United States Patent Application Publication US 2025/0074962 A1 - sequence listing, part 17

SEQ ID NO: 29063 - DNA, 2397 bp, synthetic construct
  misc_feature 1..2397: note = Description of Artificial Sequence: Synthetic coding sequence
  source 1..2397: mol_type = other DNA
atgaatctgcagccgatcttctggatcggccttatctcatccgtatgctgtgtgtttgcgcaaaccgatgagaaccgttgcttgaaggccaacgctaagagttgtggagaatgcatccaagccggaccaaattgcggctggtgtaccaactccacgttcctgcaggagggcatgcctacgtctgctcgctgcgatgacctggaggctctaaaaaaaaaggggtgtccaccggacgacattgagaaccccagaggcagcaaggatattaagaagaacaagaacgttaccaaccgcagcaaaggtacagccgagaagctgaagccagaggatatcacgcagatccagccgcaacagcttgtgctgcggcttcggtctggtgagcctcagactttcaccctgaagttcaagagggctgaggattatccgattgatctgtactacctgatggacttatcgtactccatgaaggatgacctggagaatgttaagagtctggggacagatctcatgaatgagatgaggcgcatcacttcagatttcaggattgggttcggcagttttgtagagaaaacagtgatgccatatatctccactactcctgcgaagcttagaaatccctgtacttcagaacagaattgcacttctcccttcagctacaaaaatgtactcagcttaacaaacaagggagaggtctttaatgaactcgtggggaagcagcgcatttccgggaacctggacagccctgaaggtggcttcgacgccatcatgcaagtcgccgtgtgcggctcactgatcggttggcggaatgtcacacgcctgctggtgttcagcaccgacgctggattccactttgcgggagatggcaaacttggcggaatcgttctccccaacgacggccaatgtcacctggagaataacatgtacactatgtcccattactatgattacccttccattgcgcatctggtgcagaaattgagtgagaataacattcagaccattttcgctgtgacagaggagtttcagcctgtttacaaagagcttaaaaacctaatcccgaaaagcgcggtgggcaccctgagcgctaattcatccaatgtgatccagttgataatagatgcgtacaattctctgtcatccgaagtgattttggaaaacggcaagctttccgaaggggtgaccatttcttacaagtcatactgcaaaaatggtgtgaacggaaccggggagaacggaagaaagtgcagcaacatctcaataggagatgaggtgcaatttgagatatccatcacttccaacaagtgccctaagaaggattccgactcctttaagatcaggcccctaggctttacagaggaagtggaggtgatattgcaatatatctgtgaatgcgagtgtcagtctgaaggaataccggaaagcccaaagtgccacgagggtaatggcacattcgagtgtggcgcttgcagatgtaatgaaggccgtgtagggcgtcactgcgaatgctccaccgatgaggtcaattccgaggacatggacgcatattgtcgtaaagaaaattcttctgaaatatgtagcaacaatggggagtgtgtgtgcggtcagtgtgtttgcaggaaacgcgacaataccaacgagatatacagtggaaaattctgcgagtgtgataatttcaattgcgaccgttcaaatggactgatctgtggaggtaacggggtgtgcaagtgcagagtctgcgagtgcaatcccaactatactggcagcgcgtgcgattgcagcctggacacgagcacttgcgaggcctccaatggacagatttgtaatggacgaggtatatgtgagtgcggtgtctgcaagtgtacagatcccaaatttcaggggcaaacctgcgaaatgtgccagacctgcctgggggtgtgcgctgagcacaaagagtgcgtgcagtgtcgtgcttttaataaaggcgagaagaaagacacctgtacacaagagtgtagctatttcaacattacaaaggttgaatcaagggacaagctcccccagcctgtccaaccagatcccgtttcacattgtaaagaaaaggatgtcgatgattgttggttttactttacttattcagttaacgggaataacgaagtcatggtgcatgttgtggagaatccagagtgcccaaccgggccagatatcatccccatagtggcgggagtggtggctggaatcgtcttgataggattagctctgctgctcatctggaaactattgatgattatccacgaccggagggagttcgcaaaatttgagaaagaaaagatgaatgctaagtgggatacaggtgagaatccaatctacaagtctgcagtgactaccgtggtgaatcctaaatatgaaggaaaatag

SEQ ID NO: 29064 - DNA, 150 bp, synthetic construct
  misc_feature 1..150: note = Description of Artificial Sequence: Synthetic coding sequence
  source 1..150: mol_type = other DNA
atgaatctgcagcccattttctggatcggcctaatctcctccgtctgctgtgtgtttgcacaaacagatgaaaataggtgtctcaaggcaaatgctaaatcttgcggggagtgcatccaggcaggtcctaactgtggttggtgtacgtag

SEQ ID NO: 29065 - DNA, 270 bp, synthetic construct
  misc_feature 1..270: note = Description of Artificial Sequence: Synthetic coding sequence
  source 1..270: mol_type = other DNA
atgaatctccaacccattttttggatcgggttgatctcttccgtgtgctgtgtgttcgctcaaacagacgaaaaccgctgtctcaaggccaatgctaaatcctgcggtgagtgcattcaggctggccctaattgtgggtggtgcacaaactccactttcctccaagaaggtatgccaacctccgcaagatgtgacgaccttgaggcattaaaaaagaagggttgcccacccgatgatatcgagaatcctcgcggatcaaaggatatctag

SEQ ID NO: 29066 - DNA, 2406 bp, synthetic construct
  misc_feature 1..2406: note = Description of Artificial Sequence: Synthetic coding sequence
  source 1..2406: mol_type = other DNA
atgaatctacaaccaatcttctggataggattgattagctctgtgtgctgcgtgttcgcacaaacggatgagaatcggtgcctgaaggcgaacgcaaaatcttgcggggagtgtatccaggctggacccaattgtggctggtgcacaaacagcacctttcttcaggaaggcatgcccactagcgctaggtgcgacgatctggaagcacttaagaagaagggatgtccccctgacgatatcgaaaatccgaggggttccaaagacatcaaaaaaaataagaacgtcacaaatagaagcaagggaacagcagagaaactgaaaccggaggatataactcagatccagcctcaacaactggtcctgcggctgaggagcggagagccacaaaccttcacccttaaatttaaacgggcagaggattatccaattgatttatactacctgatggatctttcttactcaatgaaagacgacctcgagaacgtgaaatcacttggcaccgatcttatgaacgagatgagaaggattactagtgattttagaataggcttcgggtctttcgtcgagaagactgtcatgccatacatttccactacacctgcaaaactgcggaatccatgtacttctgaacagaactgcacatcaccattctcatataagaatgtgctgtctctaactaacaaaggtgaggtgttcaacgagcttgtcgggaaacagcggatctctgggaaccttgacagccccgaaggcggttttgacgcaatcatgcaggtcgcagtctgtggcagcctcattggctggagaaacgtgacccgacttctggtgttctcaaccgacgccggattccacttcgctggggacggtaaattgggaggtattgttctacccaacgacgggcaatgtcaccttgaaaataacatgtataccatgtctcattactatgattaccccagcatcgcacatttggtgcaaaaacttagtgaaaacaatatccagacaatattcgcagtgaccgaggagttccagcctgtatacaaagagcttaaaaacctgattcccaagtctgcggtaggaaccctttccgccaatagctccaatgtgatccagttgatcattgatgcctacaattccctctcttcagaggtgatcctggaaaacgggaagctgtcagaaggcgtgaccatctcttataaaagctactgtaagaacggagtcaacgggaccggagagaatggcagaaaatgcagtaatatttcaatcggtgacgaggtccagttcgaaatctctatcacttcaaacaagtgtcccaagaaagactccgactccttcaaaattcgcccattgggtttcacagaagaggtcgaagtgatactccaatacatctgcgaatgtgagtgccagtcggagggcatccctgaatctcccaaatgccacgagggaaatggcaccttcgagtgcggggcttgtaggtgcaacgaaggcagggtggggcgacattgtgagtgttctactgacgaggtgaactccgaggacatggatgcatactgcaggaaggagaacagcagcgagatctgctccaataatggtgagtgtgtgtgcggacagtgcgtctgccgtaaacgggataacaccaacgaaatctattcaggcaagttctgtgagtgcgacaattttaactgcgatcgaagtaatggccttatttgcggcggaaatggcgtgtgtaagtgtcgagtgtgcgaatgcaatcctaactacaccggatccgcttgcgactgtagtcttgacacttccacgtgtgaggcatctaatgggcagatatgcaacggcagggggatatgtgagtgcggcgtttgtaagtgcaccgacccaaaattccaaggacagacgtgtgagatgtgccagacttgcctcggggtgtgcgccgagcataaggaatgtgtccaatgccgagccttcaataagggtgagaagaaagacacttgtacgcaagaatgctcgtattttaatatcacaaaggtggaatccagggataaactgccgcagcccgttcaacctgaccctgttagtcattgtaaagagaaggatgttgatgattgctggttctattttacatattcagtaaacggcaataacgaagttatggtccatgtggtggaaaaccctgaatgtcctaccggccctgatattattcctattgtcgcaggagtcgtggccggtatcgtcctcatcgggttggctctgctgctgatctggaagctgttgatgatcattcatgataggcgcgaattcgcaaaatttgagaaagagaagatgaacgctaaatgggatacccaggagaacccaatttataaaagcccgatcaataactttaaaaatcccaactacgggagaaaagctgggctgtag

SEQ ID NO: 29067 - DNA, 411 bp, synthetic construct
  misc_feature 1..411: note = Description of Artificial Sequence: Synthetic coding sequence
  source 1..411: mol_type = other DNA
atgaacctgcaacctattttttggattgggctgattagcagcgtgtgttgtgtttttgcacagaccgatgaaaaccgctgcctgaaggccaacgcaaagtcttgcggcgagtgcatccaggccggacctaattgcggttggtgcacaaacagcacatttctgcaggagggcatgccgacatcagcgcgatgcgacgatctggaggctctcaaaaagaaaggatgcccccctgatgacatcgagaacccccgaggaagcaaggatataaagaagaacaaaaatgttacgaatagatcaaagggcacggctgagaagttaaagcccgaggatatcacccagattcagccgcagcagttagtgctacggctgagatccggggaacctcagacattcacattaaagttcaagtag

SEQ ID NO: 29068 - DNA, 378 bp, synthetic construct
  misc_feature 1..378: note = Description of Artificial Sequence: Synthetic coding sequence
  source 1..378: mol_type = other DNA
atgaacctacaaccaatcttctggattggtctgatctcctcggtgtgttgtgtcttcgctcagactgacgagaataggtgcctgaaggccaacgcgaagtcatgcggagaatgtatccaggcaggacccaattgcggctggtgcacaaactcaaccttcttgcaggaaggtatgcccacctccgcgcgatgtgacgatctagaggctttgaagaagaagggctgtccgccagatgatattgagaaccctaggggctctaaggacatcaagaagaacaagaatgtgacgaatcggagtaaaggcacggccgaaaagctgaagcccgaggacatcacacaaatccagccacaacagttagtgctgaggctaaggtcctag

SEQ ID NO: 29069 - DNA, 492 bp, synthetic construct
  misc_feature 1..492: note = Description of Artificial Sequence: Synthetic coding sequence
  source 1..492: mol_type = other DNA
atgaacttacagcccatcttttggataggcctgataagtagcgtgtgctgcgtgtttgcgcaaactgacgaaaatagatgcctgaaggctaatgccaaatcctgcggcgaatgtatccaggctggtcccaattgcggctggtgtaccaattccacatttttgcaggaggggatgccaacctccgctcgctgtgacgacttggaagcgctcaagaagaaaggatgcccaccagatgatatcgaaaatccccgtggctccaaagacattaagaagaataagaatgtgactaaccggagtaagggaaccgcggagaagcttaagcctgaagacatcacacaaatacaaccccagcagctcgtgctgcggctgaggtctggggaaccccagacattcactctgaaattcaagcgcgcagaggattacccaattgatctgtattaccttatggacctgagctatagtatgaaggatgacttggagaatgtcaaatag

SEQ ID NO: 29070 - DNA, 459 bp, synthetic construct
  misc_feature 1..459: note = Description of Artificial Sequence: Synthetic coding sequence
  source 1..459: mol_type = other DNA
atgaacctgcagcctattttctggatcggcctgatttcctcagtttgctgcgtctttgcccagacagacgaaaacaggtgtctgaaagccaatgccaaatcctgcggtgagtgcattcaggcaggtcccaactgcggttggtgcactaactctgtgtcgaagacctttctgcaggagggcatgccgacttcagctcgttgtgacgacctcgaggccctgaagaaaaaaggctgcccacccgacgatattgaaaatcccaggggaagcaaggatataaagaagaacaaaaacgtgacaaaccggagcaaagggacggcagagaaactgaaacctgaagacatcacccagatccaacctcaacagctggtcttgcgcttgagaagcggtgagccccaaacatttacactgaagttcaaaagagcagaggactatcctatcgatctatattacctgatgtag

SEQ ID NO: 29071 - DNA, 315 bp, synthetic construct
  misc_feature 1..315: note = Description of Artificial Sequence: Synthetic coding sequence
  source 1..315: mol_type = other DNA
atgaacctacaacctattttctggattggtctcatctcatctgtgtgctgtgttttcgcgcaaacagacgagaatagatgccttaaggccaatgctaaatcatgcggggagtgcatccaggctggtccaaactgtgggtggtgcacaaactccacgtttcttcaggaagggatgcccacctccgcaagatgcgacgacctcgaggccctgaaaaaaaagggatgcccccctgacgatatcgaaaatccaaggggcagtaaggacattaaaaagaacaaaaatgtgacaaacaggagcaagggtaccgctgagtag

SEQ ID NO: 29072 - DNA, 432 bp, synthetic construct
  misc_feature 1..432: note = Description of Artificial Sequence: Synthetic coding sequence
  source 1..432: mol_type = other DNA
atgaatctgcagcccatcttctggatcggcctgatttcatcagtgtgttgcgtgttcgcacagaccgacgagaaccgctgcctgaaagcaaatgctaagtcatgcggcgaatgtatccaggccggtccaaactgtggatggtgtactaatagtacattcctgcaggaaggcatgccaactagtgctagatgcgatgatctggaggctctcaagaaaaaaggatgcccccctgatgacatcgagaatcctcgcggatccaaggatatcaaaaagaataagaacgtcaccaacagatcgaagggaaccgctgagaaactaaagcccgaggatatcacacagatccagccgcagcagctggtgctgagattgagaagtggtgagccgcagacttttaccctaaagtttaaaagagctgaggattacccaatatag

SEQ ID NO: 29073 - DNA, 2310 bp, synthetic construct
  misc_feature 1..2310: note = Description of Artificial Sequence: Synthetic coding sequence
  source 1..2310: mol_type = other DNA
atgctcgggttgcgcccaccccttctggcactggtgggcctcctgtccttagggtgcgtactgtctcaagagtgtacaaagtttaaggtttctagctgccgcgagtgcattgagagcggcccaggctgcacctggtgtcagaagctgaactttaccggacctggtgatcccgattccattaggtgtgatacaagaccccaactgctaatgcggggatgtgcggctgacgatataatggatcccacttcccttgctgaaactcaggaagaccacaacggcggacagaaacaactgtcacctcagaaagtgacactatatctcaggcctggacaggcagccgcattcaatgttaccttccggagggccaaggggtacccaattgatttatattatctcatggatctgagctactcgatgctagacgacttgcggaacgttaaaaagttagggggagatctccttcgcgcactaaacgaaattacagagagcggaagaatcggctttggcagctttgtggataagacagtgctgccattcgtgaatacacacccagacaaactccgaaacccgtgtccaaataaggaaaaggaatgtcagccaccatttgctttcaggcacgtgctgaagctgacaaacaatagcaatcagttccagactgaagtggggaagcagttaatttcgggcaatttagatgcccctgagggaggactggatgccatgatgcaagtggcagcgtgccctgaagagataggatggcgtaacgtcactagattattggtgtttgctactgacgatgggtttcatttcgctggtgatggcaaattgggggctattctcacgccaaacgatggccgttgtcatctcgaggacaatttgtacaagcggtcgaatgaattcgattatccctctgtcggccagctggcccacaagcttgcagaaaataatatccagccaattttcgccgttacatcaaggatggtcaagacatatgaaaagctgaccgaaattatcccaaaatccgcggttggagagcttagcgaggattcttcaaacgtagtccagctgatcaagaacgcatacaataagctctcttcaagagtgttcctggaccacaacgcactgcctgacactctgaaggtcacctatgatagcttttgcagcaacggtgtaactcacaggaaccagccacgtggcgactgtgacggcgtgcaaataaacgtgccaattacattccaagtgaaggtgactgccactgagtgcatccaagaacagtcgtttgtgatccgagcacttggcttcacagatatcgtgactgtgcaggtactgccccagtgtgaatgcagatgcagggatcagtctcgggatcggtccttgtgtcacggaaagggattcctggagtgcggcatctgcagatgcgatacagggtatattggaaagaactgcgagtgccagacacagggcaggagctcccaggagctggaaggctcttgcaggaaagacaacaatagtatcatctgcagtggcttaggggattgtgtctgtgggcagtgcctttgccacacttcagatgtaccagggaagttgatatacgggcagtactgtgagtgcgatacgattaattgcgaaagatataatggtcaggtttgcggaggtcctggccgtggcctttgtttttgcggtaaatgtaggtgccatcctggcttcgagggcagtgcttgtcagtgtgagcggaccactgagggttgtttgaatcccaggagagtggaatgcagtggccgagggagatgccggtgtaacgtttgcgagtgccactcgggttatcagttacccctctgtcaggaatgccccggttgtcctagcccttgtggtaagtacataagctgtgccgagtgcctgaagtttgagaaaggccctttcggcaaaaattgtagcgcggcttgcccaggcctccagctttccaacaatcccgtaaaaggacggacctgcaaagagcgtgactcagagggctgttgggttgcctacacgctagaacagcaggacggaatggatcggtacttgatttatgtggatgagtcccgggagtgtgtcgcaggaccgaacatagccgcaattgtcggcggaacggtggcaggtattgtgctgatcggaatcctgctgttggtgatatggaaggcactcatccatctatccgatctaagggagtatcgcaggttcgaaaaggagaagttgaagtcccagtggaataacgacaaccccctgttcaagtccgcaacaactaccgtcatgaatcctaagtttgcggaatcttag

SEQ ID NO: 29074 - DNA, 969 bp, synthetic construct
  misc_feature 1..969: note = Description of Artificial Sequence: Synthetic coding sequence
  source 1..969: mol_type = other DNA
gggagattagggaaggatcttgccacaggcgtgctgtctcaggagtgtacaaaattcaaagtcagctcttgcagagaatgtatcgaatctggaccgggttgtacctggtgccaaaagctgaatttcaccggacctggcgatcccgactcgatcaggtgtgatacaaggcctcagctcttaatgagggggtgcgccgcagatgacattatggaccccacaagcctcgcagagacccaggaggaccacaatggcggacagaagcagctgagcccccagaaagttaccttatatctcagacccggacaagctgctgccttcaatgtgacatttaggcgggctaaaggataccctatcgacttgtattatctcatggacctgtcctatagtatgctcgacgacctgcgtaacgtgaaaaaactgggcggtgatctcctgcgcgcactgaatgagatcaccgagagcggaaggataggtttcggctcgttcgttgataagacagtgctcccattcgtgaacactcacccagacaagcttaggaacccttgtcctaacaaggaaaaggagtgccagccgccatttgctttccggcacgttctgaagctgaccaacaacagcaaccagttccagaccgaggttgggaagcagttgatttcaggcaatttggatgcccctgagggcggactggacgccatgatgcaggtagctgcctgtcctgaggagattggatggaggaacgtgaccaggctgctcgtgtttgccacagatgatggatttcatttcgccggtgacggcaagctgggcgcaattcttacaccaaacgacggaagatgccacctggaagacaacctgtacaaaagatcaaatgagtttgattatccttccgtgggacagctggctcataaactggcagaaaataatatccaacctattttcgccgtcacgtcgcgaatggtgaagacatacgagtag

SEQ ID NO: 29075 - DNA, 2310 bp, synthetic construct
  misc_feature 1..2310: note = Description of Artificial Sequence: Synthetic coding sequence
  source 1..2310: mol_type = other DNA
atgttaggcctcagacccccactgctagccctggtggggctcttgtctctgggctgtgtgctttcacaggagtgtactaagttcaaggtatcctcatgtcgcgagtgtatcgagtctggtcctggctgtacatggtgccagaagcttaacttcacaggcccaggtgaccctgattctatacgctgtgatacccggccacagctactcatgcgcggatgtgctgctgatgacatcatggaccctaccagccttgctgagactcaggaagatcacaacggtgggcagaagcagctgagccctcagaaggtcacattgtacctccgtcccggacaggctgcagcttttaacgtcacttttcggagggctaagggctacccaatcgacctgtactacctgatggacctgtcttacagtatgctggacgacttacggaacgtgaaaaaattaggtggagatctgctacgggcactcaacgaaattactgagagcgggaggattggcttcggaagcttcgtcgacaaaacggtcctgccattcgtgaatacccacccagacaagttaaggaatccatgccccaataaagagaaggaatgccagcctccctttgccttcagacacgtgctgaagctgacaaataacagcaatcagttccagactgaggtcggcaagcagctaatatccggaaatctggacgccccagagggcggattggacgccatgatgcaggtggccgcatgccctgaggagatcggctggcgaaacgtcacaagattgcttgtgtttgccaccgatgatggattccatttcgccggagatgggaagctgggcgctattctgacccccaacgacggacggtgccatttggaggacaatttgtacaagcgcagtaatgaattcgactatccaagcgttggacaacttgctcacaaactggccgagaacaatattcagcccatctttgccgtcaccagtagaatggtcaagacatatgagaagctgactgagattatcccaaaaagtgcggtgggcgaactgtctgaggattcatctaacgtggtacagctcattaagaacgcctacaataagctgagtagtagagtgttccttgaccataatgcgctgcccgacaccctgaaggtgacatacgactccttttgctccaatggtgtaacacaccgcaaccagccccgtggcgattgcgatggggttcaaataaatgtcccaatcacttttcaagtgaaggtcaccgctacagagtgcatccaagagcagtctttcgtgattcgcgcactcggtttcacggacatcgtaaccgtccaggttctccctcaatgcgaatgcagatgtagggaccagtctcgcgatcggtctctgtgtcacgggaagggttttctggagtgcgggatctgtaggtgtgataccggttatataggcaagaactgcgagtgccaaacgcaaggcaggtcctcacaggaactcgaggggagctgtaggaaagacaataacagcatcatctgctccggcctgggcgattgcgtttgtgggcagtgcctttgtcatacttctgacgtgccaggaaaattaatatacgggcagtactgcgagtgtgataccataaattgcgaacgctataacggtcaggtatgcggtgggccagggagggggctgtgcttttgcggaaagtgcaggtgccacccaggcttcgaagggtcggcatgccagtgcgaaagaaccactgagggatgcctgaatcccaggagggtggagtgcagcgggcgagggcgttgtcggtgcaatgtgtgcgagtgtcacagcggatatcagttaccactttgccaggagtgccccggatgtccatcaccctgtggtaagtacatctcctgcgcagaatgtctgaagttcgagaaagggccatttgggaaaaactgctctgctgcctgcccaggactgcaactttctaacaatcccgtcaaggggaggacatgcaaagagcgtgatagcgaaggttgctgggttgcctacacgcttgagcaacaagacggtatggacaggtatctgatctacgtagacgagtccagagaatgtgtggctggcccaaatatcgctgcaatagttggtggcactgtggcgggtatcgttctgatcgggatactcctgttggttatttggaaggccctgatccatctgagtgacttacgagagtatcggaggttcgagaaagagaaactgaaatcccaatggaataatgataatcctcttttcaaaagtgcaaccacaacggtcatgaaccctaaatttgcggagagctag

SEQ ID NO: 29076 - DNA, 2310 bp, synthetic construct
  misc_feature 1..2310: note = Description of Artificial Sequence: Synthetic coding sequence
  source 1..2310: mol_type = other DNA
atgctagggttgcggccacccctgcttgcacttgtaggcctgttgtcacttgggtgcgtcctgtcccaggagtgcactaaatttaaagtgtcatcttgccgcgaatgcattgaatctggtcccggatgtacttggtgccagaagttaaatttcacagggccaggcgatcccgacagtattaggtgcgacaccagaccccagctgctgatgagaggctgtgcggctgatgacattatggacccaacctctctcgccgaaacacaggaggatcacaacggaggacagaagcaactctcccctcaaaaggtgacgctctatctgcgcccagggcaagcagcggcatttaatgttacattcaggcgcgctaagggctatcccatcgacctctattaccttatggacttatcctacagcatgttagatgacctgcgcaacgtgaagaagttgggaggggatctgttgagggccctgaacgagatcacggagtctgggcgtatcggttttggttcttttgtggacaagaccgtgctgccattcgtgaatacccatcccgataaattgcgtaatccctgccctaataaagagaaagaatgccaaccccctttcgccttccgtcatgtcctgaagctgacaaataactcgaaccagtttcagacggaggttggcaaacagttgatctcggggaatctggatgccccagagggtgggctggacgctatgatgcaggtggccgcttgtcccgaggagattgggtggaggaatgtcactaggctgctcgtgttcgcaaccgacgacgggtttcacttcgcaggtgatggcaaactgggtgctatcctaactcctaacgatgggagatgccacttggaggataatctctataaaaggtccaacgaatttgattatcccagtgttggacagttggctcacaaattggctgagaacaacatccagccaattttcgcggttacttccaggatggtcaagacctacgaaaaattaaccgagatcatccccaagtctgccgtgggagagctgagcgaagatagcagtaatgtggtgcagttgatcaagaatgcgtacaacaagctcagctccagggtgttcctggaccacaacgctttgccagacactctgaaggttacctacgactcattctgtagcaacggcgtgacacacagaaaccagcctaggggtgactgcgatggagtgcagataaacgttccaatcacgtttcaggtcaaagtcacagccactgaatgtatccaagaacagtcctttgtgattcgcgcattgggcttcacagatatcgtcacagtccaggtgctgccacagtgcgaatgtagatgtcgtgaccaatcccgcgatcggtcactgtgccacggaaagggttttctggagtgcggaatctgcagatgtgatacagggtacatcggaaaaaactgtgagtgtcagacccagggtcgctcttctcaagagcttgagggatcttgccgcaaagacaataatagcattatctgctcaggtttgggggactgcgtgtgcggccagtgtctctgtcacacctcagacgtgcctggtaagctaatctatggccagtattgtgaatgtgatactatcaactgtgagcggtacaatggtcaagtttgtggcggtccaggcagaggattatgtttttgcggaaaatgtcgctgccacccaggcttcgagggaagcgcctgccagtgcgagcgcacgactgaagggtgtctaaacccgaggcgggtcgagtgttcaggcaggggacgctgccggtgcaacgtgtgtgagtgccatagtgggtaccagctgcccctgtgtcaggagtgtcctggctgcccatcaccatgtggcaagtatatctcgtgcgctgagtgtttgaaatttgaaaaaggacctttcggcaaaaattgcagcgccgcatgcccaggcctgcaattgtctaataatcctgtgaagggccgaacctgcaaagagagggactcggaggggtgttgggtggcatacaccttggagcagcaggatggtatggatcgctacctgatatacgtggatgagtcacgggagtgtgtcgcaggacccaatattgccgcaatcgtgggtggtaccgtggctgggatcgtcttgatcggcatccttctgttagtgatctggaaagctttgatccatttgtctgacctgcgcgagtaccggagatttgagaaggagaagctaaagagccagtggaacaacgataacccgctgttcaagagcgcgactactacagtgatgaaccccaaattcgctgagtcatag

SEQ ID NO: 29077 - DNA, 2310 bp, synthetic construct
  misc_feature 1..2310: note = Description of Artificial Sequence: Synthetic coding sequence
  source 1..2310: mol_type = other DNA
atgcttgggctacggcctccactgctagcccttgttggattgctgtcactcggatgcgttttgagccaggaatgcactaaattcaaggtctccagctgtcgcgaatgtatcgaaagcgggccagggtgtacatggtgccaaaagctgaactttacagggcctggcgaccccgactccatccggtgtgatactcggccacagctgttaatgcgtgggtgtgccgctgacgacattatggaccccacatctctcgctgaaactcaagaggatcataatgggggacagaagcaattgtcccctcagaaggttaccctttatctcaggcctggtcaggccgctgcatttaatgttacttttcggagagcaaaagggtatccgatcgacctgtattacctgatggaccttagttattcaatgcttgatgatctgaggaatgttaagaagctagggggagaccttctccgcgctttaaacgagattaccgaatccgggagaataggctttggttcatttgtggacaagaccgtgctaccctttgtcaacactcaccctgataaactgagaaatccttgcccaaataaggagaaggagtgtcaaccgccatttgcgtttaggcacgtgctgaagttaactaacaacagcaaccagtttcagaccgaggtgggaaagcaacttatttccggaaacctcgacgcacccgaagggggactggacgcaatgatgcaagtcgctgcttgccccgaagaaataggatggcggaacgttacacgcttgctggtgttcgcaacagacgatggtttccattttgcgggagatgggaaactcggggctattcttacccctaacgatgggagatgccatctggaggataacctgtataagcgctcaaatgagttcgactacccaagtgtggggcagctcgcgcataaactggcagagaacaacatccagcccattttcgcagttacgtcgcgcatggtcaagacctacgagaagctgacggaaattatccctaaatccgcagtgggagaactgtctgaggattccagtaacgtcgtgcaactcataaaaaacgcttataataagctgtcatcgcgcgtttttcttgaccataacgcgctgccagacacattgaaggtcacttatgactctttttgcagtaacggagtgacccacaggaatcaacccaggggggactgtgatggcgttcagattaacgtccccatcaccttccaggtaaaagtgaccgcaacggaatgcatccaagagcagtcttttgttattcgagccctggggtttaccgatattgtgactgtccaggtcctgccccagtgtgagtgtcgatgtcgtgaccagtccagagatcgcagtctatgccacggaaaggggtttctggaatgcggcatttgccgttgtgatactgggtacatcggcaaaaattgcgaatgccaaacacagggtagaagctcccaggaactggaaggcagctgcagaaaagataacaatagcattatttgtagcggcctgggggattgtgtatgtggccagtgcctgtgtcacacaagcgacgtccctgggaaactgatttatggacagtattgtgaatgcgatacaatcaattgcgagcgatataacggacaggtctgcggcggaccaggccgtggcctgtgtttttgtgggaaatgtcgatgccacccaggcttcgagggctccgcctgccagtgcgagcggactacagagggatgtctcaacccacggagggtggagtgtagtggccgtggcaggtgcagatgtaatgtttgtgaatgtcacagcgggtatcagctgccgctatgccaggagtgtcctgggtgtccatctccctgtgggaaatatatctcctgtgctgagtgcctaaaattcgagaaaggaccctttggaaagaactgtagtgctgcctgtccaggactacagttaagcaataaccctgtaaaaggcagaacttgcaaagagcgtgactccgaagggtgttgggtggcctatactctcgaacaacaagatggcatggatcgatatctgatctatgtggacgagagtagagagtgtgtcgcaggtccaaacatcgcagccatcgtgggcggtaccgttgcaggcatcgtgctgataggcattcttcttctggtgatctggaaagcccttatccatttgagcgacttgcgggagtacagacgcttcgaaaaggagaaactgaagtcccaatggaacaacgacaacccactgtttaagtcggccactacgactgtaatgaaccctaaatttgcagagagttag

SEQ ID NO: 29078 - DNA, 2310 bp, synthetic construct
  misc_feature 1..2310: note = Description of Artificial Sequence: Synthetic coding sequence
  source 1..2310: mol_type = other DNA
atgctagggctccggccaccactccttgccctcgttgggctgttgtcgctcggatgtgtgctatctcaggagtgcacaaagtttaaagttagttcctgccgcgagtgcatcgagtccggcccaggctgcacttggtgccaaaaacttaactttaccggtcccggagaccccgattccatacgttgtgatacccggcctcagctcctcatgagggggtgtgctgccgacgacattatggaccctacttctcttgccgagacacaggaagaccacaacgggggacagaagcagctgtcacctcagaaggtcactttatatctgcgccctgggcaggccgcagcttttaatgtaacctttagacgcgctaaggggtatccaattgatctatactatctgatggatctctcctactcgatgctggacgacttacggaatgtaaagaaactgggcggagatcttctgagggcactcaacgagattacagagtcaggaagaatagggtttggaagcttcgtcgataagacagtgctgcctttcgtgaatacacacccggacaagttgcgcaatccctgtcccaataaggaaaaggaatgccagccgccattcgctttcaggcacgttctcaagctgaccaacaactctaatcagttccagaccgaggtgggcaagcaattaatttcagggaaccttgacgcccctgagggaggccttgacgcaatgatgcaggtggctgcttgccccgaagagatcggatggaggaacgtcacacgccttcttgtttttgctactgacgacgggttccacttcgccggtgacggaaagctcggggctattctcacgccaaatgatgggaggtgtcatctggaggacaacttgtataagcggagtaacgaatttgattaccctagcgtggggcagttggcccacaaactggccgaaaataatatccagccaatctttgccgtgaccagccgaatggtcaaaacctatgaaaaacttacagaaatcatacctaaaagcgcagtgggagaactctcagaagactcgtcgaatgtggttcaattgattaagaacgcgtacaataaactgtccagcagggtattcttggaccataatgccttgcctgatacactcaaggtgacgtacgattccttttgctccaacggcgtgactcaccgtaatcaacccagaggagattgcgatggggttcaaattaacgtgcctatcacattccaggttaaagtcacggctacagaatgcattcaggaacagagtttcgtgatccgtgccctaggcttcaccgacatcgtgaccgttcaagtgttgccgcagtgcgagtgtcggtgtcgcgaccaatcacgcgatcggtccctgtgccacgggaaaggcttcctggaatgtgggatctgtcgctgcgataccggctatatcggcaaaaactgtgaatgccagactcagggtcgctcctctcaggagctcgaaggcagctgcaggaaagataataactccattatttgctccggactcggggactgtgtctgtggtcagtgtctctgtcacacatccgacgtgccagggaaactcatttatggccagtactgtgagtgcgataccattaactgcgagagatacaacggccaggtgtgcggaggaccaggaaggggactttgcttctgcggcaaatgtcggtgtcaccccggattcgaaggcagcgcttgccagtgtgagcggacaacagagggttgtctgaacccaagacgcgtggagtgctctggaaggggtcggtgccggtgtaatgtgtgtgaatgccattccggataccagctgcccttgtgccaggaatgcccaggctgccccagtccttgtgggaagtacatctcctgcgccgagtgccttaagttcgaaaagggacccttcgggaagaattgttcagctgcctgccctggtctccaactctctaataatcccgtgaagggccgaacttgtaaagagcgcgattctgaaggctgttgggttgcctacacgctggaacagcaagacgggatggataggtacttaatatatgtggatgagagtcgagagtgtgttgctggtccaaacattgccgcaatagttgggggaaccgtcgcgggaattgtgctaatcggaatcttattgcttgtgatttggaaggccctgattcaccttagtgacttgagggaatatcggcgatttgagaaagagaaattgaaatcgcagtggaataacgataatccactgtttaaaagcgctaccacaaccgttatgaacccgaaatttgctgagtcttag

SEQ ID NO: 29079 - DNA, 363 bp, synthetic construct
  misc_feature 1..363: note = Description of Artificial Sequence: Synthetic coding sequence
  source 1..363: mol_type = other DNA
atgttgggcctacgaccgcctctactcgcgctagtaggcctgctttcgctggggtgtgtgctctcccaggagtgcacaaaatttaaggttagttcatgtcgagagtgcatcgagagtggccctgggtgcacttggtgccagaagttgaacttcacgggtccgggagaccctgatagtattcgttgcgatactagaccccagctgttgatgagaggctgcgccgcagatgacattatggacccgacaagcctggcagagacacaggaagaccacaacggcggtcaaaagcagctgtcaccccagaaggtgaccctatatttgcgacctggacaggctgcagcctttaacgttaccttccgatag

SEQ ID NO: 29080 - DNA, 213 bp, synthetic construct
  misc_feature 1..213: note = Description of Artificial Sequence: Synthetic coding sequence
  source 1..213: mol_type = other DNA
atgctcggattgagaccaccactgctagctttggttggactgctctctctgggatgcgtgttgtcccaggagtgcaccaaatttaaagtgtcctcctgccgagagtgcattgagagtggtcccggatgtacatggtgccagaaactaaacttcactggaccaggggaccctgactctataaggtgcgatacaagaccacagttattgatgtag

SEQ ID NO: 29081 - DNA, 150 bp, synthetic construct
  misc_feature 1..150: note = Description of Artificial Sequence: Synthetic coding sequence
  source 1..150: mol_type = other DNA
atgcttggccttcggcctcctctgctcgccctggtgggcttgctgtctctaggatgcgtcctcagccaagaatgtaccaagttcaaggtcagctcttgtcgagaatgcatcgagtcgggcccaggatgcacatggtgtcagaagctgtag

SEQ ID NO: 29082 - DNA, 483 bp, synthetic construct
  misc_feature 1..483: note = Description of Artificial Sequence: Synthetic coding sequence
  source 1..483: mol_type = other DNA
atgctgggcttgaggccccctctgctcgcattagtgggcctcttatctctgggctgtgtcctgagtcaggaatgcaccaaattcaaagtgagctcttgccgcgagtgcatcgaatctgggcctggatgcacatggtgccagaaacttaacttcacaggacctggtgatcctgactccatcaggtgtgacacacgacctcagctactgatgcggggatgcgccgcagacgatatcatggatccaacttccctggcggagacacaggaggaccataatggcggtcagaagcaactgagcccacagaaagtcacactgtacctgcggccagggcaagctgctgctttcaatgtcacgttcagacgcgcaaaaggatatcccatagatctctattatctgatggatctctcttattccatgctggatgacctccgtaacgtcaaaaaactcgggggagatttgctgcgggcacttaacgagatatag

SEQ ID NO: 29083 - DNA, 501 bp, synthetic construct
  misc_feature 1..501: note = Description of Artificial Sequence: Synthetic coding sequence
  source 1..501: mol_type = other DNA
atgttggggttacggcctcctctgctggcgctggttggactattatctctgggatgcgttctatcccaagaatgtacaaagttcaaagtgtcctcgtgtagggagtgcatcgagagtgggcctgggtgcacttggtgccagaaattaaattttacaggtccaggtgacccggattctatccggtgcgacacaagacctcagttactgatgcggggatgtgccgctgacgatataatggatcccacgtccctggctgagacgcaggaggatcacaatgggggacagaagcaattatcccctcagaaggtgaccttgtatcttagacctggccaagctgcggcttttaacgtgaccttcaggcgtgcgaaagggtacccaatcgacctctattacttaatggacctgagctacagcatgctggatgacctccgtaatgttaagaaattgggaggagacttgctgagggccctgaatgagattaccgagtctgggagaatctag

SEQ ID NO: 29084 - DNA, 1137 bp, synthetic construct
  misc_feature 1..1137: note = Description of Artificial Sequence: Synthetic coding sequence
  source 1..1137: mol_type = other DNA
atgttgggactgcgccctcccctcttggctcttgtcggcctcctctcgttagggtgtgtgctgtcacaggaatgtaccaagtttaaggtgtctagctgccgcgagtgcatcgagtctggacccggatgcacatggtgccaaaagctcaatttcaccggcccaggagatcccgatagcattaggtgcgatacaaggccccagcttctgatgaggggctgcgctgctgatgacatcatggatcccacctctttagccgaaactcaagaagatcacaacggaggccaaaagcagctgtctcctcagaaggtgaccctctacctccgacctggattcgggtcctttgtggataaaaccgtgctgccctttgtgaatacccatccagacaagctgcggaatccttgtcccaacaaagaaaaggaatgtcaacccccattcgccttcagacatgtgttgaagttgacaaacaacagtaatcagtttcagactgaagtcggcaaacaattgattagcggaaacctggacgctcctgagggcggattagatgccatgatgcaggtggctgcatgccctgaggaaatcggctggcgaaatgtaacacgtctccttgtgtttgcgactgacgatggattccactttgctggggacggcaagcttggggcaatactgactccaaatgacggcagatgccatcttgaagataatctttataagagatccaacgagttcgattacccttcagttggtcagcttgcccacaaactggcagagaataacatccagcccatttttgccgtgactagtaggatggtaaagacctacgaaaagctgacagaaattatccctaagagtgccgtcggggagctttctgaggatagttccaatgttgtccagctcatcaaaaatgcttacaacaagctctcatctagagtcttccttgatcataatgctctccctgacactttgaaggtcacctatgatagcttttgtagcaacggggtgactcaccggaatcagcctaggggcgactgtgatggtgtccagatcaatgtccccataacctttcaagtgaaggttacagcaaccgaatgtatccaagagcaaagctttgtaatcggccgatgggctagtaggacatag

SEQ ID NO: 29085 - DNA, 2367 bp, synthetic construct
  misc_feature 1..2367: note = Description of Artificial Sequence: Synthetic coding sequence
  source 1..2367: mol_type = other DNA
atgagggctagacctagaccccgtcccctgtgggccacagtactagccctgggagcacttgcgggagtgggggtgggagggcctaatatatgcacgacaagaggtgtaagcagttgtcagcaatgtctggcagtgtcccccatgtgcgcctggtgctcagatgaggccctcccgcttggctcaccgaggtgcgatctcaaggagaacctgttaaaggacaactgcgcgccagagagcattgagtttcccgtgagcgaagccagagtgttggaagaccgtcccctgtcagacaagggctccggcgatagctctcaggtgacacaagtgtcaccccagagaatagccttgcggctgcgaccagacgactcaaagaattttagcatccaggttaggcaagtcgaagactatcctgtagatatctactatctgatggacctgtcatattcaatgaaggacgatctctggtccatccagaacctgggcacaaaactagctactcagatgagaaagctgactagtaatctgcgcattgggtttggagccttcgtggacaaaccagtgagcccatacatgtacatttcacctcccgaggcactggagaatccatgctatgacatgaagaccacctgcctcccgatgttcggatataagcacgttttgacactcactgaccaggtaacaagatttaatgaggaagtcaaaaagcagtccgtcagccgaaatagagatgcccctgagggcggatttgatgcaataatgcaggcaactgtttgcgatgagaagataggatggagaaatgacgcctcgcatttgcttgtgttcactaccgacgctaagacacacatcgccctcgacgggcgattggctgggattgtgcaacccaatgacggacagtgtcacgtcggatctgacaaccactattctgcctccaccaccatggattatccatccctgggtttaatgacagagaagctctctcagaagaacattaacctgatctttgccgtcacagagaatgtcgtcaatctgtaccagaattacagtgagctcattcctggtaccactgtaggcgtgctgagcatggacagtagcaacgtgctgcaactgatcgtcgacgcttacggaaaaattaggtccaaggtggaactggaggtgagagatctgcctgaggaactgtcccttagctttaatgcaacctgcctcaataatgaggtgattccaggcctgaagtcatgcatgggcctcaaaattggcgacaccgtcagctttagtattgaagcaaaggtacggggatgtccacaggagaaggaaaaatccttcaccattaaacccgtgggctttaaggactcactgatcgttcaagtaaccttcgactgcgactgtgcttgccaggctcaggcggagcccaacagtcacaggtgtaataacggaaatggtaccttcgagtgcggagtgtgccggtgcggccctggttggcttgggtcgcaatgcgagtgttccgaggaagactacagacctagtcagcaggacgagtgtagtccacgggagggccagcctgtgtgttcccagagaggcgagtgcctctgcggccagtgtgtttgtcattctagcgactttggcaagattacaggcaagtactgcgaatgtgatgatttcagttgtgtgcggtacaaaggggaaatgtgttcaggtcatggacagtgtagttgtggagactgcctgtgcgactcggactggaccggctattactgtaattgcactacccggacagacacttgtatgagctcaaatggtctgttgtgctccggaagagggaagtgtgaatgcggatcatgtgtatgcattcagccgggaagttacggagatacatgcgagaagtgccctacatgtcctgatgcatgtacattcaagaaagagtgtgtggagtgtaaaaagtttgatcgcggtgctctccacgatgaaaacacatgcaaccgatactgccgggacgagatagaatctgtgaaggaactcaaggacaccggaaaggatgctgtcaactgcacctacaaaaacgaagatgactgtgtcgttcggttccaatactatgaggacagctctggtaaatctatcctgtatgtcgtggaggaacctgaatgccccaagggacccgacatattggtggtacttctctcagtcatgggcgcaattcttctgattgggctggcggcactgctcatttggaagctgctgattaccatccacgacagaaaagagtttgctaagtttgaggaagagagggctagggccaagtgggatactgccaacaacccactctacaaagaagccaccagcacgttcaccaacataacatacaggggaacatag

SEQ ID NO: 29086 - DNA, 2256 bp, synthetic construct
  misc_feature 1..2256: note = Description of Artificial Sequence: Synthetic coding sequence
  source 1..2256: mol_type = other DNA
atgtgcgcctggtgtagtgatgaagcgttgcctctcggtagtccacggtgtgacctcaaggaaaaccttctgaaggacaactgcgcccctgaatcaatcgaattccccgttagcgaagctagggtcttagaggaccgacctttgtccgataagggatccggggactcaagccaggttactcaggtgagcccccagcgtattgccttaaggctgcgaccagacgatagtaaaaatttttcgatccaagtgcgccaggtcgaggattacccagtagatatatactacctcatggatctgtcgtatagtatgaaagatgacctatggagcatccagaatcttggcacaaaactcgccacacagatgagaaaactaacgtcaaacctgaggatcgggttcggcgctttcgtggataaacctgtgtccccttatatgtatatttccccccctgaggccctcgaaaatccatgctacgatatgaagaccacctgcttgccaatgtttggctacaagcacgtgctgacactcactgatcaggtgactcggttcaacgaagaagtgaagaaacagtccgtaagtagaaaccgcgatgccccagaggggggtttcgatgctattatgcaagctactgtctgcgacgaaaaaataggatggagaaatgacgccagccacctgctggtgtttaccacggacgccaaaacacatatcgccctggacggacgtctggccggaatcgtgcagccaaatgacggccagtgccatgtgggctctgataatcactacagcgccagcacgaccatggattatccttccctggggcttatgaccgagaaattgtcccagaagaatatcaatcttatattcgctgtgactgagaatgtagttaatttgtatcagaactactcagaactcattccaggcacaaccgtaggggtactttccatggatagcagcaatgtcttacaacttatcgtggacgcttacggcaagatcaggtccaaggtggaactagaagtccgggaccttcccgaagaactgtcactgagcttcaatgcaacctgtctgaacaacgaggtgatccccggtctaaagagttgcatggggctgaaaatcggcgataccgtgtcattcagtatagaagccaaggtgagaggatgtccccaagaaaaagagaaatctttcacaattaagcccgttggttttaaagactctttgatcgtacaggtgaccttcgactgcgattgcgcatgtcaggcgcaggctgagcctaactcgcataggtgtaataatggaaacggcacctttgaatgtggggtttgcaggtgtggtccaggctggttgggtagtcagtgcgaatgctccgaagaagattatcgtccttcccagcaggatgagtgctcaccgagagaagggcaaccggtgtgcagtcaaagaggagaatgtctgtgtggtcagtgcgtgtgccatagctccgacttcggcaagatcaccggcaaatactgcgagtgtgatgacttcagctgcgtccgttataagggcgagatgtgcagcggtcatgggcaatgtagctgtggcgactgcctgtgcgactccgactggaccgggtactactgcaattgcactacaagaactgatacttgcatgtcatcgaatgggcttctctgttcagggagaggaaaatgcgagtgcggctcctgcgtttgcatacagccagggagttatggcgatacttgcgagaagtgccccacctgtccagacgcttgcaccttcaagaaggaatgcgtcgagtgcaaaaagttcgatagaggggcactgcatgacgagaatacctgtaacaggtactgtcgcgacgagattgagtctgtgaaagaactaaaagacaccggtaaggatgcggtgaactgtacgtataaaaacgaagacgattgtgtggtccggttccaatattatgaagactcctcaggcaagtccatcttgtatgtggtggaggagcccgagtgtccaaagggtcctgatatattggtcgtactgctgagcgtgatgggcgcaattctcctcatcgggctagccgctcttctgatttggaagttgctgatcaccattcacgacaggaaagaatttgccaagtttgaagaagaacgggctagagccaagtgggacaccgagatacttttgtattattgctccttcattttggtgcatcagtccctcgagtccctgaggacagaatttacctccaaacagaaggacggaaactag

SEQ ID NO: 29087 - DNA, 2367 bp, synthetic construct
  misc_feature 1..2367: note = Description of Artificial Sequence: Synthetic coding sequence
  source 1..2367: mol_type = other DNA
atgcgcgctcggccacgtccaaggccactttgggccacggtactcgccctgggggcattagccggagttggggtgggcggacccaatatctgcaccacccgcggtgtgagctcgtgtcagcaatgtctcgctgtatctcccatgtgtgcctggtgtagcgatgaggccctgcccctgggatctcccaggtgcgatctgaaggaaaacctgttaaaggataattgtgcacccgaatctatcgaattcccagtgtctgaggccagggttttggaagatagaccactgagtgataaaggctcgggcgattccagccaggttacacaagtgtctcctcaaagaatagcactgaggctgcggcctgacgatagcaaaaacttctctatccaggtccgacaagtggaggattaccctgtagatatctactaccttatggacttaagttattctatgaaggacgatctgtggtctattcagaatctgggcacaaaactggccactcagatgcgcaagctgacatccaacctcagaatcggcttcggcgcattcgtggacaagcccgtgtccccctacatgtacatcagccctccagaagctctggaaaacccttgctacgacatgaagaccacgtgtctcccaatgtttggatacaaacatgtgcttacactgactgatcaggtgactcggttcaatgaggaggtgaagaagcagagtgtgtctcgcaatagggatgcaccagagggcggttttgatgccattatgcaggcaaccgtatgtgatgagaaaataggctggaggaacgacgcctctcacctgctcgtgttcacgacagatgcaaagacacatatagccttagatggcaggctagctggtatagtgcagcccaatgatgggcagtgtcacgtaggttcggataaccactacagtgcatccacaacaatggattacccatccttagggctaatgaccgagaagctgagccagaagaatatcaatcttatcttcgctgtgacagaaaatgtggtgaatctatatcagaactactctgagctgatccccggaaccactgttggcgtgctaagcatggacagcagcaatgttttgcagttaattgtggacgcttacggcaaaattagatccaaagttgagttggaagtgcgtgaccttcctgaggaattaagtctgtcctttaatgcaacttgcctgaataatgaggtaatcccagggcttaaatcatgtatgggattgaagatcggagacacggtctctttcagcatcgaggctaaagtgagaggctgtccacaggagaaggagaagtcatttaccatcaaacctgtagggttcaaggattctttaattgtacaagtcactttcgattgcgattgtgcctgtcaggcccaggcagaaccaaacagccaccgatgcaacaatggcaatggtacctttgagtgcggtgtttgccgatgtggccctggatggttaggtagccagtgcgaatgttcagaggaagactacagaccaagccagcaggacgagtgttctcctcgtgaaggccaaccggtgtgcagtcagaggggagaatgcctctgtggccaatgtgtctgtcactctagcgattttggaaagatcacaggcaaatactgtgaatgcgacgatttctcctgcgtacggtataagggggagatgtgcagtgggcatggccagtgtagttgtggggactgtctgtgcgactctgactggacggggtattactgcaactgtaccacgcggacagacacctgcatgagttcgaatgggctcctctgctctggcagggggaagtgcgagtgtgggagctgtgtctgcattcagccaggatcatatggggatacttgtgaaaagtgccctacgtgtcccgacgcttgtacgttcaaaaaagaatgcgtggaatgcaaaaagtttgaccggggagcccttcacgatgagaatacctgcaaccggtactgcagagatgagatcgaatctgttaaggaactcaaagatacagggaaggatgcggtgaattgtacctacaagaacgaagatgattgcgtcgtccggtttcagtattacgaagactcaagtggtaagtcaattctgtacgtggtcgaagagccggaatgcccaaaaggtcctgatatactcgtagtgctgctgagtgtgatgggcgcaatcttactcatcggcctggctgccttactcatatggaagctgctcattactatccatgaccgcaaggaatttgccaaatttgaagaagagcgcgcacgggcaaagtgggacactgccaacaaccctctttacaaggaggctacctccacattcacaaatattacatatagggggacgtag

SEQ ID NO: 29088 - DNA, 1359 bp, synthetic construct
  misc_feature 1..1359: note = Description of Artificial Sequence: Synthetic coding sequence
  source 1..1359: mol_type = other DNA
atggatgacattttcacccagtgccgggagggcaatgctgtggcagtgagactgtggttggacaataccgagaacgatttaaatcagggtgacgaccatggttttagccctctgcactgggcctgccgagaggggaggagtgcggttgtcgaaatgctgataatgaggggtgctcgcatcaatgtgatgaatcgcggtgacgacactccgctccacttggccgctagtcacgggcatcgggatattgtgcagaaactcctgcagtacaaagcagatattaacgccgttaacgaacacgggaatgtgcccttgcattatgcctgcttctggggccaagaccaggtggctgaggatctggtggccaatggagccctggtgtctatctgcaataagtatggcgagatgcctgtggacaaagccaaggctccactgagagagcttctgcgggagagagctgaaaaaatgggccagaatctcaatagaattccttacaaagacacattctggaaaggaaccacccggacccggccaagaaacggaactctaaataaacacagcgggatagacttcaagcagctgaacttcctgaccaaactcaacgagaaccacagtggggagctttggaaaggacggtggcaagggaatgatatcgtcgtcaaggtgctcaaggtacgcgactggagtacgcgtaagtcaagagatttcaacgaagagtgccctcgcctgcgcatattttcacatccaaacgtcctgccagtgttgggcgcatgccagtccccccctgccccacacccgacgctcatcactcactggatgccgtatgggtcgctatataatgtgcttcacgagggaaccaatttcgttgtggaccagtctcaggcggtcaaatttgctctggacatggcaagaggtatggccttcttgcatactcttgagcccctgataccaaggcatgccctgaactcacgcagcgtcatgatcgacgaggacatgaccgccaggatcagcatggcagatgtgaagttctctttccagtgtccaggcagaatgtatgccccagcttgggtcgcccctgaggccctgcaaaaaaaacccgaagacacgaatcgacgctccgcggacatgtggagcttcgcggtgctgctgtgggagttagtgactcgcgaagttcctttcgctgacctttctaacatggagattgggatgaaggtggctctagaggggctgcggcctactatcccgcctggcatcagcccacacgtgtgtaagctgatgaagatctgtatgaacgaagaccccgcaaagagaccgaaatttgatatgatagtgccgatcctggaaaagatgcaggataaatag

SEQ ID NO: 29089 - DNA, 1359 bp, synthetic construct
  misc_feature 1..1359: note = Description of Artificial Sequence: Synthetic coding sequence
  source 1..1359: mol_type = other DNA
atggatgacatttttacccagtgccgtgaggggaacgcggtggctgtgcggctgtggcttgataatacggagaacgacctaaatcagggtgatgaccatggcttttcacccttgcattgggcttgtagggaaggcaggagcgccgtcgtcgaaatgctcattatgcgcggagccagaatcaacgtgatgaatcgcggagatgacactccgcttcaccttgctgcctcgcacggccatagggatatcgtacagaagctccttcagtataaggccgatattaacgccgtgaatgaacatggcaacgtgcctcttcactatgcatgcttctggggtcaggatcaagttgcggaagatctcgtggccaacggagctctggtttcaatatgtaacaaatacggggagatgccggtcgataaagccaaggctccgctgcgcgaacttctaagagagcgcgctgagaagatgggccaaaacttgaatcgaataccatacaaagatacattttggaaagggacaaccaggacgaggcctcgcaacggcacactcaataagcacagcggcatagactttaaacaactgaactttctcaccaagctcaatgaaaatcacagcggtgagctttggaaggggcgatggcaaggtaatgacatcgtggttaaagtcctcaaagtgagagactggtctacccgaaaatcccgggacttcaatgaagagtgccccagactgaggattttctctcaccctaacgttctcccggtcctgggagcttgtcagtcacccccagcccctcacccaacattgattactcattggatgccctatggatctctgtataatgtgctccacgagggcaccaatttcgtggtggaccagtcacaagcagttaaattcgccttggacatggcccgaggaatggcctttcttcataccttggaacccttaattccacgccacgccctcaattccagaagtgtcatgatcgatgaggatatgactgccagaatctcaatggctgacgtaaagttctcttttcagtgtccaggccgaatgtacgccccagcatgggttgctccggaagccctgcaaaagaagccggaagatactaatcgacggtccgccgacatgtggtccttcgccgtcttgttgtgggagctcgtcacacgcgaggtgcccttcgccgacttgtctaacatggaaattggaatgaaggtggccctggaagggttacgacccactattcccccagggatctcaccgcacgtctgtaaattaatgaaaatctgtatgaatgaggaccccgctaagaggcccaaatttgacatgattgtgcctattcttgaaaagatgcaagacaagtag

SEQ ID NO: 29090 - DNA, 1359 bp, synthetic construct
  misc_feature 1..1359: note = Description of Artificial Sequence: Synthetic coding sequence
  source 1..1359: mol_type = other DNA
atggatgacatttttactcagtgtagagaaggcaatgctgtcgcggttcgcttgtggctggataacacagagaatgacctaaatcagggggacgaccatggattctccccgcttcactgggcttgtagggaagggcgaagcgctgtcgttgagatgctcatcatgcggggagctcgcataaatgtgatgaatagaggcgatgatacgccgcttcacctcgcagcaagccacggtcatcgtgacatagtccaaaagctgcttcagtataaagctgatatcaatgcagtgaacgaacatggtaatgtcccattgcattacgcttgtttttggggccaggatcaggttgctgaggacctggtggcaaacggtgccctggttagtatctgtaataagtatggtgagatgcctgtggataaagcaaaggcacctctgcgtgagctcctcagagagcgcgctgagaaaatggggcagaatctcaatcgcataccgtacaaggacaccttctggaagggcacaacccggacacgccctagaaacggtactctcaacaagcactcaggtatcgatttcaagcagttgaacttccttacaaagttgaatgagaaccatagcggcgagctgtggaaaggtcgatggcaagggaatgacatcgtcgtgaaggtgctgaaggtgagggattggagtactaggaaatctcgggatttcaatgaagagtgcccacggctgaggattttctctcatccaaatgtgcttccagtgctgggtgcctgccagagccctccggctccacaccccacgcttatcacgcattggatgccctatggttccctgtacaacgttttacacgaagggaccaattttgtggtggaccagagtcaggctgtgaagttcgctctggacatggcccgaggtatggccttcctgcacacattggagccccttatccctaggcacgccctgaatagtcgctccgtgatgatcgacgaggatatgaccgcacggatctccatggctgacgtcaagttctcttttcaatgccctggcaggatgtacgccccagcctgggtggctcccgaggccctccagaaaaaaccggaggataccaatcgtcgctctgctgatatgtggtcgttcgcggtgcttctttgggagctggtcactcgagaagtgcctttcgctgatttatcaaatatggaaataggaatgaaagttgccctggaaggattacggccaacgattcccccaggaatatctcctcatgtgtgtaaattgatgaagatctgcatgaacgaagatccagctaagagacctaagttcgacatgattgtgcccatcctggaaaaaatgcaggacaagtag

SEQ ID NO: 29091 - DNA, 957 bp, synthetic construct
  misc_feature 1..957: note = Description of Artificial Sequence: Synthetic coding sequence
  source 1..957: mol_type = other DNA
atgcccgtggataaggccaaggcacctctgcgcgagctgctaagggagagggctgaaaagatgggtcagaatttaaaccgaatcccttacaaagacacgttctggaaaggcacgaccagaactagaccgagaaacggaacactaaacaaacacagcggcatcgactttaagcagctcaattttttaactaagcttaacgagaaccacagcggagagttatggaaaggacgctggcagggcaacgatatagtagtgaaggtgctcaaggtgagggactggtcaacgcgcaagtcacgagattttaatgaagaatgtccgaggctccggatattttctcatccgaacgtgctcccagttctgggggcatgccagagtcccccagcgcctcatccaactttaatcacccattggatgccatacggctcgctatataatgtactccatgagggcacaaactttgtggtggatcaaagtcaggcagtgaagttcgccctggatatggcacggggtatggcgtttctgcacactctggagccattaatcccacggcacgccttgaattctagatccgttatgattgacgaagatatgaccgccagaatctcaatggccgatgtcaaatttagctttcaatgtccgggacgcatgtatgctccagcctgggtggcccctgaagcattgcaaaaaaagccagaggacacaaatcgaagatccgccgacatgtggtccttcgccgttctgctatgggagctcgtgactcgcgaggtgcccttcgccgatcttagcaatatggagataggcatgaaagtggctttggagggactccgcccaactatccctcccggaattagccctcacgtgtgcaagctgatgaagatctgtatgaacgaagaccccgctaagcggcctaagttcgacatgattgtccctattttggagaagatgcaggacaaatag

SEQ ID NO: 29092 - DNA, 978 bp, synthetic construct
  misc_feature 1..978: note = Description of Artificial Sequence: Synthetic coding sequence
  source 1..978: mol_type = other DNA
atgcctatcacaaggatgcgcatgcgcccatggctggaaatgcagataaattcaaaccagattcctggtctcatttggatcaacaaggaggagatgatttttcagattccttggaagcacgctgctaagcatggatgggacataaataaggacgcttgtttgtttagatcatgggctattcatacgggacgatacaaagcgggagaaaaggaacccgaccctaaaacatggaaggcaaactttaggtgcgctatgaatagtctaccagatattgaggaagtcaaagatcagagcaggaacaaggggtcctccgccgtgcgggtctatcgtatgcttccccctctgactaagaatcagcgaaaggaacgcaagtctaaaagctcccgggatgctaaaagcaaggccaaaaggaaatcctgcggtgactcttctcccgatactttttcagatggattatccagttcaactctccccgatgatcacagctcctacacagtacctggatatatgcaggacctcgaggttgagcaggccttaacccccgctttgagtccatgcgcagtgtcgtccacgctccctgattggcatattcctgtggaagtagtccctgattccactagtgatctgtataacttccaggtgagtcccatgcccagtacatccgaggcgactaccgacgaggatgaagaaggcaagctgcctgaggacattatgaaacttttggagcagtccgagtggcaacctacaaacgtggacgggaaggggtatctgttaaatgaaccgggtgtacagcctacctcggtttatggggacttctcctgcaaggaggaacctgaaatcgactcgcccggaggcgacatcggattgtctctgcagcgcgtgttcaccgatctgaaaaatatggatgcgacctggcttgactcccttctgacccccgttaggctgccttccatccaagctatcccatgcgctccctag

SEQ ID NO: 29093 - DNA, 978 bp, synthetic construct
  misc_feature 1..978: note = Description of Artificial Sequence: Synthetic coding sequence
  source 1..978: mol_type = other DNA
atgccgattaccaggatgcgtatgcgcccttggctggagatgcagattaattctaatcagatcccgggattgatttggataaacaaagaggaaatgattttccagatcccatggaagcacgctgctaaacatgggtgggatatcaataaagacgcctgtcttttcaggtcttgggcgatccataccggcagatataaagccggtgagaaagaacctgaccctaaaacttggaaagctaatttccgttgcgctatgaattctctcccggacatcgaggaggttaaagaccaatcaaggaataagggctcttctgccgtgcgtgtctaccgaatgctgcctccccttacaaaaaaccagcggaaggaacggaaatctaagtcctcacgcgatgctaagagcaaagcaaagcggaagagttgtggcgactccagtcctgacactttctctgatggactgtcaagttcaactctccccgacgatcacagttcctacacggtcccaggctacatgcaggaccttgaggtcgagcaggctcttactcctgcactttcaccttgcgcggtgtcaagcacattgcctgattggcatatccccgtggaggtcgtgccagactcgacatctgacctttataatttccaggtaagccccatgccctcaacttccgaggcaacgaccgacgaagacgaggaaggcaaattacccgaggatattatgaagctcctggaacagtctgagtggcagccaacgaacgtggacgggaagggatacctgttgaacgagccaggcgtacagcctacctccgtgtacggagatttctcttgtaaagaggagcctgaaatcgatagtccagggggagacattggactcagcctacagcgcgtgttcacagatttaaagaatatggacgccacttggctggattctctcctgactccagtgcgcctgccctccattcaagctatcccctgcgccccttag

SEQ ID NO: 29094 - DNA, 579 bp, synthetic construct
  misc_feature 1..579: note = Description of Artificial Sequence: Synthetic coding sequence
  source 1..579: mol_type = other DNA
atgccaattacacgaatgagaatgcgaccctggcttgaaatgcagattaactctaaccagatccccggactgatctggataaataaagaagaaatgattttccagattccctggaagcacgccgcaaagcacggttgggatatcaacaaggacgcttgcctcttcagatcgtgggcaattcacacggggagatataaggctggcgagaaagagcccgatccgaagacctggaaagccaattttcgctgcgccatgaactccctgccagacatcgaagaggtcaaagaccaatcccgaaacaagggatcctcagctgtcagggtctacaggatgctgccaccattaacaaagaaccagcggaaagagcggaagtccaaatcatcaagagatgctaaaagcaaggcaaagagaaaatcctgcggcgatagctctccggataccttttcggacggcctgtcttcctctaccctccccgacgaccactcaagctatacagtgccaggctatatgcaggacctggaggttgaacaggctttgacaccggcactgtccccttgcgcagtttcaagcaccctctag

SEQ ID NO: 29095 - DNA, 1356 bp, synthetic construct
  misc_feature 1..1356: note = Description of Artificial Sequence: Synthetic coding sequence
  source 1..1356: mol_type = other DNA
atgaatttggaggggggagggaggggcggtgagtttggcatgtctgccgtctcatgcggaaacggaaaactcagacagtggctgatcgatcagatagattcaggtaagtatcccggactagtttgggagaacgaggagaaatctatattcagaataccatggaagcacgccggtaaacaggattacaaccgcgaagaggatgcagccctatttaaagcctgggccctgttcaaaggcaaatttcgagaggggattgataaacctgacccgccaacgtggaaaacaaggctgcggtgcgcgctaaataagtccaatgacttcgaagagctggtcgaaaggagccagcttgatattagtgatccttacaaagtttaccggattgtcccagagggcgctaagaagggggcaaaacaattgacccttgaggatccacagatgtccatgtcccacccttatactatgaccaccccgtacccctccttaccagctcaacaggtgcacaactacatgatgccgccactagaccggtcctggagagattatgttcccgaccagccacatcccgagattccttatcagtgcccgatgacattcggacccaggggacaccattggcagggccctgcctgcgaaaatggatgccaagtgacagggactttttacgcttgtgcaccacctgaatcacaggcccctggggtgcccaccgagccgtcaatcaggagcgctgaagcactagctttctccgactgccgcctgcacatttgcctctactaccgcgagattctcgtgaaggagctgaccacatctagccccgaaggttgcaggatatcacacggccacacatatgacgcatccaatctggaccaggtgttatttccttaccccgaagataacggccagcgcaaaaacattgagaaactgctcagccatcttgagcgtggagtcgtgctctggatggcacccgacggtctctacgctaaacggctctgccagagccgtatttactgggatggccctctggcgttgtgtaacgacaggcctaacaagctggaacgcgaccagacctgtaaattgttcgacacacagcagtttctatcggaactccaagcattcgctcaccacggtagatccctgccaagattccaggtgaccctgtgctttggtgaggagtttcctgacccccagaggcaaaggaagttgatcaccgcacacgtggagccactgctggcaaggcaattatactattttgcccagcagaattcgggccactttctgcgcggttacgatctccctgagcatatcagtaacccggaagattatcaccgctctatcaggcattcttctatacaagagtag

SEQ ID NO: 29096 - DNA, 1443 bp, synthetic construct
  misc_feature 1..1443: note = Description of Artificial Sequence: Synthetic coding sequence
  source 1..1443: mol_type = other DNA
ctggggcctacggccgctctcagctctgaaagtagggctagagccgcacaggcagggggtggtcctagggcccgtgccaggactcggggtatgaatctggaaggaggcggaagaggtggcgagttcgggatgtccgctgtttcatgcgggaatgggaaacttagacaatggctgatcgatcagatcgatagcggaaagtacccaggcctggtttgggagaacgaagagaagtctattttcagaatcccatggaagcacgctggcaagcaggactataacagagaggaggatgctgccttatttaaggcctgggccctctttaagggcaaatttcgagaaggaatcgataaacccgacccccctacctggaagaccaggttgcgatgtgcacttaataagtccaacgactttgaggaactcgttgagagatctcagttggacatctccgatccatacaaagtgtacagaattgtgccggagggcgctaagaaaggcgctaagcagcttaccttggaggacccacagatgtccatgagccatccttacactatgactacaccatacccctcactgcccgctcaggtgcataactatatgatgccgccactggatagaagctggagggactatgtgccagaccagcctcaccccgagattccgtaccagtgcccaatgacctttggccctagagggcatcactggcaggggccagcttgtgaaaacggatgtcaggtgactggcacgttctatgcttgtgccccacccgagtcccaggctcccggagtgcctacagaacctagcattcggagtgccgaggcattggctttcagcgattgcaggctccatatatgcctctactaccgcgaaattctcgtcaaggaactcaccacttcaagccctgagggttgccggatctctcacgggcacacctacgacgcgtccaatcttgaccaggtactgttcccctaccctgaggacaacggacagaggaaaaacatcgagaaactgctgtcacatctggagagaggggttgtcctgtggatggcccctgacggattgtacgccaagaggttgtgccaaagccggatctattgggatgggcctttagccctgtgtaatgacaggcctaacaagctggaacgcgatcagacttgtaaactgtttgatacccaacagttcctctccgagcttcaggcctttgcgcatcacggcagatcactccccagatttcaggtcactttatgttttggggaggagttcccagacccacagcggcagcggaagctcattacagcacacgtggaacccctgctggcaaggcaactgtattacttcgcacagcaaaactcgggacactttctcagagggtatgacttgcccgaacacatttcgaaccctgaggactatcatcggagcatcaggcatagtagcatccaggaatag

SEQ ID NO: 29097 - DNA, 1497 bp, synthetic construct
  misc_feature 1..1497: note = Description of Artificial Sequence: Synthetic coding sequence
  source 1..1497: mol_type = other DNA
atgaatcagtctatacctgtcgcgcctacccctcctcggcgagtgcgtctcaaaccgtggttggttgctcaggtaaatagttgtcagtaccccggtctgcaatgggttaacggtgaaaaaaagctcttttgcatcccctggcgtcacgcgacgcggcacgggccatctcaagatggagacaacaccatatttaaagcatgggcgaaagagactgggaagtacacggagggagtggacgaagctgatcccgctaagtggaaagctaatctgagatgtgctctgaacaagtcaagagattttagactgatttatgatgggcctagagatatgcctccacagccctataagatttacgaggtctgcagtaacggccctgccccaactgattcccaaccacccgaagattattccttcggcgctggagaggaggaagaagaggaagaggaacttcagaggatgctgccctctctgagtctgacagaagacgtgaagtggcccccaactctgcagcccccaaccttgcggcctcctacgctgcaaccccctaccttacagcctcctgtcgtcctcggccctccagctccagatccgagtcccctggctcccccaccaggcaaccctgctgggtttcgcgaattgctctctgaggttttggagccgggtccactgcctgcatctctgcctccggctggtgaacagctgctgcctgatctgctcataagcccccacatgctccctcttacagatctggaaatcaagtttcagtatcgtggcaggccaccaagagccctgacgatctcaaacccacacggctgccgcctgttttattcacagctagaagcgacccaagagcaggtggaactgttcgggcctatctctcttgaacaggttcggtttccctcccctgaggacatccccagcgataaacagcggttttatacaaaccagctcctggatgtcctagaccgagggctgattctgcagctgcaagggcaagacctttatgcaattcgcttgtgtcagtgtaaggtcttctggagtgggccttgcgcttctgcgcacgactcttgtcccaatccgatacagagagaagtgaagaccaaactgttctccctcgagcacttcctgaatgagcttattctgttccagaaaggccagactaacacaccgccacctttcgagatttttttttgctttggggaggaatggcccgacaggaaaccacgcgaaaagaagctcattacagttcaagtcgtgccggtggcagcccgtcttcttctcgagatgtttagtggcgaactgagctggtctgccgactctataaggctccagatcagcaaccctgacctgaaggacaggatggtggagcagttcaaggagctgcaccacatctggcaaagtcagcaacggctccagcccgttgcccaggctccaccgggtgctggcctcggagtcggacaaggaccctggcccatgcatcccgcaggtatgcaatag

SEQ ID NO: 29098 - DNA, 1545 bp, synthetic construct
  misc_feature 1..1545: note = Description of Artificial Sequence: Synthetic coding sequence
  source 1..1545: mol_type = other DNA
atgaaccagagcattcccgtggcccctacaccaccacgaagggttagattgaagccttggctcgtggcacaggtgaatagctgccagtatcccggactgcagtgggtgaatggggagaagaaactcttttgcataccttggagacatgccacacggcatgggccttctcaagatggagacaatactatttttaaggcttgggcaaaggagacggggaaatatacggaaggagttgatgaggccgatccagcaaaatggaaagcgaatctgcgctgcgccctgaacaagtcccgggactttcgtctgatttacgatggcccaagggacatgcccccacagccctataaaatctatgaagtctgcagcaacggacctgcaccgactgactctcaacctcccgaagattattcttttggcgcaggggaggaggaggaggaggaggaggagctgcaacggatgctgccgtccctgtcgctgactgatgctgtgcagtcaggaccccatatgactccctacagcttgctcaaagaagacgtgaaatggcctcctacactccagccacctactctccggcctcctacgttgcaaccccctacactgcagcctccagtcgtgttaggccctcccgctcccgaccctagtcctcttgctcctccacctggcaaccccgctggctttagagaattgctttctgaagtactggaaccgggtccgctgcccgcatcactgccccctgctggcgagcaattactccccgacttgctgatcagccctcatatgttgcctctcacggacctggaaatcaagttccagtaccgcggacgccctcctcgagctcttaccatatccaatccgcacggttgcaggcttttttacagtcagcttgaggccacgcaggaacaggtcgaactgtttggcccaataagtctagaacaggtccgtttcccttcccccgaagacattccatccgacaaacaacgattttatactaaccaactgctcgacgttttggatcgtggtttaatcctccagctgcagggccaggatttatacgccatccgattatgccagtgcaaagtattctggtcaggaccatgcgctagcgcacatgatagttgcccgaatccgatacaaagggaggtgaaaactaaactgttcagcctcgaacactttctcaatgagctgatcctgtttcaaaaaggtcaaacgaatacaccaccaccttttgagattttcttttgcttcggcgaggagtggcctgacaggaaacctagggagaaaaagctgatcacagttcaagttgttcccgtggctgccagactgctgctcgaaatgttttctggcgagttgtcatggagcgccgacagtattcgactgcagatctccaaccctgacctgaaagatagaatggtggaacagttcaaagaactccaccacatttggcagtctcagcaacgcctccaaccagttgctcaggctcctcctggcgctggcctcggggtcgggcagggaccctggcccatgcaccccgctggaatgcagtag

SEQ ID NO: 29099 - DNA, 1497 bp, synthetic construct
  misc_feature 1..1497: note = Description of Artificial Sequence: Synthetic coding sequence
  source 1..1497: mol_type = other DNA
atgaaccagtcgataccagtggcgcctacacccccaaggagagtgcggctgaaaccatggttagtggcacaggtgaactcctgccagtatcccggtttgcaatgggttaatggagagaaaaaactgttctgcatcccctggcggcacgcgactcggcacggccctagtcaagatggtgacaacaccatctttaaggcatgggctaaggagaccggcaagtacacagagggtgttgacgaagctgaccccgcaaagtggaaggctaacttgaggtgcgcccttaacaagtcccgcgattttcggctgatctatgacggtcccagggacatgcctcctcagccttataaaatttacgaggtgtgttcaaatggacccgctcccaccgattctcagccacctgaggattacagtttcggggcaggagaagaggaagaagaggaagaggagttgcagcgcatgcttccctcactgagtctgacggaggatgtaaaatggccccctactttacaacctccgacccttcggccacctactcttcagccccctacactacagcccccagttgtgttgggtccccctgctccagaccctagcccattggctccacctcctggtaaccccgctggatttagggagttgttgtccgaggttcttgagccaggcccactgcccgcatcgctgcctccagcaggcgagcagctgcttccggatctgctgatatctccccacatgcttcctctgacggacctggagatcaagttccaatataggggacgccctcctcgggctctaaccatttccaaccctcacggttgccgcctgttctactctcagcttgaggccacacaggaacaagtggaactttttgggcctatcagtcttgaacaggtacgctttccctcccccgaggacatccccagcgataaacagcggttctacaccaatcagcttcttgacgtgcttgaccggggtctgattctgcagctccaggggcaagatctgtacgccattagactttgccagtgtaaggtgttttggagcggcccatgcgccagtgcccacgatagttgtccgaacccgatccagcgggaggtgaaaactaaattgtttagtctggagcatttcctgaatgaactaatacttttccaaaaagggcagaccaacacaccccctccgttcgaaattttcttctgttttggcgaggaatggccagatcggaaaccacgcgaaaaaaagttaattaccgtgcaggtggtgcccgttgccgcacggctgctactggaaatgttctcgggggagctgtcttggagtgccgatagcataaggcttcagatctccaaccctgacttgaaagatagaatggtcgagcagttcaaggaattgcaccacatatggcagtcacagcagagattacagcctgttgcccaggctcctccaggggctgggctgggagtggggcagggcccatggcccatgcatccagccggaatgcagtag

SEQ ID NO: 29100 - DNA, 1467 bp, synthetic construct
  misc_feature 1..1467: note = Description of Artificial Sequence: Synthetic coding sequence
  source 1..1467: mol_type = other DNA
atgaaccagagcattcctgttgcacctactcccccacgcagggtgcgtttaaaaccttggcttgttgcgcaggtgaatagctgccagtatccaggtctccagtgggtgaatggggagaaaaagctgttctgcattccatggcggcacgcgacacggcacgggccatctcaggatggggacaataccatcttcaaggcatgggccaaagagaccggcaagtacacagagggagtagacgaggcagatcctgccaagtggaaagctaatctccgttgcgcattaaacaaaagccgcgacttccgcctcatctatgatgggcctcgcgacatgccaccccagccttacaaaatttatgaggtgtgtagcaacggccctgcacccaccgattctcagccccctgaggattactcttttggggcaggcgaagaggaggaggaggaagaggagctgcagcgtatgctgccttctctttcactgaccgaggatgtgaagtggccaccaacccttcagcctccaacactgcagcctccagttgtattgggccctcccgcacccgatcctagccccctggccccaccgccaggaaacccagctggttttagggagcttttatcggaggtcctggagcctggaccccttccagccagtctcccacctgctggggaacagttacttccagacttactcatctccccccacatgcttcccctgacagacctagaaattaagttccagtaccgcggacgacctccacgtgcgctgaccatctcaaacccgcatggatgcaggcttttctactcacagctagaagccacccaagagcaggtggagctgttcggacccatatcgttagaacaggtgagatttccctctccagaggacattccgagcgacaagcagagattttacaccaaccagctgttagatgttctcgaccggggacttatcctacagttacaggggcaagacctctatgccatccgcctgtgccagtgcaaagtattttggtccggtccatgtgcctccgctcacgatagctgtcctaaccctattcaaagggaggtaaagaccaaactgttctcgctcgaacattttttaaatgaactcatcctttttcaaaagggtcagactaatactccccctccatttgaaatttttttttgcttcggggaagagtggccagaccggaaacctcgagagaaaaaattaatcacagtgcaggtggttcctgtggctgccaggctgttgttagagatgttctcaggtgagctgtcatggtctgccgattcaatacggctgcagattagcaatccagatctcaaagacaggatggtcgaacaatttaaagagctgcaccacatctggcagtcacagcagcgcctgcaacctgtggcacaggcaccacccggagcagggctcggggttggccaaggcccttggccaatgcaccctgctggcatgcagtag

SEQ ID NO: 29101 - DNA, 684 bp, synthetic construct
  misc_feature 1..684: note = Description of Artificial Sequence: Synthetic coding sequence
  source 1..684: mol_type = other DNA
atgaatcagtccatacccgtggctccaacccctcccagaagagtcagattaaaaccctggctagttgcacaagtgaacagctgccaatatcctggccttcagtgggtgaacggcgaaaagaagctgttttgtattccttggaggcacgccactcgccacggaccaagtcaggatggcgacaatacaatcttcaaagcttgggctaaagaaactggtaagtacacggaaggcgtggacgaagccgatcctgccaagtggaaggctaaccttagatgtgcactaaacaaatcaagagacttccgtctaatctacgacggtccacgggacatgccccctcaaccatacaaaatttacgaagtgtgtagcaatgggccagctcccacagacagccagcctcctgaggactattctttcggcgcaggcgaggaggaggaggaggaagaagaacggatgtcatctggccgacctctgtgcagtagacctttgtgcgggcgtctgttatgcagccggcctctctgctcccgtccgtggtgttgggtccctctgctgcaaactcccgctccctggttactgccgttagctactcttctggcctcaggctcttttagtctcaggagttggagcctgggcccatgtctgcctgcttgccctttgcaggccaacagctcctgccagacgtgctag

SEQ ID NO: 29102 - DNA, 474 bp, synthetic construct
  misc_feature 1..474: note = Description of Artificial Sequence: Synthetic coding sequence
  source 1..474: mol_type = other DNA
atgaaccagtctatccccgtggcgccaacaccgccacgcagggtgcgattgaaaccatggctggttgcccaggtaaatagctgccaatatcctggcctgcagtgggtgaacggcgaaaaaaagctgttctgtataccatggagacatgcgacccgtcacggcccttcacaggacggagacaacaccatattcaaagcttgggctaaagagacggggaagtataccgagggcgtggatgaggcggatccggctaaatggaaagccaatctgcgctgtgccttgaataagtctagggacttccggcttatatacgatgggccacgggacatgccgccacagccctataagatctacgaagtatgctccaatgggccagcccctacagattctcagccacctgaagattacagtttcggtgctggggaggaggaagaggaagaagaagagatgcagtgtagtctagccccaacctag

SEQ ID NO: 29103 - DNA, 321 bp, synthetic construct
  misc_feature 1..321: note = Description of Artificial Sequence: Synthetic coding sequence
  source 1..321: mol_type = other DNA
atgaatcagtccatcccggtggcccctactccccctcgaagagtgagattgaagccctggcttgtggcacaagtcaatagttgccagtaccctgggctgcagtgggtcaatggcgagaagaagttgttttgtatcccatggaggcacgccacaagacatggcccttcacaggacggggacaacactatattcaaggcctgggccaaggagaccggtaagtacaccgagggtgtggacgaggcagaccccgctaaatggaaggccaatctgcgctgcgcactgaataagtctagggatttccgtctcatttacgatggttag

SEQ ID NO: 29104 - DNA, 180 bp, synthetic construct
  misc_feature 1..180: note = Description of Artificial Sequence: Synthetic coding sequence
  source 1..180: mol_type = other DNA
atgaaccagtccatacccgtagcacccactccacctagacgggtgagactgaagccttggctggtcgctcaagtcaatagctgccagtatcccggacttcagtgggttaacggagagaagaagctcttctgcatcccttggaggcacgccacgagacatggacctagccaggatgggtag

SEQ ID NO: 29105 - DNA, 1497 bp, synthetic construct
  misc_feature 1..1497: note = Description of Artificial Sequence: Synthetic coding sequence
  source 1..1497: mol_type = other DNA
atgaatcagtctatccctgtggccccaacaccgcctcggagggtccggttaaaaccctggctggtggcacaagtcaatagctgtcagtatcccggtctccaatgggtcaacggggaaaagaagttattctgtatcccttggcgccatgctacccgacacggtccgagccaggacggcgataacaccatcttcaaggcctgggccaaggaaacaggcaagtatacggaaggcgtggatgaagccgatcctgcgaagtggaaggccaacctgagatgcgcattgaataaatccagggatttccgtttgatctacgacggcccaagagatatgcccccacagccatataagatctacgaggtttgttctaacggacctgcccctacagacagtcagccacccgaagactattctttcggggctggagaggaggaagaagaagaggaagaattgcagaggatgctaccttccctgagcctcacagaggatgttaagtggcccccaacgctgcagccaccgaccctgcgaccacctaccttgcagccacccaccctgcaaccaccagtggtattaggccctcctgcacctgatccttcgccccttgctccaccaccgggtaacccggcaggttttagggagctgctttccgaagtccttgagcctggtcccctgccagcatcactgcccccagccggagagcaactgctgccggatctcctgatctccccccacatgttgcccctgaccgacctagagataaagtttcagtatcgagggaggccccctcgagctctaacaatcagtaatcctcatggatgtagactgttttattctcagctggaagcgacccaggagcaggtcgagttatttggccctatctcgttggaacaggtgcggttcccaagccctgaggacattccttctgacaagcagagattttatacaaaccagctgttagatgtgctcgacagaggactaatcctgcagcttcagggacaggatctctatgccattcgcctgtgtcagtgcaaggtgttctggagtggcccatgtgcctctgcacacgatagctgccctaatcccattcaacgagaagtgaaaacaaagctctttagccttgagcactttctaaatgagctcatcctgtttcagaaaggccagacaaacacgccaccaccgtttgaaatttttttttgtttcggcgaggaatggcctgataggaagcccagagaaaaaaagctgatcactgtccaggtcgtgccagtggccgctcggcttctcctggagatgttctccggggaattaagctggtccgccgacagtatcaggctgcagataagtaatccagatttgaaagacaggatggtcgagcagtttaaagaacttcaccatatctggcaaagccagcagcggctccagcctgtcgcccaggcacccccaggtgcaggcttgggcgtgggacagggaccctggcccatgcatcccgcagggatgcagtag

SEQ ID NO: 29106 - DNA, 426 bp, synthetic construct
  misc_feature 1..426: note = Description of Artificial Sequence: Synthetic coding sequence
  source 1..426: mol_type = other DNA
atgaaccagtccatccccgtagctccgacaccaccgcgacgcgttcgcctgaagccctggctagtggcccaagttaatagctgtcagtatcccggacttcagtgggtgaatggggaaaagaaattattctgcataccctggagacacgcgactcgacatgggccttcgcaggacggggataataccatcttcaaagcctgggcaaaagaaacagggaaatacaccgaaggtgtagatgaggccgaccctgccaaatggaaggctaatctgagatgcgcgcttaataagagtagagatttcagattaatctacgatggaccgagagacatgccccctcaaccatacaaaatctacgaggtatgttccaacggaccggctccaaccgacagtcagcccccagaggattatagctttggcgcagggtag

SEQ ID NO: 29107 - DNA, 459 bp, synthetic construct
  misc_feature 1..459: note = Description of Artificial Sequence: Synthetic coding sequence
  source 1..459: mol_type = other DNA
atgaatcaatccataccagtggcaccaacacccccacgacgtgtgcgcctcaagccctggttggtcgcgcaggtgaattcttgtcaataccccggactacagtgggttaatggcgagaagaaattgttttgcataccctggcgtcacgcgaccagacacggaccctcccaagatggagataacactattttcaaggcatgggctaaagagactgggaagtatactgagggggttgatgaggccgatcctgcgaaatggaaagccaacctcaggtgcgccttaaacaaaagcagagatttccgcctaatctacgacggcccaagggatatgcccccacaaccctataaaatatatgaagtttgctccaatggccctgcgcctaccgatagccagccacccgaggactacagtttcggcgcaggagaggaagaagaagaagaagaagaggtcagtgtgtag

SEQ ID NO: 29108 - DNA, 1239 bp, synthetic construct
  misc_feature 1..1239: note = Description of Artificial Sequence: Synthetic coding sequence
  source 1..1239: mol_type = other DNA
atgaatcagagtattcccgttgccccaacccccccacgcagggttcgccttaaaccatggcttgtcgcccaagtcaacagttgccaatatcctggactacagtgggtcaacggagaaaagaagctcttctgcattccatggaggcacgccacacgccatggcccaagccaggatggggacaataccatcttcaaagcctgggctaaagaaactgggaaatacaccgagggcgtcgatgaggccgatcctgcaaagtggaaggccaatctacgctgcgcacttaataaaagccgggattttcgtttgatctatgatgggcctcgggacatgcctcctcagccttacaagatctatgaagtctgctctaatggacctgcacccaccgactcacaaccacccgaagattacagctttggtgctggcgaagaagaagaggaggaggaagagcttcagagaatgctcccatccctgtcactaactgtgactgatcttgaaatcaagtttcagtatagaggcaggccccctcgcgcattaacgatatccaacccccatggttgtagactgttctactcacagctggaagccactcaagaacaggtcgaactcttcggtccaattagcctggaacaggtccggtttccttctccagaagatatcccttccgataagcagaggttttatacgaaccagctgctggacgtgttggaccgtggcctaatcctgcagctccagggccaggacctgtatgccatccgcctatgtcagtgcaaagtgttttggagcggtccatgcgcttccgcccatgactcgtgtccgaatccgatccaaagagaggtgaaaactaaactgtttagcctggaacacttcttgaatgagctgatcctcttccagaagggccaaactaacacaccgccacccttcgaaatttttttttgctttggcgaggaatggcctgacagaaaacctagagaaaaaaaactgataacagtgcaggttgttcccgtggcggctcgcctgctgctggagatgttctccggcgaactatcttggtctgccgacagcataagactgcagatctcgaaccccgacctgaaggaccggatggttgaacaatttaaggaactacaccatatctggcagtcgcagcaaagactgcagccggtggcgcaggcaccacctggcgctggtctgggcgtaggccagggaccctggcccatgcaccccgctggcatgcaatag

SEQ ID NO: 29109 - DNA, 570 bp, synthetic construct
  misc_feature 1..570: note = Description of Artificial Sequence: Synthetic coding sequence
  source 1..570: mol_type = other DNA
atggcatctccttttgccctgctgatggtccttgtggtgctgtcatgtaagagttcatgctcgttaggctgtgacctgcccgagactcatagcctggacaacagaagaacactgatgctgcttgcgcaaatgagcaggatatcacccagttcttgcctgatggacaggcacgacttcggatttccacaggaagagtttgatgggaatcagtttcagaaggcccctgccatctcagtgctccacgagctgatacagcaaatctttaatctctttactacaaaggattcatccgcggcatgggacgaagatctactcgacaaattttgtactgaattataccagcaactgaacgacctggaggcttgtgtaatgcaagaagagcgcgtcggtgagactccgctgatgaacgcggactctatcttggcagtcaaaaagtattttcggaggatcacgctatacctcaccgaaaagaagtatagcccctgcgcctgggaggtggtcagagcagaaattatgcggtctttgtcactcagcaccaaccttcaggaaagacttcgaagaaaggagtag

SEQ ID NO: 29110 - DNA, 516 bp, synthetic construct
  misc_feature 1..516: note = Description of Artificial Sequence: Synthetic coding sequence
  source 1..516: mol_type = other DNA
atgctggttaactttatcctccgatgcggcctgttgttagttacgctgtccctggcgattgccaagcacaagcaaagctcttttactaagagctgctatcctagggggaccttgtcacaagctgtggatgctttgtacattaaggccgcttggctgaaagctactatccctgaggaccgaataaagaatatacggctgctaaagaaaaagaccaaaaagcagtttatgaagaactgtcagtttcaggaacagctgctctcattttttatggaagacgtgtttggacaacttcagctgcaaggttgcaaaaagatccggtttgtggaggacttccacagcctgcggcagaagctgtcccactgcatcagttgtgctagcagcgcgagagagatgaagtccataacaaggatgaaaagaatcttttacaggatcggcaacaaaggcatttataaggccatctcagagttagacatccttctgtcttggattaaaaagttactcgagtcgtcgcagtag

SEQ ID NO: 29111 - DNA, 543 bp, synthetic construct
  misc_feature 1..543: note = Description of Artificial Sequence: Synthetic coding sequence
  source 1..543: mol_type = other DNA
atggccttggcagacctgtacgaggagggcggagggggtgggggagaaggagaggacaacgcagatagcaaggaaacaatttgtcgcccttctgggaggaaatccagcaagatgcaagcttttcggatctgggacgtcaatcagaagaccttctatttgcgcaacaatcagctcgtcgcaggttatctgcaggggcctaacgtgaatcttgaagaaaagatcgacgtggtacccattgaaccacacgcattgttcctgggaatccatgggggtaagatgtgcctcagctgcgtaaaatcaggagacgagacgcggctccagttagaggccgttaatattaccgatctatcggagaatcggaaacaggacaagaggtttgcattcattcggagcgacagtgggccaacgacatcctttgagagtgccgcatgtcccggttggtttctttgcaccgctatggaagccgaccagccagtgtccctgacgaacatgcctgatgagggtgttatggtgactaagttttacttccaagaagatgagtag

SEQ ID NO: 29112 - DNA, 480 bp, synthetic construct
  misc_feature 1..480: note = Description of Artificial Sequence: Synthetic coding sequence
  source 1..480: mol_type = other DNA
atggcgttggagacaatatgtagaccttcagggagaaagagctccaagatgcaggcgttcagaatctgggatgtcaaccagaagacgttttacctgagaaataaccagctggttgccggatacctccagggcccaaacgtgaacctagaggagaaaatcgacgtggtcccgatcgaacctcacgcgctctttctgggtatacacggtgggaaaatgtgtctctcatgcgtgaaaagcggagatgaaacacgcctgcagcttgaagccgttaacatcacagacctgagcgagaatagaaagcaggacaagcgatttgcttttatcagatcagacagcggccctaccacctcatttgagagtgcagcttgtccaggctggttcctatgcaccgctatggaggctgaccagcctgtgtcacttacgaatatgccagatgagggcgtgatggttactaaattttacttccaggaggacgagtag

SEQ ID NO: 29113 - DNA, 534 bp, synthetic construct
  misc_feature 1..534: note = Description of Artificial Sequence: Synthetic coding sequence
  source 1..534: mol_type = other DNA
atggaaatttgccgcggtcttcgcagtcacttgatcaccctgttgctcttcctctttcattccgagacgatttgccgcccttcaggacggaagtcaagcaaaatgcaggccttccgcatatgggacgtcaatcagaagaccttctatctcaggaataatcagttggtcgcagggtacctacaaggaccaaatgtcaaccttgaggagaaaatcgatgtggttccaatagaaccacacgcgttatttctgggaattcacggtggcaagatgtgtctgagttgcgtaaagagcggcgatgaaactcgccttcagctcgaggcagtgaacatcaccgatctatctgagaaccggaagcaagataaacggttcgcgtttattcggtccgattccggtcccactacaagctttgagagcgcagcgtgcccgggatggttcctgtgtacagcaatggaggccgaccaaccagtatcattgaccaacatgcccgatgagggggtgatggtaactaaattttacttccaggaggacgagtag

SEQ ID NO: 29114 - DNA, 432 bp, synthetic construct
  misc_feature 1..432: note = Description of Artificial Sequence: Synthetic coding sequence
  source 1..432: mol_type = other DNA
atgcaggctttccgaatctgggatgtgaatcagaagaccttctacctgaggaacaatcagctcgtggcgggataccttcagggacccaacgtaaacctggaagagaaaattgatgtggtccccattgagccacacgcgttgttcctcggaatacacggaggaaaaatgtgcctctcttgcgtgaaaagcggggacgaaaccaggctgcagctcgaggcggtgaacataaccgacctgtccgagaatagaaagcaagataaacggttcgcctttatacgatccgacagtgggccaacaaccagtttcgagagcgctgcctgcccaggatggttcctctgcactgcaatggaggcggatcaacccgtgagtttaacaaacatgcctgacgaaggggtgatggttactaaattttatttccaggaagatgagtag

SEQ ID NO: 29115 - DNA, 1470 bp, synthetic construct
  misc_feature 1..1470: note = Description of Artificial Sequence: Synthetic coding sequence
  source 1..1470: mol_type = other DNA
atggagccaggcctggagcacgcccttcggcgaacccccagctggtctagcttaggcggttccgagcaccaggaaatgagtttcctggagcaggagaacagttcaagctggcctagtcctgccgtaacgtcgtccagcgagaggatacgagggaaacggagggcaaaagcccttcgctggacacggcagaagagtgtggaagagggcgaacccccaggacagggcgaggggcctaggagcaggcccgctgcagagtccactggacttgaggcaaccttcccaaaaaccacccctctagcacaggcagatccagctggcgtggggactcctccaacgggctgggattgccttccatcagactgtactgccagtgctgctggaagtagcacagacgatgtggaactggctactgagtttccagccaccgaggcctgggagtgcgaactggagggtctgttggaagagcggccagcgttatgcttaagcccccaggccccttttccaaaactcgggtgggacgacgagctaagaaaaccgggtgcccagatctatatgaggtttatgcaggagcacacttgctacgacgccatggccacctctagtaaattggtgatattcgataccatgctagagattaagaaagccttctttgccctggttgccaacggggtccgcgcagcacccctgtgggattctaagaagcagtcgtttgtggggatgttaactatcaccgacttcatccttgtactgcatcgatactatcggtccccgcttgtgcagatctacgagatagagcagcacaagatagagacttggcgggaaatctatttacagggctgcttcaagcctctggtctccatttccccaaatgactccttgtttgaagccgtttataccttaattaagaacagaattcacagactccccgtgttagacccagtgtctggcaatgttctgcacatcctgacccacaaacgcctcctgaagttcctgcatattttcggctcattgctccctagacccagtttcctttaccgtacgattcaagacctaggtatcggcacattccgagatctggcagtcgtgctggagacagcgccaatcctgaccgctctagatatttttgtcgatcggagggtgagcgctctccctgtggtgaatgaatgcggccaagtcgttggtctgtacagccggtttgatgtgatccatctggctgcacagcaaacatacaaccacctagacatgagtgtaggggaggcacttagacagaggaccctgtgcctcgagggagtcttatcgtgccagccccacgaaagtctgggagaggtgatcgaccgcatcgctcgggagcaagtacacaggcttgtcctcgtggacgaaacccagcacctgttaggcgtggtaagcctttcggatatcctccaagctctggtgctctctcctgcgggaatagacgccctgggagcgtag

SEQ ID NO: 29116 - DNA, 1710 bp, synthetic construct
  misc_feature 1..1710: note = Description of Artificial Sequence: Synthetic coding sequence
  source 1..1710: mol_type = other DNA
atgaaggtgctccttcggcttatttgttttattgctctgctcatctccagtcttgaagcggataaatgtaaggaacgcgaggagaaaattatactggtatcttctgccaacgagattgacgtcagaccctgccctctaaatcctaatgagcacaaaggaaccatcacctggtataaagacgatagcaaaacacctgtgagcaccgagcaggcatcacgcatccatcagcataaagagaagttgtggtttgtgcccgcaaaggtggaagacagcggtcattattattgtgtagttcggaactccagctattgtctcaggattaagattagcgccaaattcgtagagaacgagccaaatctctgctataacgcacaagcaattttcaagcagaaattgcctgtagctggcgacggtggcttagtgtgtccttatatggaatttttcaagaatgagaataacgagctgccaaagttgcagtggtataaggactgtaagccactcctactggataacattcatttttcgggagtcaaggatagactcattgtgatgaacgtcgcagagaaacatcggggtaactatacgtgtcatgcctcctacacatatcttgggaaacagtatccgattacgagggtcatagagttcatcaccctcgaggaaaataagcccaccaggcctgtcatcgtttcacccgctaacgaaaccatggaggtcgacttgggctcccagatacaactgatatgtaacgtaaccggacagcttagcgacatagcgtattggaaatggaacggctctgtgatcgacgaggatgatcccgtgctaggtgaggactactacagcgtggagaatcctgcaaataaaagaagatctaccctgataacagtgttaaatatctcagaaatcgaaagtcgattctataaacatccgtttacgtgcttcgcaaagaatacacacggcatagatgccgcttatatacagctcatttaccctgtcacaaacttccagaaacacatgattggtatttgcgtgaccttaactgtcatcattgtgtgctcagtctttatctataaaatttttaagatcgacatcgttctttggtatcgcgactcgtgctatgattttctccccattaaagcttcagatggaaaaacatacgatgcttacatactgtacccaaagacagttggggagggctccacgtctgattgcgacatttttgtgttcaaagtgctgccggaagttctggagaaacagtgcggatacaaactttttatctatgggagggatgactatgttggcgaagatattgtggaagtgatcaatgagaacgtaaagaagagccgcaggctgataatcatccttgtgcgcgagacatccggcttttcttggctcggcggaagcagtgaagagcagatcgccatgtataacgcacttgtgcaggacggcattaaagtggtgttactggaattggagaaaattcaggactacgagaagatgcccgagagtattaagtttatcaaacagaaacatggtgctatccgctggtccggggactttactcagggtcctcagagtgccaagacccgattttggaaaaatgtgcgataccacatgcccgtgcagaggcgaagtccctcctctaagcatcagttgctttctccagccaccaaggagaagctacagagggaggctcatgttcctctcggctag

SEQ ID NO: 29117 - DNA, 549 bp, synthetic construct
  misc_feature 1..549: note = Description of Artificial Sequence: Synthetic coding sequence
  source 1..549: mol_type = other DNA
atgaaagtccttctgcgactgatttgttttattgcactgctaatctcatcacttgaagcagataagtgcaaggagcgggaggaaaaaatcatcctggtgagcagtgcaaatgaaatcgatgtcaggccatgtcccctaaatccaaacgagcacaaaggcacaatcacctggtacaaagatgattccaaaacacctgtcagcaccgaacaagcttcccgaattcatcagcacaaagagaaactttggtttgtgccagccaaggtcgaagattctggccattactattgtgttgtgcgaaacagtagttattgcctaaggattaagatttccgcaaagttcgtggagaatgagccaaacctgtgctataacgcccaggccatctttaagcagaagctgcccgtcgctggagacggtggcctggtatgcccctacatggagttcttcaagaacgagaataatgagttgccaaagttgcagtggtacaaagattgtaagccactgctcctggataatattcactttagtggagtaaaagatcgcctcatttag

SEQ ID NO: 29118 - DNA, 345 bp, synthetic construct
  misc_feature 1..345: note = Description of Artificial Sequence: Synthetic coding sequence
  source 1..345: mol_type = other DNA
atgaaggtcctcctgcggttgatttgcttcatcgctctgctgatctcaagcttggaggccgataagtgtaaggagcgcgaagagaagataatcctggtttcatctgccaatgagatagatgtgagaccgtgccccctgaatcccaatgagcacaaggggacaatcacgtggtataaagacgactccaaaacacccgtttccaccgagcaggcaagccgaatacaccagcataaggagaagctatggttcgtccccgcaaaagtggaggactccgggcactattattgcgtggttagaaattcttcctactgcctccggatcaaaatttcagcgaagtttgtttag

SEQ ID NO: 29119 - DNA, 321 bp, synthetic construct
  misc_feature 1..321: note = Description of Artificial Sequence: Synthetic coding sequence
  source 1..321: mol_type = other DNA
atgaaggtgttgttaaggctcatctgcttcatcgctctcttaatttcgagtcttgaggctgacaagtgtaaggagcgcgaagaaaaaatcattctcgtaagcagtgccaacgagatcgacgtgcggccatgtccgcttaaccccaacgagcataaagggacgattacctggtacaaagacgactccaaaacacctgtgtctaccgagcaagcaagccggattcatcagcacaaagaaaaactttggtttgtgcccgcaaaagtggaggatagtgggcactattattgcgtagtgagaaacagcagctattgtttaaggtag

SEQ ID NO: 29120 - DNA, 243 bp, synthetic construct
  misc_feature 1..243: note = Description of Artificial Sequence: Synthetic coding sequence
  source 1..243: mol_type = other DNA
atgaaagtgctgctgagattgatttgctttattgccctgctgatcagctcacttgaggccgacaaatgcaaggagcgcgaagaaaagatcatattggtctcttccgccaatgagattgatgtgcgaccttgccctctcaatccgaacgagcataaggggaccatcacctggtacaaggacgatagtaagacaccagtgtccaccgagcaggccagccgcatccaccaacacaaagagaagtag

SEQ ID NO: 29121 - DNA, 810 bp, synthetic construct
  misc_feature 1..810: note = Description of Artificial Sequence: Synthetic coding sequence
  source 1..810: mol_type = other DNA
atggcagaggtgcctgaacttgcgagcgagatgatggcatactattcaggcaacgaggatgacctgtttttcgaggctgatggcccaaagcagatgaaatgcagttttcaagacctcgacctgtgtcccctagacggaggaattcagcttcgaatttccgatcaccattactccaagggcttcaggcaggcagcctctgtcgttgtagccatggacaaacttcggaagatgctcgtgccctgcccccagaccttccaggagaacgatttatccacattttttccctttatctttgaggaggagccaatctttttcgacacatgggataacgaagcttacgtccatgatgcccctgtaaggtctctgaactgcaccctgcgtgactctcagcagaagtccttagtaatgtccggcccttatgagctcaaggccttgcatctgcaaggccaggacatggagcagcaggtagtcttcagtatgagtttcgtacagggagaagaatcaaacgataagatccccgtggcattagggctgaaagagaagaatctttacctctcctgcgtgctgaaggatgacaaaccgaccctccagttggaatcagtagatcccaaaaactacccaaaaaaaaagatggagaagcgcttcgtgttcaacaagatcgagatcaataataagctcgagttcgagtctgcacagttccccaattggtatattagcacatctcaagcggaaaatatgcctgtgtttctgggaggaaccaaggggggtcaggatataacagactttactatgcagttcgtgtcatcatag

SEQ ID NO: 29122 - DNA, 336 bp, synthetic construct
  misc_feature 1..336: note = Description of Artificial Sequence: Synthetic coding sequence
  source 1..336: mol_type = other DNA
atggctgaagttcccgagctggccagcgagatgatggcttactacagtggaaacgaggacgaccttttttttgaagccgacggtcctaagcagatgaaatgcagcttccaggatctggacctctgtccgttggatgggggaatccagcttagaatctctgaccatcattactcgaaaggcttccgccaagcggcttcagtggttgtcgctatggataaattgagaaagatgttagtgccatgtccacaaacatttcaggagaacgacctcagcacttttttcccttttatttttgaagaagaaccgatcttcttcgatacatgggacaatgagtag

SEQ ID NO: 29123 - DNA, 432 bp, synthetic construct
  misc_feature 1..432: note = Description of Artificial Sequence: Synthetic coding sequence
  source 1..432: mol_type = other DNA
atggcagaggtgccagagctggcttcagaaatgatggcctactacagcggcaacgaggacgatcttttcttcgaagccgacggtcccaagcaaatgaaatgtagttttcaggacctcgacctgtgtccactggacggcggaatccaacttcgcatcagcgaccaccactatagtaagggtttccgacaagctgcctctgttgtggtggccatggacaaacttcgaaaaatgctggtcccatgcccgcagacttttcaagaaaacgacctcagcacttttttcccgttcatcttcgaggaggagcctatcttttttgacacctgggacaatgaggcttatgtgcatgatgccccagtgcggtccttgaactgtactctgcgtgacagtcagcagaagtctttggtgatgagcggaccttatgaactgaagtag

SEQ ID NO: 29124 - DNA, 378 bp, synthetic construct
  misc_feature 1..378: note = Description of Artificial Sequence: Synthetic coding sequence
  source 1..378: mol_type = other DNA
atggccgaagtgcccgagctggcctccgagatgatggcttactattcggggaatgaggatgacctgttctttgaggcagacggtcctaaacaaatgaaatgctcttttcaggatctggatctctgcccactggacggtggcattcaactccgcatctcggaccaccactacagcaaggggttccgccaggctgcatctgtggtggtggcgatggataaactccgtaaaatgctggtgccctgtccacagacctttcaagaaaacgatttatctaccttctttccatttatcttcgaggaagagcctatcttcttcgacacatgggataatgaggcctatgtgcatgatgccccagtgcgtagtctgaattgcacgtag

SEQ ID NO: 29125 - DNA, 762 bp, synthetic construct
  misc_feature 1..762: note = Description of Artificial Sequence: Synthetic coding sequence
  source 1..762: mol_type = other DNA
atgtggccacccggaagtgcctcacagcccccaccctcgccagcagccgcaaccggcctccatcctgccgcaagacccgtctccttacagtgtagattgtccatgtgtcctgccaggtcgctgctgctagttgccacactggtactattagaccacctgtcactggcccgaaatctcccagtagccacgccagaccctggcatgtttccttgtttacatcacagccagaatctgcttcgcgcagtatccaatatgctacagaaggctaggcagacactagaattctacccatgcactagtgaggaaatcgaccatgaagacattaccaaggacaaaacctcaacagtcgaagcgtgtctgcctttagaactgacaaaaaatgaatcctgcctcaactcaagagaaacctcatttatcaccaatggaagttgtcttgccagcaggaaaacttccttcatgatggccttgtgtctttctagtatctatgaagacttgaagatgtaccaggtggagttcaaaacaatgaacgcaaaactgttgatggacccaaagcgccagatatttctggaccagaacatgctcgccgttatcgatgaactgatgcaggccttaaactttaatagcgagaccgtgcctcagaagtcatccctagaggagcctgacttttataagactaaaattaagttatgcatcctcctgcatgccttccgcatcagggcagtgacgattgaccgcgtcatgagttacttgaacgcctcgtag

SEQ ID NO: 29126 - DNA, 720 bp, synthetic construct
  misc_feature 1..720: note = Description of Artificial Sequence: Synthetic coding sequence
  source 1..720: mol_type = other DNA
atgtggccccctggttccgcttcccaaccacccccatctcctgcagccgctactggtctacaccccgctgcccgaccggtgagcttacagtgccggctgagcatgtgcccagccaggtctctcctactggtggccacactcgtgctgctggaccatttatccctggcgaggaacttaccagtggcaacacctgatcctggcatgtttccctgcctgcaccactcccagaacttgctaagagccgtttcgaatatgctgcagaaagccagacaaaccctcgagttttacccatgcacaagcgaggagatcgatcacgaagatatcaccaaggacaaaacttcaaccgtagaagcctgtctccctctggaacttaccaaaaacggctcctgcctcgcgagccgtaaaacttcctttatgatggccctatgcctcagtagtatttacgaggatcttaagatgtatcaggtggagttcaagactatgaacgctaaacttctcatggatccgaaaagacagattttccttgaccagaacatgctcgcagtgattgacgagctcatgcaggccttaaactttaactccgaaactgttccgcagaaatcctcactcgaggaaccagatttctataaaacaaaaattaagctttgcattctgctgcacgcatttcggatccgtgccgtgactatcgaccgagtgatgtcctacctcaacgcctcatag

SEQ ID NO: 29127 - DNA, 648 bp, synthetic construct
  misc_feature 1..648: note = Description of Artificial Sequence: Synthetic coding sequence
  source 1..648: mol_type = other DNA
atgtggccacctggatccgccagccagccacctccttcacccgctgccgctactggcctccatccggcagccagaccagtgtccctgcagtgtcggctttcaatgtgtccagccagaagtctgctcctcgtcgctacgctcgtcctgctcgatcatctgtccttggcacggaatttgccagtggctacacctgatcctgggatgttcccatgtctgcatcacagccagaacctgttgcgagctgtttccaacatgttgcagaaaaatgaatcatgcctcaactcacgagaaacgagcttcataacaaacggaagttgcctggcgtcaaggaagacatctttcatgatggccttgtgcctgtctagtatttacgaggacctgaaaatgtaccaggtggaattcaaaacaatgaacgcaaagttactgatggaccctaagagacagatcttcctcgaccagaacatgcttgcagtgatcgatgagttaatgcaggctctgaatttcaattctgagaccgtgccccaaaaatcatccctggaggagcctgacttttataagaccaagatcaaactttgtatattgcttcacgcattccggatccgcgcagtgaccattgatcgcgtgatgtcttacctgaatgcctcatag

SEQ ID NO: 29128 - DNA, 489 bp, synthetic construct
  misc_feature 1..489: note = Description of Artificial Sequence: Synthetic coding sequence
  source 1..489: mol_type = other DNA
atgcgtatctcaaagcctcaccttagatctataagcattcagtgctacctatgtctcctgctgaatagccatttcctgactgaggctggcatccacgtttttatactgggctgtttctctgccggactgcccaagaccgaggcgaactgggtgaacgtcatctctgacctcaaaaagatcgaagacctcattcagagtatgcatatcgatgcaaccttgtacacagagagtgacgtacacccaagttgtaaagtgaccgccatgaaatgcttcctcctcgagttacaggtcatatctctagagtcaggggacgccagtatccacgatactgtggagaatctcattatccttgccaataactccttgagttcgaacggtaatgtgactgagagtgggtgcaaggaatgtgaggagctggaggagaagaatattaaggagtttctgcaatcgttcgtccatatcgtgcagatgttcatcaataccagctag

SEQ ID NO: 29129 - DNA, 489 bp, synthetic construct
  misc_feature 1..489: note = Description of Artificial Sequence: Synthetic coding sequence
  source 1..489: mol_type = other DNA
atgagaatctcgaagccccacttgcggagcatctcaatccaatgttatctgtgcctgcttctcaatagtcattttttgaccgaggccggaattcatgtctttatactggggtgcttcagtgcaggactgcccaaaacagaagccaattgggtcaatgttattagtgatctgaaaaaaatcgaagacctgatccaatctatgcacatcgatgcaactctgtatacggagtcagatgttcacccatcgtgcaaagttacagctatgaaatgctttctcttggagctgcaggtaatcagcctggaatctggggacgccagcatccacgacaccgtggagaacctgattattctggccaacaacagcctctcctcaaacggaaatgtcaccgagagcggttgcaaggagtgcgaagagcttgaggaaaagaacatcaaagaatttctccagagctttgtccacatcgtccagatgttcattaacacatcctag

SEQ ID NO: 29130 - DNA, 408 bp, synthetic construct
  misc_feature 1..408: note = Description of Artificial Sequence: Synthetic coding sequence
  source 1..408: mol_type = other DNA
atggtgctcggcaccatcgacctgtgtagctgcttttctgccggactgcccaaaactgaagcaaattgggtaaatgtgattagtgacctcaaaaaaattgaagacctgatacagagtatgcacattgacgcaactctgtacactgaatccgacgtgcatcctagctgtaaagtcaccgccatgaagtgctttttgctggagctccaggtcatttccctggaaagtggagacgcttccattcacgacacggtcgaaaacctcatcatattggctaacaatagtctgtcaagtaacggaaacgtgacagaatctgggtgcaaggaatgtgaggagcttgaagagaagaacattaaagagttcctgcagtctttcgtgcatattgtgcagatgtttatcaatacatcatag

SEQ ID NO: 29131 - DNA, 408 bp, synthetic construct
  misc_feature 1..408: note = Description of Artificial Sequence: Synthetic coding sequence
  source 1..408: mol_type = other DNA
atggttctggggactatagatctgtgctcttgcttctccgccggtctccccaagacggaggccaattgggttaacgtaatctctgacctcaaaaagatagaggatctgatacagtctatgcatatagatgcaactctgtatactgaaagtgacgtccaccctagctgcaaagttaccgctatgaagtgctttcttctggaactccaggtgatctccctggaatcaggcgacgctagcatccatgacactgtagagaatctgatcatattggccaataattcattgtcatctaacggcaacgtgacggagtccggctgtaaagaatgcgaggaactggaggagaaaaacataaaggagttcctccagtcttttgtgcacattgtccagatgtttatcaacacatcgtag

SEQ ID NO: 29132 - DNA, 408 bp, synthetic construct
  misc_feature 1..408: note = Description of Artificial Sequence: Synthetic coding sequence
  source 1..408: mol_type = other DNA
atggtgttgggaacgatcgatctgtgctcttgtttctcagctggtctgccgaaaactgaagcaaattgggtaaacgtgatctccgacttgaaaaagattgaagaccttatccagagcatgcatatcgatgccacattgtacacggagtccgatgtgcaccctagttgcaaagtaacagccatgaagtgttttctcctagaactgcaagtgatctctctggaaagcggggatgcttccattcacgatacagtggagaatctgatcatcctggcaaataactctctgtcaagtaatggcaatgtgaccgaaagcgggtgcaaagaatgcgaggagctggaagagaaaaatattaaggagttccttcagtccttcgttcatattgtgcagatgtttatcaacaccagttag

SEQ ID NO: 29133 - DNA, 489 bp, synthetic construct
  misc_feature 1..489: note = Description of Artificial Sequence: Synthetic coding sequence
  source 1..489: mol_type = other DNA
atgcgcatctctaagccacacctgcgcagtatatcgattcagtgttacttatgcctccttctcaacagccactttctcaccgaagcaggtatccacgtgttcattcttggctgctttagtgccggattgcctaagactgaggcaaactgggtgaatgttatctcagatctcaaaaagattgaagatctgattcagtccatgcacatcgacgctactctgtacaccgaatcggatgtgcaccccagctgcaaggtgacagccatgaagtgcttcctcctggagctgcaggtgattagtctcgagagtggcgatgcctcaattcacgatacagtggagaacctgatcatcctggccaacaacagcctttccagtaacggaaacgttacagaaagtggctgcaaggaatgtgaggagttagaagagaagaacatcaaggaattcctgcagtcatttgttcacattgtgcagatgtttattaacacttcttag

SEQ ID NO: 29134 - DNA, 582 bp, synthetic construct
  misc_feature 1..582: note = Description of Artificial Sequence: Synthetic coding sequence
  source 1..582: mol_type = other DNA
atggcagccgagcctgtggaagacaattgcatcaattttgtagccatgaagttcattgacaacacgttatatttcatcgccgaagacgatgagaacctcgagtctgactatttcggcaaattggagtccaaactttcagttataaggaacctgaatgaccaagttctgtttatcgaccaggggaatagacccttgtttgaagacatgacggattctgactgcagggacaatgccccaaggactattttcattatctcgatgtacaaggattcccaaccccgagggatggccgtgacgatttctgttaaatgtgagaagattagtactctctcatgtgaaaacaaaattattagttttaaagaaatgaacccccctgacaatatcaaggatacaaaatctgacattattttctttcagagatccgtgccgggacacgataacaagatgcagtttgaatcaagcagctacgagggctacttcctggcctgcgagaaagagcgtgacctctttaagctgattctgaaaaaggaggatgaattgggcgatagatccataatgtttaccgtgcagaatgaagactag

SEQ ID NO: 29135 - DNA, 570 bp, synthetic construct
  misc_feature 1..570: note = Description of Artificial Sequence: Synthetic coding sequence
  source 1..570: mol_type = other DNA
atggctgcggaacccgtagaagacaattgtattaacttcgtggctatgaaatttatagacaacaccctgtatttcatcgagaatttggagtccgactacttcggcaaattggagagcaagctgtctgtgattcggaacctcaacgatcaggtgctttttatcgatcagggtaatcgtcctctctttgaggatatgacagatagcgactgcagagacaacgctccacgcacgatttttatcatttctatgtataaagattcacaacctagaggaatggcagtgactataagtgtgaaatgtgaaaagataagtaccttgtcatgcgaaaataaaatcatctcatttaaggaaatgaaccccccagacaacatcaaggacactaaaagtgatattatcttttttcagaggtccgtgccaggtcacgataacaagatgcagtttgagtcctcttcttacgagggctatttcctggcttgtgaaaaagaaagagatttgtttaaactaattctaaaaaaggaggacgaacttggagacagaagcatcatgttcaccgttcagaacgaggattag

SEQ ID NO: 29136 - DNA, 582 bp, synthetic construct
  misc_feature 1..582: note = Description of Artificial Sequence: Synthetic coding sequence
  source 1..582: mol_type = other DNA
atggcagccgaaccggtagaagacaattgcattaattttgtggcaatgaagttcattgacaacacactatattttattgcagaagatgacgagaatctggagtccgactatttcggtaaactggaaagcaaactatcagtcatccggaacttgaatgatcaggtcctgtttatagaccagggcaatcgacctttgttcgaggacatgaccgacagcgattgtagagacaacgcaccacgcaccatcttcataatctcgatgtataaagactcccagccccgaggtatggccgtcacaatctctgtcaagtgtgaaaagatatctacattgagttgcgagaataagatcattagcttcaaagagatgaatcctcctgataatataaaagataccaaatccgacatcattttttttcagaggtccgtgcctggccacgataacaagatgcaatttgaatcctcctcttacgaggggtacttcctcgcttgcgagaaggagcgtgacttattcaaactgattcttaaaaaggaagacgaactgggggacaggtcaatcatgtttacagtccagaacgaggactag

SEQ ID NO: 29137 - DNA, 1782 bp, synthetic construct
  misc_feature 1..1782: note = Description of Artificial Sequence: Synthetic coding sequence
  source 1..1782: mol_type = other DNA
atggagacccctccactcccacctgcgtgtaccaaacagggacaccagaaacccctcgacagcaaggatgacaatacggagaagcattgccccgttaccgttaacccatggcatatgaaaaaggcgtttaaagtgatgaacgagttacgatcacagaatctcttgtgcgatgtgacgattgtggctgaggacatggaaatcagcgcccatcgcgtcgtcctagctgcttgctcaccttacttccacgccatgtttaccggcgagatgtcagaaagtcgcgcaaaaagggtccgcattaaggaggttgacggttggactctccggatgctcatcgactatgtgtacactgccgagatccaagtaaccgaggagaatgttcaggtccttcttcccgctgccggactcttacaactgcaggatgtaaagaaaacatgctgcgagttccttgagtcccaactgcacccagtgaactgtctgggaatacgtgccttcgccgacatgcatgcttgtactgacctgctgaataaagccaacacctacgccgagcagcatttcgccgatgtcgtgctgtcggaggagttcctgaatctcgggattgaacaggtgtgtagcctgatttccagtgataagctgacaattagctcggaggaaaaagttttcgaggctgttattgcttgggtcaatcatgacaaagacgttcgccaggaatttatggctagactcatggagcatgtccgcctacccctgctgcccagagagtacttagtgcagagggtagaggaagaggctctcgtgaagaacagcagtgcctgtaaagattacctgatcgaagctatgaagtaccacctgttaccaacagagcagaggatcttgatgaagtcggtgagaacacggttgagaacacctatgaatttgcctaaactaatggtggttgtgggcggtcaggctcccaaggctatccgtagcgtggaatgctatgattttaaggaagagcgctggcatcaggtcgctgagctgccgtcacggaggtgtagagccggtatggtgtacatggctggtctggtgttcgcggtggggggtttcaacgggagtttgcgagtgcgaactgttgacagctacgatccagtgaaagaccagtggacatccgtggccaacatgagagaccggaggagcaccctcggtgccgcagtcctaaatgggctgctgtatgcggtagggggattcgatggcagcaccggactgtcctccgtggaggcctacaacatcaagagcaatgagtggtttcacgtggctccaatgaacactagacgatccagtgttggggtgggcgtggtgggcggactgctgtacgcagtcgggggatacgacggagcttctaggcagtgtctatcaacagtagagtgttacaatgccaccactaatgagtggacctacattgcagagatgtccactcgcagaagcggcgcaggagtgggggtacttaacaatctgctgtacgctgtgggcggacatgatggccctttagttcgcaagtccgttgaagtgtatgatccgactactaatgcctggagacaggttgccgatatgaatatgtgcaggaggaatgctggggtctgcgccgtcaatggcctactgtacgtggtgggaggcgatgacgggtcttgtaatctggcaagcgtggagtactataatcctaccacagacaagtggactgtggtgagctcgtgcatgtccacaggcagatcctacgcgggagtgacggttatcgacaagcccttatag

SEQ ID NO: 29138 - DNA, 1131 bp, synthetic construct
  misc_feature 1..1131: note = Description of Artificial Sequence: Synthetic coding sequence
  source 1..1131: mol_type = other DNA
atgaaagagaatgtcgctagtgccactgtttttacgctgctgctgtttttaaacacttgtctcctcaatggtcagcttcctccgggaaagccagagatttttaagtgtcgctcccctaacaaggaaaccttcacatgttggtggagaccaggcaccgacggagggttacctactaactacagcctcacataccaccgggagggagagacactgatgcacgaatgtcctgactacatcaccgggggacccaatagttgtcacttcggcaagcagtacaccagtatgtggagaacttacatcatgatggttaacgctacaaaccagatggggtccagcttctctgatgagctctacgtggacgtgacctacattgtccagccagaccctccccttgagctggcagtggaagtgaagcagccagaagacaggaagccctacctatggatcaagtggagtccacctacgctgatcgatttaaagaccggatggtttactctgctatatgagattcgactcaagccagagaaagcagccgaatgggaaatacatttcgcagggcagcagaccgagttcaaaatattgagcctccatcctggccagaaatatcttgtccaggtgcgatgcaaacccgaccatgggtactggagcgcgtggtctcccgcaacatttattcagattccgtccgactttacaatgaacgacacgacagtgtggatctctgttgcggttctcagcgcagtcatctgcctgataatagtctgggctgtcgccctcaagggctatagtatggtgacttgtatctttcctccagtaccgggtccaaagatcaagggctttgacgcccacctgcttgagaagggaaagtccgaggaactgctctctgcactcggctgccaagatttcccacccacatcagattatgaggatcttctggtggaatatctggaggtggatgattctgaggaccaacaccttatgtccgtgcattccaaggagcacccaagtcagggcgatcccctgatgcttggagcttctcattacaagaacctgaaaagctacaggccgaggaagattagtagtcaaggccgtctggctgtttttaccaaggctacactcacaacagtccagtag

SEQ ID NO: 29139 - DNA, 414 bp, synthetic construct
  misc_feature 1..414: note = Description of Artificial Sequence: Synthetic coding sequence
  source 1..414: mol_type = other DNA
atgggcctgacgagccagctcctaccaccccttttttttctgcttgcctgtgccggaaattttgtgcatgggcacaagtgtgacatcactctgcaggagattatcaaaactctgaactctctgacagaacagaagaatactaccgaaaaggaaacattttgtcgtgcagccacagtgctacgacagttctacagccaccacgagaaggacactcggtgcctgggcgctactgctcagcaattccataggcacaagcagctgatcaggtttctcaaaaggctggataggaacctgtggggtttagctggactgaattcatgccccgtcaaggaagccaaccagtcaaccttggaaaacttcctggagagattgaagacaatcatgagggagaagtactccaaatgttctagctag

SEQ ID NO: 29140 - DNA, 639 bp, synthetic construct
  misc_feature 1..639: note = Description of Artificial Sequence: Synthetic coding sequence
  source 1..639: mol_type = other DNA
atgaatagtttttccacatcggcatttggacctgtggccttcagcctgggcctgctccttgtcctccctgccgcattccccgctcccgtgcctccaggggaggactctaaagatgtggcggctccccataggcagcccctgacatcatccgagcgcatcgacaagcagatccggtacatcctggatgggatatctgcattgcgaaaggagacatgtaataagagcaacatgtgtgaatcatccaaagaggctctggccgagaacaatctgaacctccctaaaatggccgaaaaggacggttgttttcagtcaggctttaatgaagaaacctgcttagtgaagataatcaccggactgctggaatttgaagtttatctggagtacctgcagaatcggtttgaaagctctgaggaacaggcgagagctgtgcagatgagtaccaaggttcttatacagttcctgcagaaaaaagcgaaaaatttagacgcgattaccacacccgaccccacgaccaatgccagcctgttgacaaaactccaggcccagaaccagtggctccaggacatgacaacgcacctgatactccggagctttaaagaatttcttcaatcgtcactccgggcacttcgacaaatgtag

SEQ ID NO: 29141 - DNA, 369 bp, synthetic construct
  misc_feature 1..369: note = Description of Artificial Sequence: Synthetic coding sequence
  source 1..369: mol_type = other DNA
atgtgtgaatcctctaaggaggcactggccgaaaataacctgaatctccccaagatggctgaaaaagacgggtgctttcagtccggttttaatgaagagacttgtctggtaaaaataattacgggcttgctcgaattcgaggtatatctggaatacctgcaaaaccggtttgaaagtagcgaggagcaggccagagctgtacagatgtccactaaggtcctgatccaattcctccagaagaaggtgggtgtaagtagcttcccccagttaggggttggtgaggacagattaaaggattccgtacttgacaatagcgggatgcagtgtcattttcagaagaggaggctgcatgttaataagcgtgtatag

SEQ ID NO: 29142 - DNA, 639 bp, synthetic construct
  misc_feature 1..639: note = Description of Artificial Sequence: Synthetic coding sequence
  source 1..639: mol_type = other DNA
atgaatagcttctccaccagcgcttttggtcctgtggccttttcactcggcctgctgttggttttgccggcagcctttcccgctccagtgcctcctggagaagacagcaaggacgtggccgcacctcataggcaaccgttaacgagttcggagcggatagacaaacagatacgttatatactcgatggcatttcggctctacggaaggagacctgcaacaaaagcaatatgtgcgaaagttcaaaggaagccctggcagaaaataacttgaatctccccaagatggccgaaaaagatggctgttttcaatcaggattcaacgaagagacctgcctggttaaaatcatcaccggtctgctagaatttgaggtttacctggagtacctacagaacagatttgagtcttccgaagagcaagccagggcggtgcagatgtccactaaggtgttaatccagtttttacagaagaaagcaaaaaacctggatgcaataactacccccgacccaacaacaaacgccagccttttaaccaagttacaggcccagaatcagtggctgcaggacatgacgacacacctgattttacgcagttttaaagagtttctgcagagttcgctgagggccctgcgccagatgtag

SEQ ID NO: 29143 - DNA, 597 bp, synthetic construct
  misc_feature 1..597: note = Description of Artificial Sequence: Synthetic coding sequence
  source 1..597: mol_type = other DNA
atgaactccttctctacaagcgccttcggaccggtcgccttctctttaggattgctcctggtgttgcccgcagccttccctgctccagtcccaccaggcgaggacagcaaggacgtggcagccccacatagacagcccctcacttcatctgagcggatagacaagcagatccggtatatcctggatggaatttccgctcttcggaaggagacgtgtaacaaaagcaacatgtgtgaatcctcgaaagaggccctggccgagaacaatctgaacctgcccaaaatggcagaaaaggatggctgttttcaaagcggcttcaatgaagagacttgtttggtgaagatcatcaccggcctgctggagttcgaagtatatctcgagtatcttcagaacaggtttgagtcctccgaggaacaggcccgtgctgttcaaatgtctacaaaggtgctcatacaattcctacagaaaaaggtgggcgtgtcctccttcccccaactgggcgttggcgaagataggcttaaagactccgtcctggacaattccggcatgcaatgtcattttcagaagagacgcctccacgtcaacaaaagggtgtag

SEQ ID NO: 29144 - DNA, 759 bp, synthetic construct
  misc_feature 1..759: note = Description of Artificial Sequence: Synthetic coding sequence
  source 1..759: mol_type = other DNA
atgaactccttctcaaccagcaagtgccgaaagtccctcgcactggaattgcctgctgcggtggaaccgtgtgtaagggagggatgtgtggcacaaggaggtctagccggtggtcagcagcagagacaggccccatcatgtgctgtcagtagtccactgcggagcctaccctcgggtactggggcttttggccctgtagccttttcccttgggctgttactcgtccttcctgccgcttttcctgctcctgtgcccccaggtgaggacagcaaggatgtagccgctccacatagacagccactgaccagcagtgagcgtatcgataagcagatccggtacattttggatggaatcagtgcccttcgcaaggagacatgcaacaaaagtaacatgtgtgaaagttccaaagaggcactagctgagaacaaccttaacctgcccaaaatggcagagaaggatggctgtttccagtccggcttcaatgaggagacctgtcttgttaagatcataacaggccttttggaatttgaagtgtaccttgagtatttacagaataggttcgagtcgagcgaggaacaggctcgggcagtgcagatgtcgacaaaggtgcttattcagtttttgcagaagaaagtgggcgtgtcttccttcccccagttgggggttggagaagaccgtcttaaagatagtgttctggacaactctgggatgcagtgtcacttccagaaaaggagactgcacgtgaacaagcgcgtatag

SEQ ID NO: 29145 - DNA, 459 bp, synthetic construct
  misc_feature 1..459: note = Description of Artificial Sequence: Synthetic coding sequence
  source 1..459: mol_type = other DNA
atgaactcctttagcacctctgcttttgggccagtagccttttcccttgggctgctccttgtcctacccgcagcctttccagctccagtccctcccggtgaggacagtaaggacgtggccgctcctcataggcaacctctcacaagtagcgagaggattgataagcagattcgctatatcctcgatggtatcagtgccttgcgcaaggaaacctgtaataagagcaacatgtgcgagagttccaaagaagccctcgcagagaataaccttaaccttcccaagatggcagagaaagacggttgcttccaaagtggcttcaacgaagagacctgtctggtgaaaataattaccgggctgctggaattcgaggtgtacctggagtatctgcagaacaggtttgaatcatctgaggagcaggcacgcgctgtgcagatgtcaaccaaagttctaattcagtag

SEQ ID NO: 29146 - DNA, 300 bp, synthetic construct
  misc_feature 1..300: note = Description of Artificial Sequence: Synthetic coding sequence
  source 1..300: mol_type = other DNA
atgacatccaagttggctgtggcactgttagctgccttcctcatttccgctgctctgtgtgagggtgctgtgttacctagaagtgccaaggaattacgatgtcagtgcattaaaacatacagcaagcctttccaccccaaattcatcaaagaactgcgagtgatagaatcaggtcctcactgcgcaaacaccgagattattgtgaagctgtccgatggcagggaactctgcctagatccaaaagaaaactgggttcagagggttgttgaaaaatttttgaagagagcggaaaactcttag

SEQ ID NO: 29147 - DNA, 2139 bp, synthetic construct
  misc_feature 1..2139: note = Description of Artificial Sequence: Synthetic coding sequence
  source 1..2139: mol_type = other DNA
atggccggaggaccagggccaggcgaacccgcagccccaggggctcagcatttcttgtacgaggtcccaccttgggtaatgtgcagattttacaaggtaatggacgcattggaaccagctgactggtgccagttcgccgctctgatagtccgggatcagacggagctgcgactttgtgaaagatcaggacagaggacagcatctgttctctggccgtggataaaccgcaatgctcgggttgccgatctggtgcatatcttaactcacttacagttgctccgtgctcgcgacatcataaccgcctggcatcccccagcaccacttccaagtcctgggaccactgccccaagacctagctcgattcccgctcctgctgaagctgaagcctggagccccaggaagttgccatcttccgcaagtaccttcctgtctccagccttccctggtagccagacccattctggccctgagttaggactagttccaagccctgcatcgctatggccacctccaccgtccccagctcctagtagtactaaacccggtcctgaatctagcgtgtccctgttgcagggggctcgcccatttccattctgctggcccctatgcgagatatccagaggcacccacaatttttcagaggaacttaaaattggagagggcggtttcggctgcgtgtaccgcgctgtgatgcggaacacggtgtatgctgtgaagaggctgaaggagaacgcagaccttgaatggacggcggtcaagcagtcatttctgacagaagtcgagcaactgtccagatttcgacaccccaacattgtagactttgctggatattgtgcacaaaacggcttctactgccttgtgtacgggttcctgcctaacggcagcctagaggaccgcttgcactgtcagacgcaggcctgtcccccacttagctggccccagcgactggacatcctgctagggacagctcgcgctattcagttcctgcatcaggattcgcctagcttaatccatggagatatcaagtccagcaacgtcctgttggacgaacgcttaacacccaagctaggtgattttggcttggccagatttagcaggttcgccggaagttcaccatcgcagtcctctatggtggcaagaacccaaaccgtgagaggaactctcgcatacctcccagaagagtacatcaagaccgggcgactggccgtggatacagataccttttcttttggtgtcgtcgtgctggagaccctcgcgggacagcgcgctgtgaagacccacggtgccagaaccaagtacctaaaagacctagtggaagaagaagctgaggaggctggagtggccctgagaagcactcaatccacactgcaggcaggcttagccgctgacgcctgggctgccccaatagccatgcagatctacaagaaacacctcgaccccagacccggtccctgtccgccagaactgggactaggcctgggacagctcgcatgctgctgcttgcacagacgcgcaaagcggagaccgcctatgacccaagtgtacgaacgtctggagaagctccaggccgtggttgccggtgttcccggtcactcagaagcggcttcctgcatccccccaagccctcaggagaactcatacgtgagcagcacaggcagagctcattcaggggctgctccatggcagcctctagcggcaccttccggggctagtgctcaggctgctgaacaactgcagcgcggtcccaatcaaccagtggaaagtgacgaatcactgggaggactgtcggctgcactgcgcagttggcacctgacccctagctgtcccttggacccagcaccactgagagaagccggatgcccgcaaggggataccgcaggcgagtcctcatggggctccggccctgggtcccggccaaccgcagtagaggggttagccctgggatcctctgcgtcctccagctcagagccccctcagatcatcattaatcccgcacgccagaaaatggtgcaaaaactggcactgtacgaggacggcgctctagactccctgcaattgctgagctcaagcagcctacccggattgggcctggagcaagatcggcaggggcctgaggaaagtgacgaatttcagagctag

SEQ ID NO: 29148 - DNA, 2082 bp, synthetic construct
  misc_feature 1..2082: note = Description of Artificial Sequence: Synthetic coding sequence
  source 1..2082: mol_type = other DNA
atggcaggagggccaggcccaggcgaacccgctgcccctggggcacagcacttcctctatgaggtccccccatgggtgatgtgcagattctacaaagttatggatgccctggagccagccgattggtgccagtttgggggatggcgcagggcagcaggcggaagggaggctcgtggtctgcttgccccaactccagacgccccacgtcctgcagcagcactcatcgtccgagaccagacggaacttaggctgtgcgagcggtccggacagcgcacagctagcgtactgtggccttggatcaaccgtaatgcccgagtcgccgacttggtccatatactgacccacctgcagcttctgcgcgctagggacatcattactgcgtggcatccccctgctccactgccctcgcccggtaccacagcacctaggccatcatcgatccctgcccctgccgaggcagaggcatggtcaccacgtaaactgccttcctccgcaagtactttcctcagcccagcctttcccggatcgcaaacccactcaggacctgagttagggctggttccatccccagcctctctgtggcctcctccccctagccctgcaccctcttctactaagccaggccctgaatcatctgttagccttctgcagggtgctaggccttttccattctgttggcccctgtgcgagatcagccggggaacacataacttcagcgaagagctcaagatcggcgaaggagggttcggctgcgtgtaccgagccgttatgcgcaatacagtgtatgccgtaaaaaggctgaaggaaaatgccgatttagaatggaccgccgttaagcaaagtttcctgactgaggtggaacaattgagtcggttccgccatcctaacattgtggactttgccggttattgcgcccagaatggcttttactgtctcgtgtacgggtttcttccaaatggtagcctcgaggacagactgcactgccagacccaagcgtgccctccgctgtcctggcctcagaggttagatattctgttaggaacagcccgagcaattcagttcctgcatcaggattcacctagcttaattcacggagacatcaagtctagcaacgtactgttggatgagaggttgacacctaaactgggggatttcggacttgcgagattttcccggtttgccggtagtagcccgagtcaatcttcaatggttgcgagaactcagactgtgcggggaaccctggcctacctgccagaggagtacatcaagactggacggctcgctgtggacaccgatacgttcagctttggagtggtcgttctggagactctggccggtcagcgcgcagtgaaaacccacggagcacgtacaaaatatctgaaggacctcgttgaggaggaggcggaggaagccggtgtggcactcagaagtacccagagtacactccaggccggtctggctgcggatgcttgggcagctcctatcgcgatgcagatctataaaaagcatctaggacaactggcctgttgctgcctgcacagacgtgctaagcggaggcctcccatgacccaggagaatagctatgttagttcgacggggcgtgcacactccggcgcagctccttggcagcccctcgcagcaccctcaggggcatctgcacaagcagccgagcagcttcaacgcggtccgaaccagcctgtcgagtctgacgagtcactcggcggactgtctgccgcactgaggtcctggcacctgacccctagttgccctttggaccccgctcctttgagagaggccggttgcccgcagggagatactgctggtgagagttcatgggggagtggaccagggagccgtcccaccgctgtcgaggggttggctctcggcagttcggcctcctccagttctgaaccaccacagatcatcatcaacccagccaggcagaagatggtgcagaagctagcactttatgaggacggcgctcttgactcactacagctgctgagttccagcagcttgccagggcttggactggagcaggaccgtcagggaccggaagagagcgacgagttccaatcctag

SEQ ID NO: 29149 - DNA, 2049 bp, synthetic construct
  misc_feature 1..2049: note = Description of Artificial Sequence: Synthetic coding sequence
  source 1..2049: mol_type = other DNA
atggcgggagggccaggcccaggggagcccgctgcccctggggcacagcacttcctgtatgaagtgccaccttgggtcatgtgccgcttttacaaagtcatggatgccctcgagcctgctgattggtgccagttcgccgcactaattgttcgtgaccagaccgaactgcgcttgtgcgagcgcagcggacagagaacagcttccgtgctgtggccttggataaacaggaacgccagagtggccgatcttgtgcatatcctgacacacctacagttgctgagggccagggatatcatcaccgcctggcatccccctgcaccacttccttcccccggtactactgcaccacgtccgagttccattccagcccctgctgaggccgaggcatggtctccacggaagctgccctcatccgccagcacatttctgtctcccgcattccccggttctcagacacattccggacctgagcttggactagtgccctcgcctgctagcctatggcctcctccaccttctcctgcgccatccagtacaaagcctggccctgaatcctcggtgagtttactgcaaggtgccagaccctttccgttttgttggccactgtgcgaaatctcacgcggtacccataatttcagcgaggagctgaagattggtgagggcggttttggctgcgtttatagagccgtcatgcgcaacacggtgtacgcagtgaagaggctgaaagaaaacgccgacctcgaatggaccgcggtgaaacaaagcttccttacagaggtggaacaattatcccgctttaggcaccctaacatcgtggattttgccggatactgcgcgcagaatggcttctattgtctggtttatgggtttcttcctaacggcagtctcgaggatcgtttacactgtcagacgcaggcttgtcccccattgagctggcctcagcgcttagatatcctgctcggcaccgcaagagcaattcagttccttcaccaggacagcccgtcacttatccacggcgatatcaagtcgagcaatgtacttcttgacgagcggctgactcccaagttgggggactttggtctggccaggtttagccgctttgcagggtcgagcccgagccagagcagcatggtcgctcgtacccagacagtgagaggcacactggcttacttgcctgaagaatacattaagactgggagactcgcggttgacacggacaccttcagtttcggtgttgtggtactagagaccctggccggtcagagggccgtgaagacacacggagcgaggaccaaatatcttaaagaccttgtcgaagaggaagccgaagaagccggagtggcacttagaagcacccaaagcaccttacaagcgggactggcagctgatgcatgggcagcacccatcgctatgcagatttacaagaagcatctcgacccccgacccggaccctgtccacccgagctcggcctgggcttgggccaacttgcatgttgttgcctacacaggcgtgccaaaaggcgtccaccaatgacacaagaaaactcgtacgtatcttccacggggagggcccactcaggtgccgctccatggcaacccttagctgcgccatcaggtgcttcagcccaggccgcagagcaactgcagagggggcctaaccagcctgtggagagtgacgaaagtctcggaggcttgagcgcggcactccgctcatggcatctgaccccctcatgtcccctggaccccgctcctttacgcgaggcaggctgcccacagggcgatacagccggagaaagctcttggggtagcggccctggctcccgtccgacagcagtggagggcctggcactagggagttccgcctcctctagcagcgagcccccacagatcataataaaccccgctcgccagaagatggtccagaagttggcactgtatgaggacggcgctctggattcactgcagctcttaagttcctccagcctgccaggcctcggacttgagcaagatcggcaggggccagaggagtccgatgagtttcagagttag

SEQ ID NO: 29150 - DNA, 2127 bp, synthetic construct
  misc_feature 1..2127: note = Description of Artificial Sequence: Synthetic coding sequence
  source 1..2127: mol_type = other DNA
atggctggtggccctggacccggagaaccggcagcccctggcgctcagcactttttgtacgaagtgcccccttgggtcatgtgccgcttctataaagtaatggacgctttggaacctgccgactggtgccaattcggcggttggaggagagctgccggaggccgagaggccagaggactcctggcgcctacccccgatgctcctcggccagctgctgccctcattgttcgagatcaaacggaacttagactgtgcgagcgctcaggacagcgcaccgcttcagtgttgtggccctggattaaccgaaatgctcgggtggcagacctggtccacatcctcacacatctgcagcttctgcgggcacgagacataataacagcatggcaccctccagcccctttgccttcaccaggtaccacggcccctagaccaagttccatccctgctccagcggaagcagaagcttggtccccacggaagttgccaagttcagcttcaaccttcctcagccctgcctttccaggcagtcagacccactccggtccagaactgggcctcgtgcccagcccggctagcctgtggcccccacctccttcccctgcaccgtctagcaccaagccgggacccgagtcttcggtgagtctgttgcagggtgccagaccatttcctttttgctggcctctgtgtgaaattagccggggaacacacaattttagcgaggaactgaagattggtgaggggggattcggatgcgtgtacagagccgttatgagaaacacagtgtacgcggtgaagaggctcaaagaaaacgcagaccttgaatggacagcggtaaagcaaagttttctgaccgaagttgaacagctgtctcgtttcagacatcctaacatagtggacttcgccggttattgtgcccagaacgggttttactgtctcgtctatggcttcctccctaatggatcactggaggaccgcttacactgccagactcaagcttgtcccccactgtcctggccgcagagactagacattctgctcgggacagctcgtgctatccagttccttcaccaggattccccatccctcatccacggcgacattaagagtagtaacgtgctgctagatgaaagactgactccgaaactgggtgattttggtcttgctagattttcaaggtttgcgggatccagtccctcccagtccagtatggtcgctcgcacccagaccgtgcggggaaccctggcctacctgccggaggagtacattaagacgggcagactagctgtggataccgacaccttcagctttggcgtggtcgtgctggaaacactggccggtcagcgagccgtgaagacccatggggctcgcactaagtatttaaaagacttggttgaagaggaagctgaggaggccggagtcgccctcaggagcacccagtccacattgcaagcgggacttgcagccgacgcatgggcggctcccatcgccatgcagatctataaaaagcatttggaccctagacctggaccctgcccgcctgagctcgggctggggctgggacagttagcttgttgttgccttcatcgaagggcaaagagacggcctcccatgacacaggagaactcatacgtcagctcaaccggcagggcccactcaggcgctgctccatggcaaccgctagctgcccctagcggcgcaagcgcgcaagcagctgaacaacttcagcgcggtcccaatcagcccgtggaatctgacgagtctttaggtggactaagcgcggctctcaggtcatggcacttgaccccgtcctgcccgctggatcccgcacctctccgggaagccggatgccctcaaggggacacagccggagagtcctcatggggatctgggccaggttcacgacctaccgcagtggagggtctggcactaggctcttctgcatctagcagctccgagccccctcagattattattaatcctgccagacagaaaatggtgcaaaagctggcgctgtacgaagatggagctctggactccctgcagctgctgagtagtagctctctcccaggactgggattggagcaggaccgacaggggcctgaagagagcgacgaattccaatcttag

SEQ ID NO: 29151 - DNA, 1902 bp, synthetic construct
  misc_feature 1..1902: note = Description of Artificial Sequence: Synthetic coding sequence
  source 1..1902: mol_type = other DNA
atggccggtggccctgggccaggcgagcccgctgcccctggggctcagcacttcctctacgaggtaccaccttgggtaatgtgtaggttttacaaagtgatggacgccctcgaacccgcagactggtgccaatttgctgccctgattgtacgggatcagacagagctccgcctgtgcgaacgaagcgggcagcggacagctagcgtactttggccctggatcaatagaaatgctcgcgtagctgacctggtccatatcttaacacatctgcagctcctgcgcgcaagggacattatcacagcatggcatccccctgcaccccttcctagtcccggaacgaccgcacccagaccatcaagcattcctgcacctgccgaggccgaggcctggtcgccacgcaaactgccctcatcagcctcaaccttcctgagtccagcatttccgggtagtcagacccacagcggcccagagctgggcctcgtgccctcgcccgctagtctgtggcctccaccaccatcccccgcaccgagttcaacaaagcccggacctgaatcctccgtttcactcctgcagggcgctaggccttttcctttttgttggcctctgtgcgagatctcccgagggacccataatttcagcgaggagctcaaaatcggagagggcggttttgggtgcgtttatcgggcagtgatgaggaatactgtttacgccgtgaaaagactgaaggagaacgccgatctagaatggacagcggtgaagcagtctttcctgactgaagtggaacagctcagtcgcttccggcaccctaacatcgttgattttgcaggctactgtgcccagaacggattctattgtttggtctacggttttctgcctaacggaagccttgaagataggttgcattgtcagacccaggcatgcccccctcttagttggcctcagcggctggatatcttactgggtacagcccgagccatccagtttctacaccaggattcaccaagtttgattcatggcgacatcaagtcctccaacgttctgttggacgagcgtctgactccaaaattaggggattttggccttgccagattttcacggtttgcgggaagtagtccgtcccagtcctcaatggtcgccagaactcaaacagttaggggaacgctggcatacctgccagaagaatacattaagactgggaggctggccgtggatacagacacattttccttcggcgtggtggtgctcgagacccttgcgggacaacgagctgtgaagactcacggagcgagaacgaagtacctcgtatatgaacggctcgagaagttgcaagctgtcgtcgcgggagtcccaggccactctgaggcagcctcatgtattccgcctagccctcaagaaaattcatatgtgagctccaccggcagagcacactccggagccgctccttggcagccgcttgcggctccttctggtgcctctgcccaggccgctgagcagctgcagcgcggacccaatcagccagttgaatcagatgagtccctgggcggactgtccgcagcgctgcgctcctggcacctgacaccctcgtgccctctggatcccgctcctctgcgtgaggccggttgtccacagggggacacagccggagaaagttcatggggctccggacctggcagtcgaccaaccgccgtcgaaggcctggccttgggctcaagcgcgtcttcttcttccgaaccaccacagattatcatcaacccagccaggcaaaaaatggtccagaagctagctctgtatgaggacggcgctctcgactctcttcagctgctgagctcgagctcactcccaggtttggggttggagcaggatcgccaaggcccagaggagtcagatgagtttcagtcatag

SEQ ID NO: 29152 - DNA, 1245 bp, synthetic construct
  misc_feature 1..1245: note = Description of Artificial Sequence: Synthetic coding sequence
  source 1..1245: mol_type = other DNA
atgagcaaaaagattagcggcggatctgttgtagagatgcagggggatgagatgacccggataatctgggagctgataaaagagaagcttatcttcccatatgttgaactcgacctacactcttacgatctgggcatcgaaaacagggacgctacaaatgatcaggtgacaaaggacgctgctgaggcgattaagaaacataacgttggcgtgaaatgcgctacaattacccccgatgagaaacgggttgaagagttcaagctgaagcagatgtggaagagcccgaatggtaccatacggaacatcttagggggaacagtgttcagagaagccatcatttgcaaaaacataccaaggttggtgtcaggctgggtgaagccaatcattataggcaggcacgcatacggcgatcaatacagggcaaccgattttgtcgtccccggacctgggaaagttgagattacatatactccaagcgacggtacccagaaggtcacttacctggtccacaatttcgaagaaggagggggagtcgctatgggcatgtacaaccaagacaaaagtattgaagacttcgcccactcttccttccagatggccctgtcaaaaggatggcctctttatctcagcaccaagaacacaatactgaagaagtacgatggcagatttaaagatatatttcaggagatctatgataagcagtataaaagccaatttgaggcccagaagatctggtatgaacacaggttaatcgacgacatggtggcccaggctatgaagagtgaaggcggtttcatttgggcttgtaagaattacgatggggacgtgcagtccgactctgtcgcccagggttacgggtccctgggaatgatgaccagcgttttagtgtgtccggacggaaaaactgtcgaagccgaagccgcacacggaactgttactcgccactacagaatgtatcaaaaggggcaggaaacctctaccaatcccattgcatcaatttttgcctggacccgtggacttgctcaccgcgctaagctggacaacaacaaagagctggctttcttcgctaatgccctggaggaggtttcaatcgaaaccatagaagctggatttatgaccaaagatttggctgcctgcattaaaggcctgcccaacgtgcaacggtctgactacctgaacacattcgagttcatggataaattaggagaaaacctcaagatcaaactggcccaagctaaattgtag

SEQ ID NO: 29153 - DNA, 474 bp, synthetic construct
  misc_feature 1..474: note = Description of Artificial Sequence: Synthetic coding sequence
  source 1..474: mol_type = other DNA
atgagtaagaaaatcagcgggggtagcgtggttgaaatgcagggggacgagatgacgcgcattatctgggaacttatcaaggaaaagttgatctttccctatgtagaactggacctgcattcctacgacctcgggatcgaaaatcgcgacgcaacaaatgaccaggtgaccaaggacgcagccgaagcaattaaaaagcacaacgttggagtgaaatgcgcgacaattacacctgatgaaaagcgtgtcgaggagttcaagcttaagcagatgtggaaaagccctaatggtaccatcaggaacatactaggaggcaccgtgtttcgtgaagccattatctgtaagaacattcctagactggtctcaggctgggtcaagcccatcatcatcggtagacatgcgtatggcgatcagtacagggccactgacttcgttgttccaggccctggaaaggtggaaattacatacacttag

SEQ ID NO: 29154 - DNA, 1245 bp, synthetic construct
  misc_feature 1..1245: note = Description of Artificial Sequence: Synthetic coding sequence
  source 1..1245: mol_type = other DNA
atgtcaaaaaagatcagcggaggcagcgtggttgagatgcagggtgacgagatgaccagaattatatgggagctcattaaagagaagctcatttttccctatgtggaattggacctgcatagttatgacctcggtatcgaaaacagagacgctactaatgaccaggtcacaaaggacgccgctgaggccatcaagaagcacaatgtgggtgtcaagtgcgcaacaatcacccctgacgagaagcgtgtggaggagtttaagctgaagcaaatgtggaagagtcccaacggcactattcgcaacatactgggaggcactgtgttcagggaggccattatctgcaagaacatcccccgtctcgttagtggctgggtcaaacccatcattattgggaggcatgcatacggtgatcagtaccgcgcaactgatttcgtagtgcccggaccaggcaaggtcgaaataacatatactccaagtgatggaacgcaaaaagtcacctacttagtccacaactttgaagagggcggaggggtcgcgatgggtatgtataatcaggataagagtattgaggattttgcccacagtagctttcagatggcactaagtaaagggtggccactctacctctctacaaagaacactatattgaaaaaatacgatggtcggtttaaagatatcttccaggagatctatgacaagcagtataaaagtcagtttgaagcccagaagatttggtacgagcacaggctgatcgacgacatggtcgcccaggccatgaagtcggaggggggtttcatctgggcctgcaaaaactatgatggtgacgtgcagtctgactccgtagctcagggctacgggtccctaggcatgatgacttcggttttagtgtgccccgacgggaaaacagtggaggccgaggctgcccatggcactgttaccaggcattaccggatgtatcagaaaggccaagaaacatctactaatcctattgctagcatcttcgcctggacccgcggacttgcccatcgggctaagcttgacaataacaaagaattagctttctttgcaaacgccttggaggaggtctctatcgagacgattgaggctggctttatgactaaggacctggccgcatgcatcaaaggactgcccaacgtgcagcgttctgactatctcaacacgtttgagttcatggacaaactgggagagaacctcaagatcaagctcgcgcaagcaaagttgtag

SEQ ID NO: 29155 - DNA, 225 bp, synthetic construct
  misc_feature 1..225: note = Description of Artificial Sequence: Synthetic coding sequence
  source 1..225: mol_type = other DNA
atgtcgaaaaagatttctgggggatcagttgtcgagatgcagggcgacgagatgacacggatcatttgggagctcataaaggagaaactgatatttccatatgtggaactggatctgcacagttacgatctgggcatagagaaccgcgacgccacaaatgaccaagtgactaaagatgctgccgaggccatcaaaaaacataacgtgggcgtgaagtgtgcgtag

SEQ ID NO: 29156 - DNA, 1245 bp, synthetic construct
  misc_feature 1..1245: note = Description of Artificial Sequence: Synthetic coding sequence
  source 1..1245: mol_type = other DNA
atgagcaagaaaatttctggcggtagcgtggtggagatgcagggtgatgagatgacaagaatcatatgggaacttatcaaggaaaagcttatctttccgtacgtggagctggatctgcatagctatgatctgggtatcgagaacagggacgccacaaacgatcaggtgacgaaggacgccgctgaggccatcaagaagcataatgtcggggtaaagtgcgccactattacgcccgatgaaaagcgtgttgaggagtttaaacttaagcagatgtggaaaagtcctaacggaactatcaggaacatcctcgggggtaccgtgttccgggaggcgatcatctgcaaaaacatcccaaggctggtcagtggctgggtcaaaccaatcatcatcggccgacacgcttacggggaccaatatcgggctacagacttcgtggtgcctggtcccggaaaggtggaaataacctacacgccctctgatggcacccagaaggtgacctacttggtccacaactttgaggaggggggaggggtcgccatggggatgtacaaccaggataaatcaatcgaagattttgcccactccagcttccagatggccttaagtaaaggctggcctctatacctaagtactaaaaacacaatattgaagaagtacgatggaagatttaaggacatcttccaagaaatttatgataaacagtacaaaagccagttcgaagcccaaaagatatggtatgaacatagactcatagatgatatggtagctcaggccatgaagtctgagggtggtttcatttgggcctgtaaaaattacgatggggacgtgcaaagcgactccgtcgcccagggatacgggtcactgggaatgatgacatcggtcttagtttgcccagacgggaagactgtggaggccgaggctgcgcacgggacagtcaccaggcactatcgaatgtaccagaagggccaagagacctccacaaatcccatcgcttcgattttcgcctggacaagaggcctggcccatagggcgaaactggacaacaacaaagaattagcattctttgcgaacgcactggaagaggtgtcgatcgagacgatcgaggccggattcatgaccaaggatctggcggcttgcattaaggggctacccaacgtccagaggagcgattatcttaacacgttcgagttcatggacaagctcggcgagaacttaaagatcaaactcgcgcaggccaaattgtag

SEQ ID NO: 29157 - DNA, 189 bp, synthetic construct
  misc_feature 1..189: note = Description of Artificial Sequence: Synthetic coding sequence
  source 1..189: mol_type = other DNA
atgagcaaaaagattagcggcggttccgtcgtcgaaatgcagggggacgagatgaccaggataatctgggaactgatcaaagaaaaactaatattcccatacgtggagctggacctccattcttacgatctgggcattgagaatagggacgctacaaacgatcaggtaaccaaggatgctgccgagtag

SEQ ID NO: 29158 - DNA, 1359 bp, synthetic construct
  misc_feature 1..1359: note = Description of Artificial Sequence: Synthetic coding sequence
  source 1..1359: mol_type = other DNA
atggccggttacctgcgcgtggtgagatctctttgtcgcgcaagcggttcccggccagcttgggcccctgcagccttaaccgccccaaccagtcaagaacagcccagacgccattacgctgacaaacggatcaaggtagctaagcccgtggtggagatggatggagatgaaatgacgcgaatcatttggcagtttataaaagaaaaactaattctgcctcacgtggatattcagcttaaatattttgacttaggactcccgaatcgcgaccagacagacgaccaggtaaccatagactccgccctcgctacacagaagtattctgtggctgtaaagtgtgccacaatcacccctgacgaggctcgtgtagaagaatttaagcttaagaagatgtggaaaagtccaaatgggaccatccggaatatactggggggtaccgtgttccgggaacctatcatatgtaagaatatacctaggctcgtccccggttggactaaacctatcacgatcgggagacatgcccacggcgaccagtataaagccacagatttcgtcgctgatcgggctggaacatttaagatggtgttcactcccaaggacggttccggggttaaggagtgggaggtctataattttcccgctggcggagtggggatgggaatgtataacacagacgaaagcatctctggctttgcacacagctgcttccagtacgcaattcagaaaaagtggcctctctacatgtccacaaagaatactattctcaaggcatacgatgggaggttcaaagatatctttcaggaaatctttgataaacactacaaaactgattttgacaaaaataaaatttggtatgagcaccggctaatcgatgacatggtggcccaggtgctcaagagctccggagggtttgtttgggcttgcaaaaattatgatggggatgtgcagtctgatatcctggctcaagggtttggatccttgggactgatgacgagcgtgctggtgtgtcctgacggcaagacaattgaggcagaggctgcccatggaacggtgaccagacactatagagaacatcagaagggcagaccaacctctacaaatcccattgcctcaatctttgcctggactcgcggtctggaacataggggaaaactggacggaaatcaagacctcattcggtttgctcagatgctagagaaagtctgtgttgagaccgtcgagtccggagcgatgactaaagaccttgccggatgcatccacgggctctcaaatgtgaagctcaacgaacattttctgaacactactgattttctggacacaattaaatcaaacctggacagagctctggggagacagtag

SEQ ID NO: 29159 - DNA, 969 bp, synthetic construct
  misc_feature 1..969: note = Description of Artificial Sequence: Synthetic coding sequence
  source 1..969: mol_type = other DNA
atgtggaaatctccaaatggcacaatccgcaacatcttaggcggtaccgttttccgcgagcccatcatctgtaagaacatccccaggctcgtgccaggttggacgaaacctattacaattggaaggcacgctcatggcgatcagtacaaggcgaccgatttcgtagctgatcgcgcaggcacattcaagatggtgttcacaccaaaggacggctctggagtcaaagaatgggaggtctataacttcccagctggcggagtggggatgggaatgtataacaccgatgaatcaataagcgggttcgctcatagttgcttccagtacgctatccagaagaaatggcccctctacatgagcactaaaaataccattctaaaagcttatgatgggaggttcaaagacatattccaggaaattttcgataagcactataaaacagatttcgataagaacaaaatttggtatgagcatcggttgatcgacgatatggtggctcaagtcctcaaaagctcagggggttttgtgtgggcctgcaagaactatgacggcgatgtccaatccgacattctggcccaggggttcggcagcctggggctgatgacatctgtcctcgtttgtcctgacggcaagacaatagaggccgaagccgcacacggtactgtcactcggcactatcgcgagcatcagaagggtcggcctactagcaccaatccgattgccagcatcttcgcctggactagagggctggagcaccggggaaaacttgacggaaatcaggatctgattcgatttgcccagatgctggagaaagtttgcgtggaaactgtggagagtggcgctatgacaaaagacttagctggatgtatacacgggctctctaatgttaagttgaacgaacactttttgaatactaccgacttccttgacactattaaatctaatctcgaccgggcactcggcagacagtag

SEQ ID NO: 29160 - DNA, 1203 bp, synthetic construct
  misc_feature 1..1203: note = Description of Artificial Sequence: Synthetic coding sequence
  source 1..1203: mol_type = other DNA
atggacggcgacgagatgacacgcattatatggcagtttattaaggagaagctcatcctccctcacgtcgatattcagctgaagtattttgatctgggtctgcctaacagggaccagactgacgatcaggtgaccattgactctgcattagccacccaaaaatatagtgttgctgtgaagtgcgccactatcacaccagacgaagcaagagtcgaggagtttaagttgaagaaaatgtggaagagcccaaatgggactatacggaatatactggggggaactgtgtttcgggagcctatcatttgcaagaatattccaagactggtgcccggatggaccaagccaattaccatcggccgacacgcgcatggggaccagtacaaggctactgacttcgtggccgaccgtgcaggcacttttaagatggtctttacccccaaggacggctctggcgtcaaggagtgggaagtttacaacttccctgctggtggcgtgggaatgggcatgtataataccgacgaatctatctcggggttcgcacattcgtgctttcagtacgctatccagaagaagtggccactatacatgagtacgaagaataccatacttaaagcctacgacggacgcttcaaagacatcttccaggaaattttcgacaaacactacaagacagacttcgataagaataagatttggtacgaacatcggctcatagacgatatggttgcccaggtgctcaagtcatcaggaggcttcgtctgggcttgtaagaactatgacggagacgtgcagagcgacatcctcgctcagggttttgggtctctcgggctcatgacatctgtgctcgtgtgcccagacgggaaaactatcgaagcagaagcagcccatggcactgtgaccaggcactaccgagagcatcagaagggcaggcctactagcacgaaccccatagcgagcatcttcgcttggacccggggtttggaacatagagggaagttggacggaaatcaggacctgattcggtttgcacagatgctggaaaaggtctgcgtggagacagtggagagtggcgctatgacaaaagatttggcgggatgcatacacggactgtctaacgtcaaacttaatgaacactttctcaatactacagactttctcgacacgataaaaagtaatcttgacagggcccttggacggcagtag

SEQ ID NO: 29161 - DNA, 3657 bp, synthetic construct
  misc_feature 1..3657: note = Description of Artificial Sequence: Synthetic coding sequence
  source 1..3657: mol_type = other DNA
atgcgctccccacggacccgaggcagatccggacgacctctgtccctcttactagctttgttgtgtgctctccgggctaaggtgtgcggtgcctctggtcagttcgaacttgaaattctgagcatgcagaatgtgaacggtgagttgcaaaatggtaattgttgcggtggtgcacgtaatcccggtgatcgtaagtgcacccgcgatgaatgcgatacatactttaaggtctgtcttaaggaatatcagagccgggtgactgcagggggtccttgttcttttggttctggctctacgccggtgattggcggtaacacctttaatctgaaggcctcacggggaaatgatcgaaacaggatcgtgctcccattctccttcgcctggcctcgtagttacacactgttagtcgaagcatgggacagttctaatgacactgttcagccggactcaattattgagaaggccagccattccggcatgattaacccctctaggcagtggcaaacactgaaacagaacaccggcgtcgcgcactttgagtaccagataagggttacatgtgacgactattattacggattcggctgcaacaaattttgcaggccccgagatgacttcttcggacactatgcctgcgatcagaatgggaacaagacttgcatggagggctggatgggcccagagtgcaatagggctatctgccgccaggggtgctctccgaagcacgggagctgcaaactgcctggagactgcagatgtcaatatggctggcaaggtctctactgcgataaatgtatcccgcaccctgggtgcgtgcatggcatttgcaacgagccttggcaatgtctgtgtgaaactaattggggtggtcaactgtgcgacaaggatctcaattattgtggtactcatcagccgtgccttaacggaggtacctgttcaaatacaggccctgataagtaccagtgttcgtgccctgaaggctactctggacctaattgcgagattgcggagcatgcctgcctttcagacccatgccacaaccgaggttcatgtaaagagacctcactgggatttgagtgcgagtgctccccagggtggaccgggcctacctgcagtacgaacatagatgattgctcccctaataactgttcccatggaggcacatgtcaggacctggttaacggctttaagtgcgtgtgccctccccaatggacagggaaaacttgtcagttggatgccaatgagtgcgaggctaagccatgtgtgaacgctaaaagctgcaagaacttgatcgcctcatattattgcgattgcttgccagggtggatgggtcaaaactgtgacatcaatatcaacgactgtctcggacagtgccaaaacgatgcctcctgcagggacctggtcaacggataccgatgtatttgtccgccagggtacgctggcgaccactgcgagcgcgacatcgacgaatgtgcctccaacccctgcctgaatggcggacattgtcagaacgaaatcaacagattccaatgtctgtgtcccaccgggttctccggcaacttgtgccaacttgacatcgactactgtgagccaaatccctgccagaacggtgctcagtgctataacagggcttccgactatttttgtaagtgccccgaggattacgagggaaaaaactgcagccatctgaaagatcattgtcgaacaactccctgcgaggttattgattcctgcactgtggccatggctagcaatgacacccctgagggggtcaggtacatttcgtccaacgtgtgcggccctcatgggaagtgcaagagccagtccggcggaaaattcacttgcgattgtaataaaggatttaccggaacctattgccatgaaaacatcaacgattgcgagtccaacccctgcaggaacggaggcacctgcatcgacggcgtgaactcctataaatgcatatgttccgacggttgggagggggcttattgtgaaaccaatatcaacgactgctcacagaatccttgtcacaatggagggacatgtcgcgacctggtgaacgacttctattgcgactgtaaaaacggctggaagggaaagacgtgtcacagccgggattcccagtgcgacgaagctacgtgtaacaacggaggcacttgctacgatgagggcgacgcttttaagtgtatgtgtcctgggggttgggagggtactacttgtaacattgccagaaactctagttgcctgccaaacccgtgccacaatggtggaacttgcgtagttaacggtgagtcctttacttgcgtgtgtaaggaggggtgggagggtccaatttgtgctcagaacactaacgactgctctcctcatccatgctacaatagcgggacctgcgttgacggggataactggtacagatgcgaatgcgctcccggatttgctgggcctgactgccgaatcaacattaacgaatgccagtccagcccctgtgcattcggagcaacttgtgtggacgagattaatggctataggtgcgtatgccccccagggcacagtggagctaaatgtcaggaagtgtctggccgaccgtgcatcacaatgggcagtgttatccccgatggtgcaaaatgggacgacgactgtaatacatgtcagtgtctgaatgggaggattgcttgttcaaaagtctggtgtgggcctcgcccttgtctgctccataagggccactccgaatgccccagcggacagtcatgcatcccaatcctggatgaccagtgtttcgtgcacccatgcacgggagtaggcgaatgccggtcaagctcactccaacccgttaaaacgaaatgcacatcagattcatattatcaagacaactgtgcaaacatcacattcacatttaataaagagatgatgagtccaggcctgacaacggagcatatatgttctgagctgcgaaaccttaatatattaaagaacgtgtcagctgaatactctatttacattgcctgtgaaccatcgccatcagcgaacaatgagatccatgtggccatcagcgcggaagacattagggatgatgggaatcccatcaaagagatcacggataagatcattgatctggtttcgaaaagggacggtaatagttctcttattgctgccgtggctgaagttagggtccaacgtaggccactgaaaaaccggacagacttcttagtcccactgttgtcatcggtgctcaccgtcgcctggatctgctgcctcgtaactgccttttattggtgtttaaggaaaagacgaaaaccgggatcacatacccactctgcaagcgaagataatacaaccaataacgtcagggaacaactaaaccaaatcaaaaacccaattgaaaaacatggtgccaatactgtgcccatcaaggactacgagaataagaattctaagatgagcaagataaggacccacaactccgaggtggaagaggatgatatggacaagcaccagcagaaggctcgcttcgccaaacaaccagcttatacactcgttgaccgcgaggaaaagcctcccaatggaacgccaaccaagcatcccaattggacaaacaaacaggacaatagggacctagagagtgcccagtccctgaaccgcatggaatacattgtctag

SEQ ID NO: 29162 - DNA, 3180 bp, synthetic construct
  misc_feature 1..3180: note = Description of Artificial Sequence: Synthetic coding sequence
  source 1..3180: mol_type = other DNA
atgattaacccaagcagacagtggcaaaccttgaagcagaacacaggtgtggcacacttcgaataccaaattagggttacttgcgacgactattattatggtttcgggtgcaacaagttctgcaggcctagggatgatttcttcggccactatgcatgcgatcagaacgggaacaaaacatgcatggaggggtggatggggccagagtgcaatagagctatttgtaggcaaggttgcagccccaagcacggctcgtgcaagctgccaggtgattgtcgttgccaatatggctggcagggactgtactgtgacaagtgtatcccacacccagggtgtgttcacggcatttgcaacgaaccatggcagtgtctgtgcgaaaccaattggggcggacaactctgtgataaggatctcaactattgtgggacacaccagccatgtctcaacggcggaacttgttctaacacgggacctgataagtaccagtgttcctgccctgaagggtatagcggcccaaactgtgagatagccgaacacgcgtgcctttcagacccatgtcacaatcgcggatcctgcaaagaaaccagcctcggattcgaatgcgagtgctccccgggttggacaggccctacgtgttctaccaacatcgatgactgctcccctaacaactgcagccacgggggaacctgccaggacctggtcaacggttttaaatgcgtgtgcccaccccagtggacgggcaaaacctgccagctggacgccaacgaatgtgaagccaagccctgcgtgaacgcgaagtcgtgcaaaaacctgatcgccagctactattgtgactgtctccccggttggatgggccagaattgcgatataaacatcaatgattgcctgggccagtgccagaacgatgcgtcttgcagggacctcgtgaacgggtaccgctgcatttgtcctcctggctatgccggagaccattgcgaaagggacatcgatgagtgtgcgagtaacccctgtctgaacggcggacattgtcagaacgagattaatcgcttccaatgtctttgccccaccggatttagtggcaatctctgccagctcgacattgactattgtgaaccgaacccatgccaaaatggcgcacaatgttacaatcgagccagtgactacttctgtaagtgtcctgaggactatgaaggaaaaaactgctcccacttgaaagatcattgtagaaccacaccttgcgaagtgattgactcctgcacagtggcaatggcctcgaatgacaccccagaaggagtgcgctacatctccagcaatgtctgtggtccccatgggaagtgcaagtcgcagtctggcggtaagttcacctgtgattgcaacaagggattcactggcacgtactgccatgagaatataaacgattgcgagtcaaacccttgcagaaacggcggaacgtgtatcgatggcgtgaactcctacaaatgtatttgcagtgacggctgggagggcgcatactgtgagaccaatatcaacgactgctctcagaacccttgtcacaacgggggaacctgccgtgacctcgtgaatgacttttactgtgattgtaagaacgggtggaaaggcaagacttgtcatagcagggactcccaatgcgacgaggccacttgcaataatggagggacctgctacgatgagggagacgcattcaagtgcatgtgtcctggaggatgggaaggaacaacgtgtaatatcgccagaaattccagctgccttcccaatccttgccataatggagggacctgcgtggttaacggagaatccttcacatgcgtctgcaaggagggctgggagggtccaatctgtgcccagaacacaaacgactgcagccctcacccttgctataattctggtacctgtgtggacggggacaattggtacaggtgcgaatgcgcacccggttttgcgggacccgactgtcgaatcaacataaatgaatgtcagagctctccatgtgcttttggagccacatgtgtggacgagattaacggttatcggtgcgtatgccccccagggcattccggcgctaaatgtcaagaagtcagtggcagaccatgtattaccatggggtctgtgatacccgacggcgctaaatgggatgatgactgcaatacatgtcagtgcctgaatggtcgcatcgcatgctcaaaggtttggtgtgggcctcgcccttgcctgttgcacaaaggacacagtgagtgcccatcagggcagtcctgtatccctatcttggacgatcagtgttttgtgcacccctgtactggggtaggagagtgtaggtcctcctctctccaaccggtgaagacaaagtgcacctcggacagctattaccaagataattgtgcaaacattacttttactttcaataaagagatgatgtcaccaggcctgacgacggaacacatttgctctgagctaagaaacttgaacattctgaaaaatgtgagcgctgaatactctatctacattgcctgcgagcctagcccaagcgctaataacgagattcatgtggccatctcagcggaagacatccgagatgacggtaatcccattaaggagatcaccgataagattatagatcttgtgtctaaacgagacgggaatagctctctgattgccgctgtggcagaggtaagggtccaaaggcggccactaaagaaccgcaccgattttctagtgcctttactgtccagcgtgctgaccgttgcatggatttgctgccttgtgacagccttttattggtgtctgcgcaaacgcaggaagccaggctcacacacccacagcgcttccgaagacaatacaaccaacaatgtgagagagcagcttaaccagatcaagaacccgatagaaaagcacggtgccaataccgtgcccatcaaggattacgaaaataaaaattctaaaatgagcaaaattcgcactcataactcagaggttgaagaggatgatatggataagcatcagcaaaaagcaaggttcgccaagcagccagcctataccctggtggacagggaggaaaaacctccaaacggaaccccgactaaacacccaaactggacaaacaagcaagataatcgggatctcgaatctgctcaatccctgaacagaatggaatatatcgtctag

SEQ ID NO: 29163 - DNA, 3399 bp, synthetic construct
  misc_feature 1..3399: note = Description of Artificial Sequence: Synthetic coding sequence
  source 1..3399: mol_type = other DNA
atgggtatggcatgtctaactatgacagagatggagggtacatccacaagttcgatctaccaaaacggagatatctcggggaacgctaacagcatgaagcaaatcgatcccgttctgcaggtctatctttaccacagtctgggcaaaagcgaagccgattaccttacttttccatctggagagtatgtggccgaagaaatttgcatcgcagctagtaaggcgtgcggaatcactccagtctaccataacatgtttgccctgatgtctgagacggaaaggatctggtacccccctaaccatgtctttcatatcgatgagagcaccagacacaacgtcttgtatagaattcgcttctacttccccagatggtactgcagcggaagcaatcgggcttacaggcatggcatatcccgcggagctgaggctcccctgctcgatgattttgtcatgtcgtatcttttcgctcaatggagacacgacttcgtgcacggctggatcaaggtccctgtaacacatgagacacaggaagagtgcctcggcatggctgtgctggatatgatgcggatcgcaaaggagaacgatcaaacacctctcgcgatctataactccattagctataaaactttcttacccaaatgtatacgtgctaagatacaggactatcacattttgactcggaaaagaatcaggtatagattccgacggtttattcagcaattctcccaatgcaaagctacagcacgtaacctcaagttgaaatatttaataaatttggaaacactgcagagtgcattttatactgaaaagtttgaggttaaggagcctggttctggtccatctggcgaggaaattttcgcaactatcatcatcaccggcaacggaggaatccagtggagccggggtaagcacaaggagtctgagactcttacggagcaggatttgcagctttactgtgactttcctaacattattgatgtttctatcaaacaagcgaaccaggagggttccaatgaatcaagagttgtaactatacacaagcaagacggcaaaaatctggagatcgagctatctagtttgagggaagctctgtcatttgtgtcattgatagatggttactaccgactgaccgcagacgctcaccattatctttgtaaagaagtcgcccctccagccgttctagagaacattcaatctaactgtcacggccctatatccatggatttcgctatctctaaattgaaaaaggctgggaaccagacaggcctttatgtgctccggtgcagccctaaagacttcaataagtactttcttacttttgcagtggaacgcgaaaacgtcatagaatataaacactgtctcattaccaagaacgagaatgaggagtataatctttccggaacaaagaaaaatttttccagcttaaaagatctattaaattgttaccagatggaaactgtgaggagtgacaatatcattttccagtttaccaagtgttgtccccctaaaccaaaggacaagtctaatctgctggtgtttcggaccaatggcgtatcagacgtgcctacctccccgacactgcagcgccctacacatatgaatcagatggtgtttcataaaatcagaaatgaggatctgatctttaatgagagcttggggcagggaacttttacgaaaatatttaagggcgtgcggagagaagtaggcgattacggccagctccatgagactgaggtcctgctgaaggtcctcgacaaggcacataggaactacagtgagtcattctttgaggccgctagcatgatgtccaaactgtctcacaaacatctcgtgttaaattacggcgtgtgcgtgtgtggggacgaaaatatcctggtgcaggagtttgtgaagttcgggagtctggacacttatctgaaaaaaaacaagaactgcatcaacatactttggaaattagaggttgccaaacagctcgcctgggctatgcacttcctggaggagaacacccttatccatggtaatgtatgcgcaaagaatattctgctgatccgggaagaggataggaaaacgggcaatcccccattcatcaaactgtccgatcctggaatctccatcacggtcctccccaaagacatcctgcaagagaggatcccctgggttcctccagagtgtatagagaaccctaagaacctgaacttggcaaccgacaagtggtctttcggaacaacactatgggagatttgctctggtggcgataagccactcagcgctctcgactctcagcgcaagctccagttttatgaggacaggcatcagctgcctgcccctaagtgggctgaactcgcaaatctgatcaacaattgcatggattatgagcccgacttccgaccatcattccgcgctattataagagacctgaatagcctgttcacccccgactatgagttgttgactgagaacgacatgttgccaaatatgcgaatcggggctttagggttctcgggggcatttgaggaccgtgacccaacccagtttgaagagcgccacttgaagtttttgcagcaactgggaaaggggaactttggctctgtggaaatgtgtcgttatgaccctttgcaggataataccggcgaggtagtggctgttaaaaaattgcagcacagcaccgaagagcacctccgggattttgaacgagaaatcgagatcctcaaatcattgcagcatgataacatcgtgaagtacaaaggcgtctgctactccgccggaagacgaaacctcaaactgatcatggaatatctcccgtatggctctcttcgggattacttgcagaagcacaaggaacgtatcgaccatattaaattgctgcagtacacaagccagatatgtaaaggtatggagtacctcggcaccaaacggtacatccaccgcgacctggccaccagaaacatcctcgttgaaaacgagaatcgggtcaagattggcgattttggcctgaccaaagtcctcccgcaggacaaagaatattacaaagtcaaagagccgggtgagagccccatcttctggtatgctcctgagtcccttaccgagtctaaattttccgttgccagtgacgtgtggtcgtttggggtggtcctgtatgagctgttcacctacatcgagaaatctaagtccccacctgctgaattcatgcggatgattggcaacgataagcagggccaaatgattgtgttccatcttatcgaattgttgaaaaacaacggcagattaccacgacccgatggttgtcccgacgagatctacatgattatgaccgagtgttggaataacaatgtgaaccagaggccatcatttagagacctggcccttcgggtggaccagatcagggacaacatggcgggatag

SEQ ID NO: 29164 - DNA, 3399 bp, synthetic construct
  misc_feature 1..3399: note = Description of Artificial Sequence: Synthetic coding sequence
  source 1..3399: mol_type = other DNA
atgggcatggcttgtctgaccatgacggagatggagggcacctccacctcttctatttatcagaacggtgacatctcggggaatgccaacagtatgaagcagatcgatcccgttctgcaggtgtacctgtatcatagccttggaaaaagtgaagctgactacctgacgttccccagcggtgagtacgtcgctgaggagatttgcatcgcggctagtaaagcatgtgggattactcctgtttaccacaacatgttcgccttgatgagtgagactgagcgaatttggtatccacctaaccacgttttccacatcgacgagagcacgagacataacgtgctctacaggataagattttactttccgaggtggtattgctctggctccaatcgggcatataggcacgggatttcacgaggagcagaagcacctctgctggacgattttgtcatgtcctacctgttcgcccaatggaggcatgactttgtgcacggctggattaaggtcccagttacacacgaaactcaggaagagtgtctggggatggcggtgttagacatgatgaggatcgcgaaggagaacgatcagacccccttagccatctataactcaatatcgtataagacttttctgccgaagtgcattcgcgcaaagattcaggactaccatatcctcacacggaaacgcatccgctacaggttccggagattcattcaacagttttcccagtgcaaggcgacagccaggaatctcaaattgaaatacctgattaatctggagacacttcaaagcgccttttataccgaaaagtttgaggtgaaagaacctgggtctggcccaagcggcgaagagatttttgccacaataattatcacaggcaatgggggtattcaatggagccgcggaaagcacaaggagagcgagactctgacagagcaggacttgcagctgtactgcgattttccgaacataattgacgtgtcaattaaacaggcaaatcaggaagggagtaacgagtctcgagtggtcacgatccataagcaggacggcaagaacctagagatagagctatcatccttgcgggaggccctgagcttcgtttcccttattgatggttattaccgactgacggctgatgcccatcactacctgtgtaaagaggtggcgccaccggcagtgttagaaaacattcaatctaattgccacggaccaattagcatggactttgccatatcaaagctgaagaaggcgggtaaccagacaggtttgtacgttctgcgctgctccccaaaagatttcaataagtatttcctcacgtttgccgtggaaagagaaaatgtaattgaatacaagcactgcctaatcactaaaaacgagaacgaagagtacaatctttcaggcacgaaaaagaacttttccagcctgaaggatctcctgaattgctatcagatggagacagtgcgcagtgataatataatctttcagtttactaagtgctgcccccctaaacctaaggataagtccaacttactggtgttcaggacgaacggggtgtcagatgtccctacatctccaactctgcagaggcctacccacatgaatcagatggtgtttcacaagatcagaaatgaggacctgatctttaatgagagccttgggcaggggacctttaccaagattttcaagggagtgaggagggaagtaggcgattatggtcaacttcatgagacagaggttctgctcaaggtgctcgataaagcacatcggaattattctgaatctttctttgaggctgcttctatgatgagcaaactgtcccacaagcatctggtgctgaattatggcgtgtgtgtgtgcggtgacgagaacattctggtgcaagaatttgtgaagttcggctcactcgatacatacctgaagaaaaacaaaaactgtataaacatcctatggaaactcgaggtggccaagcagcttgcttgggcaatgcactttctggaagaaaacactctcatccacggaaacgtctgtgccaagaatatactgcttatcagagaggaggataggaagacaggcaatcctcccttcatcaagctgtccgatcccggaatcagcatcactgtgctccccaaagacatactccaagagagaattccatgggttccacccgagtgcatcgaaaacccgaaaaatctgaacctggccactgacaagtggagttttgggacgactctctgggagatatgttctggaggggataagccactctcagctttagactcccagcgtaaattacagttttacgaggatcgccatcagctgcctgctccgaagtgggctgaactcgctaatctgattaacaattgtatggattacgaaccagactttcggccttccttccgcgctatcatacgggacctcaactcactctttacccctgattacgagctcctgacagagaacgacatgctcccaaacatgcgcatcggcgctctggggttctcaggcgcttttgaggatagagacccgactcagtttgaagagcgacaccttaaattcttgcagcagttggggaagggaaacttcggttccgtcgagatgtgtcggtatgatcccctgcaggataataccggggaagtcgtggctgttaaaaagctacaacacagcactgaagagcacctccgagactttgaacgggaaatcgagattctgaagtccctacaacacgacaacattgtgaagtataaaggggtgtgctactccgcgggacgcaggaatttaaagctgataatggagtacctgccttatggatctctacgagactatctgcagaagcacaaggagagaatcgatcatattaagttgctgcagtacacatcacagatttgcaaaggcatggaatacttgggaactaaacgctacattcatcgagacttagctactcgaaacatactggtggagaatgaaaatcgcgtaaaaattggtgactttggtcttacaaaagttctgcctcaggacaaggaatattacaaagtcaaggagcccggtgaaagccccatcttttggtacgcaccagagagcctgacagagagtaaattttccgtggcctcagatgtgtggtcctttggggtagtgttatacgagctgttcacatatatcgaaaagtctaaatcgcctcccgctgaatttatgcggatgatcgggaacgacaagcaggggcaaatgattgtatttcatctgatcgagctacttaagaacaatggcagactccctagacctgatggttgcccagacgagatttatatgataatgaccgagtgctggaataacaatgttaaccagcgacctagttttcgcgatttggcactgagagtggaccagatcagagataatatggctggctag

SEQ ID NO: 29165 - DNA, 2952 bp, synthetic construct
  misc_feature 1..2952: note = Description of Artificial Sequence: Synthetic coding sequence
  source 1..2952: mol_type = other DNA
atgtcatatctgtttgcccaatggcgccatgacttcgtgcacgggtggatcaaagtacccgtcacccacgagacccaggaggagtgtctgggcatggccgtcctggacatgatgcgcatcgccaaggagaatgatcagacacctctcgcaatctacaattcaataagctataagacatttttgccgaaatgtattagagccaaaatccaggattatcatatcttaaccaggaaaaggatcagatatcggttccgtcggtttattcagcagttctcccagtgcaaggcgacagccaggaacctgaagttaaaatatctgattaatctggagaccctacagtccgcattttacacggagaaattcgaggttaaagagcccggatcaggtccaagcggggaggaaatcttcgctaccattatcattacgggcaacgggggaatccagtggtcacgcggaaagcataaagagtcagagaccctaaccgaacaagatctgcagttgtattgcgactttccgaatatcattgatgtgtccatcaagcaggccaaccaggagggtagtaatgaatcacgcgtcgtgacaatccacaaacaagacggaaaaaacctggaaattgaactcagcagcctgagggaagctctgagttttgtctctctgattgatggatactatagattaaccgccgacgcccaccactatttatgcaaggaagttgcaccccctgctgttctcgagaatattcagtctaactgccatggacctatttcaatggacttcgccatcagcaaacttaagaaagcgggaaaccagactggtctgtatgtgctgcggtgttcccccaaggattttaacaagtacttcctcacgttcgcggtagaaagggagaatgtgatcgaatataagcattgtctgataaccaaaaacgaaaacgaggaatataacctctcaggcacgaagaagaatttcagtagcctgaaggatctcctgaattgctaccaaatggagacagtcagatccgataacattatatttcagttcactaaatgctgtccacctaagcccaaagataagagcaaccttctggtctttcggaccaatggtgtgagcgatgtgcccacatcacccacactccagcgccctacacatatgaatcagatggttttccacaaaatccgcaacgaggaccttattttcaatgagtcactgggccaggggaccttcaccaaaatctttaaaggtgttcgcagagaagtcggcgactatggacagctccacgaaaccgaggtgttgttaaaggtgttggataaggcgcacaggaactattccgaatccttttttgaggccgcatcaatgatgagcaagctcagtcacaagcacctggttcttaactacggagtatgcgtgtgcggtgatgagaacatcttagtgcaagagtttgtgaaatttgggtccctcgacacatatcttaaaaagaataaaaattgtattaatatcctgtggaagctggaagtggccaaacaactggcctgggcgatgcacttcctggaagagaatacgctgatacacggcaatgtctgcgccaaaaatattctgctcatccgggaagaggatcgaaaaacgggcaatcctccttttatcaaactctccgaccccggtatttctatcacagttttgccaaaggatattctacaagaacggatcccttgggtgccaccagagtgtatcgagaacccgaagaatctaaacctggcgaccgacaagtggagcttcggaacaactctgtgggaaatctgttccggcggagacaagccgttgagcgcgttagattcacaacggaaactccaattttacgaggacagacaccagcttcccgctcctaagtgggccgagctggcaaatctaatcaataactgcatggattatgagcctgatttcaggccaagcttcagagcaatcatccgggaccttaactccttattcaccccagactacgaactgctgacagaaaacgatatgctccctaacatgcgaatcggagcactcggctttagcggggcttttgaggaccgcgatcctactcagtttgaggagcgccatttaaagtttttacagcagttgggaaaaggtaattttggaagcgtggagatgtgtcgctatgacccgcttcaggacaataccggggaggttgtggctgtcaagaaattacagcactctaccgaagaacacctaagagacttcgaacgggaaatcgagatcttgaaaagcctgcagcacgacaacatcgttaaatataagggagtctgctactctgccggtaggcgaaatcttaagcttatcatggagtacctgccttacggcagcctaagggattacctccaaaagcataaggagcggattgaccatattaagcttcttcagtacacctctcagatttgtaagggaatggagtatttaggcaccaaacgttatattcatagagatctggctacaaggaatatcctggtcgagaatgaaaaccgagttaaaattggggattttggcttgacgaaggttctacctcaggacaaagagtattacaaggtcaaggagccaggagagtccccgatcttctggtatgcacctgagagcctcaccgaaagcaaattttctgtggccagtgacgtatggtctttcggagtggtcctgtacgagctgttcacctacatcgagaaatctaagtcgcctccggctgaatttatgcgcatgattgggaacgataagcaggggcagatgatagtgtttcacctcatcgagctcctcaagaataatggcaggctgcccaggccggacgggtgtcctgatgaaatatacatgattatgacagaatgttggaataacaacgtgaaccagagacctagttttcgcgatctcgccctccgggtcgatcaaatacgggacaatatggccggatag

SEQ ID NO: 29166 - DNA, 732 bp, synthetic construct
  misc_feature 1..732: note = Description of Artificial Sequence: Synthetic coding sequence
  source 1..732: mol_type = other DNA
atgactggcatcgcagccgcatcttttttcagtaacacctgccggttcggcggatgtggcctccacttccccactctggcagacctgatcgagcatatagaagacaatcacatagacactgaccccagggtacttgaaaaacaggagttgcagcagcccacatatgtagccctgtcttacataaaccgcttcatgaccgacgcagcgcgacgggaacaagaaagtctgaagaaaaagatacagccaaagcttagcctgaccttatcttcgtccgtcagccggggaaacgtctctaccccacctagacactctagtggaagtttaactccacctgtgacccccccaatcacaccgagttcatctttccggtcatcaactccgaccggaagtgaatatgacgaggaggaggtggactacgaagaatctgattccgatgaatcatggacaacggagagcgcgatctcgtctgaggccatcctgtcctctatgtgcatgaacgggggtgaggagaagccttttgcatgccctgttccgggatgcaagaagcggtataagaatgtaaacggcatcaaataccacgccaagaatggccaccggactcagatccgggtgcggaaaccgtttaaatgccggtgcggtaaaagctacaaaaccgcccagggccttcggcaccatacaatcaattttcacccgcctgtaagcgccgaaattattcggaaaatgcagcagtag

SEQ ID NO: 29167 - DNA, 1044 bp, synthetic construct
  misc_feature 1..1044: note = Description of Artificial Sequence: Synthetic coding sequence
  source 1..1044: mol_type = other DNA
atgtgtactaaaatggagcagcctttttatcacgatgactcctacacagcaaccggctacgggagagcccctggaggcctgtcgctgcacgactacaagctgttaaagccgtctcttgccgtcaatctagccgatccttacaggtccttaaaagcccctggagcgcgaggacctgggcctgagggcggaggtggaggatcatacttttctggtcaagggtccgatactggtgcctctctgaaactcgcctcttccgaactggaaaggctaatcgttccaaacagcaacggagtaattaccactactccaaccccaccaggtcaatacttctaccctcggggaggaggatcaggcggaggtgccggtggcgcaggcggaggagttacagaggagcaggaaggtttcgctgatggattcgttaaagcactggacgacctccacaagatgaaccatgtgacccctcccaacgtatccctgggtgccaccgggggtcctccggcaggaccaggtggcgtctatgctggccctgaacctccaccggtgtataccaacctgtcttcctactcaccagcttccgcatccagtggcggagccggagccgctgtcgggactggaagttcctatcccactactactatatcttacttgccccatgcccctccatttgcaggaggccatccagcccagctggggttggggagaggggcatccacatttaaagaggagccgcaaactgtcccagaagccagaagtcgggacgccacccctcctgtgagcccaatcaatatggaggatcaggagcggattaaagtggagagaaagcgactcaggaacaggctcgccgctaccaagtgccgaaaaagaaagctcgagaggatagctcgcctggaagacaaggttaagaccctgaaggccgaaaacgccggtctgagctccaccgcaggcctcttgagggaacaggtcgcccagcttaaacagaaggtgatgacgcatgtgtccaacggctgtcagcttctccttggcgtcaaagggcacgctttttag

SEQ ID NO: 29168 - DNA, 996 bp, synthetic construct
  misc_feature 1..996: note = Description of Artificial Sequence: Synthetic coding sequence
  source 1..996: mol_type = other DNA
atgactgccaaaatggagaccaccttttacgatgacgcactgaatgcttccttcctgccgagcgagagcggaccttacgggtactcaaatcctaaaatactgaaacagtccatgacgttaaatttggcagatccggtggggtcccttaagccacaccttagagcgaaaaattccgacctactgacctccccagacgtggggcttctgaagctcgcctctcccgagctcgagagactgatcatccagtcgagtaacggccacataacaacgacgcccacacctacacagttcctgtgtcctaaaaacgtaaccgacgagcaagagggcttcgcagaagggttcgtacgtgctcttgctgagcttcacagccaaaacactctccctagtgtgaccagtgctgcacagcctgtaaacggggcaggaatggtcgcacctgcagtcgcgagcgtagctgggggatcgggctctggtggattcagcgcttctctccattcggagccccctgtttatgccaacttgagcaattttaatccgggagcgttgtccagcggaggcggtgcaccatcttacggtgcagccggacttgcctttccggctcaacctcaacagcaacaacagcccccacaccaccttccccaacagatgccagtgcagcatcctcgcctccaggccctaaaggaggagccccagacagtccccgaaatgccgggagagacaccgcctttatcacctatcgatatggaatcccaagagcgtattaaagccgagcgcaagaggatgcggaaccgcatagccgcatcgaaatgtcggaagagaaagttggaaaggatcgccaggctggaagagaaggtgaaaactctgaaggcacaaaactccgagctggcatccactgcgaatatgctcagggaacaggtggctcagctcaagcaaaaagtgatgaaccatgtcaactcaggatgccagttgatgctgacacaacagctgcagaccttttag

SEQ ID NO: 29169 - DNA, 831 bp, synthetic construct
  misc_feature 1..831: note = Description of Artificial Sequence: Synthetic coding sequence
  source 1..831: mol_type = other DNA
atgagggccccacacctacatttgtccgcagcttccggagcaagagcactcgcgaaactgctgccactgctcatggctcagctgtgggccgctgaggcagctcttttacctcagaatgatacgcgcctggacccagaggcatacggctctccctgcgctcggggtagtcagccctggcaggtcagtcttttcaatggactgtcatttcactgtgctggtgtgttagttgaccagtcatgggtacttacagccgctcactgcggtaacaaacctttgtgggcacgggtaggagacgaccatcttctcttacttcagggggaacagctgaggcgaactaccaggtctgttgtgcaccctaagtaccaccaggggtctggaccaatccttcccaggaggacggatgagcatgacctgatgcttcttaagttggcaaggccagtagttttagggccacgtgtgagggccctgcagctaccatatcgatgtgcccagcccggtgatcagtgtcaagttgccggttgggggacaaccgccgctcgcagggtgaagtacaacaaggggcttacctgttcaagcatcaccatactgtcccccaaagaatgcgaagtgttttaccccggtgtggtcaccaacaacatgatctgtgctggcctggaccgcggtcaagacccctgtcaatctgacagcgggggtcctctggtctgtgatgaaacactacagggaatactgagctggggagtatatccatgcggatccgcccagcaccctgccgtatacactcaaatatgtaagtatatgtcgtggataaacaaagtgatcaggtccaactag

SEQ ID NO: 29170 - DNA, 831 bp, synthetic construct
  misc_feature 1..831: note = Description of Artificial Sequence: Synthetic coding sequence
  source 1..831: mol_type = other DNA
atgagagctcctcatcttcatctttccgctgcttccggcgcaagggcattggctaagctcctccctctgctcatggctcagttgtgggccgctgaggctgccttgttgccgcagaacgatacccgcttggatcctgaggcctatggctcgccctgcgcgcgagggtctcagccctggcaagtctcgcttttcaatggcttgtccttccactgcgcaggcgtgctagttgatcagagttgggtgctgaccgcagcccattgtgggaacaagcccttatgggccagggtgggcgatgaccaccttctgctgttgcaaggagaacaacttaggcgaactacaaggagtgtggtgcatcccaaatatcaccagggctctggcccaatccttcccaggcggaccgatgagcacgacctgatgctgctgaaactggcccgtcccgtagttctgggtccgagagttcgtgctctccagctcccctatcggtgtgcccaacctggggatcagtgtcaagtggccggatggggtactacagccgcaaggagggtgaagtacaataaaggtctaacttgtagtagtattacaatcctttctccgaaagaatgtgaagtcttctaccccggtgtcgttaccaataacatgatctgtgccggtctcgatcgtggacaagacccttgtcagtccgactccgggggaccgctggtctgcgacgaaacgctccaggggattctctcctggggggtatatccgtgcggatcagcacagcatcctgccgtgtacacacagatatgtaaatatatgagctggattaacaaagtgattcgcagtaactag

SEQ ID NO: 29171 - DNA, 831 bp, synthetic construct
  misc_feature 1..831: note = Description of Artificial Sequence: Synthetic coding sequence
  source 1..831: mol_type = other DNA
atgagggcaccccacctccacctgagcgctgctagcggtgcgagagccctggctaagttactgcccctgctaatggcccagttgtgggccgctgaagcagcccttctgccccagaatgatacccggctggacccagaagcctatggcagtccgtgtgctagaggcagccagccatggcaggtgtctcttttcaacggtctcagctttcactgcgctggcgtgctggttgaccaaagttgggtcctgacggccgcacactgcggcaacaagcccctctgggccagggtcggagatgaccatctgctgttactccaaggcgagcagcttcggaggaccacacggtctgtggtgcatcctaaatatcatcagggtagtggccctatcctccctcggaggactgatgaacacgacctgatgttgctgaagctggcacggcctgtggtgcttggcccaagagtccgtgctctccagcttccctacagatgcgcgcagcccggagatcaatgtcaggtcgcaggctggggaactacagccgctcgtcgcgtaaagtataataaagggctgacatgcagcagcattactattctgagtcctaaggagtgcgaagtgttctaccctggggtcgtgactaataacatgatttgtgctggactggatagaggccaggacccttgtcagagtgactcgggaggaccattagtgtgcgatgagacgctccagggaatccttagctggggggtctacccctgcggcagtgcccagcacccagccgtatacacacagatctgcaagtacatgtcttggataaacaaggtgatcaggtcgaactag

SEQ ID NO: 29172 - DNA, 657 bp, synthetic construct
  misc_feature 1..657: note = Description of Artificial Sequence: Synthetic coding sequence
  source 1..657: mol_type = other DNA
atgtgggtcccggttgttttccttacactgtcagtcacttggatcggggctgctccgctgatcttgtctcggatcgtgggcggttgggagtgtgaaaagcacagtcaaccgtggcaggtgttggtggcctcgcgaggacgggcagtttgcggaggcgttctggttcatcctcagtgggtcctcactgcagctcactgcattcggaagccaggagacgattcatcccacgatttgatgctgctgcgtctgtcagagccagcggagctgacagacgccgtgaaggtcatggatctgccgactcaggagcccgctctgggcaccacctgctatgcctcaggatggggctcaatcgagcccgaagaatttttgacacccaagaaactgcaatgcgtggacctccacgtgatttctaatgacgtatgcgcgcaggtgcacccacaaaaggttactaagtttatgctgtgtgcaggccgatggaccggaggcaaatctacttgctcaggggacagcggagggccactggtctgcaatggggtgctccaggggattacctcatggggaagcgagccttgcgcactgccagagcggccatctttgtatacaaaggtggtgcactatcgcaagtggattaaggacactatcgtggccaacccttag

SEQ ID NO: 29173 - DNA, 1590 bp, synthetic construct
  misc_feature 1..1590: note = Description of Artificial Sequence: Synthetic coding sequence
  source 1..1590: mol_type = other DNA
atgagcactaatgagaatgccaacactcctgccgctagacttcacagattcaagaacaaaggcaaagactctaccgaaatgcggaggaggagaatcgaagtcaatgtcgagctgaggaaagccaaaaaagacgatcagatgctcaagcggagaaatgtgagttcatttcccgatgatgctacttctccattgcaggaaaacagaaataaccagggaacagttaattggtccgtggacgacattgtaaaaggcattaactcaagtaatgtagagaatcagctgcaggcaacacaggcggcaaggaagctgctgtctcgcgagaaacagccccctattgataatatcattagggctgggcttatccccaagtttgtgagtttcctgggaagaaccgactgttctcccatccagttcgagagtgcatgggcgcttacgaacatcgccagtggaaccagcgagcagacaaaggcggtggttgacggcggagccatcccagccttcataagcctccttgccagcccccacgcccatataagtgagcaggctgtgtgggctttaggaaatattgccggtgacgggtctgttttccgtgacttagtcattaagtacggtgccgtggatcctctgctggctctcttggccgtgcccgacatgagttctctggcatgcggctacctgcggaatcttacatggacgctatccaatctctgtaggaataagaatccagctcctcccattgacgcagtggagcagatcttacccacacttgtgcgcctcctccaccacgacgatcccgaggtattggccgatacttgttgggccatttcttatctaactgatggcccaaatgagcgaattggaatggtggtgaaaactggcgtggtgccacagctggtgaaactgctgggagcatccgaactaccaatagtcactcccgcactgagagcgattggtaatatcgtgactggaactgacgagcagactcaggttgtcattgacgccggagctctggcagtgttccctagtctcctgaccaaccccaaaacaaatatccagaaagaagccacctggaccatgagcaacattactgccggacggcaagaccagatacagcaagtcgtcaatcatggcctggtaccctttttagtttccgtgctgagtaaagcagattttaagacccagaaagaggcagtgtgggctgtgacaaactacacttctgggggaacagtagaacaaatcgtgtatctggtgcattgtgggatcatcgaacccctgatgaacctcctcaccgccaaagacaccaagattattttggtgatactagacgcaatcagtaacatcttccaggccgctgaaaagctcggggagactgagaagctttccattatgatcgaagagtgtggcggactagacaaaatcgaagccttacagaatcacgaaaacgaaagcgtgtacaaagccagtctgagtctgattgaaaaatacttttctgtggaggaggaagaggaccaaaatgtggttcccgaaactacatccgaagggtacacgttccaggtgcaggacggagctcctggcacgtttaatttctag

SEQ ID NO: 29174 - DNA, 1590 bp, synthetic construct
  misc_feature 1..1590: note = Description of Artificial Sequence: Synthetic coding sequence
  source 1..1590: mol_type = other DNA
atgtccacaaacgaaaacgctaatactccagcggcacgcttgcataggtttaaaaacaagggtaaggattccactgagatgagacgtaggcgaatagaagtgaacgtggagctacgcaaagcaaagaaagacgaccagatgctcaaacgaaggaacgtgtcttctttcccggacgacgcaacctctccacttcaagaaaatcgcaacaaccagggaacagtgaattggagtgtggacgacatcgtcaaaggcatcaatagttcgaacgtggagaaccaattacaggccacgcaggcggctcggaaactgctttcccgtgagaagcaaccgcctatcgacaatatcatacgcgcagggctgatccccaagtttgtgagctttttaggaaggacagattgcagccctatccaatttgagtctgcttgggccctgacaaatattgccagcggaacttctgagcagactaaagcagtcgtggacgggggagccattcccgcttttatctctctattggcttcaccacacgcccacatttctgagcaggccgtctgggctttaggaaacattgccggagacggctcagtgttccgcgacttagtaattaagtatggagccgttgatccacttctggcccttctcgcagtgccagatatgtctagccttgcctgcggttatctgcgcaacctgacctggaccctgtcaaacttgtgccgcaataagaatccagccccacctatcgatgcagtggaacaaattctcccgactttagtgaggttgttgcaccacgatgaccccgaagttctggccgacacctgctgggcaatctcatatctgacggatgggcctaatgaaagaatcggcatggtggtgaagacaggtgtggtgccacagctcgtgaagttactaggagcctctgagctccctatcgtcacaccagctctccgggcaataggcaacatagtgacggggaccgatgagcagactcaagtagtgatcgacgctggggcactggctgtattccctagcttgctgaccaatccaaaaacgaacatccagaaagaagccacatggaccatgagcaatatcacggccggtaggcaggaccagatccagcaggttgtgaaccacggcctggtgccatttctggtcagtgtgctcagcaaagccgactttaaaacccaaaaagaagcagtctgggcggtgacgaattatacgagcggcggaacagtcgagcagattgtatatctggtgcactgtggcatcattgagcctctcatgaatctcctgactgctaaagacaccaagattattcttgtcatattagatgcgatttccaacatctttcaggccgctgaaaagctaggcgagacagaaaagctgtccataatgatagaagaatgtgggggtctcgacaaaattgaggcactccagaatcacgaaaatgagtcagtgtataaggctagcctgtcattgatcgagaagtatttttccgtcgaggaggaggaagatcagaacgtcgtgccggaaaccaccagtgagggatatacttttcaagtgcaggacggggctcccggaacgttcaacttttag

SEQ ID NO: 29175 - DNA, 1968 bp, synthetic construct
  misc_feature 1..1968: note = Description of Artificial Sequence: Synthetic coding sequence
  source 1..1968: mol_type = other DNA
atgcctctgaagtggaagacctcatcgccagccatttggaaattcccagtgcccgtgctaaaaacgagtagatctacaccactgagtccagcttacatctcactggtggaagaagaggaccagcacatgaagctgtccctcggtggctcagagatggggctgtcctcgcatcttcagagttccaaggcaggcccaactagaattttcacctcaaacacacattcatcagtggtgttgcagggattcgatcagctccgcctggaaggactgctgtgtgacgtcaccctgatgcccggtgacacagacgacgcctttccagtgcacagggttatgatggcttctgcttctgattactttaaggcaatgttcacaggcggtatgaaggaacaggacctgatgtgcattaagctccatggcgtcagtaaggtcggcttgaggaagattatcgacttcatctacaccgccaaactgagcctcaatatggacaacctgcaagacaccctggaagcagcttcatttctgcagatccttcccgtgctggacttttgtaaagtatttctcatctcaggcgtaacacttgacaactgcgtcgaggtcggcaggattgccaatacctacaatctcactgaggtggataagtatgtgaacagtttcgtcctcaaaaacttccccgctcttttgagtaccggagaatttctcaaactgccgttcgagcggctggcttttgtattgtcctctaactctctgaagcattgcaccgaacttgagctgtttaaggcaacctgtcggtggctccgccttgaagagcctcgaatggactttgctgcaaagctgatgaaaaacatccggtttcctctaatgactccccaggaactgatcaactacgtccagaccgtggactttatgcggactgacaatacttgcgtgaacttactgctggaggccagcaactaccagatgatgccatacatgcagcctgtgatgcaaagcgatcgcaccgccatacggtctgatacaacccatctagtgacactgggcggtgtgcttcggcagcagctggtagtcagcaaggagctccgcatgtacgacgagaaagcccatgagtggaagtcccttgctcccatggacgcacccaggtatcagcacggaattgctgtaattggaaactttctgtatgtagtaggagggcagagtaactatgacactaaagggaagacagcagtggacactgtgttcaggttcgaccctagatacaataagtggatgcaagtggcctcccttaacgaaaaacggacctttttccacctgagtgctttgaaaggctatctttacgctgtcggcggtaggaatgctgccggagagctgccaactgtcgaatgctacaatccccgaaccaacgagtggacatacgttgcgaagatgtcagagcctcactatggacacgctggtactgtctacggcggagtgatgtacatctctggcggaatcacgcacgacacatttcaaaaggagttgatgtgtttcgaccccgatactgacaaatggattcagaaagctcccatgacgactgtgaggggactgcattgtatgtgtacagtcggcgagcggctgtacgtaattgggggtaaccactttaggggaaccagtgattacgatgatgtgttaagctgcgagtactattccccgatccttgatcagtggaccccaattgccgcaatgctccgtggccaatccgacgtaggagttgctgtgtttgagaataagatatatgtagtcggagggtattcatggaataataggtgcatggttgaaatcgtgcaaaaatatgatccagacaaggacgagtggcataaggtttttgatctgcccgaaagtttaggcggaatcagggcctgcacccttacagtcttccccccagaggagactacccctagccccagccgtgagagccccctttctgccccatag

SEQ ID NO: 29176 - DNA, 1815 bp, synthetic construct
  misc_feature 1..1815: note = Description of Artificial Sequence: Synthetic coding sequence
  source 1..1815: mol_type = other DNA
atggggctcagctcccatcttcaatctagtaaggccggacctactcggatcttcacatcgaacactcattcgagcgttgtgctgcaggggtttgatcagctgcggctggagggtcttttgtgcgacgtgactctgatgccaggcgataccgacgatgctttccccgtgcacagagtaatgatggctagcgcaagtgactactttaaggccatgttcacaggtggaatgaaggaacaggacttaatgtgcatcaagttgcacggggtatccaaggtggggttaaggaagatcatcgatttcatctacacagctaagttatctttaaacatggataacctgcaggacaccctggaggccgctagcttcctccaaattttgcccgtgctggatttttgcaaagtcttcctcatttctggagtgactctggacaactgtgtggaggttggtagaatagccaatacatataatctgaccgaagtggacaagtatgtgaattcttttgtcctgaaaaacttccctgccttgttgtccactggagaattcctaaaacttcctttcgagaggctcgcctttgttctatcatctaattccctgaagcattgtactgaactggaactctttaaggcaacatgtaggtggctccggcttgaggagcccagaatggatttcgccgctaaattgatgaagaacattcgattccccctcatgacaccacaggagttaatcaactatgtacagaccgtggacttcatgcgaactgacaatacttgcgtcaaccttttactggaggctagcaactaccaaatgatgccatacatgcaacctgtcatgcagtccgacaggaccgcaattcggagcgataccactcatctggttacactgggcggtgttctgcggcaacagctggtcgtaagcaaagagctaagaatgtatgatgagaaggctcatgagtggaagtcactcgctcctatggatgcgcctagatatcagcatgggatcgctgtcatcggcaactttctctacgtggtgggcggtcaaagcaattatgacacaaagggaaaaacagccgtggacactgtctttagatttgaccctcgctataataaatggatgcaggtcgccagcttgaacgaaaagcgaactttcttccacttgtcagccttgaagggatatctgtatgccgtgggcggtcggaatgcagccggagaattgcctacagtggagtgctataatccccgtaccaatgagtggacctatgtggccaagatgagtgagccgcattacgggcatgccggaaccgtgtatggcggtgtcatgtatatctcaggcggaatcacccatgacacatttcagaaagaacttatgtgcttcgatccagatacagataagtggattcagaaagccccaatgactacagtgcgcggtctgcattgtatgtgtaccgtgggcgagcgcctatacgtgattgggggaaatcactttagaggaacaagcgactatgacgatgtccttagctgcgagtactatagccccattttagatcaatggacgcctattgcagctatgctccggggtcagagcgatgtgggcgtcgcggtgtttgagaataagatctatgtggtgggtggttacagttggaataaccgctgcatggttgagatcgttcagaagtacgaccccgacaaagatgaatggcataaggtgttcgacctgccagagagtctgggaggcatacgagcgtgtaccctgaccgtttttcctcctgaagagacaactccttctcctagtcgcgaatcacctctatccgctccctag

SEQ ID NO: 29177 - DNA, 1815 bp, synthetic construct
  misc_feature 1..1815: note = Description of Artificial Sequence: Synthetic coding sequence
  source 1..1815: mol_type = other DNA
atgggattgagtagccatttgcaatccagcaaagctggacctacacggattttcacgagcaacacccacagcagcgttgtccttcagggcttcgatcagctccgcctagaaggcctactgtgcgatgtgacactgatgcctggcgataccgacgatgccttcccggtgcacagagttatgatggccagcgctagcgattactttaaagcaatgttcaccgggggaatgaaagagcaggaccttatgtgtataaaactccacggtgtatccaaagttgggctgcgaaagatcatcgacttcatttataccgctaaattatcattaaacatggacaacctgcaggacactctggaggccgcttcttttctacagattctgccagttctcgacttctgcaaagtctttctcatctctggtgtgactctagacaactgtgtggaagttggcagaatcgcgaatacatacaatctgaccgaggtcgacaaatatgtgaatagtttcgtcctgaaaaattttccagctttgctgagcacaggggaattcctgaagctgcctttcgaaaggctcgcctttgtactgagttccaattcgctcaagcactgcacggagctggagctgttcaaggcaacttgtagatggctgcggctggaagagcctcgtatggacttcgctgcaaagctgatgaagaacatccggttcccattaatgacccctcaggaacttatcaactacgtccagacagtggatttcatgcggaccgacaacacctgcgtgaatttgttgcttgaagcgtctaattatcaaatgatgccatatatgcagcctgtcatgcagtccgatcgcacggccattaggtctgatacgacccatctcgtcacactcggcggagtcctccgtcagcagctcgtggtctcaaaggagcttcgcatgtacgatgaaaaggcacatgagtggaagagcttagcgcctatggacgcaccgaggtatcagcacggcatagctgttatcgggaatttcctgtacgtcgtcgggggtcaatctaactatgacaccaagggcaagaccgccgtcgacacagttttccggtttgaccctaggtataacaaatggatgcaggtggccagtcttaacgagaagcggacattcttccacttgtctgcgctcaaggggtacctatatgccgtgggaggtcggaacgccgcaggggagctccccactgtagaatgttacaaccctagaactaacgagtggacctacgttgctaagatgtcagagcctcactacgggcacgcgggaacagtgtacggcggtgtcatgtacattagcggtggaatcacacacgataccttccaaaaagaactgatgtgctttgatccagatacggataagtggatacagaaagcgccaatgacgactgtacgaggcctccattgcatgtgtacagttggtgagcggttgtacgtgatcggtgggaaccattttaggggaacctcagactacgatgatgtgttgagttgcgaatattattcacctatccttgatcagtggacccccatagctgccatgctgcgtggacagtctgatgtgggggtggccgtcttcgaaaataaaatttacgtcgttggtggctattcctggaataatcgctgtatggttgaaatcgtgcagaagtacgacccagacaaagatgagtggcataaggtgtttgacctgcccgaaagcctcggtggaatccgcgcttgcaccctaacagtcttcccccctgaggaaaccaccccttctccctccagggagtcccctttgagtgccccttag

SEQ ID NO: 29178 - DNA, 1815 bp, synthetic construct
  misc_feature 1..1815: note = Description of Artificial Sequence: Synthetic coding sequence
  source 1..1815: mol_type = other DNA
atgggtctgtccagccatctacagagttcaaaagctggccctacaaggatctttacatccaatacacacagcagcgtggtgcttcaggggtttgaccaactgcgccttgagggacttctttgtgatgtgactctgatgccaggggacacagacgatgcttttcctgtgcacagagtgatgatggctagtgcctctgattattttaaagccatgttcaccggcggaatgaaggaacaagatctgatgtgtattaagctccacggggtgtctaaggtcggactgaggaagattatagatttcatctataccgccaaactgtcattaaatatggacaatctccaagacaccttggaggccgctagcttcctccagatactccccgtgctcgatttctgcaaggtatttctgatcagtggcgtaactctggataactgcgtggaggtcggtcggatcgctaacacttacaacctcactgaggtggacaaatatgtgaactccttcgtgctaaagaacttccccgctcttctgagcacgggcgaatttttgaaactgccattcgagaggctggcatttgtgttgtcaagcaattcccttaagcactgcaccgagctggaattgtttaaggccacatgtagatggcttcggcttgaggagcccagaatggactttgcagcaaagctaatgaaaaacattcgcttccctcttatgacccctcaggagctgatcaactacgtccagacagttgattttatgaggacagacaacacttgtgtgaatttgctgttggaagcgtcaaactaccagatgatgccctatatgcagccagtgatgcagagtgaccgaacggccatcaggtccgacacaacccatctggttacattgggaggtgtccttcgccaacagcttgttgtgtccaaggagctgcggatgtatgacgagaaagcgcacgaatggaaaagcttggccccaatggacgcccctaggtatcaacatggcattgcagttattggaaatttcctgtatgttgtaggagggcagtctaattacgataccaaaggtaagacagccgtggatacagtgttccgctttgatcccaggtacaataagtggatgcaggtcgcaagcctaaatgagaaaaggacatttttccatctttcggctctcaagggctatctttatgcagtcggcggacggaacgcagccggtgaactgcctacagtcgaatgctataacccgaggaccaatgaatggacatacgtggccaagatgtcagagcctcactacggccacgcgggaaccgtttacggaggggtgatgtacatctccggaggcatcacgcacgatactttccaaaaggagcttatgtgttttgaccccgatacagacaagtggattcagaaagcgccaatgacgaccgtgcgtgggctgcactgtatgtgtactgtcggcgaacgcctttacgtgataggtggaaaccactttcggggtacatccgattacgacgacgtgctgagttgtgaatattactccccgattttagatcagtggacgcccatcgctgccatgctccgaggacagtctgatgtgggcgtggctgtgtttgagaacaagatctacgtcgttggcggttatagttggaacaaccgctgtatggtcgaaatagtacagaaatatgaccccgataaggatgagtggcacaaggtgttcgaccttcctgaatccctcggtgggataagggcttgtactttgaccgtgttcccacccgaggagacaacaccctctcctagcagagagtcccccctgtcggccccttag

SEQ ID NO: 29179 - DNA, 1815 bp, synthetic construct
  misc_feature 1..1815: note = Description of Artificial Sequence: Synthetic coding sequence
  source 1..1815: mol_type = other DNA
atgggcctgagctctcatttacagagcagtaaggccggacccaccaggatctttacaagcaacactcattccagcgtggtgctgcagggatttgaccagctgcgactcgagggcctgctgtgcgacgtcactctgatgcctggcgacaccgacgatgcgttcccagtgcaccgagtgatgatggccagcgcttccgactacttcaaagctatgttcactggcggaatgaaagagcaggatctcatgtgcatcaaactgcacggtgtctcaaaagtgggcctgcgtaagattattgattttatctacacggctaagttgtctctaaatatggataatctgcaggacacactggaggccgcaagttttctccagattctccccgtgttggacttctgcaaagtgtttcttatctctggagtgaccctcgacaactgcgtcgaagttgggcgtattgccaacacatacaacctgaccgaggtggacaagtatgtgaatagttttgttttaaagaattttccagcccttctttctacaggcgagttcctaaagctgccattcgaacggttagccttcgtactcagtagcaacagcctcaaacactgtacagagttagaactcttcaaggccacgtgtaggtggctacgcctcgaggaaccccgtatggatttcgctgcgaagctgatgaagaatatacgtttccccctgatgaccccccaggaactgatcaattacgtccaaacagtcgacttcatgagaaccgacaacacctgcgtcaacctcctgctcgaagcctccaattaccaaatgatgccttatatgcagcctgtcatgcagagcgaccggacagccatccgcagtgacacaacccacctggtcacactagggggagtgctccggcagcagcttgtcgtgtcaaaggagcttaggatgtatgacgaaaaggcacacgaatggaagagtctggcccctatggatgccccaaggtaccaacatggcatcgctgtaataggcaactttctgtacgtggtcggaggacagtccaattatgacactaaagggaaaaccgccgtggacaccgtgttcagatttgatcctagatataataagtggatgcaggtcgccagccttaatgagaagcggacattcttccatttaagcgcgctcaagggctatctttacgccgtggggggaaggaacgctgcaggcgagctgcccacagtggagtgttacaatccccgaacaaacgagtggacctacgtcgccaagatgagcgagccacattacggacatgcaggtacagtctatgggggagtcatgtatatttctggcggaatcacgcatgacacctttcagaaggaactgatgtgctttgatccggatactgacaagtggatacagaaggcccctatgaccacagttagaggactccactgcatgtgtacagtcggcgaacgcctatatgttatcggtgggaatcacttccgcggtacctctgattatgatgacgtgctgtcatgtgagtattactcaccaatattggaccaatggactccaatagccgcaatgcttcgaggccagagcgacgtgggcgtcgcagtcttcgaaaacaagatctacgtggtaggaggctatagctggaataaccgctgtatggtggagattgtacagaagtatgacccagacaaggacgaatggcataaagtctttgaccttcctgagtctctgggcggaattcgtgcatgcactcttacagtctttccacctgaggagactacaccatctccttcccgcgaatcaccgctgagcgctccatag

SEQ ID NO: 29180 - DNA, 117 bp, synthetic construct
  misc_feature 1..117: note = Description of Artificial Sequence: Synthetic coding sequence
  source 1..117: mol_type = other DNA
atgggcctgtcaagtcatcttcagtcctccaaggcgggtcctaccaggatctttacctcaaacacccactcatccgtagtgctgcagggattcgatcaattgaggctagagggatag

SEQ ID NO: 29181 - DNA, 1815 bp, synthetic construct
  misc_feature 1..1815: note = Description of Artificial Sequence: Synthetic coding sequence
  source 1..1815: mol_type = other DNA
atggggctgagctcccatcttcagtcctcgaaggcaggccctacacgaatctttacatccaatacgcacagttccgtggtgctccaggggtttgaccaactacgccttgaagggctcctctgcgatgtgactctgatgcctggggataccgacgacgcattccccgtgcatagggttatgatggcatcagcgtctgattactttaaggccatgtttactggaggtatgaaagagcaggacttaatgtgcatcaaactacacggagtgagcaaagtcggcttacgcaagatcatcgattttatttataccgccaaactgtcattgaatatggacaatcttcaggatacattagaagctgcttccttcctacagatactacccgttctggatttttgtaaagtatttctgatatctggggtaactctggataattgtgtggaggtgggacggattgcgaatacctataacctcactgaggtggacaaatatgtaaacagcttcgtgctaaaaaatttccccgcacttcttagtacgggcgaatttttgaaactgccgtttgaacgcctcgcattcgtgttgtcctctaactccctcaagcactgtacagagctcgaattgtttaaggctacatgtcgatggttgcggctcgaagaacctcgcatggacttcgccgctaagttgatgaagaacatccggttcccactgatgactccacaggagctgataaattacgtccagactgttgacttcatgcggacagataacacttgtgtaaatttgctgctcgaggcaagcaactaccagatgatgccctatatgcaaccagtcatgcagtctgacagaaccgcgatccgttctgatacaacacacttagtgaccctgggtggcgtgctgaggcaacagttggtggtcagcaaggaactgaggatgtacgacgagaaggctcatgaatggaaatccctggctccgatggatgcgcctaggtaccaacatggtatcgctgtcataggaaattttctgtacgttgtaggcggtcagtctaattatgacaccaaaggaaagaccgctgtggataccgtgtttaggtttgacccaaggtacaataagtggatgcaggttgccagcctcaatgagaagagaaccttctttcatctgagcgccctcaaaggttatttgtacgccgtgggagggcgaaacgccgctggcgagcttcccaccgtcgaatgttacaatccccgtacaaacgagtggacatacgtcgcgaaaatgtctgagccacactacgggcacgctggcaccgtatacgggggtgtgatgtacatatccgggggtattactcatgacacatttcaaaaggagcttatgtgcttcgacccggataccgacaaatggatccagaaggctcccatgactactgttaggggcctccactgcatgtgcacagtcggcgaacggctgtacgtgatcggcggtaaccacttccgtggaacctctgattacgacgacgttctgagctgtgaatattatagccctatccttgaccagtggacaccaatcgctgcaatgctgcgaggccagagtgacgtgggcgtcgctgtgtttgagaataaaatttatgtagttggcggatactcctggaacaatcgctgcatggttgagatagtccaaaagtatgatccagataaagatgagtggcataaggtgttcgacctacctgagagcctgggaggaattagagcttgcaccctgacggtgtttcccccagaggagacaacgccatcgccttcccgagaatcccccctaagtgctccctag

SEQ ID NO: 29182 - DNA, 1977 bp, synthetic construct
  misc_feature 1..1977: note = Description of Artificial Sequence: Synthetic coding sequence
  source 1..1977: mol_type = other DNA
atgatgcgggttcagacactgcgtgagaagtgggcctactggcggaggaggcagttatcccttaaacaggctgattttaaggatattttcaagaaatccaccagtggatcacttgtcgaggaggaagaccagcatatgaaattatcacttggaggatcggaaatggggctgtcatcacacctgcagtcgagcaaagccggaccgacaaggatctttactagtaacacccattctagtgtcgtcctgcagggattcgaccagctgcgactggagggtctgctgtgtgacgtcaccctcatgccaggcgatacagacgacgcctttcctgtgcatagggtcatgatggccagtgcatccgattactttaaagctatgtttacagggggaatgaaggagcaggatttgatgtgtatcaagctccatggggtctctaaggtgggcctcagaaagatcatcgattttatctataccgctaaactctctctcaacatggataacctgcaggataccctggaggcagcttcatttcttcaaatcttaccagtgctggatttttgtaaagttttccttatttcaggcgttaccctcgataattgtgtggaggtgggcaggatagccaatacttacaacctgaccgaggtggacaaatacgtgaatagcttcgtgttaaagaactttccagccctgctgagcacgggagagttccttaaattgccatttgagcgactggcctttgtgctctcctcaaacagcctcaagcactgtaccgagctcgagctgttcaaggccacatgtagatggttgagacttgaggaaccccgtatggattttgccgcaaaactgatgaaaaatattcggtttccattgatgacccctcaggaactgatcaactatgttcagacggtggatttcatgcggaccgataatacctgtgtgaacttgctgctcgaagcttctaactaccaaatgatgccatacatgcagccagtgatgcaaagtgatcgcacagccattagatctgacactacccacctcgttaccctggggggtgtgcttaggcagcagctggtcgtcagcaaggaattaaggatgtacgacgagaaggcacacgagtggaaatcactggccccaatggatgccccaagatatcagcacggaattgctgtaattggcaactttctatacgtggttggcggacagagtaattatgataccaagggcaagaccgctgtggacacagtgtttcgatttgatcctaggtacaacaagtggatgcaagtcgctagcttaaacgaaaaacgaaccttctttcacctcagcgccctgaaaggctatctgtacgcagtagggggaaggaatgcagcaggcgagctgccaactgtagagtgctataatccgagaactaacgaatggacttacgtggcaaagatgagtgaaccccactatggccacgcaggcacagtgtacggtggcgtcatgtatatctccggaggtatcacccacgatacattccagaaggagctgatgtgctttgatccggataccgataagtggatccagaaggccccaatgactaccgtccggggattgcactgcatgtgcacagtgggggagaggctgtacgtcatcggcggaaaccacttcagaggaacaagtgattatgatgacgttcttagttgtgaatactactctccaatccttgaccagtggactcccatcgccgctatgttgcggggtcagagtgacgtgggcgtcgctgttttcgagaataaaatctacgtggtgggcggttacagctggaacaatcgctgtatggtagagattgttcagaaatacgatcccgacaaggacgagtggcacaaggtctttgatctgcccgaaagtctcggtggtataagagcgtgcacccttaccgtttttccacccgaagaaactacaccgtccccatctcgtgagtcaccacttagcgctccttag

SEQ ID NO: 29183 - DNA, 1920 bp, synthetic construct
  misc_feature 1..1920: note = Description of Artificial Sequence: Synthetic coding sequence
  source 1..1920: mol_type = other DNA
atggatcacctgcaccggggtgagcttgtggcagccattctaaggaataggtctctggtggaagaagaggaccagcatatgaaactgagtctgggaggtagtgagatggggctgtcaagtcatctgcagtcgagcaaggcagggccaacgcggatctttacttcaaacacgcactcaagtgtggttttacagggatttgaccagctcaggctagagggactgctgtgcgatgtaactcttatgcccggagatacagacgacgcattcccagtccacagagtgatgatggcttccgcttctgattactttaaagccatgttcactgggggaatgaaagagcaggatttgatgtgtatcaagcttcatggagtgtcaaaagttggactgcgcaagattattgatttcatttataccgcaaaactgtctttgaatatggataatttgcaagatactcttgaggctgcaagttttctgcagattctgcccgtcttggacttttgcaaagtgtttttgatctctggtgtgacgctggataattgcgtggaagttgggagaattgcaaacacatacaatctgactgaagttgacaagtacgtcaacagtttcgtgcttaagaattttcccgctcttctgtctaccggcgaattcctgaagctgccctttgagaggctggctttcgtgttgtcgtccaatagcctgaagcactgcactgagctcgaactgtttaaggcgacctgccgctggctgaggcttgaagagcctcgcatggactttgcggcaaagctcatgaagaacattcgcttcccccttatgacgccccaagagctgataaactatgtgcagactgtggacttcatgaggactgataatacctgcgtgaatcttcttttagaggccagtaactaccagatgatgccatacatgcagcccgtgatgcagtctgaccggacagccatccgctctgataccacacatttagttaccctcggaggagttctcaggcaacagctggtcgtgagcaaagagctccgaatgtatgatgagaaggctcatgagtggaagagcctagctccaatggacgcgccaagataccagcacggcatagcagtgatcggcaacttcttgtatgtggtcggaggacagagcaattacgatacaaagggtaagactgcagtggatacggtcttccggttcgatcctagatacaacaagtggatgcaggtcgctagcctgaatgaaaaacggactttttttcacctgtcagccctcaaaggatacctgtacgcagttggcggacgtaacgctgctggcgagttacccacagtggagtgctataacccacggaccaacgagtggacctacgtcgctaagatgagcgagccacactatggccacgccggtactgtctacggcggagttatgtacatatctggcggaattactcacgatacttttcaaaaagaactcatgtgctttgaccccgatacggacaagtggatacaaaaagcccctatgaccactgtccgcggactccactgtatgtgcacagtcggcgaacgactctacgttattggtggcaatcacttcaggggtacatctgattatgatgacgtactcagctgtgagtattactctccaattctggatcagtggacgcctattgcagcaatgcttcggggtcagtccgacgtgggtgtcgcagtgttcgaaaacaaaatttatgtagtcggtggatattcatggaataatagatgcatggttgaaattgtgcagaagtatgacccagacaaggatgagtggcacaaagtgtttgacttgcctgaaagcctgggaggaattcgtgcgtgtaccctgaccgtgttccccccagaagagactactccctctccatctcgggaatcgcctctgagtgccccatag

SEQ ID NO: 29184 - DNA, 1920 bp, synthetic construct
  misc_feature 1..1920: note = Description of Artificial Sequence: Synthetic coding sequence
  source 1..1920: mol_type = other DNA
atggatcacctgcaccggggagagctagtcgccgctatcctgcgcaatagaagtctcgttgaggaggaggaccagcacatgaagctgtcactgggaggctctgagatgggcctgtcttcacatctacagagctctaaggctggacccacacgcattttcacaagcaacacacactcatcagtagtgctgcaggggtttgaccagcttcggctggagggtcttctgtgtgatgtcacgctcatgcccggagacacagacgatgcgttcccggtccacagagtcatgatggccagtgcttctgattatttcaaggctatgttcacagggggtatgaaagagcaggacctgatgtgtatcaaacttcacggcgtctcaaaggttgggctgagaaaaattattgacttcatctacacagccaagctttccctcaatatggataatcttcaagacactcttgaggctgccagcttccttcagatcttaccggttctggacttttgcaaagtgttcctgatctccggagtgacactggataactgtgtggaggtgggacggattgcaaacacgtacaacctcactgaagtggataagtatgtcaactcattcgtgctgaagaactttcctgcattgctgtccactggcgagtttctaaagcttccattcgaacggcttgcctttgtccttagctcaaatagcttgaaacattgtaccgagttggagctgttcaaggccacatgtcggtggctccggctggaagagccccgtatggattttgctgctaagttgatgaaaaacattcgctttccgctgatgacaccacaggaactgattaactatgtccaaacagtggactttatgcgcactgataatacctgcgtgaatttgctcctggaagcgagcaactatcagatgatgccttatatgcagcctgtaatgcagtcggaccgtacagcaatccgcagcgacacaactcacttagtgactctgggtggcgttctgcgtcagcagctcgtggtctctaaagaacttagaatgtatgacgagaaggctcacgagtggaagagtctggccccaatggacgcgcctagatatcagcatgggattgctgtaattggcaatttcctgtatgtggtcggaggacagtccaattacgacaccaaggggaagactgcagttgacacagtgttccggtttgatccaaggtacaacaagtggatgcaggtcgctagtctcaatgagaaaaggaccttctttcacttaagcgcactcaaggggtacctgtacgctgtcgggggaagaaacgccgcaggcgaactcccaacggttgaatgttacaatccaaggaccaatgaatggacctacgttgccaaaatgagcgaacctcactacggacacgccggaactgtctatggaggagtgatgtacattagtggtgggatcacccatgatacttttcagaaagagctcatgtgcttcgatcccgatacagataagtggatacagaaggccccaatgactactgtgcgcggactgcactgcatgtgtacggttggagaaaggttatatgttatcgggggaaatcatttccgaggtacttccgattatgacgatgtattgtcgtgtgagtattactctcctatcctcgatcagtggacaccgatcgccgcaatgttacggggtcagagcgacgtgggtgttgccgtgttcgaaaacaaaatatacgtcgtgggcggatatagctggaacaatcgatgtatggtggagatcgttcagaagtatgaccctgacaaagatgagtggcacaaagtgttcgatttacccgaaagcctcgggggtatacgcgcttgtacgctaaccgtgtttccaccggaggagacaactcccagccccagtagagaatctccactgtccgcaccttag

SEQ ID NO: 29185 - DNA, 1842 bp, synthetic construct
  misc_feature 1..1842: note = Description of Artificial Sequence: Synthetic coding sequence
  source 1..1842: mol_type = other DNA
atgaagctttctctggggggtagtgagatgggtcttagcagccacttgcaatcatccaaagcaggcccaacacggattttcacatcaaacacccacagttccgtggtgctgcaaggattcgaccagctccggttagaaggcctcctttgtgacgtgacactgatgcctggcgatacagatgacgcattccccgtgcatcgagtgatgatggcctccgcgagcgactactttaaagcaatgttcaccgggggaatgaaggagcaagacctgatgtgtatcaagctgcatggcgttagcaaggtggggctacgcaagattatcgattttatttacaccgccaagttatcactgaacatggacaacctgcaggataccctcgaggccgcatctttcctgcaaatcctcccggtgctcgatttctgcaaagtattcctgatttctggggtcactctggataattgcgtcgaagtgggtcgcatcgctaacacctacaacttaaccgaagttgacaagtacgtgaattcctttgtgctgaaaaatttccccgcactactgagcaccggggaatttctgaagttgcccttcgagcgtctggcctttgtcctgtcaagtaatagcctgaagcactgcactgagctggaattgttcaaagccacctgccggtggctgcggctggaggagccgaggatggattttgctgcaaaactgatgaaaaatattagattcccactcatgacacctcaggaacttattaattacgtgcagactgttgatttcatgagaactgacaacacatgtgtcaatctgctgcttgaagcaagtaactatcagatgatgccctatatgcagccagtaatgcagagcgaccgaacagcaatacgcagcgacaccacacatttggtgactctggggggagtcctccgccaacagctggttgtgtcgaaggagctccggatgtacgatgaaaaggcccatgagtggaagtcgctggcacctatggatgctccgagataccagcatggcatcgcagtgatcggaaatttcctgtatgtcgtaggcggacaaagcaattacgacacgaaggggaaaacagctgtcgacacggtgttccggtttgaccccaggtacaataagtggatgcaagtggctagcctgaacgaaaaacgtacattcttccatctctctgcacttaagggctatttgtatgccgtcggcggtcgcaacgcagcaggggaactgcccactgtagaatgttacaatcccagaacaaatgaatggacatacgtggccaagatgtccgagcctcattatggtcatgctggaaccgtgtacggcggagttatgtatatctccggcggaattactcacgatacgttccagaaggagctcatgtgcttcgacccagacactgataagtggatccagaaagctccgatgaccaccgtgcggggtcttcactgcatgtgcaccgtcggagagagactttacgtgattggtggaaatcactttcgcggtactagtgactacgacgatgtgctctcatgcgaatattactcccccattctcgatcaatggacccccatcgctgctatgttgcgtggacagtccgatgtcggagtagcggtatttgagaacaagatttatgtggtaggaggatatagttggaacaatagatgcatggtggagattgtgcagaagtatgaccccgacaaagacgagtggcacaaagtcttcgacttaccagagtcactcggtggcatccgggcatgcactttgaccgtgtttccgcctgaagagaccacacccagcccttcacgtgaatcgcctctgtccgccccatag

SEQ ID NO: 29186 - DNA, 1419 bp, synthetic construct
  misc_feature 1..1419: note = Description of Artificial Sequence: Synthetic coding sequence
  source 1..1419: mol_type = other DNA
atgactacctgctctcggcagttcacttctagctcaagtatgaaaggatcgtgtggaatcggagggggtataggagggggatctagccgcatcagctcggtgctggcaggtgggagctgtagagccccaagtacatatggtgggggtctgtccgtgagtagcagcaggttctcttctgggggtgcatgcggcctgggaggcggttacgggggagggttctcaagctcatccagtagcttcggaagcggttttggcggaggttacggcggtgggcttggtgcgggtctgggtggtgggtttgggggaggttttgctggaggggatgggctactcgtaggctcagagaaggtgaccatgcaaaatcttaatgacagactagcgtcttacctggataaagtgagagcgttggaagaagcgaacgctgatcttgaagtgaaaatcagagactggtatcagcgtcagagacccgcagagatcaaagattattctccctatttcaagactatagaagatctccgcaataagatcttgactgcgacagtcgacaacgcaaacgtgctattgcaaatcgataatgctcggctggccgcagatgacttccgaaccaaatatgagacggaactcaacctgaggatgtcagtggaagctgacataaatggcttgcggcgtgtgctggatgaattgaccctagctagggccgatctggagatgcaaattgagagtttgaaagaggagctggcctatttaaaaaagaaccatgaagaggaaatgaacgcgttacggggacaggtcggcggtgatgtcaatgtagaaatggatgctgcaccaggtgttgacctgagtcgcatcctcaatgaaatgagggatcaatacgagaaaatggcagagaagaaccgtaaagacgccgaggagtggttctttaccaagactgaggaactcaatagggaggtggcaacgaactccgagctcgtgcagagcgggaaaagcgaaatcagcgaattgaggaggaccatgcagaacctggaaatcgagcttcagtcacagctctctatgaaggcctcccttgaaaactccctggaagagactaagggcagatattgcatgcagctggcgcagatccaggagatgatcgggagcgttgaggaacagttggcgcagctgcggtgtgaaatggaacagcagaatcaggagtataagatcttgcttgatgtgaagacaaggctagagcaagagatcgcaacataccggagattgttggagggtgaggacgctcatctgagctccagccagttctcaagcggcagccagtctagcagagacgtgacctcttctagcagacaaatccgaaccaaggtaatggacgtccatgatgggaaggtggtgagcactcacgaacaggtactaagaacaaaaaattag

SEQ ID NO: 29187 - DNA, 1293 bp, synthetic construct
  misc_feature 1..1293: note = Description of Artificial Sequence: Synthetic coding sequence
  source 1..1293: mol_type = other DNA
atgagtttcaccactagaagtactttctccacaaactaccggagtcttggctccgtgcaagcccctagctacggagctcggccagtcagtagtgcagctagcgtttacgcaggagctggcggttccggttcgcgtattagtgtgagccgcagcacctcatttcgcggaggaatgggatccggcggtctcgccaccggtatcgctggcggactcgccggaatggggggtatccaaaatgagaaagaaaccatgcaaagtctgaacgacagactggctagctatttggaccgggtgcggagcctggagactgaaaatagacggctggaatcaaagatcagggagcacctggaaaagaagggtccacaggtgcgtgactggtctcactactttaaaataattgaggacttaagagcccagattttcgctaataccgtggacaacgccagaatcgttctccagatagacaatgctaggcttgcggctgatgatttcagggtcaaatacgagaccgaactcgccatgaggcagtcagtggagaacgacattcatgggctacgaaaggtaattgacgacacaaacataacgcgactgcaactggaaacggaaatagaggccctgaaagaagaattgttgttcatgaagaagaaccacgaggaggaggtaaaggggctccaggcccagatcgcctccagtggcctcactgtggaggtcgacgcccctaaaagtcaggatctcgctaaaatcatggccgacattcgagcccaatacgacgagctcgcacggaagaaccgggaagaactcgacaaatattggtcacagcagatagaagagtccacaaccgtggtgactacacagtcggcagaagtgggcgcagcagaaactacactcacagagctccggaggactgtgcaatctttggaaatcgacttggattccatgagaaatcttaaagccagtctagagaattccctgcgagaagtggaggcgcgatatgctctgcagatggaacagctgaacgggatcctactacacctagagtctgaactggcacagaccagagcagagggacagaggcaggcccaggagtatgaagccctcctgaatatcaaggtaaaactcgaggccgaaatcgcaacatacagaagactcctggaggacggggaggatttcaacctgggcgatgcccttgattccagtaattcgatgcagactattcagaagacgacgaccagacgcattgtggacggcaaggtcgtgtcggaaaccaacgatacaaaagttctgcggcattag

SEQ ID NO: 29188 - DNA, 1293 bp, synthetic construct
  misc_feature 1..1293: note = Description of Artificial Sequence: Synthetic coding sequence
  source 1..1293: mol_type = other DNA
atgtcttttaccacgcggagcactttctcaactaactatcggtcactgggatctgtgcaggccccatcatacggtgcacggcctgtgagttccgccgctagcgtgtacgccggagcaggcggatctggctcccggatctcagttagcaggagtacttctttcagaggcggtatgggtagcggcggactcgctactggtattgcgggtggactggcgggaatgggcggaattcaaaatgagaaagagactatgcagtcattgaatgatcgtctagccagctatctggatagagtgaggagtctggaaactgagaatcgcagacttgagagcaaaattcgcgaacacctcgaaaaaaaaggccctcaagttcgtgattggtcccactacttcaaaatcattgaggacctccgcgcacagatcttcgccaacactgtcgacaacgctaggatagtccttcagatcgacaatgccaggctggccgctgatgattttcgagtgaaatacgagacagagctagctatgaggcagtccgtcgaaaatgatatacacggtctgaggaaggtaattgatgacacgaacatcactagactgcagttagagaccgaaatcgaggctctgaaggaagaattgctgttcatgaaaaagaaccacgaagaagaggtgaagggactacaggctcaaatcgcttctagcggtctgaccgtggaggtcgatgcgccaaaaagtcaggatctggccaaaatcatggccgacatcagggcacagtacgatgaactcgctcgaaaaaatagagaagagctcgataaatactggagccagcagatcgaagagagcactaccgtggttacgacacagagtgctgaagttggcgctgctgagacaacccttacagaactgagacggaccgtgcagtccctcgaaatcgacctggactcgatgagaaacctcaaggcctccctcgagaattcattaagagaggtggaagcaagatacgcgctgcagatggagcagctgaacggtattctcctgcaccttgaatctgagctggctcagacacgcgctgaaggacagcggcaagcccaagaatacgaagccctacttaatatcaaggtgaaactcgaggccgagattgctacctaccgaaggttgctggaggacggagaagacttcaacttgggagatgcgctggacagctccaattctatgcaaacaattcaaaaaacgaccacccgaagaatagtggatggcaaggtagtgtcagaaacgaacgacaccaaggtcctgaggcactag

SEQ ID NO: 29189 - DNA, 1203 bp, synthetic construct
  misc_feature 1..1203: note = Description of Artificial Sequence: Synthetic coding sequence
  source 1..1203: mol_type = other DNA
atgacctcttacagttaccgacagtcttctgcgactagctcctttggaggactcggcggaggatctgtcaggttcggacctggcgtagcatttagggccccatccattcatggtggtagcggtggaaggggcgtctctgtaagcagcgccagatttgtgtcctcctcatctagcggagcctatgggggtggctacggtggtgtgctgactgcatctgatgggctcctggcaggtaacgaaaagctgaccatgcagaacctcaatgaccggttggcaagctatttggacaaagtgcgcgctcttgaggcggctaatggagaactggaagtgaaaatccgtgactggtaccagaagcaggggcctgggccttccagagattatagtcactactacactaccattcaggatttgagggacaagatacttggtgcaacaatcgaaaacagtaggatagtgctgcaaattgataacgccaggcttgcggcagacgatttccgtactaagtttgagacggagcaggctctgcgcatgagtgtcgaggcggacattaatggattgagacgagtcttagatgaactcaccctggcccgtacagacctggaaatgcagatagaaggcttgaaggaggaactggcgtacctaaaaaagaatcatgaggaagagatctcaactcttagaggccaagttggcggacaggtgtccgttgaagtcgactccgcaccaggtactgatctcgccaaaatactgtcagatatgcgaagtcagtatgaggttatggcggagcaaaacaggaaggacgcagaggcctggtttacctctcggacagaggagttgaatcgggaggtggccggtcatacagaacagctgcagatgagcagaagcgaagttaccgacctcagaaggactctgcagggcttagagatcgagcttcaatctcagctatctatgaaagccgctctggaggatacgctggctgagaccgaagcacgctttggcgctcaactggcgcatatccaagccctgatcagcggcatcgaggctcagctcggcgacgtacgagctgatagcgagaggcaaaaccaggaataccagagattaatggacattaaatcgcgactagagcaggagatcgccacctatcgctcactcctcgaaggccaagaagatcactataacaacctgtcggccagtaaggtcctctag

SEQ ID NO: 29190 - DNA, 591 bp, synthetic construct
  misc_feature 1..591: note = Description of Artificial Sequence: Synthetic coding sequence
  source 1..591: mol_type = other DNA
atgacatcatatagctaccgtcagtccagcgctacgtcgtctttcggtggcctggggggaggttcagtgagatttggacccggtgtagcctttcgagccccttctatacacggcggtagtggtggccgaggggtctccgtgtcttccgctagatttgtaagctcatcaagctctggggcatacggtggaggctacggcggagttctcaccgctagcgatggactgctggccggaaatgagaaattgacaatgcagaatctgaacgacagactcgcctcttatttggacaaagttcgagccctggaggctgctaacggtgagctcgagatcttaggcgctaccattgagaatagccgcattgtgctgcagatagacaatgccagactggccgcagacgatttccgaacaaagttcgagaccgaacaagcgttgcgcatgagtgtagaggcggacatcaacggcctgagaagggttctggacgaattgaccctcgcccgtactgatctggaaatgcaaattgaaggtctcaaggaggagctggcgtacctgaagaaaaatcatgaggaggaaataagtacccttcgaggctag

SEQ ID NO: 29191 - DNA, 1773 bp, synthetic construct
  misc_feature 1..1773: note = Description of Artificial Sequence: Synthetic coding sequence
  source 1..1773: mol_type = other DNA
atgtctagacagtcaagtgtgagtttccggtccggcggttcccggtccttttcaaccgcttcagccatcacgccctcggtgtccaggacatccttcacgtctgtcagccgaagcggcggaggaggcggaggcggatttggacgggtcagcctagcgggagcatgcggggtggggggatatggctccagatctctgtacaacctggggggttccaaacgcatttccatcagcacctctggaggctctttccggaatcgctttggggctggcgcaggaggcggatacgggttcggcggaggcgctggcagcggcttcggctttggcggaggggctgggggtggtttcggtctcggcggtggagccggatttggtgggggtttcggagggccaggctttccagtctgccctccgggtggcatacaagaagttaccgtgaatcaatccctgctcacgcctctgaatttgcagatcgacccctctatccaaagagtgaggactgaggagagggagcagatcaaaaccttaaataataaattcgccagcttcatagacaaggtcagattcttagagcaacagaacaaggtgcttgacacaaagtggacactcctgcaggagcaaggtacaaaaaccgttcggcagaacctcgaacccctattcgagcaatatattaataatctcagacggcaactggactctattgtcggtgagcgtggtcgactggattctgagctgagaaacatgcaggatctggtggaggacttcaagaacaagtatgaagacgagatcaacaaacgcaccacagctgaaaatgaatttgtgatgctgaagaaagatgtcgatgccgcatacatgaacaaggtggagcttgaagccaaagtggatgctctgatggatgagatcaatttcatgaaaatgttcttcgacgccgagctgtcccagatgcagacacacgtcagtgacaccagcgtcgtgctttcaatggacaacaaccgtaatctggatcttgactctatcattgccgaagtgaaggcccagtatgaggagatcgcgaatagaagcagaacagaggccgaaagctggtatcagacgaaatatgaggagttacagcagacggccggaagacacggtgacgacctgaggaatacgaagcatgaaataagcgagatgaatcgaatgatccagagactgcgggcagagattgacaacgtgaaaaaacagtgtgccaatttacaaaatgctatcgctgacgccgaacaacgcggagagctggccctgaaagatgcacgcaataaactagccgaactcgaagaggcgcttcagaaggcaaagcaggacatggcgagattattacgggagtatcaggagttaatgaacacaaagctagcgttggacgtggaaatcgcaacatataggaagctgcttgagggtgaggaatgccgcctgtccggagaaggggtgggtcctgtcaacatctctgtggtgacttcttctgtctcttctggctacggctcaggttcaggctacggaggcggactgggaggcggactggggggtggcctggggggaggactggcaggtggctcttccggatcatattacagctccagcagtggcggagtaggcctgggagggggtttatccgtcggaggcagcgggttcagcgccagctcagggagaggactgggagtgggcttcggctcaggcggaggtagctcttcatccgtaaagtttgtctcaacaactagctcgtctcggaagtcttttaaatcctag

SEQ ID NO: 29192 - DNA, 1668 bp, synthetic construct
  misc_feature 1..1668: note = Description of Artificial Sequence: Synthetic coding sequence
  source 1..1668: mol_type = other DNA
atgagcaggcagagcagcgtctcttttagatccgggggatcccggtccttctccactgcatctgccattacgccctcagtcagtaggacatctttcacctcggtttctaggtcgggtggcggaggaggcggagggttcggaagagtgtctctagcaggggcttgtggtgttggcggatacggattcggcggtggagccggaagcgggtttggattcggcggaggcgctggcggaggatttgggctcggcggaggggcagggttcggcggaggcttcggcggacctggcttccctgtatgcccaccgggaggcatccaggaggtgactgtgaatcagagtttactcacccccctcaatcttcaaattgacccatctattcagcgggttcgaactgaagagagagagcaaataaaaacactcaacaataagtttgccagctttatcgataaggtgcgattcttagaacagcagaataaggtgctggacactaagtggacgctgctgcaggagcaaggaactaaaaccgtgcgccagaatcttgagcccttgttcgagcagtacatcaacaacttgcgtaggcagctggattccattgtgggagaaagaggacggttagactcagagctgcggaatatgcaggacttagtggaagatttcaagaacaagtatgaggatgaaatcaacaaaagaaccacggctgagaacgagttcgtaatgttaaaaaaagacgtggatgctgcatatatgaataaggtcgaacttgaggctaaggtggacgcactcatggatgaaatcaacttcatgaaaatgttcttcgacgcagagctaagccagatgcagacccacgtgtccgatacatctgttgtgcttagtatggataacaaccgcaatttggatttagactcaattattgcagaagtgaaggctcagtatgaggagattgccaacaggtcacgcacagaggcagaatcctggtaccagaccaagtatgaggagcttcaacaaacggccggaaggcatggagatgacctgagaaacacaaaacatgagatctctgaaatgaaccgtatgattcaacgtctacgggctgagattgataacgttaagaagcagtgtgccaacctgcagaatgctatcgcggatgctgagcagaggggcgaattagccctgaaagatgcccgaaacaagctggcagagctcgaggaagcacttcaaaaagcaaagcaggacatggcgagactgctcagggagtaccaagagttgatgaacacaaaactcgccctcgacgtggaaatagccacttatagaaagcttttagagggggaagagtgccggctgagtggcgaaggagtgggcccagttaatatctctgtcgtgacatccagcgtttcttcaggatacggatcaggaagcggttatggcggaggactcggagggggactcggcggaggcttaggcggtggtcttgccggtggatcaagcgggtcctactacagctcttctagtggaggggtgggactgggagggggtctcagcgtcggcggaagtggctttagcgccagctccgggaggggacttggcgtggggttcggcagtggcggaggaagctcatcatccgtaaagttcgtctctaccactagcagtagtcgcaaatcattcaaatcatag

SEQ ID NO: 29193 - DNA, 399 bp, synthetic construct
  misc_feature 1..399: note = Description of Artificial Sequence: Synthetic coding sequence
  source 1..399: mol_type = other DNA
atgtcaagacagagcagcgtgtctttccgctcagggggttctagaagtttctcaaccgcctccgcaatcacaccctccgttagtcggaccagttttacgagtgtgtcaagaagcgggggaggaggtggcggtggatttggtcgtgtctctctggcgggtgcttgtggggtaggagggtacggctcgcggagcctgtacaacctggggggtagcaagaggatttcaattagcacctcaggaggaagctttagaaatcgttttggggcaggcgcaggcggaggctatgggtttggcggaggcgctggtagcgggttcgggttcggcggtggcgcagggggtggattcggactcggagggggtgccggatttggcggtggctttggtggtcctggtttctag

SEQ ID NO: 29194 - DNA, 1410 bp, synthetic construct
  misc_feature 1..1410: note = Description of Artificial Sequence: Synthetic coding sequence
  source 1..1410: mol_type = other DNA
atgagtattcatttctcatcccctgttttcactagtcgaagcgcagcgttttccggcaggggcgcacaggtacgactgagctcggccagaccaggaggattaggaagttcctctttgtacggtctaggggcttctaggccccgagtcgcggttaggtccgcctatggaggccctgttggcgcaggcatcagagaagtgacaattaaccagagtcttctcgcacctctccgtcttgacgcggatccatccttacagagggtcagacaggaggaatccgagcaaatcaaaacactgaacaataaattcgcttcattcatcgacaaggtccgatttcttgagcagcagaacaaattactggagacaaagtggacgttgttgcaagaacagaagtctgctaagagcagccgtctcccggatatctttgaagcccagattgctgggcttagagggcaactggaagcgttacaagttgatggtggcagactggaggccgagctgcgtagcatgcaggatgtggtggaggattttaagaacaagtacgaagacgagataaatcatagaaccgcggctgaaaacgagttcgtggtcctgaaaaaagatgtggacgctgcctacatgagtaaggtggagctggaagccaaagtggacgccctgaacgatgagattaatttcctgcgaacactgaacgaaaccgaactcactgagcttcagtcccaaatttccgacacatctgtggttctatctatggataacagtagatcgctggatttagatgggatcatcgctgaagtcaaagctcagtacgaggagatggcgaaatgctccagagccgaggcagaggcttggtaccaaacgaagttcgaaaccctgcaggcgcaggccggaaaacacggggatgatctgagaaatacacgaaatgagatttcagaaatgaatagagcaatccagcgcttacaggctgagatagacaacataaaaaatcaacgcgctaagctcgaagccgctatagccgaggccgaagagcggggagagctggccttaaaagacgcccgtgccaagcaagaagagctggaggctgccctccagcgtggcaagcaggatatggcacggcaactgagggaataccaagagcttatgtcagtcaagctggctttggatattgaaatcgctacttatagaaagttgctggaaggagaagaaagtagactggctggcgacggtgtgggagccgtgaacattagtgtgatgaattcaactggcggaagctcttccggtggtggcatagggttgacccttgggggaaccatgggatccaatgcgctctcattctcgagttcagcaggccctgggctgcttaaggcttattcaatacggaccgcctctgcctctcggcgttcagccagggactag

SEQ ID NO: 29195 - DNA, 1338 bp, synthetic construct
  misc_feature 1..1338: note = Description of Artificial Sequence: Synthetic coding sequence
  source 1..1338: mol_type = other DNA
atgtctatccacttctcaagccctgtgttcaccagccgctccgctgctttctcgggacgcggtgcccaagtgaggttaagttctgcgagaccaggaggcctcggaagctcatcactttatggcctgggcgcatcccgtccacgggtagccccactcaggctagatgctgacccttcactccaacgcgtacggcaagaagagagcgaacagatcaaaactctgaacaacaaattcgcgtctttcatcgataaagtcaggtttcttgagcagcagaacaaattgctggagacgaagtggacgctcctgcaggaacaaaaaagtgctaaatccagcagactaccagatattttcgaagcgcagattgctggccttcgtggacagcttgaggccctgcaggtggacggcggaaggttggaggccgagctgagaagtatgcaggacgtagtggaagactttaaaaaccggtatgaagatgagattaaccacaggacagcagctgaaaacgagtttgttgttttaaaaaaagacgtcgacgcagcatatatgtcaaaagtagagttagaagcgaaggtcgatgcgttgaatgacgagattaacttcctccgcacccttaacgagactgagcttaccgagctgcaatcacagatctccgacacctctgtggtcctcagtatggacaattcgcgctctctagaccttgatgggatcatcgctgaggtcaaggctcaatatgaggagatggctaagtgttctcgggcagaagccgaggcttggtaccagacgaagtttgaaaccttacaggcccaggctggaaagcatggcgatgacttaagaaacacaagaaatgaaatatccgaaatgaaccgggctattcagcgtctccaggccgagatcgataacattaaaaatcagagggctaagcttgaagccgctattgctgaagccgaggaacggggtgagctggccctcaaggatgccagagcaaagcaggaagagctggaggccgctctgcaacgtggcaaacaggatatggcacgccagctgagagagtatcaagagctgatgagcgtgaagttggcattggacatcgaaatcgccacctatagaaaactgctggagggagaggaatctcgattggctggtgacggtgtcggggcagtcaatataagtgttatgaacagtactggtggcagtagcagtggtggaggcattggcctgaccttgggcggaactatgggaagcaacgcattatcgttctctagctccgctggacctggacttctgaaagcctacagcatacgcaccgcttctgccagtcgtcgctccgcaagggattag

SEQ ID NO: 29196 - DNA, 1212 bp, synthetic construct
  misc_feature 1..1212: note = Description of Artificial Sequence: Synthetic coding sequence
  source 1..1212: mol_type = other DNA
atgagcatacacttctccagtcctgtgtttacatcgcggagtgccgcattttcaggaagaggtgcgcaagtgcggttatcatcagccaggcccggtggactgggtagctcatcattatacgggctaggcgcatcacgccctcgggtggctgtgcgatccgcttacggcggtccggtgggggctggcatacgcgaagttaccatcaaccagagcctcctggctcctttaaggctcgacgcggacccatcgctgcagagagtgaggcaggaggagtctgagcagatcaaaacactcaataacaaattcgcatcgttcattgacaaagtaaggttcctcgaacagcagaataaactactggagacaaaatggactctgctgcaagaacagaagtccgctaaatctagccgcctcccagacatctttgaagcacagattgccggtttgcgcggacagctagaggctctccaggtagacgggggtcggttggaggcggagcttcggagcatgcaggatgtggtcgaggatttcaaaaacaaatatgaagacgaaattaatcaccgcactgcggctgaaaatgaattcgtagtcttgaagaaagacgtggatgccgcttacatgtccaaagttgagctcgaagcaaaagttgacgccctgaacgacgaaattaattttctcagaaccttgaacgagactgagatccacgtgcttcagtctcacatcagcgatactagcgtggttgtaaagctcgataacagtcaggatctgaacatggactgtattattgccgaaattaaagcccagtacgacgacatcgtgacatgctcctgggctaaggctgagtcttggtaccacggatgtctggaaatgaaggcgacagtcatttggcatggagagaccgtcggttgcaccaaggaggagattaaggagttaacgcatatgatccagcggctgatggccaaggtagaaaacgcaaagtgtcagaacagcaagctggaagtcgaagtgacacagagtgagcagcagggggaggtcgctctgtctgacaatagatgcaagttggtggagctggaagggactatgcagaaggccaggcaataccaggaggtaatgaattccaaactgggactgaatgtgaaagcggcttcatcttgccatctgctggacggggaggaacagagattgtgcgacggtatcagtgctgtgaacatttag

SEQ ID NO: 29197 - DNA, 1452 bp, synthetic construct
  misc_feature 1..1452: note = Description of Artificial Sequence: Synthetic coding sequence
  source 1..1452: mol_type = other DNA
atgtccatccgggtgacacaaaaatcttacaaagtctccacctccggacctcgcgctttctcctcaagaagctatacaagcggccctgggtcgcggatttcctcctcatcattttccagagtcggctccagtaatttcaggggcggactaggagggggttacgggggagcctcaggaatgggcggaatcacagctgtaacagtgaatcagtccctcctctcaccactggtgttagaagtagacccaaatatccaggctgtgcggacacaggagaaggagcagattaagacgctcaataataagttcgcctcattcatcgataaggtgcggttcttggagcagcagaataaaatgcttgagaccaaatggagcctgctccagcagcagaaaacagctaggagcaatatggataatatgtttgaatcatatatcaataacctccgtagacagctggagaccctgggccaggaaaagctgaaactggaggccgagttagggaatatgcaaggtctcgtggaggactttaaaaacaagtacgaggatgaaatcaacaagcgaacagaaatggaaaacgagttcgtgctgataaagaaagacgtagacgaagcttatatgaataaagtggagctcgagtctcgcctagaaggcctgacagatgagataaattttctgcgtcagctgtacgaagaggaaataagagagttgcagtcccaaatcagcgacacttccgtggttttatcaatggataatagccggagcctggacatggactccattatcgcagaggtgaaagctcagtatgaagacatcgctaaccgaagtcgagctgaagcagaaagcatgtatcagatcaagtatgaggaactacaaagcctcgcaggcaagcatggggatgatctcagaaggaccaaaaccgaaatatcggaaatgaataggaatattagcagacttcaagctgagatcgaaggcctgaagggccagagggcatccctggaggcagcaatcgcagatgctgagcagcgcggtgagctcgccatcaaagacgccaacgctaaactgtctgagctggaagcagccctgcagcgtgctaagcaggatatggcccgacaactccgggaataccaggaattgatgaatgtgaaactggcactagatattgagatcgctacctacaggaagttgttggagggggaggaatccagacttgagagcggtatgcagaatatgtccattcacactaagaccacttccggatacgccggaggcctgagctccgcttacgggggtcttacaagccccggtctgagctactccctgggctcaagttttggctctggcgcaggctcttctagtttctcaaggactagctcatcgagggctgtggtggtaaagaaaattgagaccagagacgggaaattagtgtccgagtccagcgacgttctgccaaagtag

SEQ ID NO: 29198 - DNA, 822 bp, synthetic construct
  misc_feature 1..822: note = Description of Artificial Sequence: Synthetic coding sequence
  source 1..822: mol_type = other DNA
atgtctataagggtgacacaaaagagctataaagtcagcacgagcggtcccagagccttctcttccaggtcatacacttctggaccgggttcgaggattagttcatcctcttttagtagagttggaagcagtaattttcgtgggggtttaggtggtggctacggtggggcttccggcatgggcggaattaccgctgttactgtgaaccaatcactcctcagcccactggtgctggaggttgacccaaatattcaggccgtaagaacacaggaaaaggaacaaatcaagaccttgaataataagtttgcctcattcatagataaagtgaggtttctcgaacagcagaacaagatgctcgaaacaaagtggtctctgctgcaacagcagaaaacggcacgtagcaatatggataatatgttcgagtcatacatcaacaatctgcgcaggcagcttgaaacgctgggacaggagaagctgaagctcgaagccgaattgggtaatatgcagggcttggtggaggactttaagaataagtatgaagatgagattaacaagcgaaccgagatggagaatgagtttgtgcttatcaagaaagacgtggacgaggcgtatatgaataaagtcgagctagaaagtcgcctcgagggcctgaccgatgagattaacttcttgcggcaactgtatgaggaggagattcgcgagctgcagtcacagatatccgacacttccgtagtgctgtccatggataattcacggtcgctagacatggacagcatcatcgccgaggttaaggctcaatatgaagatatcgcaaaccggtag

SEQ ID NO: 29199 - DNA, 1452 bp, synthetic construct
  misc_feature 1..1452: note = Description of Artificial Sequence: Synthetic coding sequence
  source 1..1452: mol_type = other DNA
atgtcgatccgcgtgacccaaaagtcatataaggtcagtacttccgggcctagggcctttagcagccgctcatacacatccggcccagggtccagaatcagtagttcatcgtttagtcgtgtgggaagcagcaatttcagaggcggattggggggtgggtatggcggtgcttctggtatgggcggtattaccgccgttacagtgaatcagtctctcctctctcctttggtcctggaagtggaccccaatatccaggcagtacggactcaggagaaggagcagatcaaaactctgaataacaaattcgccagcttcatcgataaagttagatttttagaacagcagaacaaaatgctggagacaaaatggtcactgctccagcagcagaagacggcccgaagcaacatggataatatgtttgaatcttacatcaacaacttgcggagacaactagaaaccctgggccaagagaaactcaagctcgaggctgaattgggcaatatgcaggggctggtggaggactttaaaaacaagtatgaggacgaaataaataaaaggaccgaaatggagaatgagttcgtgctgatcaagaaagatgtagacgaagcttacatgaacaaggttgaactagagtcccgcctcgaaggcctgactgatgagattaattttctacgtcagctgtacgaggaagagatacgggaacttcaatcccagatcagcgatacctctgtggtactttctatggataatagccggagcctcgatatggacagcattatagccgaagtgaaggcacagtacgaggacatagctaaccgatcacgcgctgaggctgagagtatgtatcagatcaagtatgaagaactccagagcctggcaggcaaacatggagacgatctgcgtaggacaaaaaccgagatctctgagatgaaccggaatatctcccggctacaagcagaaattgaaggacttaaggggcaacgtgcttctcttgaggccgctattgctgatgccgaacaacgcggagagctcgccattaaggacgccaatgcaaagctgagcgaattggaggccgcattacagcgcgctaagcaggatatggcacggcagctccgcgagtaccaagaactgatgaacgttaaattggctcttgatatcgagattgctacatacaggaaattgctcgaaggcgaagaatctcgtctcgaaagtggtatgcagaatatgtctatccacaccaagactacaagcggctatgcagggggactgtcgagcgcctacggtggcctcacttcacctggattatcctactccttgggtagtagcttcgggtccggtgcaggttcaagtagttttagtaggacgtcatcctcccgggctgtggtggtgaagaagatagagacacgcgacggaaagctcgtgtctgaatcttccgacgttctgcccaaatag

SEQ ID NO: 29200 - DNA, 534 bp, synthetic construct
  misc_feature 1..534: note = Description of Artificial Sequence: Synthetic coding sequence
  source 1..534: mol_type = other DNA
atgagtatccgggtgacgcagaagtcctacaaggtcagcacctccggccctagggctttctcctccaggtcctatacctctggtcccggatctagaatctcttcatccagcttttcccgggtgggcagctcgaacttccgaggtggtctaggtggcggttatggaggcgcttccggtatgggcggtatcacagctgtgacagtgaatcagtccctgttgagccccctggtgcttgaagtggaccccaatatacaagccgtgcgtacccaggagaaggaacaaattaagaccttgaacaataagttcgcctctttcattgataaagtgcggtttctggaacaacagaacaagatgttggaaacgaaatggtcgcttctccagcagcagaagaccgcacgatcgaatatggacaatatgttcgaaagctacatcaacaaccttcgtcgtcaactggagacactgggccaggagaagctgaagcttgaagccgaactggggaatatgcaagggctcgtggaagacttcaagaactag

SEQ ID NO: 29201 - DNA, 1536 bp, synthetic construct
  misc_feature 1..1536: note = Description of Artificial Sequence: Synthetic coding sequence
  source 1..1536: mol_type = other DNA
atgaacggagtctcttggtcacaggacctgcaggagggtatcagtgcctggtttggccctcccgctagtactcccgcatctacaatgagtatccgcgtcactcagaagagctataaggttagtacctcagggcctcgcgcattttcatcccgctcatacacatctggtccaggctctaggatcagctctagttcttttagtcgcgttgggtcctcaaactttcgcggtggtttaggcggagggtatggaggagccagtggcatgggtggcatcacagcggtaacggtaaaccagtctctgttatcaccactcgtgctggaagtcgatccaaacatccaggcagtccggactcaggagaaagagcagattaagacgttaaacaataaatttgcatcctttatcgacaaggtgaggtttttggagcagcagaacaagatgctcgagacaaagtggtccttgctccaacagcaaaagacagccaggtccaacatggacaacatgtttgagtcgtatatcaataacctgcggaggcagttagagacgctaggacaagaaaagctgaaattagaggcagagctaggtaatatgcaagggctggtggaagacttcaagaataagtatgaggacgagattaacaagaggaccgagatggagaacgagtttgtgctgatcaaaaaagatgtggatgaggcctacatgaacaaggtggaattggagagtaggttggaaggattgacagacgaaatcaatttcctgcggcagctctacgaggaggaaattcgcgaattgcagagccagatatccgacacctctgtggttttatcaatggacaacagcaggtctctggacatggatagcataatagccgaggtgaaggcccaatacgaggacatcgcaaataggtctcgagcagaagccgaatccatgtaccagattaagtacgaggagctacagagcctggcagggaaacatggggatgacctgcggagaacgaaaacggaaatctccgaaatgaaccgaaatatttctcgcttgcaggccgaaattgagggcctgaaaggacaaagggccagcctagaagctgccattgctgatgcagagcagcggggtgaactggccattaaggacgccaacgctaaactcagcgagctagaggctgccttgcagcgggctaagcaggacatggcgagacagctaagggaataccaggagctaatgaacgtgaagctagcactggacattgagattgccacctatcggaagctgcttgagggagaagagtctaggctggaatcaggaatgcagaacatgtctatccacacaaagactacaagtggctatgcgggtgggttgagctctgcttacggtggcctcaccagcccaggcctcagttatagtctgggaagctcattcgggtcaggagcaggttctagtagttttagtcggacgagttcctcgagagcagtagtggtgaagaaaattgaaaccagagacgggaagctcgtctctgagtccagcgacgtgcttcctaagtag

SEQ ID NO: 29202 - DNA, 1452 bp, synthetic construct
  misc_feature 1..1452: note = Description of Artificial Sequence: Synthetic coding sequence
  source 1..1452: mol_type = other DNA
atgtccatccgagtgacccagaagtcctacaaggtatcaacgtctggccctcgtgcatttagctcaagatcttatacttccggtccaggctcccgcataagctctagttccttctcccgtgtgggatcatctaacttccggggtggtctaggaggcggatacggaggcgcttcaggaatggggggaatcactgcagtgaccgttaatcagtctctgctctcacccctggtgctggaggtggaccccaacattcaggccgtgcgcacacaggagaaagaacaaatcaaaactctgaataacaagttcgccagtttcattgataaagtcagattccttgagcaacagaacaagatgcttgaaaccaaatggtccctgctgcagcagcagaaaacagccaggtctaatatggacaacatgttcgagagctatatcaacaatctgcggaggcagctcgagactcttggacaagagaagctgaagctcgaggctgaactcggaaatatgcaggggttggttgaggactttaaaaacaagtacgaggatgagatcaataagcggactgagatggagaacgagtttgtcctgattaaaaaggacgtggacgaggcttatatgaacaaagtcgagttagagtctcgcctggagggcctcactgatgaaatcaacttcctccgacagctttatgaagaggagattcgcgaactccagagccagatcagcgatacaagcgtcgtattgagtatggataattcgcggagtttggacatggattcaattatagccgaggtaaaggcacaatacgaagatatcgcgaataggagtcgcgcagaggcagagagcatgtatcagattaaatatgaggaacttcagagcctggcaggcaaacacggtgatgacctcagacgcactaaaacagagattagcgagatgaataggaacattagtcgcttgcaggctgagatcgaagggttgaaagggcagagggccagcttggaagccgcaatcgccgatgctgaacaacggggagagcttgccatcaaggacgctaatgcaaaactcagcgaactggaagccgcactgcaacgtgccaagcaagacatggctcggcaactgcgtgaatatcaagaattgatgaacgtgaagctggcactggacattgaaattgcgacataccgtaagttgttggaaggggaggaatctaggctcgagagcggaatgcagaacatgtctattcacactaagaccacttccggctatgcaggtgggctgagttcggcctatggtggtctgaccagccctggcttgagttattccttgggctcaagctttggctccggcgcaggatcctctagtttctcccgaacctcctcatctcgggcagttgtggtgaagaagatcgaaacccgcgacggcaagctggttagcgagtcctccgacgtcctgcctaagtag

SEQ ID NO: 29203 - DNA, 4071 bp, synthetic construct
  misc_feature 1..4071: note = Description of Artificial Sequence: Synthetic coding sequence
  source 1..4071: mol_type = other DNA
atgcaaagcaaagtgctcttggctgtcgccttatggctctgcgtggaaaccagggccgcaagtgtaggcctgcccagcgtttcactggacctccctaggctgagcattcagaaagacatactgacaatcaaagcaaatacaacattacagatcacatgcagaggccagcgcgacttggactggctgtggcccaataatcagtctggaagcgagcaacgcgtggaagttacggagtgctcagacgggctcttctgtaagacccttactatccccaaagtaatcggaaacgacacaggggcatataagtgcttctatagagagaccgatctcgcttccgtgatctacgtgtatgtgcaggattaccgcagcccatttatcgccagcgtgtcagatcaacatggagtggtgtacatcaccgaaaataagaacaagacggtggtcattccttgcctcggtagcatctctaatctcaacgtgtctctgtgcgcgcgataccccgaaaaaaggttcgtgcccgatggtaacagaatttcctgggatagtaagaagggttttactattccctcttacatgatctcttatgccggaatggtgttttgtgaggccaaaataaacgatgagagctaccagagcattatgtatatcgtcgtggtcgtgggttaccggatctacgatgttgttctgtccccgtcgcacggtattgagttaagcgtgggggagaagcttgtgttaaattgcacagccagaaccgagctaaacgtggggattgatttcaattgggagtaccctagctccaaacaccagcacaagaagctcgtcaatagggatctgaagactcagtctggatccgagatgaaaaagttcttatctaccttgacaatcgacggtgtgacccgatctgatcagggcttgtacacatgcgctgcctccagcgggcttatgaccaaaaagaattctacatttgtcagagtgcacgaaaaacccttcgtagcatttggatccggaatggaatctctggtggaagctacggtgggcgagcgggtcaggatcccagcaaaatacctggggtacccgccaccagagattaagtggtacaagaacggcatcccactggagtctaatcataccattaaggctggccacgtgttaacaattatggaggtttccgaacgagacacagggaactacacggttatcctgactaacccaatctcaaaagaaaagcagtctcacgtggtgagtctcgtggtgtacgtgcctccacagatcggagagaagtctctgatatcgccggtcgatagctatcagtacggaactacccagacgttgacgtgcaccgtgtatgccatcccccctccccaccacatccattggtattggcagctcgaggaggaatgtgctaacgagcccagccaggccgtgagtgttacaaatccgtatccctgcgaggagtggagatctgtcgaagactttcagggcggaaataagattgaagtcaataaaaaccagttcgcattgatcgaaggaaaaaacaagacagtgtctacactcgtcattcaggctgccaatgtcagcgccttatacaagtgcgaggccgtgaacaaggtgggtcggggtgagagggtgatcagttttcacgtcacaaggggtccagagatcaccctccagcccgacatgcagcctaccgagcaagagtcagtatccctgtggtgtaccgccgaccgcagcacattcgagaatctgacttggtataagttgggaccacagcctctccccatccatgttggtgagctgccgacacctgtttgcaagaatctcgacactctctggaagctgaacgcgacaatgtttagcaattctacaaatgacatcctcatcatggagctgaaaaacgctagcctgcaagatcaaggggactatgtttgcctggcacaggatcggaagacgaagaagcgtcattgcgttgttcggcagctcacagtactggaacgtgttgccccaacaatcactggaaatctcgagaatcagaccaccagtattggggagtctatcgaggtcagttgtactgcatcaggcaatccgcctccacaaattatgtggttcaaggataacgagactctggtcgaggacagtgggattgtgctgaaagatggaaataggaatctgactattcgtagggtcaggaaagaagacgagggtttatatacttgtcaagcttgttccgttcttggctgcgcaaaggtggaggccttcttcattatcgaaggggctcaggagaagacgaacctggagataattatccttgtcggcacagccgtgattgccatgttcttttggctgctgctggtgattatcttgaggacagtaaagagggccaacggaggcgagctgaagaccggctatctgtccatcgttatggatcctgacgagttgcccttggatgagcactgtgagcgcctgccatatgatgcaagtaaatgggaatttcccagagacaggttaaagctcggcaagcctctggggaggggcgcttttggccaggtcattgaggcagatgcgtttggaattgacaaaactgctacctgccgcaccgttgccgtgaaaatgctcaaagagggcgcaacccacagcgagcatagggctctgatgagcgaattgaagatcctgattcatatcggacaccatctaaatgtggtaaatctcctcggagcctgtactaaacctggagggccactcatggtaatagttgagttttgcaaatttggcaacctaagcacttatcttcggtcaaagcgtaacgaatttgttccatacaagacaaagggagctcgcttccgccaaggaaaagattacgttggagccatcccagtcgacctgaagcgacgtcttgacagcatcacatcatcacaatcctctgctagcagtggatttgttgaggagaagtcgctctcagatgtagaggaagaagaagctcccgaggacctctacaaggactttcttaccttagagcacctgatctgctatagttttcaggtcgcgaagggaatggagttcctggcctcaaggaagtgtatccatagagacctcgccgcacggaatatactgttatcagagaagaatgtggtcaaaatctgcgatttcggcctcgccagggacatatacaaggatcccgattacgtccggaaaggggacgcacggcttcctttaaaatggatggctccggaaacgatcttcgatcgcgtgtacaccattcagtccgacgtgtggtcctttggcgtgcttttgtgggaaatcttttctcttggcgcttccccatacccgggagtgaagattgatgaagagttctgtaggcggctgaaggaaggtaccaggatgcgcgctcccgattacaccacccccgaaatgtaccagactatgcttgactgctggcacggagaaccctcccagcgccctaccttttcagaactggtggagcacctcggtaacctactccaggcaaacgcgcagcaggacggcaaagattacatcgtgctaccgattagcgaaaccctgtcaatggaagaggacagtggtctatccctgcccacctccccggtaagttgcatggaagaggaagaagtgtgcgatcctaaattccactacgacaataccgccggtatctcccagtatctccagaactctaagagaaagagtcgccctgtttctgtaaagacctttgaagacatcccactagaagaaccagaggtgaaagtcattccggatgacaaccagacagattccgggatggtgctggcgagcgaggagctgaagacactggaagatcggacgaagctatcccccagttttggaggcatggtgcccagcaaatcccgcgaatccgtggcgtctgaagggtcgaaccaaacatctggctaccagagcggctaccacagtgatgacaccgacaccaccgtttacagctcggaggaggccgaactgcttaagctgattgaaattggagtccagacagggtcgaccgcccagatcctgcagccggactctggaaccacccttagctcccccccagtctag

SEQ ID NO: 29204 - DNA, 6629 bp, synthetic construct
  misc_feature 1..6629: note = Description of Artificial Sequence: Synthetic coding sequence
  source 1..6629: mol_type = other DNA
atgtggaacgatatcgagctgttgactaatgacgacacgggatccggctatttaagtgtcggtagcaggaaggagcatggaacagctctgtaccaagttgatctgctggttaaaatctccagcgaaaaggcctctttgaacccgaaaatccaggcgtgttctctctctgacggttttatcatagtggcagaccagagtgtaatactactggactccatttgcagatccttacagttgcacctcgtctttgacacagaggtggatgtggttgggctttgccaggaaggaaaatttcttctggtcggagagagatccggtaatctgcacctgatccacgtcacttcaaagcagaccctcctaacaaatgcgttcgttcagaaagctaacgacgaaaaccgtagaacataccagaaccttgtaattgaaaaagatggcagcaacgaaggaacctattatatgctcctgctgacctactcaggtttcttttgcatcaccaaccttcagctgctgaagattcagcaggctatcgagaacgtggacttctcgacagccaagaagctgcagggccaaattaagtccagtttcattagtacagagaactatcatacactggggtgtttaagcttggtggctggcgaccttgcatccgaggtgccagtcattatcggtggaacaggcaactgtgcattttctaagtgggaacccgattcttctaagaaaggaatgacagtgaaaaatttgattgacgcagaaattatcaagggcgcaaagaaattccagctgatcgataatcttctgttcgtgctggacacagacaacgttctctctctgtgggatatttacacactaacaccagtttggaactggccttccttgcatgttgaggagttcctgttgacaaccgaagcagactcaccatcttccgtgacctggcaaggcatcaccaatcttaaactgattgctctcactgcgtccgcaaacaagaagatgaaaaacctaatggtatacagtctccctactatggagattctttacagccttgaggtgtcaagcgtcagtagcctcgtgcagaccgggatcagcaccgatactatctatcttttagaaggagtttgcaaaaacgatcccaagctcagtgaagacagcgtgtctgtcctggtactgaggtgcctgacagaggccttgccagaaaaccgtctgagtaggttgctacataaacatcgcttcgccgaggctgagtcctttgctatccagtttgggctggatgtggagttggtatataaagtgaagagcaaccacatattagagaagttagcactttccagtgtggacgcttccgaacaaaccgaatggcagcaactggtcgatgatgccaaagaaaatctccacaagatccaagacgatgaatttgttgttaattattgccttaaagctcaatggatcacgtacgagacaacccaggaaatgctgaactacgccaagacgaggttgctgaagaaagaagacaagactgctctgatttatagcgatgggctgaaagaagtactgagagcacatgcaaaactaacaaccttctacggggctttcggcccagagaaattcagtggatccagctggatcgagtttctgaataacgaggatgatttgaaggacattttcctgcagcttaaggagggcaatcttgtttgtgcccaatatctctggctacggcaccgggctaatttcgaatcccgatttgacgtgaaaatgctcgaatctctcttgaattctatgtctgctagcgtgtctctgcagaagctctgcccatggtttaaaaacgatgtgatccctttcgtgaggcggacagtccctgagggtcagattatccttgctaaatggcttgagcaggccgcacgaaaccttgagctgacagacaaagctaactggcctgaaaatgggctccaactggctgaaatctttttcaccgcggaaaaaacagacgagctgggacttgcatcaagttggcactggatctcactgaaggactaccagaacactgaggaagtgtgtcagctccggacactcgttaataacctgagagagctgataaccctccacaggaagtacaactgtaagctggccctgagcgactttgaaaaagagaacacaaccaccatcgtcttcaggatgttcgacaaggtgttggcgccagaactgattccatccattctggagaaattcattcgagtgtatatgcgcgagcacgatttacaggaggaggaactgttgctgctgtatatcgaggacttgctcaaccgctgcagcagcaagagcacctctctatttgaaactgcctgggaagcgaaggccatggctgtgattgcgtgtctgagcgatacggatctcatctttgatgctgtcctgaagataatgtacgcagctgtggtgccatggagtgctgctgttgaacagctcgtcaaacaacacctcgagatggaccaccccaaggtgaaactgctccaggaaagctacaaactcatggaaatgaagaaactgctccgaggctacggtataagagaggtcaaccttctgaataaggagattatgcgggtggtgcgctacattcttaaacaggacgtgccaagctccctcgaagacgcactcaaggtagcccaggcattcatgttgagtgatgacgaaatttattccctgcgcatcatcgatcttatcgaccgggagcagggggaggactgcctgctgctgctgaagtctctgcccccagccgaagcagaaaaaactgccgaacgagttatcatttgggcacggctggctctgcaggaggaacccgatcactcaaaagagggtaaggcttggcgaatgagcgtggctaaaacatctgtcgacatcctgaagatcctgtgtgacattcagaaggacaacttgcagaagaaagatgaatgcgaggagatgctgaaactttttaaagaggtcgcctccttacaggagaacttcgaggtgttcctctcttttgaggactactctaattccagtctggtcgccgacttgcgggaacaacatatcaaggcccacgaagtcgcccaggcaaagcacaaaccgggatcaacaccagagccgatcgctgcagaagtacgatcacccagtatggagtccaaattacaccggcaggcactggccctacagatgtccaaacaggaactcgaggccgagcttacactgcgtgccctgaaagatggcaatattaaaacggctctgaaaaagtgttctgatctgttcaaataccactgtaatgctgataccggcaagctactgtttctcacctgccagaaattatgccagatgctggccgacaacgtgcccgttacagtcccagtgggacttaatttgccaagtatgatccatgatctcgcatcccaggcagccaccatatgctccccggactttttgttggacgctctcgagctctgcaagcataccttgatggctgtggagctgagcaggcagtgccaaatggatgactgtgggatcctcatgaaagcctcattcggaactcacaaggatccctacgaggagtggtcttattctgattttttctctgaggatggaatcgtcctcgagtcccagatggtcttaccagtaatctacgagttaattagcagcctggtcccacttgcagaatctaagagatacccccttgagagtacctcactgccttactgtagtttgaacgaaggcgatgggcttgtgctgcccgtaatcaattccatctctgcactgttgcagaacctgcaggagtctagtcaatgggagctagcattaaggtttgtggtcggctctttcggcacttgtcttcaacactccgtatccaactttatgaatgccaccctgagtgagaagctgttcggagaaacaactttggtgaaaagtagacatgtcgtaatggagctaaaggaaaaagcagtaatttttatcagagaaaacgcaacaactctgctccacaaagttttcaactgccggttggtggaccttgatctggcactgggatactgtacattactgcctcagaaagatgttttcgaaaatctttggaagttgatcgataaggcttggcagaattatgataagatattagccatatctctggtggggtccgaactagcctccctgtaccaggagatcgaaatggggctgaaatttagggagctctccaccgacgctcagtggggcatacggctgggtaagctcgggatttccttccagcccgtgtttaggcagcatttcctgaccaagaaggaccttattaaagcccttgtggaaaatatcgatatggatacctcattgatcttggagtactgtagtacttttcagctggattgcgacgccgtcctgcagctgtttattgaaaccctgctgcacaatacaaatgcgggacaggggcaaggagacgccagcatggacagcgcaaagcgcaggcacccaaaactcctggccaaggccctggagatggtgcctctccttacttcaacaaaggatctggtgatctccctttccggcatactgcacaagctggacccctacgattacgaaatgatcgaggtggttttaaaggtaatcgaacgcgctgacgagaaaataactaacatcaatattaatcaggccctcagtatcctgaaacacttaaagagttatcggagaatctccccccctgtcgaccttgaataccaatacatgctggaacacgtcatcacactccccagcgctgcgcagacaaggttgccctttcacctgatttttttcggaaccgcccagaacttttggaagatcctgagcacagagctgtccgaagaatcattccccacactgctgctcatcagcaagctgatgaaattttcactcgatacactatacgtaagcaccgctaagcacgtgttcgagaaaaagctaaagcctaagctgcttaaattaacacaagcaaagtcttctactctcatcaacaaggaaattacaaaaattacacagaccattgagtcatgcctgctgagcattgtcaacccagaatgggccgtagccattgccatctctttagcccaggacattccggagggctcgttcaaaatatcggctctgaagttctgcctgtacctggcggagaggtggttgcagaatataccgtctcaggacgaaaagcgagaaaaggccgaagccctcctgaaaaaacttcacatccagtataggcgctctgggacggaggctgttctgatcgctcacaaactgaatacagaggaatatttacgcgtgattgggaagccagcccacttaatcgtctcactgtatgagcacccaagcattaaccaaaggattcagaactcatcaggaaccgactacccggatattcacgccgcagctaaagaaatcgccgaagtgaatgagattaacctggagaaggtgtgggatatgttgctggaaaagtggctgtgtcctagtaccaaaccaggagagaaaccttccgaactcttcgagctgcaggaggacgaagctctgagacgagtgcaatacctcctgctgagcagacccatcgactactcctcaagaatgctgtttgttttcgccacctccactaccaccaccttggggatgcaccagttaaccttcgcgcatagaacccgcgctcttcagtgcctcttctatttagctgataaggaaaccattgagtccttgtttaaaaaaccaatcgaagaggtgaagtcatatttgcgatgcatcaccttcctggcttcatttgagactctgaatatcccaattacttacgagctgttttgttccagcccaaaggaaggtatgatcaaaggtctgtggaaaaatcatagtcatgagtccatggctgtgagattagtgaccgaactttgtttggagtacaagatctacgacctgcaactctggaatggattgctgcagaaacttctgggcttcaatatgatcccttatctgagaaaggtgctaaaagcaatttcttctattcatagtctatggcaggtgccttacttctctaaagcgtggcagagggttattcaaatcccattactcagcgcatcatgcccattgtccccagaccagctgtcagactgttcagagagtctgattgctgtgcttgagtgtccagtgagcggcgacctcgatcttatcggtgtggctcgacagtatatccagctggagctgcccgctttcgcgctcgcgtgtctcatgttaatgccacatagtgaaaaacgtcaccagcagattaaaaactttttaggatcctgtgatccacaagtgatactcaagcagcttgaggaacatatgaataccggacagcttgcaggcttttcacaccagattaggtctctcattctcaacaacatcattaataaaaaagagttcgggatactcgcaaaaactaaatactttcagatgttgaagatgcatgccatgaatactaacaacattacagaattagttaactacctcgccaacgacctgtccctggacgaagcttcggtattaatcactgagtatagcaagcattgtgggaagccagtcccccctgataccgcaccctgtgaaatcctgaaaatgttcctgtctgggctgtcata

SEQ ID NO: 29205 - DNA, 1332 bp, synthetic construct
  misc_feature 1..1332: note = Description of Artificial Sequence: Synthetic coding sequence
  source 1..1332: mol_type = other DNA
atgcttgagcacgttataactttaccctcagcagcacaaacacgcctgccattccacctgatcttctttggaactgcacaaaatttttggaaaatcttgtctaccgaattgtccgaggagtcattcccaactctcctgctaatcagcaagctgatgaaattttctcttgataccctctacgtgtcaacagcaaaacacgtgttcgagaagaaactcaagccaaagcttttgaaacttactcaggcaaaatcgtctactctcatcaataaggagatcacaaagatcactcagaccatagagtcttgtcttctaagcatcgtaaatccagagtgggctgtcgctatcgctatcagcctagcacaggacatccccgaagggagttttaagatctccgccctgaaattttgcctttatctggccgagagatggctccagaacatcccgtctcaggacgagaaaagagagaaagcagaagcacttctgaaaaagttacatatccaatatcgccgatccggcacggaggcagtgctgatagcgcataaactgaatactgaagagtacctcagggtgatcggcaaaccagcacacctgattgtgtccctgtacgagcaccctagcatcaatcagcggatccagaattcttccgggaccgactatcctgatatccacgctgccgcaaaagagattgcagaggtgaatgagatcaacctcgagaaagtctgggacatgctcttagagaagtggctttgcccatccaccaagccaggcgagaagccaagtgagctgttcgaactccaagaggatgaggccttgagaagggtgcagtaccttttgttatctcggccaatcgattatagttccaggatgctgttcgttttcgccactagcaccacgacgacactaggaatgcaccagctgaccttcgcgcaccgtacaagggctctgcagtgcctgttctacctcgctgacaaagagacgatagagtctctgttcaagaaacctatagaagaagtgaagtcatatttgcgctgcatcaccttcctggcatctttcgagacgctgaacattcccatcacatacgagctgttctgctcttcccctaaagagggcatgatcaaagggttatggaagaaccactcgcacgaatctatggcagtgagactcgtcaccgaactgtgtctggagtataaaatttatgacttgcagctgtggaacggcctactacagaagctgctgggcttcaacatgataccctacttgcgcaaggtgctgaaagccatctcatctatccattcactttggcagaggtggagatcatgttatgtcgcgtag

SEQ ID NO: 29206 - DNA, 417 bp, synthetic construct
  misc_feature 1..417: note = Description of Artificial Sequence: Synthetic coding sequence
  source 1..417: mol_type = other DNA
atgaattcgctggtatcttggcagctgctgctgtttttgtgcgcaacacacttcggcgaacccctggagaaggtagctagcgtggggaactcaagacccactggccaacagcttgagtctctggggctgctcgctccaggtgagcagtcccttccctgtacagagcggaaacctgcagcaacagctcgcctatcacgtcgcggtacgtctctgtctcctccccctgaaagttccggaagtccacagcagcccggattatcggccccacattcccgtcaaatccccgcaccccaaggcgctgtgctcgtccagcgggagaaagacctgccaaactataattggaactcctttggtcttagatttggaaagagagaagcggcacctggaaaccatggacggagcgcaggccgaggttag

SEQ ID NO: 29207 - DNA, 771 bp, synthetic construct
  misc_feature 1..771: note = Description of Artificial Sequence: Synthetic coding sequence
  source 1..771: mol_type = other DNA
atggcccacaggccgccttcaccagcactagcaagcgttttgcttgcactgctgctgtccggcgcagcccgtgcggctgagattgtgggtgggcacgaagcacagccccactcacgaccatacatggctagtctgcagatgagaggtaaccctggaagccatttttgtggaggaaccctcatacatccaagttttgttctcacagccgctcactgtctgagggacatccctcagcgcctcgtaaacgtcgttcttggagcccataatgtgcggacgcaggaaccaactcagcagcacttcagcgtcgctcaggtctttcttaacaattatgacgctgagaacaagctcaatgacgtacttttgattcagttgtcatctcccgcaaacctaagtgccagtgtggccactgtgcagctgccgcagcaggatcagcccgtacctcatggcactcagtgtctagcaatgggctggggacgggtcggtgctcatgaccccccagcccaggttctgcaggagttaaacgtaactgtcgtgacttttttttgtaggcctcataatatctgcacattcgtgccgaggaggaaggccggtatttgcttcggagattccggtgggccactcatttgtgatggcattatccagggaattgactcctttgtgatatggggttgcgcgaccagactttttcctgattttttcaccagggtcgctctgtacgttgactggatacggagcacactgagacgcgtagaggcgaaaggtcgtccctag

SEQ ID NO: 29208 - DNA, 2937 bp, synthetic construct
  misc_feature 1..2937: note = Description of Artificial Sequence: Synthetic coding sequence
  source 1..2937: mol_type = other DNA
atggcacacacgacgaaagtcaacggtagcgcatccgggaaagctggcgacattttgtccggtgaccaggacaaggaacagaaggatccatactttgtggaaaccccctacgggtaccaactggaccttgattttctgaaatatgtcgacgacatccagaagggaaacaccataaagaggttgaatatacaaaagagaaggaagccctcggtcccttgtcccgagccaaggactacgtctggtcagcagggtatttggacctctacagagtcattgtcaagttctaactcggacgacaataaacagtgtcccaattttcttattgcaagatcccaggtgacaagtacacctatctcaaagccacccccacctctcgagacatcactgccgttccttacaatcccagaaaataggcaattgcccccaccctccccacagctgcccaagcacaacttgcacgtcactaagacattgatggagacccgccgtaggttggaacaggaacgcgctaccatgcagatgaccccgggtgaatttcggaggccccgtctcgccagttttgggggaatgggcactacgagtagcctcccctctttcgtggggtcgggtaaccacaatcccgctaagcatcagctgcagaacgggtaccagggtaatggggattacggttcctatgcaccagctgcccctactacatcttctatggggtccagcatacgccatagccccctttcttccggcatcagcaccccagtcacaaacgtgtcaccaatgcacctacagcacatcagggaacagatggctatcgcgctgaagcgcctcaaagagctggaagagcaggtccggaccatacccgtgctccaggtgaagatctccgttcttcaggaggagaagagacagctcgtgtcacagttaaaaaaccaacgcgctgcctcccagattaacgtgtgcggagtcaggaagcgcagctattctgctggaaatgcatctcagctagaacagctgagtcgggcacggagaagcggcggagagctctacatagattatgaggaggaggagatggagaccgtcgagcagtctacgcagagaatcaaggaatttcggcaactaactgccgacatgcaggcattggagcagaaaatccaggactctagttgtgaggccagtagcgagcttcgagagaatggggaatgccgctctgtggctgttggggctgaagagaacatgaacgacattgtagtctaccaccggggatcacgcagttgtaaggacgctgctgtgggcaccctagtagaaatgcgcaattgtggtgtgtccgtgactgaggcaatgctcggcgtcatgacagaagccgacaaggagatagagctgcagcaacagacaattgaatccctgaaagaaaaaatttaccggctagaagtgcagctgcgtgaaacaacccacgatcgagaaatgacaaagctaaagcaggagctgcaggccgctggaagcagaaagaaagtcgataaggcgaccatggctcagcccctggtgtttagcaaggtagttgaagccgtggtgcaaacgagggatcagatggtgggatctcacatggatttagttgatacttgtgttggtacctccgttgagaccaattccgtgggtatatcttgccagcctgagtgtaaaaacaaagtcgtcggacccgagctgcctatgaattggtggatagttaaggaacgcgtggagatgcatgacaggtgtgccggtcgcagtgttgagatgtgtgataagagcgtctccgtggaggtttccgtctgcgaaacggggagtaacacagaggagtccgttaacgatctcacattgctcaagaccaatctaaaccttaaggaggtccgcagtatcgggtgtggagactgcagtgtggatgtcaccgtttgtagtcccaaagaatgcgcctcacgtggcgtcaatactgaggctgtgtcacaggtcgaagctgccgtgatggctgttcctagaaccgcagaccaggatacatccaccgatttggagcaggtgcaccagttcaccaacactgaaactgccacgttaatcgaatcttgtactaatacgtgcctgtctaccctggataagcagacctcgacacagaccgtggaaaccagaaccgtggctgttggcgaaggcagggtgaaggatatcaattccagcacgaagacaaggagcatcggagtgggcaccctattgtctgggcatagcggctttgaccgaccatctgctgtcaaaacgaaagagtctggcgtgggccagatcaatattaatgataattaccttgtcggcttaaagatgcgcacaattgcctgcggacctccacaactgaccgtaggactaaccgcgtccagaagaagtgtgggagtgggtgatgaccccgtgggcgagagccttgagaaccctcagccccaggccccactgggaatgatgacaggactcgatcattatatagaaaggatccagaaattgttagcggagcagcagactctgctcgctgagaactattccgaactggccgaggccttcggagagccacactctcagatgggttctctgaattcccagctgattagcacccttagcagcattaacagcgttatgaagagcgccagcacagaggagttaagaaatcccgatttccaaaagacatcactcggaaagataacggggaattatctcggttacacttgtaagtgtgggggattacagagcggcagccctttaagctctcagacctcccagccagaacaggaagtgggtacaagtgagggcaagcctatttcctccctggatgccttccccacacaagaagggactctctctcctgtaaacctgactgacgatcagatcgccgcaggcctgtatgggaatttctcgcactcccaatctctggctagcgggttctag

SEQ ID NO: 29209 - DNA, 831 bp, synthetic construct
  misc_feature 1..831: note = Description of Artificial Sequence: Synthetic coding sequence
  source 1..831: mol_type = other DNA
atgctctcagcgtgtaatctgctgaagaataccattaatgatcctaaggccctcacatctaaagacatgaggttttgcctgaacactctccagcacgagtggttccgggtcagcagccaaaaaagtgctatcccagctatggttggcgactacatcgccgcatttgaagccattagcccagacgtccttagatacgtgatcaacctagcggatggcaacggcaacacggcgctgcattacagcgtgtctcattctaacttcgaaattgtgaagctccttcttgacgccgatgtgtgtaacgtcgatcaccagaacaaggccggatacaccccgatcatgctggccgcattggccgcagtggaagctgagaaggacatgaggatcgtggaagagctcttcgggtgcggggatgtgaacgctaaagcctcgcaggctggccagacagcactaatgttggctgtgtctcacggcaggatcgacatggtgaaagggctcctggcttgtggagccgatgtaaatatccaggatgacgaaggcagcacagctcttatgtgtgcctccgagcatggacacgtggaaattgtgaaactgttgttagcccagcctggatgcaacggccatctggaggataatgacggctcaacagctctttccatcgcgttggaggctggccacaaggatatcgctgttctcctttacgcccatgtcaacttcgcaaaggcacagtctcctgttagcgtagtgcatcttgcttttgtgaatcggttgaaaagcaccaggttggtggacccactcccacctggcatagacggacggcagattttgtgttag

SEQ ID NO: 29210 - DNA, 993 bp, synthetic construct
  misc_feature 1..993: note = Description of Artificial Sequence: Synthetic coding sequence
  source 1..993: mol_type = other DNA
atggctgaggggcatcacgccgtcaatatcgagggacttaaatccgccagggttgaagatgaaatgcaggtgcaagaatgcgaacccgagaaggtggaaatccgggaaaggtacgagctctctgaaaagatgctgtccgcatgcaatttgctgaagaacacaatcaacgaccccaaagcactgacctcgaaggatatgggccaagtgcagtggctgacacctatgatacccactctaagggaagctgatgccggtggcagtcacgagcgcttctgtctcaatacactgcagcacgagtggttccgtgtgtcttcccaaaagtctgccatccccgctatggttggcgactacatcgcagcctttgaggccatctcaccggacgtactccggtatgtgatcaatcttgctgatggtaatggaaacactgctctgcattacagcgtttcccactcaaattttgaaatagtcaagctgctgctagacgccgacgtttgcaatgttgatcaccagaacaaagctggttacacacctatcatgttggctgctctcgcagccgtggaagccgagaaagatatgcgtattgtggaggagttgttcggatgcggcgacgtcaacgcaaaagcttcccaggcaggacagaccgcccttatgcttgccgtgagtcatggacgaattgacatggtgaaaggcctcctggcctgcggtgcagacgttaacattcaagatgacgagggcagtactgcgctgatgtgtgcctctgagcacggacacgtggaaattgtcaaacttctcctcgctcaacctggatgcaacgggcacttagaagacaacgacggcagcaccgccctgtcaatagcactggaggctggccacaaagacatcgccgtgctgctgtacgctcatgtgaattttgcaaaggcccaatccccgggtactcctaggttgggcagaaaaacctcgcctggccctacccatcgcggtagttttgactag

SEQ ID NO: 29211 - DNA, 3585 bp, synthetic construct
  misc_feature 1..3585: note = Description of Artificial Sequence: Synthetic coding sequence
  source 1..3585: mol_type = other DNA
atggagactcgcagaaggctggagcaagaacgggctaccatgcagatgacacccggtgagttcaggaggcccaggctggcaagttttggaggcatgggaacaacctcgtccctccccagttttgtaggctctggtaaccataaccccgcaaaacatcagctgcagaatggctatcagggcaacggcgactatgggtcatacgcccctgccgcaccaacaaccagcagcatgggatcctcgatcaggcactcgcctctgtctagtggcatctccacccccgtcaccaacgtgagccctatgcatcttcaacatatacgcgagcagatggcgattgcccttaaacggctaaaggagctcgaggaacaagttcgcaccatccctgttcttcaggtaaaaattagtgtgctccaggaggaaaagcggcagctagtctcacagcttaagaaccagcgggctgcctcccagattaacgtttgcggggtaaggaaacgttcatatagtgctggcaacgcctcacagctcgagcagttaagtcgagcccgtcggagtgggggtgaactatatatcgactatgaagaggaggagatggaaaccgtcgaacagtccacccagcggatcaaagaattccgccagttgacagccgacatgcaggccctggagcaaaagattcaagattcctcgtgcgaggcatcgtccgagctgcgagagaacggggagtgcaggagtgttgccgttggagccgaagagaatatgaacgacatcgtcgtttatcaccgcggatcccggagttgcaaagacgccgcagtcgggaccttggtcgaaatgaggaattgcggcgtctccgtcaccgaggcaatgctaggggtgatgaccgaagcagacaaggagatagagctgcaacaacagacgattgaatcccttaaggaaaaaatttaccggttggaggttcagctgagggaaaccacccacgacagagaaatgacaaaactgaaacaagaactccaagccgctggctcccgaaaaaaagtggataaagcgactatggcccagcccctcgtgttcagcaaagtagtggaggctgtagtccaaacaagagaccaaatggttggctctcatatggacctagtagatacatgcgtgggaacttccgtagagaccaattcagtcggcataagctgccagcccgagtgtaagaacaaggtggttggacccgaactgcccatgaactggtggattgtgaaagagagggttgagatgcacgatagatgtgcaggccgtagcgtggaaatgtgcgacaagagtgtgtccgtggaggtctctgtgtgtgagacagggagtaataccgaagaaagcgtcaatgatctcacactactcaagacaaacctgaacctgaaggaggtacggtctatcggatgcggcgactgttcagtggacgtaaccgtgtgctctcctaaagagtgtgcctcccgcggtgtgaatacggaggcagtgtcccaagttgaagcagctgtaatggcagtaccaagaaccgccgatcaggacactagcaccgatctggaacaagtacaccaattcacaaataccgagacagccaccctgatagaatcctgtaccaatacgtgtttgtcaacactagataagcaaacctcaacacagacagtggagacgagaacggtagctgttggagaaggcagagtcaaagatattaactcaagcacaaagacccggtccataggggtcggcactctcctgagtggccattccgggttcgacaggccaagcgcagttaagaccaaagaatctggcgtggggcaaatcaacataaacgacaattatttagttggattgaagatgaggaccatcgcgtgtggcccaccacagctgactgtgggtctaacagcaagtcgtagatcagtcggggtgggcgacgatcccgtgggcgagtcgctcgagaacccccagccccaggctcctctgggcatgatgactggcctcgatcattatattgagaggatccagaaattgttggccgaacaacagaccctgttggcagagaattattctgagctggcggaggctttcggagaaccccattcgcagatggggagcctgaatagccaactgattagtactctaagctcaatcaattccgttatgaagagtgcctctactgaagagctcagaaaccctgatttccagaaaacatccctaggcaagatcaccgggaactatttgggctacacctgtaagtgtggcggtttacaatccggctcccccctgtctagccagacatcccagccagaacaggaagtaggcacctctgagggcaagcctatttcttccctggacgcttttccgacccaagagggaacgctctccccagtcaaccttacagacgatcagattgccgctgggctctacgcctgtacaaataatgagagcaccttgaaaagtataatgaaaaaaaaggacgggaataaggacagcaatggcgcaaaaaagaacctccagttcgtggggattaatggcggatacgaaactaccagctcagacgactcttcctccgacgagtccagttctagcgaatccgacgacgaatgcgatgtgatcgaatatccattggaagaggaagaggaagaggaggacgaggatacccgcggtatggccgaggggcaccacgctgtgaacattgagggactgaagagtgcacgggtggaagacgagatgcaggtccaggaatgcgaacctgaaaaggttgagataagggagagatacgaactgagcgagaaaatgctgagtgcatgcaacctgctgaaaaatactattaatgatcctaaggccctaacgagtaaggatatgcggttttgtctaaacactctccagcatgaatggttcagagtgagctcacagaagtccgccatcccagcgatggtcggagactacatcgccgcatttgaagcgatctccccagatgtgctgcggtacgtcattaacctggctgacggtaacggaaatactgcgttacactactcagtcagccatagcaacttcgagattgtaaagctgttactcgacgctgatgtgtgtaacgtggaccaccagaataaggcaggctatacaccaatcatgctggctgcactggccgctgtagaagccgaaaaagacatgcggattgtggaggagctgtttgggtgcggtgacgtcaatgccaaggccagtcaagccggtcagacggccctgatgctggctgtaagccacggacgcatagatatggttaagggactcctggcttgcggcgctgacgtaaacatccaggacgatgaagggagtaccgcgttgatgtgcgcatccgagcatggacacgtcgagatcgtgaagctgcttctggcacagcctggatgtaatggtcatctggaggacaatgacggcagtaccgcactgtccatcgcactggaggctggccacaaagatatagccgtgctgttatatgcccacgtcaacttcgccaaagcccagagccccggaacccctcgtctcgggagaaagacgtccccaggacctacacatcgcggatcgttcgattag

SEQ ID NO: 29212 - DNA, 4059 bp, synthetic construct
  misc_feature 1..4059: note = Description of Artificial Sequence: Synthetic coding sequence
  source 1..4059: mol_type = other DNA
atggcccacacaaccaaggttaacggtagcgcctctgggaaggccggtgacatcttatctggggatcaagataaagagcaaaaggatccttacttcgtggagaccccctacggctaccagctggacctcgattttctaaagtatgtcgacgatatccagaagggcaacaccatcaagcgtcttaatatccaaaagcggaggaaacctagcgttccctgcccggaacctaggactacttctgggcagcagggcatctggacttctacagagtctcttagctctagcaactccgacgataataaacaatgtcctaactttctgattgccaggtcccaggtaacctcaacacctatatctaagccgcctcccccactcgaaacaagcttgcctttcctgactattccagagaatcgccaactcccacccccatccccacaactgcccaagcataatctgcacgtgactaagactctgatggagactaggcgacggttggagcaggagagggctaccatgcaaatgacgccaggtgagtttagaagacccaggttggcatcatttggcggtatgggcacaacaagttctttaccatccttcgtcgggagtggaaaccacaatcctgctaaacaccaattgcagaatgggtatcaaggcaacggggactatggctcttatgcccctgctgctccgaccacgtccagcatggggagcagcatccgccattcaccgcttagttcaggcataagcacacccgttactaacgtcagtcctatgcacctgcagcacatacgcgaacaaatggccatagctctgaagcgactcaaggaattggaagagcaggtgagaacaattcctgtgcttcaagtgaagatcagcgtcctgcaggaagagaagcggcagcttgtctcccagttgaaaaaccagagggctgcttctcagattaatgtgtgcggggtgcgtaaaagatcttattcagctggcaacgcctctcagctggagcaactctcaagagctcgtagatccggaggggaattatacattgattatgaggaggaagaaatggaaaccgtggagcaatcgactcaacggattaaagaattcaggcagttgactgcagacatgcaggccttagaacagaagatacaggattcaagttgcgaagccagctctgagttaagggagaacggagaatgcagatctgtggccgtcggtgccgaagaaaatatgaacgacatcgtggtttaccacagggggtcccgctcctgtaaagacgccgcagtgggtacgctcgtagaaatgcgcaactgcggggtttctgtcacagaggccatgctaggtgtgatgaccgaggcagataaggagatcgaactgcaacagcagactattgagagtctaaaggagaagatctacagactggaggttcagctaagggagactacacatgatagagagatgacgaagctgaaacaggagctgcaggcggctggtagcaggaaaaaggtggataaagccactatggcccagccactggtctttagcaaagtcgtggaggccgtagtccaaacgcgtgatcagatggtgggtagccacatggatctagtagatacttgcgtggggacctcggttgagaccaattccgttggtatcagctgtcagcctgaatgcaaaaataaggtcgtcgggcctgagctacccatgaactggtggatcgtgaaagaaagggtggaaatgcatgatagatgcgccggaagatccgtagagatgtgcgacaaaagcgtgtctgttgaagtaagcgtctgcgaaaccggcagtaatactgaagaatcagtgaatgatcttacccttctgaagactaacctcaacctgaaagaggtgcggagtatcggctgcggagactgctctgttgatgtgacagtgtgttcccctaaggagtgcgctagtcggggagtcaacaccgaagcggtgagtcaggttgaagccgctgttatggccgtccccaggacagcagatcaggacacttcaaccgacctggagcaggtgcatcagttcacgaacactgagactgccactctgatcgagagctgtaccaacacatgtttgtccaccttggacaaacagacatcaacccaaactgtggagacacgaaccgtggctgtaggcgaaggtcgggtgaaggacattaactcgtccactaagaccagaagcattggggtaggtaccttgctgagcgggcactccggatttgaccgaccctcagcggtcaagaccaaggagtcaggagtcggacagataaacatcaatgacaactacctggtggggctaaaaatgcgcaccatagcttgcggccctcctcaacttaccgtgggcctgaccgcctcgcggaggtccgtgggtgtgggcgacgaccctgtgggcgagtcactggagaatccccagccacaggcacctctggggatgatgaccgggctggaccattacattgagaggatacaaaaactgctggcagagcaacagacattgctggccgaaaactatagtgagctcgctgaagccttcggtgaaccccacagtcagatgggttcgttgaactcccagcttatttcgaccctatctagtattaactcagtaatgaagtcagcatccacagaggagctgcggaatcccgattttcagaaaacatctctcggaaagattacaggcaactatctggggtacacgtgtaagtgtgggggactgcagagcggctcacccctgtccagtcagacctcccaaccagaacaggaagtgggtacttcggaaggcaaacctatttctagcctagatgctttccccacccaggaggggactctcagtcctgtcaacctgaccgatgatcagattgcagctggtctgtatgcttgcaccaacaacgaatccacacttaagagcattatgaagaagaaggacgggaacaaagacagtaacggagcaaaaaagaacctgcaattcgtgggaatcaacggcggttacgagaccacgagctcggacgattccagcagtgacgaaagcagtagctcagagtcagatgatgagtgcgacgttattgagtatccactcgaagaggaggaggaggaagaggatgaggataccaggggaatggccgaaggccatcacgcggtgaacatcgagggcttaaagagtgcgagggtagaggacgaaatgcaagtgcaagagtgcgagccagaaaaggtagagattcgtgagcggtatgaactgagtgagaaaatgctgtctgcatgcaatttgctcaagaatacaatcaacgaccccaaggctcttacgagcaaggatatgcgcttttgtctcaacacactccagcacgagtggttcagggtcagctctcagaaaagcgcaatcccggcaatggtgggggactacatagccgcattcgaagctataagccccgacgttctgcggtatgtgatcaatctcgcagacggaaatggaaataccgcactgcactacagcgtgtcccactcgaacttcgaaatcgtaaaattgttgttagatgccgatgtgtgcaatgttgatcaccagaacaaggccggatacacacccattatgctggctgcacttgccgctgtcgaagcagagaaagacatgcggattgtggaagaactattcgggtgcggcgacgtcaatgctaaagcatcccaggccggacagacggcccttatgctcgccgtctctcatggtcggattgatatggtcaaaggattgctcgcatgtggcgctgacgtcaatatccaagatgacgagggatctaccgcacttatgtgcgcctcagagcatgggcatgtggagatcgtgaaactgctgctggcacaaccaggctgcaacggccatcttgaggataatgacggatccactgctttatctattgcgctggaggccggacataaagacatagctgtcctcctgtacgcccatgtcaatttcgctaaagcgcaaagtccagggaccccaaggcttggcagaaaaactagcccaggcccaacccatcgagggtcgttcgattag

SEQ ID NO: 29213 - DNA, 4059 bp, synthetic construct
  misc_feature 1..4059: note = Description of Artificial Sequence: Synthetic coding sequence
  source 1..4059: mol_type = other DNA
atggcgcataccaccaaagtaaacggcagcgcctccggcaaagccggagatatcctgagcggggaccaggacaaagaacagaaagatccatacttcgtcgagactccgtacggatatcagctggacctagactttcttaagtacgtggatgacatccaaaaggggaacactatcaagcgactgaatatacagaaacgcagaaagccttccgtgccctgcccggaaccgagaacaacttctggacaacaaggcatctggacttccaccgaaagccttagctcatccaattctgatgacaataagcagtgccccaactttctgatagccaggagccaggttacaagcacacctataagcaaacctccgccacctcttgagacttcactcccgtttctgaccattccagaaaacagacagcttccccctcccagccctcagttgcccaagcataacctccacgtgacaaagaccttaatggagaccagaagacgcctagagcaggagcgcgctacgatgcagatgacacctggagagtttcgcaggccgcgtctggcctctttcgggggtatgggaacgaccagctcactccctagctttgtcgggtccggtaatcataacccagccaaacatcaacttcagaacggctaccaggggaacggcgactacggaagctatgcccctgctgctcccaccacctcaagcatgggcagtagcattcggcatagtcccctgagttccggcatctcaacgcccgtaactaatgtgagccctatgcaccttcagcatataagagagcagatggccattgcccttaaaagactgaaggagctcgaagagcaggtacgcacaataccagttctgcaggtgaagatatcagtcttgcaggaagagaaaaggcagctggtgtctcagctaaagaatcagagagccgcatcacaaatcaacgtatgcggagtgaggaagagatcatactcggccggaaacgccagtcagctagagcagctctcccgggcacggcgaagcggcggagaattgtacatcgattacgaggaagaagagatggaaacggtcgaacagtcaacccagagaattaaggaattcagacagctgacagctgacatgcaggccctcgaacagaagatccaggacagtagctgcgaggcaagctctgaactgagggagaacggcgaatgccgttccgtggcagttggtgccgaagagaacatgaatgacatagtggtgtaccatcgaggatcacgtagttgcaaagacgctgctgtgggcacattggtagagatgcgaaattgcggcgtttctgtgactgaggctatgctcggcgtcatgacagaggcagacaaggagattgaactccagcaacagactattgagtcccttaaggaaaagatttacagattggaagtgcagctgcgggagaccacgcatgatcgcgaaatgacaaagttaaagcaagagctgcaggccgctggctcccgcaagaaagtggacaaagccaccatggcgcagcccttggttttttcgaaggtcgtagaggcggttgtacagacccgtgaccagatggtcggcagccacatggacctggtggatacatgtgtggggacatctgtagagaccaattccgtgggtattagctgtcaacccgaatgtaaaaataaggtcgtcggcccagaactgccaatgaactggtggatagtaaaggaacgagtggaaatgcacgaccggtgtgccggacgatccgtagagatgtgtgataaatctgtcagtgttgaagttagcgtatgcgagactgggagcaataccgaggagtccgttaatgacctgaccctgttaaaaaccaacctgaacctcaaggaagttaggagtatagggtgtggagattgcagcgtggatgtgaccgtgtgtagtcccaaagagtgcgcaagcagaggagtcaataccgaagcagtatctcaagtagaagccgctgtgatggcggtccctcggaccgccgaccaagacaccagtaccgatctggagcaggtgcaccaatttaccaacactgagacagcgaccctcatcgagagctgcaccaacacatgcctatcaacgctggataagcagacatccacccagaccgtggaaacacgcaccgtagccgtcggagagggccgtgtcaaggacatcaatagtagcacaaagacacggtccattggtgtagggacactcctgagcggtcattctggatttgaccggccatcggccgtgaagactaaagagtctggagtcgggcagattaacattaatgacaactaccttgtgggactcaagatgcgtacaatcgcttgcgggcctccccagctaaccgtcggcctgacagcttccagaagaagcgtcggggtcggggacgaccctgttggagagagtctggagaacccccaaccacaggccccacttgggatgatgacgggtctcgatcactacattgaaagaatacagaaactcttggctgagcagcagacactgcttgctgaaaactactccgagttggccgaggctttcggtgagccccactctcaaatgggtagcctcaatagtcagctgattagcaccctttcaagcattaacagcgttatgaagtctgcatccactgaagaactgaggaatcccgacttccagaaaacttcactcggcaagattaccgggaattacttgggatatacatgtaagtgcggcggactccaatccggaagtcctctgagttcacagacaagccagcccgaacaagaagtgggtacttctgagggcaagccgatatccagtctggacgccttcccaacccaggagggtacactgtcccccgttaatctaaccgatgatcagattgcagccggactttatgcatgcaccaacaatgagtcgacactaaagtcaattatgaagaaaaaagacgggaataaggactctaatggagcaaagaagaatctgcagtttgtcggcattaacggaggatatgagactacctcatccgatgacagcagctcagatgagtcaagcagttctgagtcagacgacgagtgcgacgttatcgaatatcctctggaagaggaagaggaggaggaggacgaagacacacgtggcatggctgagggacaccatgccgtaaatatagagggtctgaagagcgccagagtcgaagatgagatgcaggtgcaagagtgcgagcctgaaaaggtcgaaattcgtgaacgttatgaactgagtgagaaaatgctgtctgcgtgcaacctactgaagaacaccatcaacgatcctaaagcgctgactagtaaggatatgaggttttgcctcaacactctccagcatgaatggttccgggtgtcctcacagaagtctgccattcctgctatggtgggcgactatatcgccgcattcgaagcaatctcacctgacgtgttgaggtatgtaataaacctggctgacggaaacggtaatacggccctgcattacagcgtgtctcacagcaacttcgagattgtgaaactgctgctggacgctgacgtatgcaatgtggaccaccaaaataaggctggatatactcccattatgttggccgcactagcagccgtcgaagcagaaaaagacatgcggattgttgaggagttgtttgggtgcggagacgtaaatgccaaggcctcacaggcagggcagacagccctgatgctggctgtgtctcacggcagaattgatatggttaaagggttactcgcttgcggcgcagacgtaaacatccaggatgacgaagggtccaccgcacttatgtgtgccagtgagcatggccatgtggagattgtgaaattgctattggcacagccaggatgcaacggacacctggaggacaatgacggatctacggctctatcaattgcactggaagccggtcacaaggatattgctgtgttattgtatgctcacgtgaactttgccaaggcccaaagccccggaacccccagactcggtagaaagaccagtccagggccaacccatagaggtagctttgactag

SEQ ID NO: 29214 - DNA, 1197 bp, synthetic construct
  misc_feature 1..1197: note = Description of Artificial Sequence: Synthetic coding sequence
  source 1..1197: mol_type = other DNA
atgaagaaaaaggatggaaacaaagacagtaacggcgctaaaaagaacttgcagtttgtaggcatcaacggtgggtatgagaccaccagtagcgacgatagctccagtgacgagtcttcctcttccgagagcgacgatgagtgtgacgtcatcgagtatccacttgaagaggaagaagaggaggaggatgaggatacaagagggatggccgagggccaccatgccgtcaacatagagggcctgaaatccgctcgtgtcgaagacgaaatgcaggtgcaagagtgtgagcctgagaaggtcgagatccgggagaggtatgaactgagcgagaaaatgctgtctgcttgtaacctcctcaaaaatacaattaatgaccccaaagccctgacctctaaggatatgggtcaggtacaatggctcacaccgatgatccctaccctgcgggaggccgacgccggtggctcccatgagcggttttgtttgaatacattgcaacatgagtggttccgggtgtccagtcagaaaagcgctatccccgcaatggtcggggattatattgccgctttcgaagcgatatcgcccgacgtcctccggtacgttatcaacctcgctgacggtaatgggaacacagcactgcactattctgtcagccacagtaacttcgagatcgtgaaactactgttggacgccgatgtctgtaatgtcgaccaccaaaacaaagctggatatacccctatcatgttagcggcattggcagccgtggaggctgagaaggatatgagaattgtggaggaactgttcggatgcggagatgttaacgcaaaggcctcacaggccggacagactgcacttatgctcgccgtcagtcacggtcgaattgacatggtgaagggcctgctcgcttgtggggcagatgtcaacatacaggatgatgaaggctccacagccttgatgtgcgcctcagaacacggccacgttgaaattgtgaagctcctgctggcccagcctgggtgtaacggacatctggaagataatgatggttctacggccctctccatcgccttggaggcagggcacaaggacatagcagtgctcctgtatgctcacgtgaactttgcaaaggcacagtccccgggtacgcctaggctggggagaaaaacctctcccggacctacccatagagggtcttttgattag

SEQ ID NO: 29215 - DNA, 2211 bp, synthetic construct
  misc_feature 1..2211: note = Description of Artificial Sequence: Synthetic coding sequence
  source 1..2211: mol_type = other DNA
atggggaacccagaaaatatcgaagacgcttatgtggcagtgatcagaccaaaaaatacggcttcattaaattctcgagagtatagggcaaagtcctatgaaattttgctgcacgaggtcccaattgagggccagaaaaaaaagagaaaaaaggttctgttggagacaaagctgcaaggaaactctgagattactcagggcatactggactatgtggtggaaacaacaaagcccatttccccagctaaccagggcatccgcggaaaacgcgtggtcctaatgaaaaagtttccactagacggggagaagatgggcagagaggccagcctgtttatagttccttccgtggtgaaggacaatacgaagtacacctacacacccggttgcccaatcttttactgtttgcaagacataatgagagtatgcagtgagtcaagcacacactttgcaacactcacagctcggatgctgattgccttagacaagtggctggacgagagacacgctcagtcccactttattcccgctctgttccgcccttcccctctggaacgcatcaagacaaacgtgattaatcctgcatatgcaaccgagtcaggtcagactgaaaactcccttcacatgggttactccgcccttgaaatcaaaagtaagatgctggccctcgaaaaagccgatacctgtatatacaaccctttattcggaagcgacctgcagtataccaatcgggtagacaaagtggtaattaacccctacttcggcctgggcgcacccgactactcgaagatacaaattccaaaacaagagaagtggcagaggtcaatgtcctccgtaacagaggacaaagagcggcagtgggtcgatgatttccccctacacagaagtgcctgtgaaggggatagtgaacttttatcacgcttactgtcagagcgtttttcggttaaccaactagattcagaccactgggccccaatccactatgcctgctggtacggaaaagttgaagccactaggattctgctcgaaaagggcaaatgcaaccccaacctgctgaacggccagttgagttcgccgctgcattttgcggcaggtgggggtcacgccgaaattgtgcagattttactgaaccaccccgagacagacaggcatattactgaccagcagggacgctctcctctgaatatctgcgaggaaaataagcagaacaactgggaagaggccgctaagctgctgaaggaggccatcaacaagccatacgagaaggtgcggatctacaggatggacggaagctatagatccgtcgaacttaagcacggtaataataccactgtccaacagatcatggaagggatgcgtttgtcccaagaaacacagcagtacttcacaatctggatttgcagtgagaacttgtccttacagctcaagccatatcataaaccactccagcatgtgcgcgattggcccgaaatcctggccgagttaactaatctcgacccacagcgcgaaaccccacagctgtttcttcggagggacgtgagactgcctctcgaagttgaaaagcagatcgaagacccccttgccatcctgatcctgttcgacgaggccaggtataacctcctcaagggattttacacagcacctgatgctaaattaatcactctggcgtccttactcctgcagatcgtttacggtaactatgagagcaaaaagcacaaacagggattcctcaatgaagagaatctcaaatccatagtgcctgtaacaaagctgaagagtaaggcaccgcactggacaaatcgaatcctccacgagtataaaaatctctcaacttctgaaggagtgagcaaggagatgcatcacctgcagagaatgttcctgcagaattgctgggagataccaacatacggagccgcattctttaccgggcagatctttaccaaggcatcacctagtaaccacaaagtaattccagtgtacgtgggagttaacatcaaggggctgcacctgctgaacatggaaaccaaggcactcctgataagcctgaagtacgggtgcttcatgtggcagctcggcgataccgacacgtgttttcaaatccactcgatggaaaacaagatgtcgtttatcgtccataccaagcaagccggtctggtagtcaagctgctgatgaaactgaacgggcagctgatgccgacagagcgcaactcctag

SEQ ID NO: 29216 - DNA, 2067 bp, synthetic construct
  misc_feature 1..2067: note = Description of Artificial Sequence: Synthetic coding sequence
  source 1..2067: mol_type = other DNA
atgggaaatccagaaaacattgaagacgcatacgtggccgtcattcgccctaaaaacacggcatcacttaactcacgcgaatatagagcaaaaagctacgaaatacttctccatgaggtgcccattgagggccagaagaagaaacgtaaaaaagtgttgctggaaacaaaattgcagggaaattcagaaattacacaggggattctggactatgtagttgagacgactaaacctataagcccggctaatcagggcatcaggggcaagcgggtggttctgatgaaaaaattccctctcgacggcgaaaagatgggacgggaagcctcgctgtttattgtaccatctgttgtcaaagacaatactaagtacacctataccccagggtgtccaatcttctactgtctacaagatattatgagagtctgcagtgaatcttctacgcactttgccacattaaccgctagaatgttgatcgctctggataaatggctcgatgaacggcacgcccaaagtcacttcatcccggcattattccggccatctcctcttgagaggattaagaccaatgtcatcaaccccgcttacgctaccgaaagcggccaaactgaaaatagcctgcatatgggctactctgccctcgaaattaagtccaaaatgttggccctggagaaagctgacacctgtatctataatcccctctttggatcagacctgcagtatacaaaccgagtggataaggttgtcattaacccctacttcggattgggtgctcctgactatagcaagatccaaatcccaaagcaagagaagtggcagcgttcgatgtcatcggtgaccgaagacaaatacggtaaggtggaggccaccagaattctcctagaaaagggaaaatgcaatcctaatttattgaacgggcaactatccagccccctccattttgcagccggaggcggtcacgccgagatcgtgcaaatactgctaaaccaccctgagaccgaccgacacataactgaccagcagggccgatcccctcttaatatctgtgaagagaataaacaaaataactgggaagaggccgcaaagctattgaaggaagccatcaataaaccctatgaaaaggttcgtatctaccgaatggatggaagctacaggtccgtcgagttgaaacacgggaacaatacaacggtgcaacagattatggagggaatgcggctatcgcaggaaacacagcaatactttacaatttggatttgtagtgaaaatctctccctgcagcttaagccataccataaaccattgcagcatgttagagactggcccgagatcctggccgagcttaccaacctagatccccagcgcgaaactcctcagctgtttctccggcgtgatgtccgcctcccccttgaggtagagaagcaaatcgaggaccctcttgccattctgattcttttcgacgaggcgagatacaatttattgaaaggcttttatactgcacctgatgctaagctgatcactctagcaagcctactcctccagattgtttacgggaattacgaatccaaaaagcacaagcagggatttctgaacgaagagaatctcaagtctatcgtgcccgtcaccaagctcaaatctaaggccccacactggaccaaccggatcctgcacgagtacaagaatttgtccacctctgagggcgtttccaaagaaatgcaccacctgcaaagaatgtttctgcagaactgttgggaaattccaacgtatggcgctgcttttttcacaggtcagatcttcacgaaggcctctcccagtaaccataaagttattcccgtgtatgtgggtgtcaatatcaagggcttgcacctcctcaatatggagacaaaggcactcttgatttccttaaagtatggttgcttcatgtggcaacttggcgacaccgatacctgctttcagattcattctatggagaataagatgtcttttatcgttcacacgaagcaggcaggacttgtggtaaagttgctcatgaagttaaacggccagctgatgccaaccgagcggaactcttag

SEQ ID NO: 29217 - DNA, 2211 bp, synthetic construct
  misc_feature 1..2211: note = Description of Artificial Sequence: Synthetic coding sequence
  source 1..2211: mol_type = other DNA
atgggcaaccctgagaacattgaagacgcatatgttgccgtcatccgacccaaaaacaccgcctccctcaatagccgcgaatacagagctaagtcctacgagatccttctccacgaagtgccgatagagggccagaagaaaaagcggaaaaaagtgctgcttgaaacgaaactccaggggaacagtgagatcactcagggtatactcgactacgtcgtggagaccaccaagcctatcagcccggctaaccagggcatacgagggaagcgcgttgttctaatgaagaagttccctctggatggagagaagatggggagggaggcctcactgttcatagtgcctagtgtggttaaggataatactaaatacacgtatacacccggttgccctatcttctactgtctgcaggatatcatgcgggtttgttccgagtctagtacccatttcgcaaccttgacggcgcgaatgctgatcgctctagataaatggcttgacgagaggcatgctcagtctcatttcattcccgctctgttccgccctagtccccttgagcggatcaaaacaaatgtcattaacccagcttacgctaccgagagtgggcaaacggagaactctctgcacatgggctatagtgcattggaaatcaaaagtaagatgctggccctcgagaaggcagacacatgcatttataatccactttttggcagcgatctacaatataccaaccgtgtcgacaaggtggtcatcaacccctacttcgggctgggcgcacccgattattccaaaatacagattcccaagcaagagaaatggcaaaggagcatgtctagcgtgaccgaggataaagagaggcagtgggtggatgattttccgctccaccggtcagcttgcgagggcgacagtgaactactgagtagactgctgtctgaaaggttcagtgttaaccagttggactcggaccattgggcccctatccattatgcatgttggtatgggaaagtggaagcaacaagaatacttttagagaaaggcaagtgcaatccaaatttattgaatggccaactctcttcccctttgcattttgccgctggcggaggacacgcggaaatagtgcagatccttctgaatcatccggagacagatcgccatattacagaccaacagggcagaagccctctgaatatttgcgaggagaataagcagaacaactgggaagaggccgctaaactgctcaaagaggctatcaacaagccatatgagaaggttcggatctacagaatggacgggagctaccgtagcgtggagctaaagcatgggaataatacaaccgtccagcagatcatggaagggatgcggctctcacaagagacccagcagtattttaccatatggatctgttctgaaaatctgtcactccagctgaaaccataccataagccattgcagcatgtcagggattggcctgagattctcgccgagctgacaaatcttgaccctcagcgtgagaccccccagttatttctacgaagggacgttaggcttcctctggaggtggaaaagcagattgaggaccccctggccattctcatcctgtttgacgaagccaggtataatttgcttaagggtttttacacagcacctgacgctaagctcattactctagctagtctacttcttcaaatcgtgtatgggaactatgaaagcaaaaaacacaaacaggggttcttaaacgaagagaacctaaagtctatcgttcctgtcacaaagctgaagtcaaaggcaccgcactggacgaatcgaatcctccacgagtataaaaacctgagcactagcgaaggggtgtctaaagagatgcatcatctgcagcgtatgttcttgcaaaactgttgggaaatcccaacttacggggcagccttcttcactggacagatcttcacgaaagcttcgccaagcaaccacaaggtgatccctgtgtacgttggcgtcaacatcaaaggtctgcacctgctgaatatggaaacaaaagcattgcttatcagcctcaagtacggatgctttatgtggcaactcggggacactgatacgtgttttcaaattcactccatggaaaataagatgagcttcatcgttcataccaagcaggccggactggtggttaaactgctgatgaagctgaatgggcagttaatgcctactgaacgcaatagctag

SEQ ID NO: 29218 - DNA, 2211 bp, synthetic construct
  misc_feature 1..2211: note = Description of Artificial Sequence: Synthetic coding sequence
  source 1..2211: mol_type = other DNA
atgggcaatcccgagaacatcgaggacgcctacgtcgcagttattcgtcctaagaataccgcgtccctgaattcccgcgaatatagggctaagtcgtatgaaattctcttgcacgaggtgcccatagagggacagaagaaaaagcggaagaaagtgctgctcgagactaagctgcagggcaattcggaaattactcaaggcatcctagattatgtggtggagacaacaaaaccgattagtcctgcaaaccaggggattcggggtaaacgggtcgtgctgatgaagaagtttcctcttgacggcgagaagatgggcagggaggcatctctttttattgtgccctctgtagtgaaggataataccaagtatacttataccccgggatgccccattttttactgcctgcaagacatcatgcgagtgtgctcggaatcatccacacattttgcgaccctgactgccaggatgctaatcgccctcgataaatggctggacgagcgacatgcccaaagtcactttatccccgctcttttcaggccttcgcccctagagcgcattaaaacaaacgtcatcaatcccgcatacgctactgagagtgggcaaactgagaactcccttcatatgggatacagcgcgctggaaataaagtccaaaatgttggcgctagagaaagcagacacctgtatctacaatcctttgttcgggtcagacctccagtatacaaatcgagtagacaaggtggtgattaacccctactttgggcttggtgcaccggattactctaaaatccagatccctaaacaggaaaaatggcagcgctccatgagttccgtgaccgaggataaggagcgccagtgggttgacgattttcccttacaccgaagtgcttgcgagggcgacagcgagctactgagtagattacttagtgagagattttctgtcaatcagttagacagcgaccactgggctcccatccactacgcgtgctggtacggcaaagtggaggctactagaatcttactcgagaaaggaaagtgcaacccgaacttgctaaacggacagctttcttcgcccctccattttgccgcagggggtgggcatgctgaaattgtgcagatcctgttgaaccacccagaaacagatcgccatatcaccgatcagcaggggagatcacctttgaatatctgtgaagagaataagcagaacaattgggaggaagcagctaagctgttaaaggaggccatcaacaagccatatgaaaaagtccgtatctaccgcatggatggcagctacagatccgtggagctaaaacatggaaacaacaccacagtacagcaaatcatggagggaatgagactgagccaggaaacacagcagtatttcacaatttggatctgctccgagaatctatcattacagctgaagccataccacaaacccctccagcacgtgcgcgattggcccgagattctagccgaactgactaatttggacccccagcgagagacccctcagctgttcctgcgtcgggacgtgcggctccccttggaggtcgagaagcagatcgaggaccctcttgcaatcctcatactctttgacgaggcaaggtacaacctgctcaagggcttttacactgcacccgacgccaagcttataacacttgccagcttgttactgcagatcgtctacgggaattatgagtccaagaaacacaagcaaggcttccttaacgaagaaaacctaaagagtatcgtcccagtgacaaaactgaagtcgaaggcccctcattggacaaatcgaatcttacacgaatataaaaaccttagcacctctgaaggggtgtctaaggagatgcaccacttacagaggatgtttctgcagaattgttgggagatccctacatatggggcagcttttttcaccgggcagatcttcaccaaagccagtccctccaaccacaaagtaattccggtgtatgtaggcgtgaatattaaaggactccacctcctgaacatggagacgaaggccctgctcatttcactgaagtacggatgcttcatgtggcaactcggagacactgacacctgttttcagatccactctatggagaataaaatgtctttcatcgtgcatacgaaacaagcgggattggtcgtcaagctactaatgaaattaaatggccagctcatgcctacagagcgtaacagttag

SEQ ID NO: 29219 - DNA, 2211 bp, synthetic construct
  misc_feature 1..2211: note = Description of Artificial Sequence: Synthetic coding sequence
  source 1..2211: mol_type = other DNA
atgggtaatcctgagaatatcgaggacgcctacgtagcagttattaggccaaaaaatactgcatcactgaactccagggaatatagggctaagtcttatgaaatccttctgcacgaagtgcctatcgaagggcagaaaaagaaaaggaaaaaggtccttttggagacgaagctccaagggaattcggagattacccagggtatcctggattatgtggtggaaacaacgaagcctatttccccagcaaatcaaggaatcaggggtaagcgggtcgtcctaatgaagaagttcccactcgatggagagaagatgggcagagaagcttctctcttcatcgtgccaagcgtggtgaaggataatacaaaatatacatatacacccggatgtccaatcttttactgcttgcaagatattatgagagtatgctccgaatcatctacccacttcgccacccttactgcccgtatgctgatcgccctagacaagtggctggacgagcggcatgcccagagccactttatccctgcactctttcgacccagtccactggaacgcatcaagaccaatgtgatcaaccctgcctatgctacagagtccggtcagactgagaactcccttcacatgggttactcagcccttgagatcaagtccaaaatgctagcactggaaaaagcagatacatgcatctataaccccctttttggctctgatctgcaatatactaaccgggtagataaggtagtcataaacccgtatttcggcctgggcgcaccggattactccaagatacagattcccaagcaggagaaatggcaaaggtctatgtcctcagtgactgaggataaggaacggcaatgggttgacgacttccccctccatcgaagtgcttgtgaaggtgacagcgagctgctttctcgtctgctgtccgaacgtttcagtgtgaaccagctggacagcgatcattgggcccctatacactatgcatgctggtacggtaaggtggaggctacaagaatcttgctggagaagggtaaatgcaaccctaatctgctaaacggccagctgtcctctcccctgcacttcgctgccggaggagggcacgctgaaattgtgcagatccttctgaaccaccccgagaccgatcgccacatcactgaccaacagggacggtctccactgaatatctgtgaggagaacaaacagaacaactgggaggaggcggctaaactgctcaaggaggccatcaataagccttatgaaaaggttaggatttacaggatggatggctcttacaggtctgttgagctcaagcacgggaataacacgacagttcagcagattatggaagggatgagactcagtcaggagacgcagcaatactttaccatatggatatgcagcgagaatctgtccttacagctaaagccctaccacaaacctttgcagcacgtcagagattggcctgagattctggcggaactgaccaatttggatccacagagagagacaccccagctatttttgagaagagatgtgagactaccgctggaggtagagaaacagatagaggacccccttgccattctgatcctgtttgatgaagcacgctacaatctgctgaagggtttctatacggctccagatgccaagcttataacccttgcatctctcctgctgcaaatcgtctacggcaactatgaatctaaaaaacacaaacagggctttctgaacgaagaaaacctcaaatctatcgtgcccgttacaaagcttaagagcaaggcaccacattggaccaacaggatactccacgaatacaaaaacttgagtactagtgaaggcgtgagcaaagaaatgcatcacctccaacggatgttcctccagaactgctgggagattcctacctatggagccgcattctttaccgggcagatctttacaaaggcttccccatccaaccacaaggtgattccagtgtatgtcggggtgaacattaaagggctccatttgctcaatatggagacaaaggcgctgctcatttccctaaagtacggatgctttatgtggcaactgggggatacagacacatgcttccagattcacagtatggagaataaaatgtctttcattgttcacactaagcaggccggactggtggtgaagctgttaatgaaattgaatggacaactcatgccaaccgaaaggaatagctag

SEQ ID NO: 29220 - DNA, 210 bp, synthetic construct
  misc_feature 1..210: note = Description of Artificial Sequence: Synthetic coding sequence
  source 1..210: mol_type = other DNA
atgggaaaccctgagaatattgaagatgcgtatgtggccgtgataaggccgaagaatacagcttcactgaattctagagagtatagggccaagtcttatgaaattctgcttcacgaggtgcctatcgaaggacaaaagaagaaaagaaagaaggtccttctggagaccaaactgcagggcaactcagagatcacccagggcatcctttag

SEQ ID NO: 29221 - DNA, 1698 bp, synthetic construct
  misc_feature 1..1698: note = Description of Artificial Sequence: Synthetic coding sequence
  source 1..1698: mol_type = other DNA
atgggaaatcctgaaaatattgaagacgcttatgtggccgttatcagaccaaaaaacaccgcctcactgaatagccgcgaatatcgggcaaaatcctacgaaattctgctccatgaggtacccattgaggggcagaaaaagaaaagaaaaaaagtgctgctcgagacaaagctgcagggcaatagcgaaatcacccagggaatcctggattacgtggtggaaacaactaaacccatatcccctgccaaccaaggaattagaggtaaaagagtggtactcatgaaaaaatttcctttagacggcgagaaaatgggccgtgaggcttcgttgttcatcgtacccagcgtcgtgaaagataacaccaagtatacatatacgcccggttgcccaatattctattgtcttcaggacatcatgcgggtatgttcagagtcctctacccattttgctactttgactgcccgaatgctcatagctctggacaagtggttggatgagcgacacgcccaaagtcacttcattcctgcactgtttcgtccaagcccattagaaagaatcaaaaccaacgtcattaatcctgcctacgccacagaatcaggccaaaccgagaacagtttgcacatgggatattccgctctcgagatcaaatccaagatgctggcactggagaaagcggatacatgcatatataacccactgtttgggagcgatcttcagtacaccaatcgtgtagacaaagtggttataaatccctactttggtttgggcgctcctgattactcgaagatccagatccccaagcaagaaaagtggcagcggagcatgtcttctgtgacggaggataaggagcgccaatgggtggacgactttcccctccacagatcagcctgcgagggagactctgagttgctctcgaggttactgtccgaacggtttagcgtcaaccagcttgatagcgatcattgggcaccgattcattatgcctgttggtatggaaaggtggaggccaccaggatcctcttggaaaaaggcaagtgcaacccgaacctgttaaatggtcagttatcctctcccctgcattttgcagcagggggaggtcacgctgagattgttcagattcttttgaaccaccctgaaacagaccgccatattacagatcagcagggcagaagccccctgaacatctgtgaagagaacaagcagaataattgggaagaggctgccaagctgctgaaggaggcaattaataagccttacgagaaggtgcggatttatcgtatggatggaagctataggagtgtcgagctgaagcacggcaacaacaccacggtgcagcagattatggaagggatgagactgagtcaagagactcagcaatattttactatttggatttgtagcgagaatttatccctccagctcaagccctaccataagcctctgcagcacgtccgcgactggcccgaaatattggcagagctgacaaacctggacccacagagggagaccccccaactcttccttagacgggacgttcgcctcccacttgaagtcgagaagcaaatcgaagatcctttggctatcctgatcttgttcgatgaagctcgatataacctccttaagggcttttacactgcacctgatgctaaattgattactttggcttcccttttactgcaatctctctggaagttgtag

SEQ ID NO: 29222 - DNA, 78 bp, synthetic construct
  misc_feature 1..78: note = Description of Artificial Sequence: Synthetic coding sequence
  source 1..78: mol_type = other DNA
atgggaaacccggagaacatcgaggacgcttacgtggctgtgattcgtccaaagaatacagcttctctgaattcatag

SEQ ID NO: 29223 - DNA, 39 bp, synthetic construct
  misc_feature 1..39: note = Description of Artificial Sequence: Synthetic coding sequence
  source 1..39: mol_type = other DNA
atgggtaatcctgagaacatcgaggatgcctatgtctag

SEQ ID NO: 29224 - DNA, 117 bp, synthetic construct
  misc_feature 1..117: note = Description of Artificial Sequence: Synthetic coding sequence
  source 1..117: mol_type = other DNA
atgggcaatcctgaaaatatcgaagacgcctacgtggctgtgatcaggcctaaaaatacagcctccctcaattcacgggaatatcgggctaaaagctatgaaatcttactacattag

SEQ ID NO: 29225 - DNA, 297 bp, synthetic construct
  misc_feature 1..297: note = Description of Artificial Sequence: Synthetic coding sequence
  source 1..297: mol_type = other DNA
atgggcaatccagaaaacatcgaggacgcatacgtcgccgtgatccgcccaaagaacaccgcgtctctgaattctagagagtaccgtgctaagtcctatgaaattctcctacacgaggttccgatcgagggacagaaaaagaagcggaagaaggtactgcttgagactaagctccaggggaacagcgaaatcactcagggcattcttgactatgtagtggaaactacaaagccgatctctcctgcaaatcaaggaattaggggaaaaagggtagtgctcatgaagaaattcccttag

SEQ ID NO: 29226 - DNA, 555 bp, synthetic construct
  misc_feature 1..555: note = Description of Artificial Sequence: Synthetic coding sequence
  source 1..555: mol_type = other DNA
atggggaatcctgagaacatagaagacgcatatgtggccgtgatccgcccaaaaaacacggcctctctgaactctagagagtaccgggcaaagagctatgagatactcttgcatgaagtgccaattgaaggtcaaaagaagaaaagaaagaaggtcctcctggaaacaaagctgcagggcaacagcgaaatcacccaggggatcctcgattacgttgtcgaaactaccaagccaatcagccccgcaaatcagggaataaggggcaaaagagtcgttcttatgaaaaaattcccactggacggagagaaaatgggtagagaggctagcctgttcatcgtcccaagcgtggtcaaagataataccaagtacacatatactcctggatgcccaattttctactgtcttcaagacattatgagagtgtgctccgagtcctcgactcacttcgctacattaaccgccaggatgttgatcgccttagataagtggctcgacgaacggcacgcccagagccatttcattccagccctttttagaccgtccccattagagtag

SEQ ID NO: 29227 - DNA, 339 bp, synthetic construct
  misc_feature 1..339: note = Description of Artificial Sequence: Synthetic coding sequence
  source 1..339: mol_type = other DNA
atgggtaaccccgaaaacattgaagatgcatatgtcgcagtgattcggccaaagaacaccgcatcattaaatagcagggagtaccgtgcaaaatcatacgagattctgctgcacgaggtcccaatagagggccaaaaaaagaaacgcaaaaaggtgctgctggaaaccaagttgcaggggaacagcgagattacccaggggatcctggattacgtggtcgagactactaaacctatctctcccgctaaccaaggaattaggggcaagcgtgtggtgctgatgaaaaagtttccactcgatggagaaaaaatgggcagagaagcatcgctgtttatatag

SEQ ID NO: 29228 - DNA, 105 bp, synthetic construct
  misc_feature 1..105: note = Description of Artificial Sequence: Synthetic coding sequence
  source 1..105: mol_type = other DNA
atgggaaacccagagaacatcgaagacgcttacgtggctgtcattagacccaaaaacaccgcttcgctgaactctcgggagtaccgagcgaagtcatacgagtag

SEQ ID NO: 29229 - DNA, 177 bp, synthetic construct
  misc_feature 1..177: note = Description of Artificial Sequence: Synthetic coding sequence
  source 1..177: mol_type = other DNA
atgggaaatccagaaaatatcgaggatgcctacgtggcagtgataaggcccaagaacacagcatctttgaactccagagagtatcgtgccaaatcgtacgaaatcctgctccatgaggttcccatcgagggccagaagaaaaagaggaaaaaagtcttgcttgagaccaaactttag

SEQ ID NO: 29230 - DNA, 489 bp, synthetic construct
  misc_feature 1..489: note = Description of Artificial Sequence: Synthetic coding sequence
  source 1..489: mol_type = other DNA
atgggtaaccctgagaatattgaagatgcctatgttgcagttattcgacctaaaaacaccgcaagcctcaactcaagagagtacagagcaaaaagttatgagattttgctccatgaggtgcccattgaagggcagaagaagaaacgcaagaaggttctcctcgaaacgaaactacagggaaactcagagattacccagggcatcctggactacgttgttgagaccactaagccgatatccccggctaatcagggaatcaggggcaaacgggtcgttctcatgaaaaagttccctctcgacggagaaaagatggggagggaagcctcccttttcattgtaccttctgtagtgaaagacaatactaagtacacatacactccgggatgcccgatcttctactgcttgcaagacataatgagggtgtgtagcgagagctcaacccacttcgccaccctgaccgctagaatgctcattgctctggacaagtag

SEQ ID NO: 29231 - DNA, 732 bp, synthetic construct
  misc_feature 1..732: note = Description of Artificial Sequence: Synthetic coding sequence
  source 1..732: mol_type = other DNA
atgggaaatccagaaaatatcgaggatgcctacgtcgcggtaatccgtcctaaaaatactgcaagtctcaatagtagagagtacagagccaaaagttacgaaatcctcctacacgaagttcccattgaggggcagaaaaagaagagaaagaaagttctcctggagacaaaacttcaggggaactctgaaatcacccaagggatcctcgactacgtcgttgaaaccactaagcctatctctcctgccaaccagggcattaggggaaaacgcgtggtccttatgaaaaaattcccgctggatggcgagaagatggggagggaggcctcactgttcattgttccttccgtggtgaaggataataccaaatatacatacacccctggctgtcctatcttctattgtttgcaagacatcatgcgggtgtgctcagaaagcagtacacacttcgcaacccttacagctaggatgctcattgcccttgataagtggctcgatgaaaggcacgcccagtctcattttattccagctctattcagaccctcccctctcgagaggattaagactaacgtgattaaccctgcctatgccacagaatccgggcaaaccgaaaattccctacacatggggtatagcgccctggagatcaagtccaagatgctggcactggagaaagccgacacctgcatttataatcctttgttcggtagtgatctgcagtacacaaatcgctag

SEQ ID NO: 29232 - DNA, 198 bp, synthetic construct
  misc_feature 1..198: note = Description of Artificial Sequence: Synthetic coding sequence
  source 1..198: mol_type = other DNA
atgggtaaccctgagaatatagaggacgcctatgtggccgtgatccgcccaaagaatacagcgtccttgaacagccgcgagtaccgtgccaaaagttacgaaatcctgctccacgaggtgccaattgaagggcagaaaaaaaaaagaaaaaaagtacttctggagaccaaactgcaggggaatagtgaaatcacatag

SEQ ID NO: 29233 - DNA, 1089 bp, synthetic construct
  misc_feature 1..1089: note = Description of Artificial Sequence: Synthetic coding sequence
  source 1..1089: mol_type = other DNA
atggcaacggctgagaccgctcttccaagcatttctacgctgacggcactgggcccattcccggatacccaggacgatttcttaaaatggtggaggtcggaagaggcccaggacatggggcctggaccccctgaccctaccgaaccccctctacatgtcaagtccgaagatcagcccggagaggaagaggatgacgagaggggtgccgatgccacctgggacctagatctcctcctgactaacttctctgggcctgagcctgggggagctccgcagacctgtgcactcgccccttcggaagcttcaggagcccagtatccccctccccctgagacacttggagcctatgcaggcggaccaggactcgtggcaggcctgctgggcagtgaggaccactcaggttgggtgagacccgcattgagggcgagagcccctgatgccttcgtggggcctgctctcgcccctgcccctgctcccgagccaaaagctctcgctctgcaacccgtgtatccgggaccgggagcaggctcttctggcggatactttccccgaacgggactctctgtaccggctgcctcaggtgccccttacggcttattgtcagggtaccctgccatgtaccccgctccccagtatcagggccatttccagctgtttcgcggactccaaggcccagcaccaggcccagccacttctccctcattcctgagttgcctcggtccgggtaccgtcggcaccgggctaggtggaacagccgaggaccccggagtgatagcggagacagctccctccaagcgcggtcgcagaagctgggcgcgtaagagacaggcggcacatacctgtgcccaccctggttgcggcaagagctacactaagtccagccatctgaaagcccacctgcgaacacacacgggcgaaaagccgtatgcttgtacttgggaaggttgcggatggcgctttgctcgatctgatgagctgacacgccattacaggaagcatacaggtcagcggcctttccgatgccagctgtgtccgagagccttttctagatccgaccacctggcgctgcacatgaaaaggcatctctag

SEQ ID NO: 29234 - DNA, 999 bp, synthetic construct
  misc_feature 1..999: note = Description of Artificial Sequence: Synthetic coding sequence
  source 1..999: mol_type = other DNA
atggccactctgaaggaccagctcatttacaacctcctgaaagaagaacagacaccccagaacaaaattacagtcgtgggtgtcggagctgtgggcatggcctgcgctatttcgatccttatgaaagatctggccgacgagttggcactcgttgacgtaattgaggacaaactgaagggggaaatgatggatcttcaacatggctctctctttctcaggaccccgaagatcgtaagtggaaaggattataatgtaactgctaattccaaactcgtcataattaccgcaggcgctaggcaacaggagggtgagtcccgtctgaaccttgttcaacggaacgtaaacattttcaaattcatcataccaaatgtcgttaagtatagcccgaattgcaaattactcatcgtgtccaacccggtggacattctgacctatgtggcgtggaaaataagcggctttccaaagaatagagtaattggatcaggctgcaacctggacagcgccaggttccgatacctgatgggcgagcggctgggggtgcatcccctgtcttgccatgggtgggtcttgggcgaacacggcgactcaagcgtgccagtttggagtggtatgaatgtggcgggagtctctttaaaaacactacatccagacctaggcacagacaaggataaagagcagtggaaggaggtccacaaacaggttgtcgaatcggcctatgaagtaatcaaactcaaaggatatacctcctgggcgattggtctctctgtggctgacctagccgagagcataatgaagaacctgagaagagtgcacccggtgagtactatgatcaaaggcttgtacgggatcaaggacgacgtgttcctgtctgtaccctgtatcctgggtcagaacggcatttccgacctcgtaaaggttacgttaacgagtgaagaagaagctcgtctgaagaagtctgctgatacattatggggcatacagaaagagctacaattttag

SEQ ID NO: 29235 - DNA, 825 bp, synthetic construct
  misc_feature 1..825: note = Description of Artificial Sequence: Synthetic coding sequence
  source 1..825: mol_type = other DNA
atggcaacactgaaggaccagttgatttacaacctactaaaggaagagcagaccccacagaacaaaatcaccgtcgtgggagttggcgcagttggaatggcctgtgctatctcaattctgatgaaagacttggccgatgaattagcattggtggacgtcattgaagataagcttaagggcgagatgatggacctccaacacgggtcactattcctgcggactcctaaaatcgtaagcggaaaagactacaacgtgactgctaattctaaactggtgattattaccgcaggcgcaagacagcaagaaggcgaaagccgattgaatctcgttcagaggaatgtaaacatcttcaagtttataatcccaaatgtggtgaagtattctcccaactgcaaactgctgattgtgtcgaaccccgtggatattctcacttacgtagcctggaaaatcagcggatttccgaagaatcgagtgattggatcaggctgtaatctagactctgcccgttttaggtatctgatgggagagaggcttggagttcaccccctatcctgtcacgggtgggtcctgggtgagcatggggatagttcggtccccgtgtggtccggcatgaacgtggcaggcgtatccctaaagactcttcaccccgatcttggcactgataaggataaggaacaatggaaagagtgtagatacacactgggggaccctaaaggcgcagccatactgaagtcgtcagacgtgattagttttcactgtcttgggtataatcggattctggggggagggtgcgcctgctgcccattctatctaatttgtgattag

SEQ ID NO: 29236 - DNA, 999 bp, synthetic construct
  misc_feature 1..999: note = Description of Artificial Sequence: Synthetic coding sequence
  source 1..999: mol_type = other DNA
atggcaactttaaaggaccagctgatttacaacctgctgaaggaggagcagacaccacagaataagatcactgtggtaggcgtgggagccgtagggatggcttgtgctatatcaatcctcatgaaggacctggcagacgagttggccctggtagacgtcatcgaggacaagctgaagggcgaaatgatggacttgcagcacggcagtctattcctgagaacacctaagattgtgtcgggcaaagattacaacgtcactgctaatagtaaactcgttattataaccgctggcgctcgccagcaggaaggagagtcccgactgaacctcgtacaacgaaatgtgaatatattcaagtttattattccaaacgtggttaagtacagccctaactgtaaactgcttattgtaagtaatccggtggacatcttaacatatgttgcctggaagataagcggttttccaaaaaatagagttataggatctggttgcaaccttgactcagccagattcagatacctaatgggcgagcgcctgggcgtccatccactgtcgtgtcatggttgggtgctcggcgagcatggtgactctagcgttcctgtgtggtccggtatgaacgtcgccggtgtatctctgaagacactgcaccctgatctgggcacagacaaagataaagagcagtggaaggaggttcacaaacaagtggtggaaagcgcttatgaggtgattaaactcaagggctatacgtcatgggcaatcggactctcggtggcggatttggctgaaagcatcatgaagaacctgagaagagtgcacccagtctccacgatgataaaaggtttgtatggcatcaaggatgacgtcttccttagcgtaccgtgcatcctaggacaaaatgggatcagcgatctggtgaaagtgacccttacctccgaggaggaggccaggctgaaaaaatcagctgatacactatggggcatccagaaagagctgcaattctag

SEQ ID NO: 29237 - DNA, 825 bp, synthetic construct
  misc_feature 1..825: note = Description of Artificial Sequence: Synthetic coding sequence
  source 1..825: mol_type = other DNA
atggcgacattgaaagaccagctgatatacaatctgttgaaggaggagcagaccccacagaacaagatcaccgtcgtcggcgtgggggctgtcggcatggcttgtgctatttctattctgatgaaggatctggcagacgaactggccttagttgacgtgattgaggataagcttaagggagaaatgatggatcttcaacacggaagcctctttttacgcaccccgaagatcgtgtccgggaaagtagatatcctgacttacgtggcatggaaaatttctggcttcccaaagaacagagtgattggttcaggctgcaatctggactccgcccgatttagatacctgatgggcgaacggttgggcgtgcacccactatcctgtcacgggtgggtgctgggagagcacggagactctagtgtccctgtttggagcggaatgaacgtcgcgggtgtgtccctgaaaacgctgcaccccgacttaggtactgataaggataaagagcagtggaaggaggtgcacaagcaagtggtggagtcagcctatgaagtgattaagttaaagggttacacctcgtgggctattggtttgtccgtggctgatctagccgagtctataatgaaaaacctgcggagagtgcatccagtgtctactatgatcaagggcctgtacggaataaaagacgatgtgtttctttctgttccgtgtatcctgggtcagaacgggatctcagatttggtgaaggtgacattgacgagcgaagaagaggcccgactgaagaagagtgctgatacactgtggggaatccagaaggagctgcagttctag

SEQ ID NO: 29238 - DNA, 918 bp, synthetic construct
  misc_feature 1..918: note = Description of Artificial Sequence: Synthetic coding sequence
  source 1..918: mol_type = other DNA
atggcgacactcaaagaccagctgatatacaatctcctgaaggaggaacaaaccccccaaaataaaatcacggtagtaggagtcggggcagttggcatggcatgtgctattagcattcttatgaaagacttagctgatgaactggcaattgtgtccggaaaggattacaacgtgaccgctaactccaagcttgtgataatcaccgctggcgcacgtcagcaggagggagagagtcggctcaacctggtgcagaggaacgtcaatattttcaagttcattataccaaacgtggttaagtacagtcctaattgtaaactgctcattgtgtcgaacccggtggatattctcacatacgtggcctggaaaatctcaggcttccccaaaaatagagtgatcggcagcggttgtaaccttgacagcgccaggtttagatatttaatgggcgagcgtctcggcgtgcaccccctcagctgccacggctgggttctgggggagcatggggactcatccgtgcccgtgtggagcggcatgaatgtggcaggagtgagtttgaagacactccaccccgacctgggcactgacaaagataaagagcagtggaaagaggttcacaagcaggtggtcgaatcagcctacgaggtgatcaagttaaaaggatacacatcctgggcgatcggcctgagtgtggctgacttggccgaatcgataatgaagaacctccgccgtgtccaccccgtctctacaatgatcaagggcttatacggaattaaagatgacgtatttctgagcgtcccttgtatcttgggacagaatgggatcagtgatttagtgaaggtgaccctgacgagcgaggaggaagccagactgaagaaatccgccgatacattgtggggaattcagaaggagctgcagttttag

SEQ ID NO: 29239 - DNA, 435 bp, synthetic construct
  misc_feature 1..435: note = Description of Artificial Sequence: Synthetic coding sequence
  source 1..435: mol_type = other DNA
atggccaccctgaaggaccagcttatctataacctgctcaaagaagagcagaccccccaaaacaaaataactgtggtaggtgttggggctgtgggcatggcctgcgccatatcaatccttatgaaggaccttgcagatgagctggctttggttgacgtgatcgaggacaagctgaagggagagatgatggatctgcagcacggaagcctctttctgcgtacgcctaaaattgtttctggcaaggactataatgtgacggccaactcgaaactcgtcatcattacggccggagctaggcagcaggagggcgagagcagattaaacctggtgcaaagaaacgttaacatttttaaatttatcattcctaatgtcgtgaaatactccccaaactgcaagttattaattgtgtccaaccccggtgaggcgtttgactag

SEQ ID NO: 29240 - DNA, 345 bp, synthetic construct
  misc_feature 1..345: note = Description of Artificial Sequence: Synthetic coding sequence
  source 1..345: mol_type = other DNA
atggccactctgaaggatcagcttatttataacctgctgaaagaggagcaaacgccccagaacaaaatcacagtggtcggggtgggagccgtgggtatggcgtgtgcaatttctatcctcatgaaagacctggcggatgaattagctctggtagatgtcatcgaggataagctcaaaggcgagatgatggatttacagcacggtagcctatttctgcgcacaccaaagattgttagcgggaaagattataacgtgaccgccaactctaagttggtcatcattaccgccggtgccaggcaacaagaaggtgaatcccgcctgaacttagtacagcgcaatgtgtag

SEQ ID NO: 29241 - DNA, 219 bp, synthetic construct
  misc_feature 1..219: note = Description of Artificial Sequence: Synthetic coding sequence
  source 1..219: mol_type = other DNA
atggccaccctgaaagaccagttaatttataacctgcttaaggaggagcagacaccacagaataaaataactgtggtaggcgtgggtgcggtgggaatggcttgcgctataagcatattaatgaaggacctggccgacgagcttgccctcgtggatgtgatcgaggataagctgaaaggggaaatgatggacttgcagcatggttccctattcttgtag

SEQ ID NO: 29242 - DNA, 1086 bp, synthetic construct
  misc_feature 1..1086: note = Description of Artificial Sequence: Synthetic coding sequence
  source 1..1086: mol_type = other DNA
atgggcgagccgtctgggggttacacctatacccagaccagtatctttctgttccacgccaaaatcccattcgggtccaaatccaacatggcaacactgaaagaccagctaatctacaatctcctgaaagaagaacagacaccacagaacaaaattactgtggtcggcgtcggagccgtgggcatggcgtgtgccattagcatcctgatgaaagatctggcggacgagctggcacttgtcgacgtgatagaggacaaactgaagggcgaaatgatggatttacagcatggatctctttttttgaggacccctaaaatcgtgtcaggaaaagattataacgtcacggctaatagcaaactggtgattataacagccggtgcgagacagcaggagggggaaagtcggttgaacctcgtgcagcgtaacgtgaacatcttcaagtttattattcctaacgttgtgaagtattcccctaattgcaagctgctcattgtgtcaaatccggtggacattttgacgtacgtggcttggaagatcagcggtttcccgaagaatcgagtgattgggtccgggtgcaacttggatagtgccaggtttcgctacctgatgggagagcgcttgggagtccacccgctgagttgccatggctgggttcttggcgagcatggcgactcatctgtgcccgtctggtcaggcatgaacgtggcaggcgtgagtctcaagactctgcatccggacctcggaacggataaggataaagagcagtggaaggaggtgcataaacaggtagtagagtccgcatacgaggtgatcaagctgaagggttacacgtcctgggcgatcgggctgagcgtagcggacctcgctgaatcaatcatgaagaacttgcggagagtgcacccagtgagcacgatgattaagggattatacggaatcaaggacgatgtgttcctctccgtcccatgtattctcggtcagaatggcatttctgacctcgtcaaagtcaccttgacctcagaagaggaagcccgtctcaagaagtccgccgataccctgtggggtatacagaaggaactgcaattctag

SEQ ID NO: 29243 - DNA, 999 bp, synthetic construct
  misc_feature 1..999: note = Description of Artificial Sequence: Synthetic coding sequence
  source 1..999: mol_type = other DNA
atggcaactctcaaagatcagctcatttataatctgctgaaggaggagcagacccctcaaaacaaaatcactgtcgttggcgtcggcgctgtgggcatggcatgtgcaattagcatactcatgaaagatttagccgacgagctggcattggtggacgtgatcgaggacaagctgaaaggcgagatgatggatttacagcatggtagcctgttcctcagaaccccaaaaatagtgtccggaaaggattataacgtgacagctaacagtaagttagtcattattacagccggagctagacagcaggagggcgagtctaggctgaatctcgtccaacgcaatgtgaatatatttaagttcatcatcccaaacgtggtgaaatatagccctaactgcaagttacttatcgtttccaaccccgtcgacatattgacttacgtggcttggaagataagcgggttccctaagaatagagttatcgggagcgggtgcaatttagacagtgctaggtttagatatttgatgggagaaaggcttggagttcaccctctgagctgccacggctgggtcctaggggagcatggcgattcttccgttcccgtctggtctggcatgaatgtggccggtgtgtccctcaagacactccacccagatctgggcaccgacaaagacaaggaacagtggaaagaagtccacaaacaggtggtcgagtcagcttatgaggtcattaagctgaagggctacacaagttgggcgattggtctgtctgtggccgacctggccgaatccataatgaagaacctgcgtagagttcaccccgtgagtactatgataaagggcctgtatggtatcaaagatgatgtgtttctcagcgttccttgtatccttggccaaaatggaattagtgacctagtgaaagtgacattgacatcggaagaagaagccagactcaaaaagtctgcggatactttgtggggaatccagaaagagttacaattctag

SEQ ID NO: 29244 - DNA, 474 bp, synthetic construct
  misc_feature 1..474: note = Description of Artificial Sequence: Synthetic coding sequence
  source 1..474: mol_type = other DNA
atggcaacccttaaggatcagctcatctataatcttctgaaggaagagcagactccccaaaataagattaccgtggtgggtgtgggagctgttgggatggcctgcgcgattagcattctcatgaaggatctcgctgacgaactagcactcgtggacgttatcgaagataagctcaagggtgagatgatggatctccaacatgggtcactatttctgcgtactcccaagatcgtgtccgggaaagattacaatgtcaccgcgaacagcaagttggttattatcactgcaggagccaggcagcaagaaggcgagtcaaggctcaatctcgtgcagcgcaacgtgaatatttttaagtttattataccaaatgtggtcaagtactctcctaattgtaaactgctgatcgtgagcaacccagtggacatactgacttacgtagcctggaagatctctggattccctaagaacagatag

SEQ ID NO: 29245 - DNA, 804 bp, synthetic construct
  misc_feature 1..804: note = Description of Artificial Sequence: Synthetic coding sequence
  source 1..804: mol_type = other DNA
atgggctctgcctgtataaaggtgactaagtattttttatttttatttaatctgatttttttcattctgggcgcagtcatattaggtttcggggtgtggatactcgccgataagtcgtctttcatctccgtgctgcagacctcttctagtagcctccgcatgggcgcatatgtttttatcggcgtgggagccgttaccatgctaatgggcttcctcggatgcatcggcgctgtaaatgaagtgcgttgtctgctgggcctgtacttcgcatttttgttgttgatattgatcgctcaggttacggccggagctctgttttactttaatatggggaaactgaagcaagagatgggcggaattgttactgagttaatcagagactacaactcatcccgtgaggatagtctgcaggatgcctgggactacgtccaggcgcaagtcaaatgctgtggctgggtgagcttctacaactggactgacaacgctgagctcatgaaccgacctgaggtcacatacccatgttcgtgtgaggttaagggtgaagaagacaatagtttgtctgtacgcaaagggttttgcgaagcacccggaaataggactcagagtggtaaccacccagaggactggcccgtatatcaggagggatgtatggaaaaggtccaggcatggttacaggaaaacctgggcattattctgggggtgggtgttggggtggcaataattgagctgcttgggatggtgttgtcaatttgtctctgccgacacgtacattccgaggactattccaaagtgcctaaatattag

SEQ ID NO: 29246 - DNA, 3393 bp, synthetic construct
  misc_feature 1..3393: note = Description of Artificial Sequence: Synthetic coding sequence
  source 1..3393: mol_type = other DNA
atgaaacgcagcgagaaacccgaggggtacagacaaatgcgccctaagacttttccagcttctaattatactgtgtcatctcgccagatgcttcaggagatcagagaaagtcttcggaaccttagtaagccctccgatgcagccaaagctgaacacaatatgagcaagatgtcgaccgaggaccccaggcaagtgcgcaatccgccaaagtttggtacacaccacaaggccctccaggagataaggaacagtctgctgccatttgctaatgagacgaattcctctcgatctacttcagaagtcaatccccagatgctgcaggatctgcaggcagctggctttgatgaggacatggttatccaggctttgcagaagactaataatcgatctatagaggctgccatcgagttcatcagtaagatgtcttaccaagacccacggcgtgaacagatggctgcagccgcagctcgaccaattaacgcatctatgaagcccggaaatgttcaacagagtgtaaaccgaaaacaatcatggaaaggttctaaggagtctctggttcctcaacggcatgggcctccgctcggtgagtctgtggcttatcatagcgaaagcccaaattcccagaccgatgtcgggagaccactttccggatcaggcatcagtgcattcgtgcaggctcatccatcgaacgggcagagggtgaatcctccacctccgccacaggtcagatccgtgactccaccgccacccccacgcggacagacccctccgccaagaggaactaccccgccacctccttcctgggagccgaattctcaaaccaaacggtacagcggtaacatggaatacgtcatcagccgaatctcccctgtgccccctggcgcatggcaggagggctacccccctccgccactcaatacatcacctatgaaccctccaaatcagggccaacgcggaatctcgtctgtaccagtgggtcgtcagcccattattatgcagagcagcagtaagtttaactttccatcgggtagaccgggaatgcaaaatggtaccggccagaccgactttatgatccatcagaacgtggtccctgccggaaccgtgaatcgccagccacctccaccgtacccactgactgcggctaatggccagtctccgtccgcccttcaaaccggcggttccgcagccccaagtagctatacgaatgggtccataccccaaagcatgatggtgcctaacaggaattcccataacatggaactctacaatatatctgtgccaggactgcagacaaactggcctcagagtagcagtgcccctgcccagagctcaccgagttcaggccacgagattccaacatggcagcccaacatacctgtacgcagtaactcattcaataaccccctcggcaatcgggctagccattccgccaactcgcagccttccgccactacggtgaccgcaattacaccggctccaatccagcagccagtcaaaagtatgcgcgttctgaaacctgagctgcagaccgcccttgccccaacacaccctagctggataccccagccaatccagactgttcagccctctcccttccccgaaggcaccgcttccaatgtgaccgtgatgcctcctgttgccgaggctcccaattaccaagggccacctcctccataccctaaacatttactgcaccaaaaccccagtgtaccaccgtacgagagcatttccaagccaagtaaggaggaccagccaagcttgccaaaggaagacgaatctgagaagagttacgaaaatgtagacagcggggataaggaaaaaaagcagatcacaacttcacctatcacagtacggaagaataagaaggacgaagagaggcgagaatctagaatacagtcgtatagcccgcaggcctttaagttcttcatggaacagcacgttgagaacgtgctaaagtcacatcagcagcgtctgcatcgcaaaaaacagcttgagaatgagatgatgcgggtagggctgtcacaggatgcacaggaccagatgcgaaaaatgctgtgtcagaaagaatcgaactatatccggttgaaaagagctaaaatggacaagagcatgttcgttaaaatcaagactctgggcattggcgctttcggcgaggtctgcctggcgagaaaggtcgacaccaaagccttgtacgccacaaaaacgttacggaagaaggacgtgctcctgagaaaccaagtggcgcatgttaaggccgaaagggatatcctggcagaagccgataacgaatgggtggtgagactctattactcctttcaggacaaggacaatttgtattttgtgatggactacattcctggcggtgatatgatgagtttgctcataaggatggggatcttcccagagtctctggctcggttctatattgcagaattgacatgtgccgtggagagcgtgcataagatgggctttatacatagggatatcaaacctgacaatattctaattgatagagatggccacattaaactcaccgacttcggtctgtgcaccggctttcggtggacacacgattctaaatactaccaatccggggatcacccacggcaggatagtatggacttctctaacgaatggggagatccttcttcttgtcgctgcggggacaggctcaaaccactggaacgccgtgcagccagacagcatcaacgctgcctagctcatagcctcgtcggtacaccaaattatattgccccagaagtcctcttgagaacaggctatactcagctttgcgactggtggtctgtgggagtaattctgttcgagatgttggttgggcaacccccttttctggctcagactccactcgagacacaaatgaaagtgatcaattggcagacctcactgcacattcctcctcaggccaagctgagtccagaagcctccgacttgattatcaaattgtgtcggggaccagaagaccgcctgggtaagaacggagccgatgagattaaagcccatcctttctttaaaactattgatttctcctcagatctccggcagcaatcggcttcttacattccgaaaatcacacatcccaccgacacatcaaacttcgaccccgtggatcctgataagttgtggagcgacgacaatgaggaggagaacgtgaacgatacccttaacggctggtacaagaacggcaaacatcctgaacacgccttttatgagtttacctttcggcgattttttgatgacaatggctacccatataactaccctaaaccaattgaatatgaatatatcaattctcagggaagcgaacagcagagtgacgaggatgaccagaacaccgggtcagagatcaaaaaccgggatttggtgtacgtgtag

SEQ ID NO: 29247 - DNA, 2073 bp, synthetic construct
  misc_feature 1..2073: note = Description of Artificial Sequence: Synthetic coding sequence
  source 1..2073: mol_type = other DNA
atgaagcggtccgagaagccggaaggatatcggcagatgcgaccaaagaccttccctgcaagtaattataccgtgagctcacgtcagatgctgcaggagataagagagagccttagaaacctgagtaaaccttccgacgccgcaaaggctgaacataatatgagtaagatgtcaaccgaggatcctcgccaggtaaggaatcccccaaaatttgggacgcatcacaaggctctccaggagatccggaattccttgctcccattcgccaatgaaaccaacagcagccggagtacgagtgaagtcaatccacagatgctccaagacctgcaggctgctggttttgacgaggatatggtgatccaggcgctgcaaaagaccaacaacaggtccattgaggctgccatcgagtttatctctaagatgagctaccaggaccccaggagagaacagatggcggcagcagccgctcggcctattaacgctagtatgaagcccggtaacgtgcagcaatccgtaaacaggaagcagtcctggaagggatccaaagagtcactcgtccctcagagacacgggccaccactgggggagagcgtggcttaccatagcgagtccccaaatagccagactgacgtcggtcgacctctgtcagggagtggcatatctgcttttgtgcaagcccacccctccaatggtcagcgcgtgaatcccccaccacctccacaggtcagaagcgtcacaccgccaccaccaccacgaggacagacacccccacccaggggaaccacaccaccccctcctagctgggagccaaatagtcagacgaagagatactcagggaacatggagtacgtgatcagtcggataagcccagtgcccccaggagcctggcaggaagggtacccaccgcctcctttaaacacctctcctatgaacccacccaatcagggccagagaggaatttcatccgtaccggtggggcgtcagcccatcattatgcagtcatcctccaaattcaacttcccgtctggacggcctggtatgcagaatgggaccggccagactgatttcatgatccatcagaacgtcgtccctgctggtacagtgaatcgtcagcctcccccaccttatccactaactgcagccaacggtcagagtccctcagctctgcagaccgggggaagcgctgctcccagttcttacaccaacggctctattcctcagtccatgatggtcccaaaccggaacagtcataatatggaactgtataacataagtgtgcctggcctccaaaccaactggccccagtcctctagcgccccagctcagtctagccccagctctggccatgagatccccacgtggcagccaaatataccggttaggtcgaactcctttaataacccgctcgggaatcgggctagtcactctgctaactcccagccttctgcgactactgttacggctattacccctgctcctatccaacaacccgtgaagagcatgcgagttcttaaacctgaactgcagactgctctggctcccactcatccaagctggattccgcagcctatccagacagtacagccatccccctttcctgaaggcacagcctcaaacgtgaccgtaatgcctccagtggccgaggccccaaattaccagggccctccgccaccatatcctaagcatctcctgcatcagaaccctagcgttcctccctacgagtcaattagcaagcctagcaaggaagaccagccaagcctcccaaaagaagacgagtctgagaagtcatatgagaatgtggactcgggcgacaaggaaaagaaacagataacgacatcaccaatcactgtgcgcaaaaacaagaaagatgaggaaagacgcgagtccaggattcaatcgtattcaccacaggccttcaaatttttcatggaacagcacgtggaaaatgtgctcaagagccatcagcagaggctccatcggaagaagcagctggagaacgaaatgatgagagtcaagcctttcaagatgtcgatctttatcctcaatcatctttttgcatggtgcctcttttag

SEQ ID NO: 29248 - DNA, 3393 bp, synthetic construct
  misc_feature 1..3393: note = Description of Artificial Sequence: Synthetic coding sequence
  source 1..3393: mol_type = other DNA
atgaaacgtagcgagaaacctgaagggtacaggcaaatgcggccaaaaacatttcctgccagtaattatacggtttcctcaagacagatgctgcaggagatacgcgaaagtctccgcaacctgtccaagccatccgacgccgcaaaggcagagcataatatgtctaagatgtcaacagaggaccccagacaagttcggaatccgcctaaattcggcacacaccacaaggcccttcaagaaatccggaactccctcctcccgttcgctaacgagacgaattcatcacgttcgacttccgaagttaatcctcagatgctgcaagacttacaggctgccggattcgatgaagatatggtgattcaggctttgcagaagacaaacaaccgtagcatcgaggctgctatagagtttattagtaaaatgtcctaccaggatccccgacgggaacagatggctgccgctgccgctaggcccattaatgcctctatgaagcctggcaacgttcaacaatcagttaacaggaagcagagctggaaagggtcaaaagagtctcttgtgccccagagacatggacccccactcggcgaatcagtcgcttatcactctgaaagccctaattcacagactgatgtcgggagaccactcagtgggagcgggatctctgcatttgtccaggctcacccatctaacggccagcgcgtgaacccgccacccccaccccaggtgagatccgtgaccccaccgccacccccacgaggacagactccccctcctcgcggaacaacacctccacccccaagttgggaacctaacagccagacaaagcgatactctgggaacatggagtatgttatctctcgcatctccccagtaccaccaggcgcatggcaagagggataccccccaccccctctgaacactagtcctatgaaccccccaaaccagggtcaacgtggaattagcagtgtgcctgttggtcgccagccaatcatcatgcagagctcttccaagttcaacttccctagtgggagacctgggatgcagaacggcacaggccaaacggactttatgattcatcaaaacgtggtgcccgctggcactgtgaaccgacagcctccacctccctacccattgactgcagcaaatggccagtctccaagcgccttgcagacagggggaagcgccgctccttcctcatacacgaatggtagcatcccgcagagcatgatggttcctaacagaaacagccacaatatggagctatataacatcagcgtccccggtctccagacaaactggccccaaagtagcagcgcacccgctcagagtagccccagttcgggacacgaaatcccaacctggcagcctaatattcctgttagatcaaactcctttaacaatccgttaggaaaccgggcttctcacagtgcaaactcacagcctagtgcaactacggtcactgccattaccccggcaccaattcagcagcccgttaaatcaatgcgcgttttgaaacccgaactccagacagcattggctccaacccatcccagctggattccccagcctattcagaccgttcagccttctccctttcctgaggggaccgctagtaacgtgactgtaatgccgcctgtcgcagaggcacccaactatcagggcccaccgccaccataccccaagcacctgttgcaccagaatccttcagtgcccccatatgagagtatcagtaaaccatctaaggaggatcaaccaagtctcccaaaagaagatgagtctgaaaagtcgtatgaaaatgtggactccggggacaaggaaaaaaaacagattaccacgtctcctatcacagtgaggaagaacaagaaagacgaggagcggcgtgaatcgcggatccagagctactctcctcaggcattcaaattctttatggagcagcatgtggagaatgtcctcaagtcacatcagcagagacttcatcggaagaaacagctcgaaaacgagatgatgagagtgggtctctcccaggatgcacaagaccagatgagaaaaatgctgtgtcagaaggagtccaattacataagactcaagagggccaaaatggataaatccatgtttgtaaagatcaaaaccctaggaataggggctttcggggaagtctgtctggcacgcaaggtggacaccaaagcactgtacgcgacgaagactttgcgtaagaaggacgtgctcctgaggaatcaggtggcacacgtgaaggcggaacgcgacattttggccgaggccgacaatgagtgggtggtccgcttgtattacagttttcaggacaaggacaatctttactttgtaatggactatatacctgggggtgacatgatgagtcttctgattaggatgggaattttccccgaaagcctagcaaggttttatatcgccgagctgacatgtgctgttgagtcggtgcataaaatgggctttattcatagggatatcaagcccgataacatccttatcgacagagacggccatatcaaacttacggactttgggttatgtactgggtttcgatggacccatgacagcaaatactatcagagcggagatcaccccagacaggatagcatggacttttctaacgaatggggagatccctcctcttgtagatgtggtgaccgcctgaaaccattagaacggcgagcagccagacagcatcagaggtgcttagctcattctttggttggaacacccaactatattgcaccagaggtgctcttaagaaccggctatacccaactgtgcgactggtggagtgttggcgtcatactgtttgaaatgctggtaggccaaccccctttccttgcacaaacacctctcgaaactcagatgaaggtgataaattggcaaacatcactccacatccctcctcaggccaagctgtccccagaggcatcggatcttatcatcaagttatgcagaggacccgaggaccgcctagggaagaatggagcagacgaaatcaaggcgcacccctttttcaagaccattgacttctcttccgatctccgccaacagtcagcttcctatattcctaagataacccacccgactgatacctctaattttgatccagtcgatcccgacaaactgtggtcggatgataatgaggaggagaatgttaatgacacgctcaatggttggtacaaaaatggcaagcaccctgaacacgcgttctacgaatttacatttagaaggttttttgatgataacggctatccgtacaattatccgaagccaatcgaatacgagtacattaactctcagggcagtgagcagcaatcggacgaagacgaccagaataccggcagcgagattaagaatcgagatttggtgtacgtctag

SEQ ID NO: 29249 - DNA, 3267 bp, synthetic construct
  misc_feature 1..3267: note = Description of Artificial Sequence: Synthetic coding sequence
  source 1..3267: mol_type = other DNA
atgagacccaagaccttccccgcaacaacctatagtggtaatagccggcagaggctacaagagatacgtgagggacttaaacagcctagtaagagttctgtccaagggctgcccgctggacctaattccgacacaagtttggacgcaaaggtgcttggcagtaaagacgcgacaaggcagcagcagcagatgcgggctacccccaagttcgggccataccagaaggcattgcgcgagattcgctattccctgctcccttttgccaacgagtccggaacctcggcggctgcagaagtaaacaggcagatgttacaggagctggtgaacgccggatgcgaccaagaaatggctggccgagccctgaaacagactggatcgagaagtatagaggccgcactggagtacatctccaagatggggtacctagatccgagaaatgaacaaattgtgcgggtgatcaagcagacctccccagggaagggactaatgcctactccagtcacacgcagacctagcttcgaaggcactggcgactcctttgctagttaccaccagctctctggtacaccgtatgaagggccatcatttggtgccgatggtcctaccgcgctggaggagatgccaagaccttatgtcgactatcttttccctggagtgggccctcacgggcctgggcaccagcaccagcatcccccaaaggggtacggcgcttcggtggaagctgctggcgcacacttcccccttcagggcgcacattatggacgccctcatctgctggtccccggagaaccactggggtatggtgtgcagcggagcccttcattccagagcaaaacaccacccgagacgggtggctatgccagtctgccgacgaaagggcagggaggccctccaggggcagggcttgcgttccctcctccagccgcaggactttatgtgccccaccctcaccataaacaggcgggtcctgctgcgcatcagttgcacgtgctgggaagcaggtcccaagtcttcgctagcgattcccctccccagagcctccttacgccaagcaggaattcattgaatgttgatctctatgagttgggaagtacctccgtgcagcagtggcctgcggctacattggcgcgtcgggactcacttcagaaaccgggactggaggcaccaccgagggctcatgtggcctttagacctgactgtcctgtgccaagtagaaccaacagctttaattcccaccagccacgccctgggcctcccggtaaggcagagccttcactccccgctccaaataccgtgacagcggtgaccgctgcgcacattctgcatccagtgaagtcagtgcgagtcttgcgacccgagccacaaacagccgtggggccatcacaccccgcttgggtgccagccccagcacccgcaccagcccctgcgcctgcaccggctgcagagggattggatgctaaggaggaacacgccctggccctgggaggagctggcgcatttcctttggacgtcgagtatggcggacctgaccggcgatgtccccctccaccttatcccaagcacctactgcttcggagcaagtcagagcagtacgaccttgactccctttgcgcagggatggaacaatccttgagggccggtcccaacgagccagagggaggggataagtctcgcaaaagtgctaaaggggataaaggagggaaggacaaaaaacagatccagaccagtccagtgcccgtccgaaagaattccagagatgaagagaaacgagaaagccgtatcaaatcttatagtccttacgcctttaaattcttcatggaacagcacgtggaaaacgtgattaagacatatcagcagaaggtgaatcggcgtctgcagctggagcaggaaatggcaaaagctggcttgtgtgaagctgaacaggagcaaatgcgcaagatcctgtaccagaaagaaagtaattacaaccgtttgaaaagagctaagatggataaaagcatgtttgtaaagatcaagaccctcgggattggggcatttggcgaggtttgtttggcctgcaaggttgatacccatgccttgtatgccatgaagaccctaagaaagaaagatgtgctgaatcgcaaccaggtcgcacatgtgaaagctgagcgcgatatactcgccgaagcagataacgaatgggttgtgaaactgtactacagctttcaggataaagactccctctacttcgtgatggattacattccagggggtgacatgatgagcctattaattaggatggaggtgttccccgagcatctggcgagattttatatcgccgaactcaccctcgccattgaatctgtacataagatgggctttattcatcgcgatatcaagccagataacattctgattgacctcgatgggcacataaaattaaccgacttcgggttgtgcactggattccggtggactcacaattcaaagtactaccagaaagggtcgcacgttcgccaggattccatggagccgtctgacttgtgggacgatgtctcgaactgcagatgtggagaccgcctgaagaccctggaacagagggcacgcaagcagcatcaacggtgtttggctcatagcctcgttggtactcccaattacatcgcccctgaggtcctgttgagaaaaggctacactcagctatgcgactggtggtccgtgggcgttatcttattcgagatgctggtggggcaacccccatttctggcgccaaccccaaccgagactcagttgaaagtcatcaattgggagaacactctgcacatccccgcacaggttaagctgagtccagaggcaagagacctcatcactaaactgtgctgctcagccgaccatagactgggaagaaacggcgctgacgatctgaaggctcaccctttcttcagcgcgattgacttttcatccgacattagaaagcagccagccccatatgttccaactatcagccatcctatggacacgtcaaactttgaccctgtggatgaagagagcccctggaatgacgcctccgaaggctccaccaaggcatgggacacactgacaagccccaacaataaacaccccgagcatgctttttacgaatttacgttcaggcggttcttcgacgacaacgggtatccattccggtgtcccaagccgagtggggctgaagcctcgcaggcagagtcgtcagacctagagagttccgacctggtcgatcagacagaaggctgccagccagtttatgtttag

SEQ ID NO: 29250 - DNA, 3267 bp, synthetic construct
  misc_feature 1..3267: note = Description of Artificial Sequence: Synthetic coding sequence
  source 1..3267: mol_type = other DNA
atgcgcccaaaaacctttccagcaactacttactctgggaatagccgccagagactgcaagagatacgggagggccttaagcagccaagcaaaagctcagtacaggggctgccggctggtccaaactcagatacatccctggatgcaaaggtccttggctcaaaggacgctacccggcagcagcagcagatgcgcgctacccctaaatttggcccataccagaaggcattgcgcgaaatcaggtactccctgttaccattcgcaaatgaatcaggtacttcagcagcagctgaagtgaaccgccagatgctgcaagagctggtcaatgccggatgcgaccaagagatggctggcagagctctgaagcaaaccggtagccgttctatcgaggccgcactcgagtacatctctaagatgggatacctcgatccccgaaacgagcagattgtgagagtcattaaacaaacatcaccgggtaaaggactgatgcccacccctgtgacacgcagacctagcttcgagggcacaggagatagttttgcaagttaccaccaactctctggcaccccatacgagggaccgagctttggcgcagatggccctaccgcacttgaagagatgccaaggccttatgtggactacctctttccaggggtcgggccacatgggccaggtcaccaacaccagcacccgccaaaagggtacggggcatcagtggaggccgcaggggcacactttcctcttcagggagctcattacggcagaccacatctgctcgtccccggtgagcctttggggtacggagtgcagcggtcaccctcctttcagtctaaaacaccacccgaaaccgggggatacgcttccctgcctaccaaagggcagggaggcccacctggcgctggactcgccttcccacctccagcggctggattgtacgtcccccatccccaccataagcaggcaggcccagcggctcaccagttgcacgtcttgggatccagatcgcaagtgttcgcatccgattccccacctcagtccctgttaacccctagcagaaacagtcttaacgtggatctttacgaactgggctccactagtgtgcagcagtggcccgcagctaccttggctagacgagatagcctgcagaagccaggactagaggccccacccagggcccacgtcgcttttcggcctgattgtccagtgccatctcggaccaatagttttaattcccatcagcccaggcctgggccaccgggtaaagctgaaccttcgctgcctgctccaaatacagtgaccgcggtcactgctgcccatatactgcaccccgtgaagtccgtccgcgtgttgcggccagaacctcaaacggcagttggaccctcccaccctgcctgggtgccagcgccagccccagccccagcacccgctcctgcccctgccgcagaaggcctggatgccaaagaggagcatgccctggccctggggggtgccggagcctttcctctggatgtagaatacggtggacctgacagacgatgtccacctccaccttacccgaagcatttgttactgcgttctaagagtgagcaatacgacctcgatagcctgtgtgctggtatggagcagtctttaagggctggcccaaacgagccagagggaggagataagagcagaaagagtgcaaagggggacaaaggcggaaaagacaagaaacagatccaaacatctccggttccagtgcggaaaaacagcagagatgaagaaaaacgtgagtccagaatcaagagctactcaccatacgcctttaagtttttcatggaacaacatgtggaaaacgtgatcaagacctaccagcagaaagttaataggagattgcaattggagcaggagatggccaaggccggtctgtgcgaggctgagcaagagcagatgcgcaaaatcctgtaccagaaagagtccaactataatcgccttaagagagctaaaatggacaagtccatgttcgtgaaaatcaagaccttaggaatcggggctttcggtgaggtgtgtctggcatgcaaggtggacacccacgccctgtatgcgatgaagaccttacgaaagaaggatgtgctaaatcgcaatcaggttgcacatgtgaaagctgaacgcgacatccttgctgaagctgacaatgagtgggtggtcaaactgtactactctttccaagacaaagattctctctattttgtcatggattatatacctgggggtgacatgatgtccctgttgattcggatggaggtgttccctgagcacttagccagattttatatcgcagagttaaccctggcgattgaatcagtgcataagatgggctttatccaccgggacatcaaaccagacaacatactgatcgatctggacggacatatcaaattaaccgattttggtctatgcactggatttcgttggacccataatagcaaatactaccagaagggctcccacgttaggcaggactctatggaaccatctgatctgtgggacgatgtgagcaactgcaggtgcggtgatagattgaaaaccctggagcagagggccagaaagcaacaccaacggtgccttgcccattcactggtcggcacccctaactatatcgcgccagaggttttgctccggaaaggttacacccagttgtgcgattggtggtcagttggggtgatcctgtttgagatgctggttgggcagccacctttcttagccccaactccaaccgaaacccagctcaaggtcatcaattgggaaaacaccttacacattcctgcccaggtgaagttaagcccagaggctagagatcttatcactaagttatgctgtagtgccgatcatcgactggggaggaacggtgctgatgaccttaaagcccacccgttcttttctgcaatcgatttttcttccgacatccgcaaacagccagccccatatgtgccaactatttcacacccaatggacacctccaactttgaccccgtagatgaagaatcaccatggaacgacgcatctgagggtagtactaaagcctgggataccttgacatcccctaacaataaacaccccgagcatgcattctacgagtttacgtttagacgcttctttgatgacaacggttacccttttagatgccccaaaccttctggtgcggaagctagccaggctgagagtagcgacctggagagctcggatctagtagatcagaccgaaggctgccaacccgtgtacgtctag

SEQ ID NO: 29251 - DNA, 972 bp, synthetic construct
  misc_feature 1..972: note = Description of Artificial Sequence: Synthetic coding sequence
  source 1..972: mol_type = other DNA
atggcctatgtgcctgcacctggatatcagcccacttacaatccgaccctgccctactatcagcctatccctgggggattaaatgtgggtatgagcgtgtatatacaaggagtggcttcggaacatatgaaacggtttttcgtaaactttgtggtcggccaggatcctggctcagacgtggcttttcacttcaaccctcggtttgatggatgggacaaagtggtgttcaacacgctgcagggaggtaagtggggctctgaggaacgaaagaggagcatgcccttcaagaagggagccgcattcgagttggtcttcattgtgctggctgagcactacaaggtcgtcgtgaatggaaatcccttctacgagtacgggcataggctcccattgcagatggtgacccatttacaagtcgacggagacctgcagctgcagtctatcaactttatagggggtcagccactgaggccccagggtccaccaatgatgccgccataccccggtcccggacattgccatcagcagctaaactccttaccaacaatggaaggccctcccaccttcaatccaccagtcccctatttcggccgattacagggcggtctaaccgcgagacggactatcatcataaaagggtacgtcccccctaccggcaagtccttcgctatcaatttcaaagtggggagtagcggcgatatcgctctccacatcaatccgaggatgggtaacggtaccgtagtgagaaattcgttgttgaatgggtcctgggggagcgaggagaaaaaaataacacacaacccttttggtccaggccagttttttgatctctccatccgttgtggcctggaccgctttaaggtgtatgccaatggtcaacacctgttcgattttgcccacagactgtcagccttccagcgcgtggacaccctcgagatacaaggggacgtcacactgtcatacgtgcagatctag

SEQ ID NO: 29252 - DNA, 1530 bp, synthetic construct
  misc_feature 1..1530: note = Description of Artificial Sequence: Synthetic coding sequence
  source 1..1530: mol_type = other DNA
atgaacaacgaagaagacctgttgcaggaggacagcacacgcgatgaagggaatgagactgaagccaatagtatgaatacattacgaaggacacgcaaaaaagtcacaaaaccctacgtctgttctacagaggtgggcgaaacagacatgagtaatagtaatgactgcatgagagatagttcccaaatacttactcccccacaactgagtagccgaatgaagcacatacgacaggcaatggccaaaaatcggctccaattcgtgcgatttgaggccacagatttacatggagtttcacggagcaagacaatcccagctcactttttccaagagaaagtctcccacggcgtttgcatgcccaggggctacctggaggtgatacccaaccctaaggacaacgagatgaacaacatacgcgctacctgttttaacagtgatatcgtgctgatgcctgagctgtccacctttagggtattaccctgggccgaccggaccgcccgagtcatttgtgatacctttacagtgactggggagcccttgctcacctccccaaggtatatcgcaaagagacagctgagccacctgcaggcttcaggctttagtttgttgtcagccttcatctacgatttctgcatcttcggtgtacccgagattttaaacagcaagattatttcattcccggcactgacattcttgaacaatcacgatcagccctttatgcaagagcttgtcgatgggctctatcatacaggggcaaacgttgaatctttcagctctagtactaggcccggtcagatggagatttcatttcttccagagttcgggattagctcagccgataatgcatttactctcaggaccggcgttaaggaggttgcaagaaagtacaattacattgcttctttctttatcgaaacgggattttgcgattcagggatcctgagccactcactctgggatgtggaccggaaaaaaaacatgttctgcagcacaagcggcacagagcagttaacgattactggaaaaaaatggctggcgggtttgctcaaacattcggcagcattaagttgtctgatggctccttcagtttcatgcaggaagagatactccaaggatcggaaggacctcaagaagagcgtgcccactacatggggatataatgataacagctgtatttttaacatcaaatgtcacggtgagaagggaacaaggattgagaataaactcgggagcgctacggcaaatccctatctcgtgctggctgctacggtggcagctgggctggacgggctgcatagtagcaacgaagtactggcgggtccggatgaatctaccgacttctaccaggttgagccgtccgaaatccccctgaaactggaagacgctctcgtggctctagaagaggatcagtgtctgcggcaggcgctgggggaaacatttatccgctactttgtggcaatgaagaagtacgagttagagaatgaggagatcgccgctgaaagaaataagtttctggaatacttcatctag

SEQ ID NO: 29253 - DNA, 627 bp, synthetic construct
  misc_feature 1..627: note = Description of Artificial Sequence: Synthetic coding sequence
  source 1..627: mol_type = other DNA
atgaacaacgaggaagacttgttgcaggaggatagcactagggacgaagggaatgaaacagaagccaatagcatgaataccttgaggcggaccaggaagaaagtaaccaagccctatgtgtgctcgaccgaggtcggggagacggatatgagcaactctaatgactgcatgagggacagcagccagattttaaccccacctcagcttagcagcagaatgaagcacatccggcaggctatggcaaagaaccggttgcagttcgttcggttcgaggcgactgaccttcacggagtgtccaggagcaagaccattcctgcacatttctttcaggagaaggtttcccatggagtatgtatgccacgtggttacctcgaagtgatccccaaccccaaggacaacgagatgaacaacatacgtgccacctgctttaactcggatattgtcttaatgccggaattatccacctttcgagttctcccctgggcggatcgaactgcacgcgtaatctgcgatacattcaccgtgaccgtgagtggaatgtctattgggcgaaagacgtgtagtgccgctctgctggaactatcctcatcgcggtccctggggaagaatggttggcaagacagttag

SEQ ID NO: 29254 - DNA, 504 bp, synthetic construct
  misc_feature 1..504: note = Description of Artificial Sequence: Synthetic coding sequence
  source 1..504: mol_type = other DNA
atgcactggggaacactgtgtggatttttgtggttgtggccatatttgttttacgtccaggccgtccctattcagaaggtgcaagacgacacaaagaccctgataaagaccatcgtcacccgcattaacgacattagtcatacccagagtgtgagcagtaagcaaaaagttacgggcttggatttcatccccggactccacccgatcctcactttatccaaaatggatcagacgttggccgtttatcaacaaattttaacctccatgcctagtagaaacgtgattcaaattagcaatgatcttgagaatctgagagacctcctgcacgttctggccttttccaagtcctgccacttgccctgggcgagcggcctcgagacgctcgacagtctgggcggagtactcgaggcttcgggatattccactgaagtagtcgccctgtctcggctccagggcagcctgcaggacatgctttggcagctggatctgagccctgggtgttag

SEQ ID NO: 29255 - DNA, 1791 bp, synthetic construct
  misc_feature 1..1791: note = Description of Artificial Sequence: Synthetic coding sequence
  source 1..1791: mol_type = other DNA
atgggcagcgtctccagcctgattagtgggcactcgttccactccaaacactgccgggcatctcaatataaactcaggaaatcctcccacttgaagaagctcaaccgttactccgacgggctcctgcggtttggatttagtcaggattctggccacggaaaatcatctagcaagatggggaagtctgaggacttcttttacattaaggtgtcgcagaaggctcgagggagccatcatccagattacacagcactatcttccggtgacctaggaggacaggcaggagtggatttcgacccatctactccccctaagctcatgcctttctctaaccagttagaaatggggtctgaaaagggggcagtccggcctaccgccttcaagccagtgctccccagaagtggcgctattctccactcctcacccgagtcggcatcacaccagctccatcctgctccccctgacaaacccaaagaacaggaacttaaaccaggactatgtagtggcgctttgtccgatagcggaaggaactccatgagctccctaccgactcactctaccagttcatcataccaactcgatcccctggtgacccctgtcgggccaacgtctcgttttggtggctcagctcacaatattacccaaggcattgtgctccaggattccaatatgatgtctttgaaggcactgtccttctcagacgggggtagcaagcttggtcactcaaacaaggccgataagggccctagttgcgtcaggagcccaattagcacagacgagtgcagcatacaggaactggagcagaaactcctggaacgggagggagcgttacaaaaactccagcggtcctttgaagagaaggagttggcatcttccttggcatacgaggagcgaccacgcagatgtcgagatgagctggagggtcccgaaccgaagggtgggaataagctgaagcaggccagccagaaatcacagcgcgcacagcaagtgctgcatttacaagtccttcaattgcagcaggaaaagcgtcagcttcggcaagaattagaaagtcttatgaaagaacaagatctgcttgagacaaaactgcggtcctatgagagagagaaaacctccttcggacctgcgctggaggaaacacagtgggaggtctgccagaagtcgggagagatatcactgctgaagcagcagctgaaggaatcacagaccgaagtgaacgccaaggcttctgaaattctcggcctcaaggcccaactgaaggacacccggggaaagttggaaggactggagctccgcacgcaagacctggaaggggctctgcggaccaagggcctggagctggaggtatgcgagaacgaactgcagaggaaaaaaaacgaggccgaactgctcagagagaaggtgaatctcctggaacaggagttgcaggaactcagagcccaggctgcactggcgagggacatggggccacccacctttcctgaggatgtcccagccctacagcgggagctggagcgccttcgagcggaactccgagaggaaaggcaggggcacgatcagatgagctccggttttcagcacgagagactggtgtggaaggaggagaaggagaaagtgattcagtatcagaagcagctccaacagtcatacgtggccatgtaccaaaggaaccaaaggctcgagaaagccctgcagcaattggctcggggagattcagccggagagccgctggaagtggatctggaaggggcagatatcccatatgaagacatcatcgctacagaaatctag

SEQ ID NO: 29256 - DNA, 231 bp, synthetic construct
  misc_feature 1..231: note = Description of Artificial Sequence: Synthetic coding sequence
  source 1..231: mol_type = other DNA
atgggttccgtgagctccctgatctcaggtcattccttccatagcaagcattgtcgggcttctcagtacaagttacggaagtcctcccatttgaaaaagttaaaccgttacagcgatggactgctgcgcttcggattttcccaggatagcgggcacgggaaggctatgacccggtgtcctcgtgcctctagtatgtctggctcctgtgggcgtaggcgtcggaggcggtag

SEQ ID NO: 29257 - DNA, 1722 bp, synthetic construct
  misc_feature 1..1722: note = Description of Artificial Sequence: Synthetic coding sequence
  source 1..1722: mol_type = other DNA
atgggcagcgttagcagcctgatctcgggccattccttccactcaaaacactgtcgcgcatctcagtataagctccgcaagagcagccacttgaaaaaacttaacagatacagtgacggcctgctccggtttggtttcagtcaggactccgggcacggcaaaagttcctcaaagatgggaaagagcgaggatttcttctacatcaaagttagccagaaggccagaggatcgcatcatcccgattatacagctttaagttccggagatctgggcggtcaggctggagtggattttgacccttccacgcctcccaagctgatgccattcagcaatcagctagagatgggcagtgaaaaaggagctgtcagaccgaccgcattcaagccagtacttcccaggagtggggcaatcttacattcttctcccgaatcagctagtcatcagctgcatccggcaccccctgataaaccgaaggagcaggagctgaaaccgggtctgtgcagtggtgccttaagcgactctggtagaaacagcatgagtagtttacctacacattccactagctcatcgtaccagttggaccccctggtaacacccgttggaccaaccagcaggttcgggggaagcgcgcacaacatcacacagggcatcgtcctccaggactctaacatgatgtcccttaaagcgttaagcttctcagacggagggagtaagctggggcacagcaacaaagcagataaggggccaagctgtgtgaggagtcctatatcaaccgatgaatgttcaattcaggaattagagcagaagctgctggaacgggaaggggcactgcaaaaactgcagagatctttcgaggagaaggaactggcgtcgtctcttgcatacgaggagagacctcgaaggtgcagagacgaactcgaaggaccagaaccgaaggggggaaacaagctgaagcaggcgtcccagaaatctcagcgagcgcagcaagttctccaccttcaggtgctgcagctacagcaggaaaagcgccagctgcgccaggagctggagtctctgatgaaggaacaggacctacttgagacgaaacttcggagttacgaaagggaaaagacgtcattcggaccagccctcgaagagactcaatgggaggtttgccagaaatctggcgagatctcactattgaaacagcaacttaaggaatcacagacagaagtgaacgctaaagccagcgaaatcttggggcttaaggcccagctaaaggacacacggggaaaactggaggggctggagctgaggacacaggacctggagggcgcattgcgcaccaagggtctggaactggaagtctgcgagaatgaattacagagaaagaagaacgaggccgagctgctccgtgagaaagtgaacttactcgagcaggagctgcaagagcttagggcccaagccgctctggcacgtgacatgggcccacccacattcccagaagacgtgccagccctgcaaagagaactggagagactcgtttggaaggaagagaaggagaaagtgattcaatatcagaagcagcttcagcagagctatgttgccatgtaccaacgcaaccaacgcctggaaaaagctctgcagcaacttgcgcgtggcgacagcgccggagaaccgttggaggtggatcttgagggggcagacattccctatgaagatattatcgctacggaaatatag

SEQ ID NO: 29258 - DNA, 1791 bp, synthetic construct
  misc_feature 1..1791: note = Description of Artificial Sequence: Synthetic coding sequence
  source 1..1791: mol_type = other DNA
atggggtccgtgtctagtctgatcagtgggcactcgtttcactcaaaacattgtagggctagtcagtacaaattaagaaagagctcacacctgaaaaagctcaatcgttatagtgatggcctgctacggttcggcttctcacaggattccggacacggaaagagttccagtaagatggggaaatccgaagacttcttttacatcaaggtgagtcaaaaggccaggggctctcatcacccagattataccgcccttagtagtggagacctcgggggacaggctggggtggacttcgacccgtctacgcctcctaagctgatgcctttctccaaccagctggagatggggtcagagaagggagccgtgaggcccactgcattcaagcccgtcctgcccagatccggggctattctgcatagttcccctgaaagcgcgagccatcaactgcatccagcgcctcccgacaagccgaaggaacaggaacttaaacccggtctgtgctccggcgcactgtcagactccggaaggaacagtatgtcatcactgcccacgcactccacttcatcaagttaccagcttgacccacttgtaacccccgtgggcccaacatctcggtttgggggaagcgcacacaatatcacacaggggattgtgctgcaggatagcaacatgatgtctctcaaagccctatctttttctgacggcggatctaagctgggccactccaacaaggctgataaaggaccctcatgcgtccgctcccccatttctactgatgagtgcagtattcaggagctggagcagaaactgctcgagagagagggtgctctacagaaactgcaacgttcctttgaagagaaggagctagcgtcttctctggcatacgaagagagacctaggaggtgccgggacgaactggagggccctgagccgaagggcggaaataagctgaagcaggcctcgcaaaaatcccaaagggcccagcaggtgctgcacctgcaagtacttcagttgcagcaagaaaagcgacagttgcggcaggaactggagtccttgatgaaggagcaggatctgctcgaaacaaagcttagatcctatgagagagagaagaccagtttcggccctgccttggaggagacacagtgggaagtctgccagaaaagcggcgagataagcttactgaaacagcagctcaaggagtctcagacggaagttaacgcaaaagccagcgaaatcctggggttaaaggcacagctgaaggacaccagaggtaaattagagggccttgagctccgaacccaggacctagaaggggctcttcgtacgaagggactggagcttgaagtgtgtgaaaacgaactccaacgcaagaaaaacgaggcggagcttctgcgtgagaaggtcaatttgctggaacaggagctacaggagttgagggctcaggccgctctcgcacgggatatgggacccccaacatttccagaagatgtgcctgctctgcaaagggagctcgagaggcttagggccgagttacgcgaggagaggcagggccacgaccagatgtcatctgggttccaacacgagagactggtctggaaagaggaaaaggaaaaggttatccagtaccaaaagcagctccagcagagttacgtggcaatgtatcagcgtaaccagaggctggaaaaagctcttcagcaactggcccgtggagactcggccggagagccccttgaggtagatctagagggtgctgacataccatacgaggatatcattgccacagagatctag

SEQ ID NO: 29259 - DNA, 1614 bp, synthetic construct
  misc_feature 1..1614: note = Description of Artificial Sequence: Synthetic coding sequence
  source 1..1614: mol_type = other DNA
atgggaagcgtgagcagcctcatatccggccatagttttcacagcaaacattgtcgggcaagtcagtacaagctacggaagtcttcacatctgaaaaagttaaaccgctacagcgacggactgctgcgttttgggttcagccaagacagcggccacggcaagagctcttctaagatggggaagtcagaggactttttttacattaaagtatcacagaaagccaggggcagccaccaccctgattataccgctctgtctagtggtgatctagggggacaggccggtgtggacttcgaccctagtactccacctaaactgatgccattttccaatcaactggagatgggctccgagaagggggcagtgcggcctaccgcgtttaagcctgtgcttcccagaagcggggctatcctacacagcagccccgagtctgccagtcatcagctccatcctgctccacccgataagcctaaagaacaggaactcaaaccaggcttgtgttccggagctctctctgacagcggacgcaattctatgtcctctctgcccacccactccacttcctccagctatcagctggatccactggtcacacctgtggggcctacaagccggttcggtgggagtgcccataacatcacccagggcatcgtcctgcaggatagcaacatgatgagcttgaaagcactttctttttccgacgggggatccaagctcgggcactctaacaaggccgacaaggggccatcctgcgtgcggagtccaatcagtaccgatgagtgttctatacaggagttagagcagaaacttctggagagagaaggagctctccagaagttacagaggtccttcgaagaaaaggagttagcctcttccctagcatacgaagaacgcccaagaagatgcagggacgagctggaggggcctgaacctaagggaggtaacaaactgaagcaggcctcccaaaagagccagcgggcacaacaagtgctacacctgcaggttctccaacttcagcaggagaaacggcaacttaggcaggagttggagagtctgatgaaggaacaggacctgctcgaaactaaactccggagctatgaaagggagaaaacctcattcggcccagcgctggaagagacccagtgggaagtttgtcaaaagtcaggagaaataagtctcctcaagcagcaactgaaggagtctcaaaccgaggtcaacgcaaaagcatctgagattcttggacttaaagctcagctcaaggatacacgtggtaagctcgaagggctcgaactacgcactcaagatcttgaaggcgctttacggacgaaaggtctcgaactagaggtgtgcgagaacgaactccagcgcaaaaaaaatgaggcagagctactgcgggaaaaacacgagagactggtttggaaggaggagaaggaaaaggtgatccagtatcagaagcagcttcagcagtcatacgtcgctatgtaccagaggaatcaaaggttagagaaggccctgcagcagctcgcacggggtgacagtgctggagagcctctcgaagtggacctagagggcgctgatatcccctatgaggatattatagctacagagatctag

SEQ ID NO: 29260 - DNA, 1005 bp, synthetic construct
  misc_feature 1..1005: note = Description of Artificial Sequence: Synthetic coding sequence
  source 1..1005: mol_type = other DNA
atgacagagaattccgataaagtccctatcgctttggtgggcccagacgacgtggaattttgttcccctcccgcatacgccaccctcaccgtcaagccatcttcaccggcacgcctgttgaaagtgggcgctgtggtattaataagtggagccgtgctacttctttttggcgctattggcgctttctacttctggaaagggagtgattcacatatctataatgtgcattatacaatgtcaataaacggcaaactccaagacggctctatggagattgacgctggaaacaatttagaaacctttaagatgggttcaggcgcagaggaagctatcgcagtaaatgacttccaaaacggtatcacaggcatacggttcgctggaggtgagaagtgttatataaaggctcaggtgaaagccaggattccagaagtaggggcagtcaccaaacagtccatctccagtaaattagaaggaaaaattatgccagtaaaatacgaggaaaacagcctcatctgggtcgcagttgatcagccagtgaaggacaactctttcctttcaagtaaggttttggagttgtgcggcgaccttcccattttctggctgaagccaacctatcctaaggagattcaacgcgagagaagggaggtggtgagaaagattgtgccaactacgaccaagcgaccccattccggacctcgctcaaaccctggagctgggagattgaataatgagacccggccatccgttcaggaggattcccaggctttcaatccagataacccctatcaccaacaagagggggaatcaatgacgttcgacccccgactggaccatgagggcatttgctgtatcgagtgccggaggagctatacacattgccagaagatttgcgagccgctcgggggatactatccttggccttacaattaccagggctgtcgatcagcatgtagggtaatcatgccctgcagctggtgggttgcccgaattttgggaatggtctag

SEQ ID NO: 29261 - DNA, 390 bp, synthetic construct
  misc_feature 1..390: note = Description of Artificial Sequence: Synthetic coding sequence
  source 1..390: mol_type = other DNA
atgtcaatcaatgggaagctacaggacggctcgatggaaatcgatgctggtaataatctggagacgttcaagatgggtagtggggcagaggaagccatcgcagtgaatgacttccagaatggtatcacaggtatccggtttgccggaggcgagaagtgttatataaaagctcaggtgaaggcacgcatcccagaggtcggcgctgtcactaaacagtctatctcttccaaactggaaggcaaaatcatgcctgtcaagtacgaagagaattccctgatttgggtcgctgtggaccagcccgtcaaagataattcgtttctttccagtaaagtgctcgagctctgcggcgacttgcccatcttctggctgaagccgacatatccaaagtag

SEQ ID NO: 29262 - DNA, 1002 bp, synthetic construct
  misc_feature 1..1002: note = Description of Artificial Sequence: Synthetic coding sequence
  source 1..1002: mol_type = other DNA
atgactgagaactccgacaaggtgccaatcgctttagtcggccctgacgatgtcgagttctgctctcccccagcctatgcgacgctgactgtaaagccatcctcccccgctcggctcctcaaagttggggcagtggtactcatctccggcgcagtgttgctgctattcggagccataggagccttctatttctggaagggctctgacagtcacatctataacgtacattacacgatgagcatcaacggcaagctccaggatggctcaatggaaatcgacgcgggtaataatcttgaaacctttaagatgggctctggcgctgaggaagccattgcagtgaacgattttcagaacgggataactggaatcagattcgcaggaggtgagaagtgttatatcaaagcacaagtgaaagctaggatcccagaggttggtgccgtcactaagcagtccatctcaagtaagttagaaggtaaaataatgcccgtgaaatacgaagagaactctctgatctgggtggcggtcgaccagccagtaaaggataattcttttctgagctccaaagtcctcgagttgtgtggggatctacccattttttggcttaagccaacatacccaaaagagatccagagagagaggcgcgaagtggtcaggaaaatcgtccccaccactacgaagagacctcattctgggcctagatcaaatcccggagctggtcgccttaataacgaaactcggccatcagttcaggaggacagtcaggcattcaatcctgataacccctatcaccaggagggcgagagtatgacattcgacccacggctggatcacgaaggcatctgctgtatcgagtgccggaggtcatatacccattgccagaagatctgcgagcccctggggggatattacccgtggccgtacaattaccaggggtgtcgttcagcctgccgcgtaatcatgccttgcagctggtgggtcgccaggattctgggcatggtctag

SEQ ID NO: 29263 - DNA, 408 bp, synthetic construct
  misc_feature 1..408: note = Description of Artificial Sequence: Synthetic coding sequence
  source 1..408: mol_type = other DNA
atgaatgaagtgataatttacaacgtgttgctgctgcggaccatttcatgtatatccgagacctatggccactatctcattcactgtcccagcaaaatcagtcccgaattgcttaaaaaggagtcgattactaactcgtacgcccatttccagatctataacgtgcattacactatgagtatcaacggaaaactgcaggacggatcaatggaaatcgacgcaggcaataacctcgaaacgtttaagatgggctctggcgcagaggaggctatcgccgtgaacgatttccagaatgtcagtatttttcacgccttcagagagttcaatcaggccagcctcagagactttagtaacagccgccgatctagcgtatctcatactcaccctaacggcaattgttctttgtag

SEQ ID NO: 29264 - DNA, 2760 bp, synthetic construct
  misc_feature 1..2760: note = Description of Artificial Sequence: Synthetic coding sequence
  source 1..2760: mol_type = other DNA
atgcagcgtagtattatgtccttttttcatccaaagaaagagggaaaggctaagaaacccgagaaagaggcttctaattcctccagggagacagagccaccaccgaaggcggctctaaaggagtggaacggcgtcgtgtccgaatctgactctcccgtaaagaggcccggtcggaaggccgcacgagtcctagggtccgaaggcgaagaggaggatgaagcactctctcctgcaaaggggcagaaacccgctctcgattgcagccaggtgtccccccctagacctgcgacctcacctgaaaacaatgcttcactgtcagatacctcaccgatggattcttcccctagcggtattccaaagaggaggactgcaagaaagcagctccccaaaaggaccatccaagaagtactggaagagcagtcagaggacgaagaccgcgaagccaaaagaaagaaagaggaagaggaggaagaaactcccaaggaatcactaacagaggctgaggtggctacagagaaagagggcgaagacggagaccagcccacaaccccccctaagcccctcaaaacttccaaggcggagacgcccaccgagagtgtctcggaacccgaagtagccactaagcaagagctgcaggaggaggaggaacagactaagccgccacgtcgagctccgaagacactgagttcattcttcacgccacggaagcctgcagtgaagaaggaagtgaaggaggaggaacctggagctcctggcaaggaaggtgccgcagaggggcctctagatccgtcgggatacaatcccgctaaaaacaactatcacccagtggaagacgcttgctggaagcctggccagaaggtgccgtacctcgctgtggccagaactttcgagaagatcgaagaagtgtccgcccgacttcggatggtggagacgctgtccaatctcctgagatcagtggtggcgctctccccccctgacctgctgcctgtgctctacctgtccctcaatcacctgggcccaccacaacaagggctagaactcggggtcggagatggggtgctgctgaaggcagtggcacaggccacaggaagacaattggagtccgttagagccgaagctgccgaaaagggcgatgtgggtctggtagcagaaaacagtagatccactcagagattaatgctgccaccaccccctctgactgcctcgggggtatttagcaagtttcgtgacattgcccgactcacgggctctgcttcaacggcaaaaaagatcgatataataaaaggcctgttcgtggcatgccgtcacagcgaagcaagatttatcgcaaggagcttgtccgggcgattgagactgggactcgccgaacagtctgtgttggccgcactctcacaggcagtgtccctgaccccacctggccaggagttccctcctgctatggtggatgcagggaagggcaaaaccgcagaggctcggaaaacttggctggaggaacagggcatgatccttaaacagacattctgcgaagttccagatctcgatagaatcatccccgtgctcctggaacacggcctggaaaggctgcctgaacattgtaagctgtctcctggaatcccccttaaaccgatgctggcccacccaactcggggaataagtgaagtgcttaagcgctttgaggaggcggctttcacctgcgagtacaagtatgatggccagagggctcagattcacgcactggaagggggagaggtcaagatttttagccggaatcaggaggataacacagggaagtatcctgatatcatcagcagaataccgaaaattaaactgccgtccgtgactagcttcatcctggataccgaggctgtagcatgggatagggagaaaaagcagatccagccttttcaggtgctcacgacgaggaaacggaaggaggtcgacgcgtccgagatccaggtgcaagtctgtctgtacgccttcgacctcatttatcttaatggagagagtctagtgcgggagcccctttcaaggcggagacaattgttacgtgagaactttgtggagactgagggcgagttcgtctttgcgacaagcttagacaccaaagatatcgagcagattgccgagttcctcgaacaatctgtgaaagacagctgtgagggtttgatggttaagacgctggatgtagacgcaacatacgaaatcgccaagcggtctcacaattggctgaagcttaagaaggactacttagatggggtcggcgatacattagacttggtggtcattggagcctacctggggaggggcaaacgggctggtcggtatggaggattccttcttgccagctatgatgaagatagtgaagagcttcaagctatttgtaagcttggaacgggatttagtgatgaagagctggaagagcaccaccagtctctgaaagcactcgttctaccaagtcctaggccctatgtccggatagacggggcagtcattccagaccattggcttgatccttccgctgtctgggaggttaaatgtgcagatctgtctctcagccctatctacccagccgcacgcggtttggtggattctgataagggcatctccctgcggttcccccgattcatccgggttcgcgaggataagcagcctgaacaggctacaacgtccgctcaggtagcttgcctataccgcaagcagtcccagattcagaatcaacagggagaggattccgggtccgatccagaggatacctattag

SEQ ID NO: 29265 - DNA, 2667 bp, synthetic construct
  misc_feature 1..2667: note = Description of Artificial Sequence: Synthetic coding sequence
  source 1..2667: mol_type = other DNA
atgcagcgatcgataatggccgcattgaaggagtggaatggcgtcgtgtcggaatcagatagtccagtgaagaggcccggtcgcaaggccgctcgggtgcttggcagtgaaggagaggaagaagacgaggctctgtccccagccaagggtcagaagcccgctttagattgtagtcaggtctctcctcccaggccggcaacgtccccagaaaataatgcgtccctttcggatacaagccctatggattcctctccttctggcataccaaaacgaaggaccgctaggaaacagcttcccaagaggacaatccaggaggtgctggaggagcagtctgaagatgaggaccgcgaagcgaaaagaaaaaaagaagaagaagaggagacaccaaaagagtctctgacggaggctgaagtcgctaccgaaaaggaaggagaggatggggaccagcccactacccctcctaagcctttaaaaacatcaaaagcggagacacccacggagtccgtaagtgagcctgaagtcgccacaaagcaggagcttcaggaggaagaagaacagacgaaacctcccaggcgcgctcctaagaccctcagtagcttctttacacccagaaaaccagccgtcaagaaggaggtgaaagaggaagagcctggcgcacctggtaaggaaggagctgccgaaggtccccttgatccaagcggttacaaccccgcaaagaataattaccatcccgtcgaggatgcttgttggaaacctggccagaaagtgccatacttggccgtagcaagaacattcgagaagattgaagaggtgagtgctagactgcgaatggtggagacattgtctaatttactccgaagcgtcgtagctctaagtcctcctgatctgctgcccgtattgtacctctcccttaaccatttaggcccaccccagcagggtctagaactgggagtcggcgacggggtccttcttaaggccgtggcccaggccacgggtcgccagctggaaagcgtccgggcagaagccgcagagaaaggagatgtgggtctggtggcggagaacagcagaagcacccagcgtttgatgctccccccacctcccttgaccgcatccggggtcttcagcaagtttcgcgatattgccaggctgaccgggtccgcgtcgactgcaaaaaaaatcgatattataaaaggtttgttcgtggcttgccgtcactctgaggcaaggtttatcgcacgctccctgagcggccgtctgcggctggggctagccgagcaatccgtgttggcggcactgtcgcaggccgtgtctctcaccccacccggacaggagtttccccctgcaatggtagacgctgggaaggggaaaacggctgaggctaggaaaacctggctggaagagcagggaatgatcctcaagcagacgttttgcgaggttcctgacctggacaggattattccagtactcctggagcatggattggagcgtctgcctgaacactgcaaattatcacctggaatccccttaaaaccgatgctcgcccacccaactaggggaatatctgaagtcctgaaacgttttgaggaagcagcttttacctgtgagtacaagtacgatggacagagggctcagattcacgctttagagggcggagaggttaagatatttagccgtaatcaggaagacaacacaggcaagtacccagatatcatatcgcgaatccctaaaataaagctccccagtgttacatcttttatattggacacagaggccgtggcttgggatagagagaagaagcagattcagccgtttcaggttctaaccaccaggaagagaaaggaggtggacgcctcagaaattcaggtgcaggtatgtctatatgctttcgacttaatttacctcaacggggaatcattggtgcgggaaccgcttagcaggcgacgtcagttgctccgggagaacttcgtcgaaaccgaaggggagttcgtgttcgctacgtctttggataccaaagatatagagcagatagcggagtttctggaacaaagtgtgaaggattcttgcgagggtctgatggttaaaacactagacgttgacgcaacatacgaaatagctaagcgttcacacaactggctcaaattgaagaaagactatctcgacggcgttggggataccctggacctggtcgtgattggagcttatctgggcagggggaagagggcagggagatacggcggtttcttactggccagttacgacgaggattccgaggaactgcaggcaatttgcaagctaggaacaggcttttccgatgaggaattggaagagcaccaccagtctctgaaggctctggtactcccttcccccaggccctatgtacggattgatggagctgtgattccggatcactggctggacccgtctgccgtctgggaagtcaaatgcgccgatctttccctttcaccaatctaccctgcagcccgaggtctcgtggatagcgacaaaggcatttcattacgattcccgcgttttatccgagtgcgagaggataaacagcccgagcaggccacaacctccgcccaggtagcatgcctgtacaggaagcaatcccagattcagaatcagcagggagaggattcaggctctgatccagaggatacctattag

SEQ ID NO: 29266 - DNA, 2556 bp, synthetic construct
  misc_feature 1..2556: note = Description of Artificial Sequence: Synthetic coding sequence
  source 1..2556: mol_type = other DNA
atgcagaggtctatcatgtccttttttcatcccaaaaaagagggtaaggccaagaagccagaaaaggaagcgtcaaatagttcacgggagaccgagccgccacctaaggcggctttaaaggagtggaacggggtcgttagcgaatcagatagccctgtaaagcggccagggaggaaagcagccagggttttagggtcggagggagaagaggaggatgaggcgctgtcgcctgccaaagggcaaaagcctgcactcgattgttcacaggtcagccctcccagaccggctactagtccagaaaataacgcatcactttctgacacctcgccgatggattctagtccatcaggcatcccaaagaggcgaacagaagccgagactcccacagagtccgtgagtgagccggaggtcgccaccaagcaggaactccaggaagaggaagagcagacaaaaccccctcgcagagcccctaaaactcttagtagctttttcacgccacgaaaaccagccgtaaaaaaagaggtcaaagaggaagagccaggagcccctggaaaagagggcgcagccgaaggaccactcgatcctagcgggtataatcctgccaaaaacaactaccatcccgtagaagatgcgtgttggaagcccggacagaaggtgccttatttggctgtggcaagaacctttgaaaagattgaggaggtgagtgcgcgtttgcgtatggtggagactctgtccaacttgcttagaagcgtggtagctctgagcccccctgacctattgcctgtgctctacctgagtctgaatcatctggggcctccgcagcagggacttgagctgggcgtcggggatggtgtgttacttaaggccgtggcacaagctacaggtaggcagctggagtccgtcagggccgaagctgccgaaaagggcgatgtaggcctggtcgcggagaacagtcgctctacccagagactgatgttacccccaccacctctcaccgcctctggagtcttttcaaagtttcgggacattgcacgccttactggcagcgccagcaccgcgaagaaaattgatattatcaagggactatttgtggcctgcagacattcagaggcaagatttattgcgcgttctctgagcggacgcttgaggctaggtttggcagagcagtcagttcttgccgcattatctcaggctgtaagccttaccccaccaggacaggaatttccgcctgcaatggtggatgctgggaaaggaaagacggccgaggcccgaaagacttggttggaggaacagggtatgatcttgaaacagacattttgcgaagtgcctgatcttgataggataatccccgtcctgctggagcacgggctggagcgcctccccgaacactgtaagttgtccccaggaattcctttgaaacccatgctggcccaccctacacgcggaatctccgaagtgctgaagcgcttcgaggaggctgcttttacgtgtgagtataaatatgatggacagagggctcagattcatgctcttgagggcggagaagtcaaaattttctctcgcaatcaagaagataacacaggtaagtatcccgacatcatttcaagaatacccaagattaaactcccctccgtgacgagctttattcttgacacagaggctgttgcttgggacagagagaaaaaacagatccaacccttccaggtcctgactacaaggaagcggaaagaagtcgacgcctcagaaatccaagtgcaggtctgcctctatgcatttgacctgatttaccttaacggcgagtctttggttagagagcccctctctcggagacggcaactgctcagagaaaacttcgtcgagaccgaaggggaattcgtcttcgcaaccagtttggatactaaggatatcgaacagatagcggagttcctggagcagtctgtgaaggatagttgcgagggtctgatggtgaagaccctggatgtagacgctacctacgaaattgccaagcgatctcacaactggctcaaactcaaaaaggattatttggatggtgtcggtgacaccctggatctggtggtcattggcgcatacctgggcagaggaaaaagagctggccgatacggaggattcttgctggcctcatacgatgaagactccgaagagctccaggccatttgtaaattaggcactggattcagtgatgaggagctggaggagcatcatcagagtctgaaagccctggtgcttccttcaccccgtccgtatgtccggatagatggagccgtaatacccgaccactggctcgaccccagtgcagtgtgggaagttaagtgtgctgatctatctctcagccctatctatcctgctgcacgaggtttagttgactcggataaagggatctccctcaggtttccaagattcatccgagttcgggaagataaacagcccgagcaagccacaacatcagcacaagtcgcttgcttataccgtaagcagtcccagattcaaaaccaacaaggcgaggactctggcagcgaccccgaggacacatattag

SEQ ID NO: 29267 - DNA, 1248 bp, synthetic construct
  misc_feature 1..1248: note = Description of Artificial Sequence: Synthetic coding sequence
  source 1..1248: mol_type = other DNA
atgcaacggtccataatgagcttctttcatccgaagaaggagggcaaggcaaaaaaaccagagaaggaggcaagcaatagttcgcgcgaaactgagccaccacctaaggcggcactgaaagaatggaatggagttgtcagcgaatccgactctcctgtgaagcggcctgggaggaaggccgcacgggtgttgggtagcgaaggggaggaggaggatgaagccctttctcctgctaagggccagaagcctgccctggactgttcgcaggtgagccctcccagaccggcaacatctcccgagaataatgcctccttatccgacacctcccccatggattcttctcctagcggcatccctaagcggcgtacggaagaggaaactcccaaggagtcactgaccgaggccgaggtcgctaccgagaaagaaggtgaggatggagaccagccaactactccccctaagccattgaaaacatcaaaggccgagaccccaaccgagtctgtatccgaaccagaagtagccaccaaacaggaacttcaagaagaggaggagcagactaaacctcctcgacgcgctcccaaaacgctcagctctttcttcacccctcgaaagcccgctgtaaaaaaggaggtcaaggaagaggagcccggtgccccaggaaaagaaggagctgcagagggtccactggacccgagcggctacaatcccgcaaagaacaactaccatcctgtggaggacgcctgctggaaacctgggcaaaaggtcccctacctggccgtcgctcgtacattcgaaaagatcgaggaggtcagcgccaggcttagaatggtggagacactttctaacctgctgagatcagtcgtggctctctctccccctgatctgctaccagtgctttatctgagcctaaatcacctcgggcctccacagcagggtttagaactgggggtgggcgatggagtgttgctgaaggccgtcgcccaggccacaggccgagaaagacgtgagaccaggtcacataactgccaccctcggcacccacaccctcggagtccactaaaagtcggctcttggtccccatctggcttgcggcagccacgcaaagccacatggggatggtggcctaggaccgccgctgctccgagggggtcctgctgccatcatctgaggtcattgcccccaggctcttcagcgagttccgcgacaagtccaggctcccttgccgtgctacctcagcctcgccgatag

SEQ ID NO: 29268 - DNA, 2499 bp, synthetic construct
  misc_feature 1..2499: note = Description of Artificial Sequence: Synthetic coding sequence
  source 1..2499: mol_type = other DNA
gtgtgttgccccggatccggtgcccgtgatcagcggaaagcccgtctaacagatgaagagaaatgctggactggcagggaaaattctgacgcaaacatgcaacgatcgatcatgtctttttttcatcccaagaaggaggggaaggccaagaaaccagagaaagaggcctctaactcctcacgcgaaacggagcccccaccgaaggcagcgctgaaggagtggaacggggtcgtgtccgagagcgatagtcccgtaaaacggcctgggaggaaggccgctagagtcttggggtcagagggtgaggaggaagatgaggccctgtctccagctaaaggacaaaaacctgcattagactgttcccaggtgtctcccccaagacctgccacctccccagaaaataacgccagcctaagtgacacaagccctatggattcgtccccatcaggaatccctaaacgccgaacagcaagaaagcagcttccaaaacgcaccattcaggaggtactggaggaacaaagcgaggatgaggaccgagaagctaagcgaaagaaggaagaagaggaagagactcctaaagagagcctgacagaggctgaagtcgcaactgagaaagagggcgaggatggagaccagccaactaccccgccaaagccactaaaaacaagtaaggcagaaacccctacagaatctgtcagcgaaccagaagtggctacaaaacaggaactccaggaagaggaagagcaaactaaacccccaagacgcgctcctaaaactctttctagctttttcacgccacgaaaacctgccgtcaaaaaggaagtgaaggaggaagagccaggagctccgggtaaggaaggtgccgcagagggacctctggatcctagcggctataacccagccaagaacaattaccacccagtggaagacgcctgttggaaaccagggcagaaagtgccatatcttgcggtggccagaacttttgaaaagatcgaggaggtgagtgcgaggctcaggatggtagaaacattgtcaaatttactgcgcagtgtcgtcgccctcagccctccggatctgctcccagtgctgtatctaagcctgaaccacttggggcctccccagcagggattggagctgggcgtgggagacggcgtgttactgaaggccgtagcacaggccaccgggaggcaactcgaatccgttcgagctgaggctgcggaaaagggcgacgtgggactagtggccgaaaattcccgtagtactcagcgcctcatgctaccacctcctcccctgaccgcgtcaggtgttttctctaaatttagggatattgctagactgaccggttccgctagcacagctaagaaaattgacatcattaagggcctttttgtggcatgcagacactccgaagcaaggttcattgctaggtcactctctgggagactccggcttggcctggccgagcagtccgtgctggctgccctgagtcaggcagttagtttgacgccacctgggcaagaatttcccccagccatggtcgacgccggtaaaggaaagacagctgaggcccgtaaaacttggctggaggagcagggaatgatcttgaaacagactttctgtgaggtacctgaccttgatcgaatcatccctgtgctgctggaacatgggctcgagcgcctgccagagcactgtaagctcagccccggtatccctctgaaaccgatgcttgctcacccaacgagaggtatctcggaggtgctgaagcggtttgaagaagcagcatttacctgtgagtacaaatatgacgggcagagagctcagattcacgctttggaaggcggtgaagtgaagattttctctaggaaccaggaggataataccggaaagtaccccgacatcattagcaggattcctaaaattaagctgcccagtgttacttccttcatactggacaccgaagcagtcgcctgggacagagaaaaaaaacagattcaaccattccaagtgttgacaactaggaagcgcaaggaggtcgatgcaagcgagatccaggtgcaagtttgtttatacgcttttgatctgatctacctgaacggggaatccctggtgagagagccactcagcaggcgtaggcagttgctgagggagaatttcgtcgaaacagaaggcgaatttgtctttgccacgtccttagatacaaaggatattgagcagattgccgagtttctagagcaatccgtgaaggattcctgcgagggtttaatggtcaaaacattagacgtggatgcgacttacgaaatcgccaagaggtcccacaactggctgaagttaaaaaaagattatctggacggcgtcggcgacactctggatctcgtcgtgatcggcgcttacctcggacgcggaaaacgcgctggccgatacggcggatttctgctcgctagctacgatgaggattcagaagagctgcaggcaatttgcaaggtactcggtaactgggggtag

SEQ ID NO: 29269 - DNA, 2850 bp, synthetic construct
  misc_feature 1..2850: note = Description of Artificial Sequence: Synthetic coding sequence
  source 1..2850: mol_type = other DNA
atgtcacttgcatttaagattttcttccctcagaccctgcgagcgctgtcccggaaggagctgtgtctgttccgtaaacatcactggcgggacgtaaggcagttctcacagtggtccgagacagacctgctccatgggcacccacttttcctgcgcaggaaacctgtcctatcattccaggggagccaccttcggagtcgagccacttatcttgtgttcctgccgggtcttcatgtgggattatgtagtggcccttgcgagatggcggagcagcggttctgcgtagattatgctaaacgaggcaccgccggttgcaagaaatgcaaagagaagatagtgaaaggggtctgtcgcatcggaaaagtggtcccaaacccttttagcgagtctgggggtgacatgaaggagtggtaccatataaagtgtatgtttgaaaagttagagagggctcgggctaccacaaagaagatcgaggatctgactgagctggagggctgggaggagctggaggacaacgaaaaagaacagataacacaacacatagctgacctgagcagcaaagctgccggaacccccaaaaagaaagccgtggttcaggccaagctgactacgacgggacaggtgacatcccctgtgaaaggcgctagcttcgtcacctccaccaatcctcgcaagttctcagggttctcggctaaaccaaacaacagtggtgaggctcctagcagcccgaccccaaagagaagcctcagttcctcaaaatgcgatcccaggcacaaggattgtttgctgcgggaatttcggaaactgtgcgccatggtagccgacaaccccagctacaacaccaaaacccagattatacaggattttcttcggaagggctcggccggtgatggcttccatggtgacgtgtacctgaccgtcaaactgctgctgcctggcgtgatcaaaactgtctacaatctcaacgacaaacagatcgtgaaattgttcagccgcatcttcaactgcaaccctgatgacatggccagagacctagaacagggcgacgtgagcgaaaccattcgcgtcttctttgagcaatcaaaatccttccccccagcagctaaatcgcttttaaccatacaagaagtagacgaattcctgctgagactgtctaagctgactaaggaggacgaacagcagcaggctttacaggacatcgcatcccggtgtaccgcaaatgacttaaagtgcataattcggcttattaagcacgacctgaagatgaattctggtgccaaacatgtactggacgccctcgatccgaatgcctacgaagctttcaaggcctcaagaaatctccaagatgtcgtagaaagagttttgcacaacgcacaggaagttgagaaggaacccggacaacgcagagcactgagcgtacaggcctccctcatgacgcccgtgcagccaatgttggctgaggcctgcaagagcgtcgagtacgctatgaaaaaatgccccaatggtatgtttagcgaaatcaaatacgatggagagcgcgtgcaggttcataagaacggtgatcatttttcatacttctctcgcagcttaaagcctgtcctaccccacaaggttgcccactttaaggactacatcccacaggctttccctggcggacattcaatgattttggacagcgaggtcctgttgatcgataataagaccggtaagccgctgccatttggcacgctgggcgtgcacaaaaaggcggcttttcaggacgccaatgtgtgcctgttcgtcttcgattgtatttattttaatgacgtaagccttatggatcggcctctgtgcgagcggcgtaagtttctgcatgacaatatggtggaaatacctaaccgtattatgttctcagaaatgaagcgtgtcactaaagccctggatcttgctgacatgattacgcgggttattcaggagggactggagggtctggtcctcaaggatgtgaaaggtacatatgagccgggtaagcgccactggttaaaagtgaagaaggattatttaaacgaaggcgcaatggctgacactgccgacctcgtcgttttaggggcattctacggccagggaagcaagggaggcatgatgagcatatttctgatgggctgctatgaccctggtagccaaaagtggtgtaccgttaccaaatgtgctgggggtcacgatgacgctactttggccaggctgcagaacgaattggacatggtcaagatctctaaagacccctctaaaattccctcctggcttaaagtgaacaaaatctactatccggacttcattgtgccagatcccaaaaaagctgcggtctgggagatcaccggggcagagttctccaagtctgaggcgcacaccgctgatggcattagcatccgctttcccagatgcacgcgtatcagagatgataaggactggaagtcagccactaacctaccacagctgaaagaactatatcagttgtccaaggaaaaggctgacttcaccgtcgtggccggagacgagggttccagcacaactggaggcagctctgaagagaacaaaggaccctcgggatccgccgtgagccggaaagccccttcaaagccatccgcttccacgaagaaggccgagggtaagctctctaactccaacagcaaggacggcaacatgcagacagcaaaaccatccgctatgaaggtgggggaaaaacttgccacaaagtcaagccctgtgaaggtgggagagaaacggaaagcagctgatgagactctctgccagactaagagacgaccagcctcagaacagcgaggcaggactgtgcccgcaggacggaggtag

SEQ ID NO: 29270 - DNA, 3030 bp, synthetic construct
  misc_feature 1..3030: note = Description of Artificial Sequence: Synthetic coding sequence
  source 1..3030: mol_type = other DNA
atgagtcttgcctttaaaattttcttccctcagacacttagggctttgtcccgaaaggagctctgcctttttagaaagcatcattggcgggatgtgcgacagttttctcagtggtctgaaaccgaccttctccatgggcatcccctcttccttcggagaaagcccgtcctatcctttcagggctcccacctgagaagtcgggctacctatctggtctttctcccaggcctgcatgtgggactgtgctccggcccatgtgaaatggcagagcagcggttttgtgtggactatgccaagcgcggaacagctggctgcaagaaatgtaaggagaaaatagtgaagggcgtgtgccgtatcggcaaagttgtgcctaaccctttttccgaaagtggcggagatatgaaagagtggtatcacatcaaatgcatgttcgaaaagctggagagagcccgagccaccacaaaaaagatagaggatctgaccgaattagaggggtgggaggaacttgaggacaatgagaaggagcaaatcacccaacatattgccgatcttagctccaaggccgcaggcactcccaagaagaaagcagttgttcaggctaagctaaccactaccggccaggtgactagccccgtgaagggggcatccttcgtcacctccactaaccccaggaaattttctggttttagcgctaaaccaaataactccggagaggccccatcaagccctacccccaagagatctctttccagctcgaaatgcgaccctcgccacaaagattgcctgctgagagaatttcgtaaactgtgtgctatggttgccgacaatccaagctacaacactaagacccaaatcatccaggacttccttagaaagggcagcgctggggatggcttccacggggacgtctacttgacagtcaagctgttattgccgggagtgataaaaactgtctacaacctgaacgataaacagattgtaaaactgttctctcgtatattcaactgtaatccagacgacatggctagggatttggagcagggcgatgtctccgagacaattcgggtgttcttcgagcagagcaagtcattccctcccgctgctaaatcactcttaacaatccaggaagtggatgagttcctcctgcggctgagtaagttgacgaaggaagacgaacagcaacaagccctgcaggatatcgcgtctcggtgcaccgcaaacgacctgaaatgtattattcgcctgatcaagcatgaccttaagatgaattctggggcaaagcatgtattggacgctcttgatccgaatgcgtatgaggcctttaaggcatcacgcaatcttcaagatgttgtggaaagggtacttcataacgctcaggaggtcgaaaaagagccgggacagcggagagccctgtcggtgcaggccagtcttatgactcctgtgcagccaatgctcgccgaagcctgtaagagcgtggagtacgccatgaagaagtgcccaaacgggatgttctcggagatcaaatacgatggagaaagagtgcaggtgcacaagaatggcgatcatttcagctattttagtaggtcgttgaaaccagtactccctcacaaagtggcacatttcaaggactacatcccgcaagcctttcccggaggccacagtatgatcctggacagtgaagtgctgctgatcgacaataagacaggtaaaccattgccgttcggaacattaggcgtgcacaaaaaggctgcctttcaggatgctaacgtctgcctgtttgtgtttgactgtatttatttcaatgatgtcagcctgatggaccgcccattatgcgaacgtagaaaattcttgcacgacaatatggtagagatccccaaccgcatcatgttctccgaaatgaagcgggttacaaaagccttggaccttgccgacatgattacccgtgtcatccaggaaggcttggaaggcctggtgctgaaggatgtgaaagggacatatgagcccggaaagagacactggctgaaggtcaagaaggactatctgaatgagggcgctatggctgatacagctgacctggtagtgctaggggctttctatgggcagggtagtaagggcggaatgatgtcgatcttcttaatgggctgctatgacccaggcagccagaagtggtgcactgtgactaaatgcgcgggaggacacgatgatgcaactctcgcacggttacagaatgagcttgatatggtcaagatatccaaagatcctagcaaaataccttcctggcttaaggtgaataagatttactaccccgacttcattgttccagatcccaaaaaagctgcagtgtgggagattacaggcgcagagtttagtaaaagcgaggcccacaccgccgacggcatttcaataagattcccgagatgcacaaggatccgagatgacaaagactggaaatccgccaccaacctccctcagctgaaagaactttatcagctgtccaaagagaaggccgatttcacggtcgtggctggggacgagggcagtagtacaacagggggatcctctgaagagaataagggtccctctgggtccgctgtttctaggaaagctccctccaagccttcagcctccaccaaaaaggccgagggcaaactgtctaatagcaatagcaaagatgggaatatgcagactgctaagccttccgctatgaaggtgggcgagaaacttgccaccaagtcatcccccgtgaaggtcggcgagaaacgaaaagccgcagatgagacgctttgccagacaaaagtcctgctcgacatattcaccggagtgcggctctacctgcctccgtctactccggacttcagtaggcttcgtcggtacttcgtggcattcgacggagatcttgtccaagaattcgacatgacttcagctactcacgtgctgggctctcgggacaagaatcctgccgctcaacaggtcagccccgagtggatatgggcatgtattagaaaacggagactcgttgccccatgctag

SEQ ID NO: 29271 - DNA, 2736 bp, synthetic construct
  misc_feature 1..2736: note = Description of Artificial Sequence: Synthetic coding sequence
  source 1..2736: mol_type = other DNA
atggcagcgagccagacgtcccaaactgtggcctcccacgtacccttcgctgatctgtgctccacgctcgaacggatacagaaatccaaaggccgtgccgagaaaatcaggcatttccgagagtttctagactcatggcgaaagttccatgatgccctgcataaaaaccacaaagacgtaactgattctttttatccagccatgagattgatcctgcctcagttggagagggaacgaatggcatacggcattaaagaaactatgctggcaaaactttatatcgagctactgaatctgcctagagacggcaaggatgcacttaaattactgaattaccgtacaccaaccgggactcacggcgatgccggagacttcgctatgattgcttactttgtgcttaaacctagatgtctgcagaagggctcgctaacgattcagcaggtcaacgacctcctggactctatcgcttccaataacagcgccaaacggaaggatttgattaagaagtcactgcttcagctcataacacaatctagcgccttagaacagaagtggctcataagaatgattatcaaagatctgaagctgggcgtgtcccagcaaacgattttctccgtgttccacaacgacgccgcagagctccataatgtcacgaccgatttagaaaaagtgtgcagacaactgcacgatccctccgttggcctctcggatatcagcatcactctgttctcagcctttaagccgatgctggctgccatcgccgacatcgaacatatcgagaaagatatgaaacatcagagcttttatatcgagactaagctggacggcgagcggatgcaaatgcacaaggacggtgacgtgtacaagtattttagtcggaacgggtataactacacagatcagttcggagcatcccccactgagggttccctgacacccttcatccataacgcttttaaggcggacatccaaatctgtatcttggacggcgagatgatggcgtacaaccctaacacacagaccttcatgcagaagggtactaaattcgatattaaacgcatggtcgaggatagcgaccttcagacctgctactgtgtgtttgacgtactgatggtgaacaacaagaagctagggcatgagaccttgcggaaacgctacgaaattctctcctctatctttactccgatccccggacgaatcgaaattgttcagaagacgcaagctcacactaagaatgaagtcattgacgccctgaacgaagctatagacaagcgggaggagggcatcatggttaagcagcctctgagtatttacaagcccgataaacgaggggagggttggctcaagattaaaccggaatacgtctcaggcctaatggacgaactcgacattttgattgtcgggggttactggggcaagggttccagaggagggatgatgagccactttctgtgcgccgtggcagaaaaacccccaccgggagaaaagccaagcgtcttccatactctgtctagggtaggttctggatgcaccatgaaggagctctacgacttaggtcttaagctcgccaagtattggaagccctttcacagaaaggcccctccctcctcaatcctgtgcggaaccgagaaacctgaagtctacatcgaaccctgtaacagtgttattgtgcagattaaagcagctgaaatcgtgccgagcgacatgtacaaaaccggttgtaccttgagattccctagaatagaaaaaatcagggatgataaagaatggcacgagtgtatgactctggacgacctcgaacagctccggggaaaggcatctggcaaactggcctccaagcacctgtacattggtggcgatgatgagccccaggagaagaaaaggaaagccgctcctaaaatgaagaaggtcattggcataatcgaacatttgaaggccccaaatctgacaaatgtcaacaaaatctcaaatatatttgaagacgtggaattctgcgtgatgagcggcacggactcccaacccaagccggacctggaaaatcgcatcgcggagtttggtggctatatcgttcaaaatcccggaccggatacatattgtgtgattgccggatccgaaaatataagagtcaagaatattatcttatcaaataagcacgacgttgttaagcccgcatggttattagaatgttttaaaacaaaatctttcgttccctggcagcctcggtttatgatccacatgtgtcctagtacaaaagagcattttgcccgtgagtacgactgttatggagatagttacttcatcgacacagacctgaaccagttgaaggaagtcttctctggaatcaaaaacagtaacgagcagactcctgaagagatggcaagcctgatcgccgacctcgaatatagatacagttgggattgtagcccgctctcaatgttcaggaggcacacagtgtacctggattcttatgccgtgatcaacgatctttctacgaagaatgaagggaccagactcgcgatcaaggccttggaactccgtttccacggagccaaggttgtcagttgtttggctgagggagtgagccacgtgattatcggcgaggaccatagccgcgtcgcagattttaaagcctttaggcgaacatttaagcgaaagtttaagatcctgaaagaatcctgggtcactgattcgatcgacaagtgtgagctgcaggaggagaaccaatatctgatttag

SEQ ID NO: 29272 - DNA, 2736 bp, synthetic construct
  misc_feature 1..2736: note = Description of Artificial Sequence: Synthetic coding sequence
  source 1..2736: mol_type = other DNA
atggccgcatcccaaacttcccagaccgttgccagtcatgtaccatttgctgacctgtgctcaacactggagcggatccagaaatcgaaaggcagggcggaaaaaatccgccattttcgtgaattcttggactcctggagaaagtttcatgacgcactccacaagaaccacaaagatgtgaccgactcattttatcccgctatgcgcctaatcctcccccaactggagcgagaaagaatggcgtacggtattaaagaaaccatgctagccaagctgtacatcgagctcctgaatctgccaagggatggcaaggacgctttaaagctgctgaattacaggaccccaaccggcacccatggtgatgctggggatttcgcaatgattgcatactttgtattgaagccaagatgtctgcagaagggtagtctcaccattcaacaagttaacgacttgctggactcaattgcttctaataattccgctaagagaaaagatctgattaaaaaatcccttcttcagctgatcactcaatcctctgcgctcgaacagaagtggctgatccggatgattatcaaggaccttaaactcggagtctcacagcagactattttttcagtttttcataacgatgcggctgaactgcacaatgtgaccacagacctggagaaagtctgcagacagctgcatgacccctcagtgggactgtcagacatcagcatcactctgttctcagctttcaagcctatgcttgcagctattgctgacatcgagcacatcgaaaaagacatgaagcatcaatctttctatatcgaaaccaaacttgacggtgagaggatgcagatgcataaggacggagacgtttataagtactttagccgcaatggctacaattatactgatcagtttggagcctcacctactgagggatctttgacccctttcattcacaatgccttcaaagctgatatacagatatgtatattagatggcgagatgatggcctacaatcccaatactcagacatttatgcagaagggaactaagttcgacatcaaaagaatggtggaagactccgacctgcagacgtgctattgcgtgtttgacgtgttgatggtcaacaacaagaagttaggacacgaaacccttagaaagagatacgagatattgagtagcatttttaccccaatccccggacggatcgagattgtgcagaagacgcaggctcataccaagaatgaggtcattgacgctctgaatgaggccattgacaagagagaggaaggaatcatggtgaagcaacccttaagtatctataagccagataagcggggagaggggtggcttaaaattaagccagaatatgtaagcggcctgatggatgagctcgatattctgatagtgggcggttattggggtaaaggttctcggggagggatgatgagccattttctgtgcgcagtcgccgaaaagccaccccctggagagaagccttcggtcttccatacactgagccgcgtcggatccgggtgtactatgaaggagctctacgatctgggccttaaacttgcaaagtactggaagccttttcatcgcaaagcaccgccttcttcaattttatgtggcaccgagaaaccagaagtttatattgaaccttgcaatagcgtgatcgtgcagattaaagccgctgagatcgtgccttcggacatgtataaaaccggatgtaccctgcgttttcctcgtattgaaaagattagagacgacaaggaatggcacgaatgcatgacactggacgatttagaacaactccggggaaaggcctccggtaagctagcgagtaagcacctctatattggcggagatgatgaaccccaggaaaaaaaacggaaggccgctcccaagatgaagaaggttatcggaattatcgagcacttgaaagctcccaatctcaccaacgtaaacaagatatctaacattttcgaagatgtcgagttctgcgtgatgtccggtactgacagtcaaccaaagcccgacctggagaatagaattgccgagttcggagggtatattgttcagaaccctggacctgatacctactgtgtgattgcgggaagtgagaacatccgtgtcaaaaatataatcctctccaataagcatgacgtggtgaaaccagcctggctgcttgagtgttttaaaacaaaatcttttgtgccctggcagccgaggtttatgattcatatgtgtcccagtacaaaagagcattttgctagagaatacgactgttatggggatagctactttatcgacaccgacctgaaccaactgaaagaagtgttcagtggaattaaaaactctaacgagcaaacccccgaggagatggcctctctcattgccgacctggagtataggtattcctgggactgctccccattatccatgttccgtagacataccgtgtacctggattcatatgccgttataaacgacttgagtactaaaaatgaaggcacccggctggctatcaaggctcttgagctcagatttcacggggcaaaagtggtaagctgtttagccgaaggtgtatctcatgtcattattggcgaggatcattcacgggttgccgacttcaaagcgtttagacgaacatttaaaagaaagttcaaaatcctgaaggagtcgtgggtcactgacagtattgacaagtgcgaactgcaagaggaaaaccagtacctaatttag

SEQ ID NO: 29273 - DNA, 2736 bp, synthetic construct
  misc_feature 1..2736: note = Description of Artificial Sequence: Synthetic coding sequence
  source 1..2736: mol_type = other DNA
atggcagcaagtcaaacttcacaaaccgttgcatctcacgtgcctttcgctgacctgtgtagcacccttgaacgcatccagaaatctaagggacgggctgagaaaatcagacactttcgcgagtttctggattcatggagaaagttccatgacgcccttcataagaatcataaggacgtgacggatagcttctatcccgcaatgaggctcattttgccacagctggagcgtgagcgcatggcttatggaataaaagagacgatgctggcaaagttgtatatcgagttgcttaacctaccaagagatgggaaggatgccctgaagctgctgaattacaggacgcccactggtacgcatggcgacgccggtgattttgcgatgattgcttacttcgtacttaaaccaagatgcctgcaaaaaggaagcctgactatccagcaagttaatgatctgttggactccattgctagcaataactccgccaaacgcaaagacctgatcaaaaaaagtctgcttcagctgattacacagagttcagcactggagcaaaagtggctaattagaatgataataaaagacctgaagctgggggtctcacagcagacaatctttagcgtcttccataacgacgccgcagagctccacaacgtcaccacggatctggagaaagtttgccgtcagctacatgacccttcagtcggtctatcagacattagtataaccctgttttctgcatttaagccgatgttggcggctatcgccgacatcgagcacatcgagaaggacatgaagcaccagagtttttatatcgagaccaaattagatggcgaaaggatgcagatgcataaggatggggatgtttacaagtatttttccagaaatggatacaactacacagatcagtttggcgcaagtcccaccgaaggctccctgactcctttcattcacaacgcttttaaagctgatatccagatatgtatactggatggagaaatgatggcgtacaatccgaacacccagaccttcatgcagaaaggaacgaaatttgatatcaaaagaatggtggaagatagtgacttacagacctgttactgtgtcttcgatgtgttaatggtcaataacaagaagttgggacatgagactttgcgcaagcggtatgagatcctgtcctcaatctttaccccaatccctggtaggatcgagattgtgcagaaaacccaagcccatactaagaacgaggtgattgacgcacttaatgaagcaatagacaagcgggaagagggcatcatggtgaagcagcccctctctatttataagccagacaagagaggggaaggctggctcaagatcaaacccgagtacgttagtggcctgatggatgagctcgatatacttatcgtggggggatactggggcaaggggtctcgcggaggcatgatgagccatttcctgtgcgctgtggcagagaaaccccctcccggagaaaagccctcagtgtttcacacgctttcgcgcgtaggtagcgggtgcacgatgaaggaactgtacgatctcggcctgaagttggccaagtactggaagccgttccaccggaaagctccaccatccagtatcctgtgcgggacagagaaaccggaagtgtacattgagccgtgtaatagtgtgatcgtgcagataaaggccgctgagattgttccaagcgacatgtataaaactgggtgtactctgaggtttcctcgcatcgagaaaatccgggatgacaaggagtggcacgaatgcatgacactcgatgacttggaacaactccgcggaaaggccagtggcaaactggcctccaagcacctgtatatagggggtgatgacgagccccaggaaaaaaaaaggaaagccgcacccaagatgaaaaaagtgatcggcattatcgaacacctgaaagcccctaatctgaccaacgtgaataaaatctcaaatatttttgaagatgtcgagttctgtgtgatgtccggcactgattcacagccgaaacctgatcttgaaaatcggattgccgagttcggaggctacatcgtgcagaatcccggaccagacacatactgcgtgatcgctggctctgagaacattcgagttaagaatataattctttccaataaacacgatgtagtgaaaccagcctggctcctcgaatgtttcaaaaccaaatcattcgttccttggcagccccgattcatgatccatatgtgtccgtctacaaaggagcattttgcaagggagtatgattgttacggcgactcttactttattgacacagacctgaatcagctgaaagaggttttttccgggataaaaaatagcaacgagcagacccctgaggaaatggcctccctgatcgccgatctggagtaccgctattcctgggactgcagccccttaagcatgttcagacggcacacagtatacctggactcttacgccgtgatcaacgacctctctaccaagaatgaaggaacgcgcctggcaatcaaagcacttgagctccgcttccatggagcaaaggtggtcagctgcctcgccgagggcgtgtcacatgttataatcggtgaagaccatagccgggtcgcggattttaaggctttccgacggaccttcaagagaaaatttaagatcctgaaggagagctgggtgacagactcaatagataagtgcgagctgcaagaggagaaccagtaccttatctag

SEQ ID NO: 29274 - DNA, 1944 bp, synthetic construct
  misc_feature 1..1944: note = Description of Artificial Sequence: Synthetic coding sequence
  source 1..1944: mol_type = other DNA
atgaggctgacgctgctctgttgcacttggagagaggaacgtatgggggaggaaggttcggagctgcctgtgtgtgcatcctgcggacagcggatctacgacgggcagtacctccaggcactcaatgctgattggcacgcggattgcttcaggtgctgtgattgttctgcttctctctctcaccagtactacgaaaaagatgggcagctgttttgtaagaaagactactgggcgaggtatggggagtcatgtcacggttgcagtgagcagattactaaaggcctggtgatggtggcgggtgagcttaagtaccaccctgaatgtttcatctgcctgacatgcgggaccttcattggggatggggacacttacactctggtggagcactcaaaactttattgcgggcactgttattaccaaacggtggtaactccagtaatcgagcagatcctgcccgacagtccgggaagtcacctgcctcacactgtgacactggtgtccattcccgcttcgagtcacggaaagaggggactgagtgtgagcatagatcccccacatgggccacctggatgcggaaccgagcactcccacacagttagggtacagggagtcgatcccggatgcatgagcccggatgttaagaactcaattcacgtgggtgacagaatccttgagatcaacggtacccccatccgaaacgttccactggacgagatcgatctgctgattcaggaaacttctcgtctcttacagctgactctagaacatgacccacatgacacccttgggcatggcctggggcctgagacatctccgctgagttctcccgcttacacgcccagcggtgaagccggatccagcgcgaggcagaaacctgtactgcgcagctgttccattgaccgctctcctggcgcaggctccctcggatcccctgctagccaacgaaaagacctgggcagatcagaaagtcttcgcgtggtatgcaggccacacaggatttttcgaccaagtgaccttatacatggggaggttctgggtaaggggtgttttggccaggcgattaaggtgacacatcgggaaaccggtgaggtgatggtcatgaaggagcttattcgcttcgatgaggaaacccagcggacgtttttgaaggaggtgaaagtgatgcggtgtctggaacacccaaacgtgctcaagttcattggcgtgctgtataaggacaagcgcttgaattttattacggagtacataaagggcggaactttgcgcggtataatcaaatctatggactcgcaatacccctggtctcaacgggttagcttcgctaaggatattgccagcggcatggcttacctacactctatgaacattattcacagggacctcaactcacacaactgtctggtgagggagaacaagaatgtggtagtggcagactttggcctagcgcgactgatggtggatgagaagacgcagcctgaagggctaaggtcattgaagaagcctgatcgcaagaaaagatacacggtggttggaaacccctattggatggcccctgagatgatcaacggcaggtcttacgacgaaaaagtcgatgtgttctctttcgggattgttctgtgcgaaataattggcagagttaatgccgacccagattatctgccgagaacaatggactttgggctgaacgtgcgcggtttcttggaccgatactgcccacctaactgtcctccgtccttcttccccataaccgtcaggtgctgtgacctggaccccgagaagaggccctcttttgtgaaactggaacactggctggagactttgcgcatgcacctcgccggtcacctcccgctggggcctcagttggagcaactcgacagggggttttgggagacctacagacgcggagaaagcgggcttcccgcacatcctgaagtgcctgactag

SEQ ID NO: 29275 - DNA, 1944 bp, synthetic construct
  misc_feature 1..1944: note = Description of Artificial Sequence: Synthetic coding sequence
  source 1..1944: mol_type = other DNA
atgcgcctaaccctcctgtgctgcacatggagggaggaaaggatgggagaagagggtagtgaactgcccgtgtgcgccagttgcgggcagcgcatttatgatgggcagtatctgcaggccctgaatgcagactggcacgccgactgttttaggtgttgtgattgctctgctagcctctcccaccagtactatgagaaagatgggcagctcttctgtaaaaaggactactgggccagatacggcgagtcgtgccacggatgttctgagcaaattacaaagggcctggtaatggttgctggcgaactcaaatatcaccctgagtgttttatctgtctgacatgcgggacttttatcggcgacggggacacctataccctggtggagcattctaagctgtattgtggccattgttactaccagacggtggtgaccccggtgattgagcaaatactccctgactctcccggatctcatttgccacataccgtcacactggtttccattccagctagtagtcacggtaagcgaggcctgtccgtgtcaatcgatccaccacacggacctccagggtgcggcaccgagcattctcacaccgtccgagtgcagggggtggaccctggatgtatgtctcccgatgtgaaaaatagcatccatgtcggggaccggattctagaaatcaacggtactcctattaggaacgtccctctcgatgaaatcgatctgctcatacaggaaactagccgccttctgcagctcacattagagcatgatcctcacgacaccctcggacacggactgggcccagagacctctcctctatccagtcccgcatacacaccctcaggtgaggcaggtagcagcgcccgacagaagccggtgcttaggtcttgttcgatcgaccggtctcccggagcgggttcactgggttctcctgcttcccagaggaaggatctcggtcgcagcgaaagtttacgggtggtctgtcggccacaccgtatatttcggcctagcgacctgatccacggcgaagtacttggcaagggttgttttggccaggctattaaagttacacatcgggaaaccggtgaagttatggtcatgaaagagttaatcaggtttgacgaagagacacagcgaacgtttcttaaggaagtcaaggtgatgaggtgcctcgagcatccaaatgtgctcaagttcatcggcgtgctgtacaaagataagagactgaatttcataaccgagtatataaaaggcggtacattgagagggattattaagtcaatggattcccagtacccatggtctcagcgagtcagcttcgctaaggacatcgcctctggaatggcttatctgcattcgatgaacattattcacagggatctcaatagccataactgcctggtaagggagaacaagaacgtggtcgtagccgactttggtctggcgcgactgatggtagacgaaaagacacagcctgaaggactgaggtctctgaagaagccggacagaaagaaaagatatacagtggttggcaatccctactggatggcaccagaaatgatcaatggcaggtcctatgacgaaaaagtggacgtgttctccttcgggattgttctctgtgagatcattggacgcgtgaatgctgatccagattatctgccgaggacaatggacttcggccttaacgtgcgcggattccttgatagatattgtccacccaactgcccaccctccttctttcctattacagtaaggtgttgcgatctggatcctgagaaacgacctagcttcgtcaagctggagcactggctcgaaactcttaggatgcacttggccggtcaccttccgttgggccctcaacttgaacagttggatcggggtttttgggagacttatcggagaggggagtcgggactgccagcccaccccgaggtgccagactag

SEQ ID NO: 29276 - DNA, 1842 bp, synthetic construct
  misc_feature 1..1842: note = Description of Artificial Sequence: Synthetic coding sequence
  source 1..1842: mol_type = other DNA
atgctgctggcttcggcccctaggagacgccgtttcttgcagagagccaagtgttgtgattgttcggcttccttgtctcaccagtactatgaaaaagacggccagctcttctgtaagaaagactactgggcgcgatatggggagtcctgccatggctgctccgagcaaataacgaaaggtttagtgatggtggccggagaattaaagtatcaccccgaatgtttcatatgcctcacttgtggcacatttatcggtgatggggacacttataccctagtggagcacagtaagctttattgtggccactgctactaccagacagtcgtcactcccgtaatcgagcagatcctgccagactcgccaggttcccaccttccccataccgtgactctagtgtccatcccggcttcatcacacggtaaaaggggacttagtgtgtccatcgatcctccacacggccctcctgggtgtgggaccgagcactcccatacggtgcgggtgcagggtgtagaccccggatgtatgtcacccgatgtgaaaaattccatacacgtgggagaccgcatactggagatcaatgggaccccaatcagaaacgtgcctctggacgaaatcgatcttctgatacaagaaacctctagattactgcaactgacactggagcacgaccctcatgatactttggggcatggccttggcccagaaacaagcccattgtcctctccagcttacacgccatctggcgaagcaggttcctccgccagacaaaagcccgtgctgcgctcctgttcaatcgaccgcagtccgggtgctggatctctcgggtccccagcgagccagcgtaaggaccttggaagatccgagtcactgagggtcgtttgcagacctcaccgaatcttccgccctagtgatttaatccatggagaggtgctgggcaagggctgtttcggacaggctatcaaagttactcaccgagagacgggagaggtgatggtgatgaaagagctgatacgcttcgacgaagaaacacagcgcactttcctgaaggaggtgaaggtgatgaggtgtctcgagcaccctaatgtcctgaagttcatcggtgtgctgtataaggacaaacgcctgaacttcataaccgaatatataaaagggggtaccctccgcggaatcataaagagtatggatagtcagtatccttggagccaacgggtctctttcgcgaaggacattgcatccggaatggcttatctgcatagcatgaacataattcaccgcgacctgaatagtcacaattgcttggtacgcgaaaacaaaaatgttgtagtggcagatttcggtctcgcgagactgatggtcgatgagaagactcagcctgagggtctgcggagcctgaagaagcctgacagaaaaaagcggtacacagtggtgggcaatccctattggatggccccagagatgatcaacggccgtagctacgatgagaaagtggacgtcttctcttttggaattgtgctgtgcgagatcattggtcgcgttaacgctgaccctgattacctgcccagaactatggacttcggactgaacgtacggggatttctggatcggtattgccccccaaattgccccccttccttcttcccaattaccgtccgctgttgcgacctggaccccgagaaaagaccatcttttgtcaagctcgagcactggctggagaccctcaggatgcacctggctggccatctgccattgggccctcagttggagcaacttgaccgaggcttttgggagacttatcgtcgtggagaaagcggcctccctgcccatcccgaggtgcctgattag

SEQ ID NO: 29277 - DNA, 471 bp, synthetic construct
  misc_feature 1..471: note = Description of Artificial Sequence: Synthetic coding sequence
  source 1..471: mol_type = other DNA
atgatggtcttggataaagaggacggggttccaatgttgtctgtgcaacccaaaggtaaacaaaaagggtgtgcgggttgtaacagaaaaatcaaagataggtatctactgaaagccttggacaaatattggcacgaagactgccttaagtgtgcgtgctgtgattgccgcctaggcgaggtcggaagtacactgtatactaaagcaaatctgatcctctgccgccgtgattacctccggctcttcggtaccacaggtaattgtgcagcatgtagcaaactcatacccgcatttgagatggttatgcgtgccagggacaacgtgtatcacctggattgcttcgcttgccagctgtgtaatcagaggttctgcgtcggcgacaagttttttcttaaaaacaacatgattctctgtcagatggattacgaagagggacagctaaacggcacctttgagtcccaggtccaatag

SEQ ID NO: 29278 - DNA, 468 bp, synthetic construct
  misc_feature 1..468: note = Description of Artificial Sequence: Synthetic coding sequence
  source 1..468: mol_type = other DNA
atggtcctcgaccaggaagatggcgttcctatgctgagcgtccagcctaagggcaaacaaaaggggtgcgcgggatgcaacaggaagattaaggatcggtaccttctgaaggctctcgataaatattggcacgaagattgtctgaagtgcgcctgttgtgattgtaggctcggagaagttggctccacactatataccaaggctaatctcatactgtgtagacgggactaccttaggctgtttgggactacagggaactgtgctgcttgcagtaagcttataccagcattcgagatggtgatgcgagccagggacaacgtctatcatctggactgtttcgcctgccagttgtgtaatcaacgattctgtgtcggcgacaaattttttttgaagaacaatatgatactgtgccagatggactatgaagaaggccagctgaatggcactttcgagtcccaggtgcagtag

SEQ ID NO: 29279 - DNA, 684 bp, synthetic construct
  misc_feature 1..684: note = Description of Artificial Sequence: Synthetic coding sequence
  source 1..684: mol_type = other DNA
atggagggcagtgcagttacagtattagaacggggtggggcatcctcccccgctgaacgaagatccaagcgtcgtcgtagatccggaggcgatggcggaggaggcggaggtgctagagccccagagggtgttcgagcaccggctgcagggcaaccaagggccactaagggtgcacctccgcctccaggaacgcctcccccttcaccaatgtcaagtgccattgaaagaaagagcttggaccctagcgaggagccagtggatgaggtgctgcaaattccaccaagccttttaacctgtggcggatgtcagcagaacattggcgataggtactttttaaaagccattgatcagtattggcatgaggattgtctatcttgtgacttgtgcggatgtagactgggtgaggtcggaagacgactgtactacaaactcggacgtaagctgtgtcgcagagactatctacgcctatttgggcaggacggcctctgtgctagctgcgataagcggattcgagcctatgagatgactatgcgcgtcaaggataaagtgtaccacctcgagtgcttcaagtgtgctgcgtgccagaaacacttctgtgttggagaccgatacctgcttattaactccgatattgtgtgtgagcaggatatctacgaatggactaaaatcaatggcatgatctag

SEQ ID NO: 29280 - DNA, 477 bp, synthetic construct
  misc_feature 1..477: note = Description of Artificial Sequence: Synthetic coding sequence
  source 1..477: mol_type = other DNA
atgtcaagcgcaatcgagcggaagtctctcgacccttctgaggaaccggtggacgaagtcctgcagatcccaccaagcttgctgacatgcggcggatgtcagcaaaatatcggagacagatattttcttaaggccatagatcagtactggcatgaggactgcctgtcttgtgacttatgcggatgccgactgggggaggtcggccgacggttgtattacaagttgggtcgcaagttatgccgaagggattatctaagattgtttgggcaagatgggctgtgcgctagttgtgacaagcggattagagcatatgagatgaccatgcgcgtgaaggataaagtgtaccatctcgaatgttttaagtgtgccgcttgccagaaacatttttgtgttggcgaccggtatttgctgatcaattctgacattgtgtgtgaacaggatatttacgagtggaccaagatcaatggtatgatctag

SEQ ID NO: 29281 - DNA, 1677 bp, synthetic construct
  misc_feature 1..1677: note = Description of Artificial Sequence: Synthetic coding sequence
  source 1..1677: mol_type = other DNA
atgcacaggggcggtcagccactaaaaaaaagaagggggagcttcaaaatggccgagctggaccaactgcccgacgagtcatcaagcgccaaggcactagtgtctttgaaggagggctccttatctaacacttggaatgagaaatactcttcccttcagaagactcctgtgtggaaaggtagaaatacgtcaagcgctgtcgaaatgcccttcaggaactcaaagcggtccaggttgtttagcgatgaggatgacagacagatcaacacaaggagcccaaaacggaaccagcgtgtagccatggtccctcagaaatttaccgccacaatgtccacccccgacaagaaggcatctcagaagatcggatttagattgcgcaacctgcttaagctaccaaaggcacataaatggtgcatatatgagtggttctattccaacattgacaaaccactgtttgagggcgacaacgatttttgcgtgtgcctaaaagagtccttccctaacctgaagacacggaaacttaccagagtagaatggggaaagatccggcgtttaatgggaaagcctcgccgatgtagtagcgctttcttcgaggaggagaggtcggcgctgaagcaaaaacgccagaagatcaggctattgcagcagcgcaaggtggccgacgtctctcagtttaaggaccttccagacgagatcccattgcctctggtgattggtacaaaagttacagcgagattgcgcggtgtacacgatgggttgtttactggacagatagacgcagtcgacaccctaaacgcgacctaccgcgtaacgttcgacagaaccgggctaggtacacacaccatccctgactacgaagtgctgagcaatgagccccacgagacaatgccgatcgcggcttttggtcagaaacagaggccctctcggttcttcatgacccctcctcgcctacactatacaccaccactccagtcccctattatcgacaacgatccgcttttgggccagtctccttggcgctccaagatctcaggtagcgatacagaaaccctcggcggatttcctgttgaatttctcatccaagtgaccagactgtccaagatccttatgattaagaaggaacatatcaagaagctgcgggaaatgaacaccgaggctgagaaactaaaatcatacagtatgccgatctcaattgagttccagcgccgttatgcaaccatcgtgcttgaactggagcagctgaacaaagacctcaataaggtgctgcacaaggttcagcagtattgctatgagttggctccggaccagggattacagcctgcagaccaaccgaccgatatgcgtcgtcggtgtgaggaggaagcacaggagatcgtgcgacatgccaactcaagcacaggtcaaccatgcgtcgaaaacgaaaatttaactgatctgatctcaagactaactgccattctcctccaaatcaagtgtctagccgaaggtggagacctcaactctttcgaatttaaatctttaaccgacagcctaaatgatattaagtccacaatcgacgcatctaacatttcctgcttccagaataatgtggagatccacgtcgcccatatccagagcggcttgtcccagatgggaaatctacatgccttcgctgctaataacaccaatagagactag

SEQ ID NO: 29282 - DNA, 1524 bp, synthetic construct
  misc_feature 1..1524: note = Description of Artificial Sequence: Synthetic coding sequence
  source 1..1524: mol_type = other DNA
atggctgaactcgatcaacttcccgacgagtccagctcagccaaggcgttggtgtctcttaaggagggaagcctgtctaacacctggaacgagaagtatagctcactgcagaaaacgccggtgtggaaagggaggaatactagttccgccgtggagatgaaattcaccgccaccatgtccactcccgataagaaggcttcacagaaaattggatttaggttgaggaatctcctgaagcttcccaaggctcacaagtggtgcatttatgagtggttttactctaatatcgacaagcctctcttcgagggagataacgacttctgtgtgtgtctgaaggagtcattccctaacctgaaaaccaggaagttaactcgcgtggagtggggcaaaatcagaaggctgatggggaagccacggcgatgtagcagcgctttcttcgaggaggagcgcagcgcactgaaacagaagaggcagaagatccggctgttacaacagcgtaaagtagcggacgttagccagtttaaagacttgccggacgagattcccctgcctctggtcatcggcaccaaagtaaccgctcgtcttagaggggtgcacgatgggctgtttaccggacagattgatgcggtggatacgctcaatgcaacttacagggtgaccttcgaccggacaggtctcggaactcatacaattccagactacgaggtgttatcaaacgagccacacgagacaatgcccattgctgccttcgggcagaaacagagacccagcaggtttttcatgacaccacccagattacactacactccacccttacagagccctattattgataatgatcctttgttggggcagtcgccttggagatccaagatttccggtagcgatacagagaccctgggaggattccccgtggagtttctgattcaggtgactcgcctcagcaaaattctaatgattaaaaaagagcacatcaagaaactcagggagatgaacactgaagccgaaaagctgaagagctactctatgccgatttcaattgaattccagcgcagatacgctactattgtgctcgagctcgaacaactcaataaagacttgaacaaggtcttacataaagttcaacagtactgttacgagttggcgcctgatcagggactccagcccgcagaccagcccacagatatgaggcggcgatgcgaggaggaggcgcaggagatcgtgagacatgccaatagcagcactggacaaccgtgtgtagaaaatgaaaacctaacagatctgatcagtaggttgaccgcaatcctgctgcagatcaaatgtctcgccgagggcggtgatctcaacagtttcgaattcaagagcctcacagacagtcttaatgatattaaaagtaccatcgatgcgtccaacatttcttgcttccagaataatgttgaaatccatgtagcacacattcagagcggcctgagccaaatgggaaatcttcacgcttttgcagctaacaacactaacagggattag

SEQ ID NO: 29283 - DNA, 1572 bp, synthetic construct
  misc_feature 1..1572: note = Description of Artificial Sequence: Synthetic coding sequence
  source 1..1572: mol_type = other DNA
atgcggcctaggaccgagggattcttccctcccgcaggggctagcctacccttttccactcgcaataagcagcccgcagtgccagccgctgccgctcgtgccgctgagcacgcccctggcgctggtcctgggagggacagtggcgcagggactgctccccctgcgctcaggagacgggcatcgccctgcggcttgcttcccccattcctgcctcccggtagcgctggcggaggcggagggggagcaaggcgtggaccacccagcgcagctcctcccccaagagcgggtgcagggggtgcaggcccagcctccgcgtccaggggcggatcatccgccgctcgtcgaagagggcaacgtgctccccactcaaatctgcccaggaaggactctctccggcctacaatgcaccgtgggggacagcccctgaaaaaacggagggggtcttttaaaatggctgagttagaccaacttccggatgaatcatcgtcggccaaagcgttggtgtcactgaaagaaggtagcttgagcaacacttggaacgaaaaatacagcagccttcagaaaactcctgtgtggaaaggacggaataccagttccgccgtggagatgccttttcggaatagtaagaggtccaggttgttctccgacgaggacgatcgacagattaatacacggtcacccaaaaggaatcaaagagttgctatggtaccgcagaagttcacagccaccatgtcaaccccggacaagaaagcctcccagaaaatcggttttaggcttcggaaccttttgaaactgccaaaagcccacaagtggtgtatttatgagtggttctactccaacattgataaacctctgtttgaaggtgacaatgacttctgtgtttgcctaaaggagtcattccctaatctcaagacgcggaaattgaccagggttgagtggggaaagatacgaaggctgatgggtaaacctcggcgatgttcttcagccttctttgaggaagagcgctccgcgctgaaacagaaacgacaaaaaatccgcctcctgcagcagcggaaggtcgcagacgtgagccagttcaaagacctgcctgacgaaattccgctgccattggttatcggaacaaaagtcaccgcccgactgcgaggagtgcatgacggcctgtttactggtcaaattgacgcagtagacactctaaacgctacgtaccgagtgacctttgaccggactggcttgggcacacatacgattcctgattatgaggttttgtccaatgaaccgcatgagacgatgccaatagccgctttcggacagaagcaaagaccgtcaagatttttcatgaccccaccgcgactccattatacccctccccttcagagccctataatagacaatgatccactgctgggacaaagtccatggcgaagtaagatcagtggtagcgacacagaaacactcggagggtttcctgtggaattcctgattcaggtgaccagactttctaaaatcctgatgataaaagggacctaccaggaaatcaaggggaatgagcaccgttctaggaaaattggctag

SEQ ID NO: 29284 - DNA, 1842 bp, synthetic construct
  misc_feature 1..1842: note = Description of Artificial Sequence: Synthetic coding sequence
  source 1..1842: mol_type = other DNA
gaaaccgccgaacagaatagctccctcgcagtgggcctcaacgatcagttacatgacctgagcagaagcaggagtcccgctgcccgttcctctgccagcaatatccgagagcggagggctcgcatcgctagaggacggtgggaccgtgtgcctgatgtcgcaacaagaagaggcctgctgcggccagcggtgagtgggaaggtccgcggacgccgtagaccctccaatgtcggcttcggtaattgttcctccgctaaagccttagtttcattgaaggaaggctctctcagcaacacttggaacgagaagtattcttccctgcagaaaactccagtgtggaaaggaaggaacacatcttcagcagtggagatgccgtttcggaattctaaacggagcaggctttttagtgacgaggatgacagacagatcaacacaaggtctcccaaacgcaaccagcgtgtggcgatggtgccgcaaaagttcaccgcgactatgtccacgccggacaaaaaagcctcgcaaaagattggctttcgcctgcgtaatcttctcaaactcccaaaagcgcacaagtggtgcatttacgaatggttttattctaatatagacaagcccctcttcgagggtgataacgatttttgcgtgtgcttaaaggagtcatttcccaacctcaagacacgtaaactgacacgcgtcgaatggggtaaaatccgtcgcttgatgggcaagccccgtcggtgcagcagcgcttttttcgaagaagagcgctcagcccttaagcaaaagaggcagaagatccgccttctgcagcagcgcaaggtagccgacgtttcccagttcaaggatttgccagacgagataccgctaccactcgtgatcggcaccaaggtaacagcgcgtttacgcggtgtgcacgatgggctgtttacagggcagatcgatgccgtggataccttaaacgccacatacagagttacatttgataggaccgggctgggaacacacactatccctgattatgaagtgttgagtaatgagccacatgagactatgcctatcgctgccttcggtcaaaaacaaaggccttcccggttttttatgacccctccgagactgcactatactcccccattgcaatcacccattatcgataatgacccactgttgggccagtcgccttggaggtctaagattagtgggagcgataccgagacgctcgggggattcccggtagaatttttgattcaagttaccaggttgtccaagattctgatgattaaaaaagaacacattaagaagcttagagaaatgaataccgaggccgagaaactgaaatcctattctatgcctatttctatagagttccaaagacgatacgccaccatcgtcttggaactggaacagcttaataaggacttgaataaagtcctgcataaggtgcagcagtactgttacgaactggccccagatcaaggactacagcccgctgaccagcccactgatatgcgcaggagatgtgaggaggaggcccaggagattgtgcggcacgcaaattctagcacaggacagccctgcgttgagaacgaaaacctgacggacttgatctctcggctcaccgcaattctgctgcagattaaatgcctggcagaggggggtgatctgaactcttttgaattcaaaagcctcacagattcactcaacgatattaaatccactatcgacgccagtaatataagctgctttcaaaataacgtcgagatccacgtcgcacacattcagagcggtcttagccaaatgggcaacctgcacgctttcgccgcaaataacacaaaccgagattag

SEQ ID NO: 29285 - DNA, 13800 bp, synthetic construct
  misc_feature 1..13800: note = Description of Artificial Sequence: Synthetic coding sequence
  source 1..13800: mol_type = other DNA
atgtcggagtttctgctggcgctcctgactctgtcgggcctgttacctattgcaagggtgctgacggtgggcgctgaccgcgatcagcagctttgcgaccccggagagttcctgtgtcatgatcacgtcacctgtgttagccagagctggttgtgcgacggagaccccgattgtcctgacgactctgacgagtccctggacacatgtccagaggaggtggagattaagtgcccgctgaaccatattgcatgccttggaaccaataagtgcgttcacctgagccagctctgcaacggggtcttggattgcccagacgggtacgacgaaggggttcattgccaagagttgttatctaactgccaacagttgaactgccagtataagtgcaccatggtgcgcaattcaacacgctgttattgcgaagacggattcgagataactgaagatggcaggagttgtaaggaccaggacgagtgtgcagtgtacggcacctgtagccagacttgccgaaatactcacggttcgtatacatgttcctgcgtagaaggatacctaatgcagcccgacaatcggtcatgcaaggccaaaattgaaccgactgaccgacccccaatcctgctgatcgcaaattttgagaccatcgaagtattctatttgaatgggagtaaaatggccacgctcagctcagtgaacgggaatgagattcatactttggacttcatctacaatgaggatatgatctgttggatagaatcccgagagtcctccaaccagctgaagtgcatccagattaccaaagccggtgggctgacagacgagtggaccatcaacatcctgcagtccttccacaacgtgcaacaaatggccattgactggttgacccggaatctctactttgtggaccatgtgggggacagaatatttgtatgtaattccaacggctcagtatgcgtgaccctcatagatctggaactgcacaatccaaaggcaattgccgtggacccaattgctggcaagctgttcttcaccgattatggcaatgtagctaaggtcgagcgctgcgacatggatgggatgaatcggactcgaatcattgacagcaaaacggaacagccagccgctctcgctctcgacctagtgaataaacttgtttattgggtggatctgtacctcgattatgtgggcgtggtggattatcaggggaagaatcgccatactgtgatccagggccgacaggtgaggcacctctacggcatcactgtctttgaagattatctgtatgctactaattctgacaactacaacatagttaggatcaatagattcaacggaacggacatacatagcttgatcaaaattgaaaatgcctggggcattcgaatttaccagaaacgaacccagccaaccgttagatctcacgcctgtgaggtcgatccctatggaatgcctgggggttgctctcatatctgccttctgtcgtcttcttacaaaacccggacatgtcggtgccggactggattcaacctgggcagcgatggcagatcatgtaagcggccaaaaaatgaacttttcctcttttacgggaaaggacgcccaggcattgtcaggggaatggacctgaatactaagatcgcagacgagtatatgatacctattgaaaatctggttaaccctcgggctttggacttccacgccgagactaattatatctatttcgccgatactactagctttctgatcggtaggcagaagatcgacgggactgaaagagagacgattttaaaagacgacttagataatgtagagggaatcgctgttgactggatcgggaataatctgtattggactaacgacggacaccggaagaccatcaatgtggccagattagaaaaagccagccaatctaggaaaacgctgctggagggagagatgagccaccccagaggcatcgtggtggaccctgttaatggttggatgtattggacagattgggaggaggacgagattgacgattccgttggcagaatagagaaagcttggatggacggctttaatcggcaaatctttgtcacttctaagatgctgtggccaaacgggctgaccttagactttcacacaaacacactatattggtgcgacgcctactacgaccacatcgagaaagtgttcctcaatggaacgcatcggaaaattgtttacagcggacgtgagctcaatcacccttttggacttagccatcatggaaattacgtcttttggaccgattatatgaatggatctatatttcagttggacctgattacttccgaggtgaccttacttagacatgaacggccaccattatttggcctgcaaatttatgacccaaggaaacagcagggagataatatgtgccgcgtgaacaacgggggttgcagtaccctttgcctcgccattcctggaggcagggtctgcgcttgtgcagacaatcaattgttagacgagaatggaacgacctgcacgttcaaccctggtgaggccctgccccatatctgcaaggccggtgagtttaggtgcaagaatcgccattgtatccaggccagatggaaatgcgatggggacgatgactgtttagacggcagtgacgaagactcagttaattgctttaatcacagctgtcccgacgatcagttcaagtgtcaaaacaacaggtgtatcccgaagcggtggctctgtgatggggcaaatgactgcggttccaatgaggacgagagcaaccaaacctgtaccgcacgcacctgccaggtcgatcagttctcctgcggaaatggccgatgtatcccccgagcatggctgtgcgacagagaggatgactgtggggatcagacagacgaaatggccagctgtgagttcccaacctgtgaacctctgactcaattcgtgtgcaagtccgggagatgtatctcttcaaagtggcactgtgacagcgacgacgattgcggggacggatccgatgaagtcggttgtgtgcacagttgcttcgataaccagtttagatgctcgtccggcagatgtatccccggacactgggcctgcgacggagacaacgattgcggcgacttcagtgatgaagcccaaattaattgtactaaagaggaaatccactctcccgctggctgtaacggtaatgagttccagtgtcaccccgacggcaattgcgtcccagatctctggcgatgcgacggagagaaagactgcgaggatggtagtgacgagaaagggtgtaatggcactatccgcctctgcgaccataagacaaaattctcttgttggagcactggcaggtgtatcaacaaagcttgggtctgtgatggcgacatcgattgtgaggatcaaagcgacgaagacgactgcgattcctttctctgtggacccccaaaacacccatgcgccaacgataccagcgtatgtcttcagcctgaaaaactctgtaatgggaagaaggattgccccgacggatctgacgaagggtacctgtgcgatgaatgttccctgaacaacggcggatgctctaatcactgtagtgtcgttcctggccgaggtatcgtttgtagctgtcccgagggtctgcagctgaacaaagacaataagacttgtgagatcgtggactattgttcgaaccacctaaagtgcagccaagtgtgcgagcagcacaaacacaccgtgaagtgctcttgttacgaagggtggaaattggatgtcgacggtgagagttgcacatcagtggaccctttcgaggccttcattatcttctctattaggcacgaaattcgcagaatcgacttacacaagcgcgattatagtctcctagtaccagggctgaggaacactatcgctcttgactttcattttaatcaatccttactttactggaccgatgtggtagaggacaggatttataggggaaaactgtctgagagtggtggcgtcagcgccattgaagtggtggtggaacacggcctagcaacgcctgaggggttgactgtggattggattgctgggaacatctactggattgacagtaatctggaccagatcgaggtggccaagctggacggctccctccggaccaccttaatcgcgggagcaatggagcaccctagggctatagcattggacccacgctatggcattcttttctggaccgactgggacgccaatttcccacgaattgagagtgctagcatgagtggggctgggagaaagacaatatacaaggacatgaaaacaggggcttggcccaatgggctgaccgtcgatcactttgaaaagcgcatcgtttggactgacgcccgatccgacgctatttacagcgccttatacgacggcactaatatgatcgaaattatccggggacacgagtacctgagccacccctttgctgtgtcactgtacggctcagaggtttactggaccgattggcgcacaaacacattaagcaaagctaacaagtggacgggacaaaatgtgagtgtaattcagaaaacctctgcccagccattcgatctacagatctaccacccctctcgccagccacaggctcctaacccgtgtgctgctaatgacggtaaggggccttgtagccatatgtgcttaatcaatcataacagatcagcggcttgcgcatgcccccacctgatgaagttgtccagtgataaaaagacctgttacgagatgaagaaattcttgctgtacgcaaggcggtctgagataaggggtgtggacattgacaacccatacttcaattttatcactgccttcactgtgcccgacattgacgacgttacggtgatagacttcgatgcatctgaggaacggctgtattggactgacatcaagacccagacaattaagagagccttcattaacggtacaggtctagagaccgtaattagccgcgacatccagtcaataaggggactggcagtggattgggtgtcgcgcaatctgtattggatcagtagtgagtttgatgagacccaaattaacgtcgccaggcttgatggctcattaaagactagtatcattcacggaattgacaaacctcagtgcctcgcagctcatccagtgagggggaagctgtactggacagatggaaacactattaacatggcgaatatggatgggagcaactctaaaatcctattccaaaaccagaaagaaccagtcggcctgtctattgactatgtcgaaaacaaactctattggatctctagtgggaatggaaccattaaccggtgtaatttggatggagggaatctggaggtcatcgaatcgatgaaagaagaactcacgaaagctacagcactgacaatcatggacaagaagctttggtgggctgaccagaatctagcgcaattgggaacatgcagcaagcgtgatggacgcaacccaacaattctgcggaataagacatctggagttgtgcatatgaaagtgtacgataaggaggctcagcaggggtccaattcctgtcaacttaacaatggaggatgttcccagctttgccttcccacttcagaaaccacccggacttgcatgtgtaccgtgggatactacctgcagaaaaataggatgtcctgccagggaattgagtccttcctgatgtattccgtacatgagggcatccggggtatacccctcgagccaagcgacaagatggacgccctcatgcccattagcggtacaagctttgcagtgggtatcgacttccacgctgaaaacgatactatctattggaccgacatgggcttcaacaaaattagtagagcaaagcgggatcagacctggaaagaagacatcatcactaacggcctcggacgggtcgaaggcatagccgtggattggatagctgggaatatctactggactgaccacgggttcaatcttatcgaggttgccaggttgaatggctcttttagatatgttataattagccagggactcgaccagcctcggtcaatagctgtgcaccctgagaaaggcttactgttctggacagaatggggtcagatgccctgcattggtaaagcgcgtttagacgggtcagagaaggttgtcctggtgtctatggggattgcgtggcctaacggcatctccatcgattacgaggagaacaagctctactggtgtgacgctcgaacagataagatcgaacggatcgatctggaaactgggggaaacagggaaatggtgctgtcaggctctaacgtcgacatgtttagcgtagcagtctttggtgcatacatatactggtcagaccgggcacacgcaaacggtagtgttcgcaggggccacaaaaatgacgctacggaaacaataactatgaggaccgggctgggcgtgaatctcaaggaagtcaaaatctttaaccgggtgcgggaaaagggaactaatgtgtgtgcgagagacaacggcggatgtaagcagttatgcctgtaccggggtaacagccgtcgtacatgcgcatgcgcacacggttatctagccgaggatggcgtaacgtgtttacgccatgagggctacctcctatattcgggacgaaccatattgaaatccatccatctgtccgacgagactaatctcaattctccaattagaccatatgagaaccctcggtatttcaaaaatgtgatagccctggcatttgattataatcaacgcagaaaaggaacaaaccggatcttttatagcgatgctcactttggcaacatacagctcattaaggacaattgggaggaccgccaagttatagtcgaaaacgtgggcagcgttgaaggccttgcctaccatcgggcatgggataccctgtactggacatcctccactactagcagtatcacccggcataccgtggaccagacccgtcccggtgcgttcgatcgcgaggccgtcatcacgatgtcagaagacgaccatcctcatgtgttggcgctagatgagtgccaaaatctgatgttttggaccaattggaacgaacagcacccgagtatcatgcgctcgaccctgaccgggaagaacgctcaggttgttgtctccaccgatattctgaccccaaatggcctgactatcgactatagagccgaaaaattgtacttttcagatgggtctcttggaaagatagagaggtgcgagtacgatggctcccaacggcacgtcattgtaaaatccgggccaggaacttttctctcactggccgtatatgacaactatattttctggtcagactggggaagaagagcaatactgagatccaataaatataccggcggtgatactaagattctaagatctgacattcctcaccaacccatgggtattattgctgtcgccaacgatactaacagttgcgagttatccccctgcgccctgctgaacggcggatgtcacgatctctgcttgctaacacctaatggaagagtgaactgctcttgcaggggagaccgaatccttctcgaggataatagatgcgtgacaaagaatagcagttgtaatgcgtactctgagtttgagtgcggtaatggggagtgtatcgactatcagctcacctgcgacgggatccctcattgtaaagataagagcgatgaaaagcttttatactgcgagaatcgctcttgtcgcaggggcttcaagccatgttacaaccggagatgcattccccacggtaagctgtgcgatggagagaacgattgtggggacaatagcgacgagctggattgtaaggtttcaacctgtgcaaccgtggaattcaggtgtgccgatgggacctgtattcctaggagtgcacgttgtaatcagaacatcgactgcgcggatgctagtgacgagaaaaattgcaataacaccgactgcacacacttttacaaactcggtgtaaaaaccaccggctttatacgatgcaatagtacaagcctgtgtgtccttccgacctggatatgcgacggttcaaatgactgtggcgattactcagatgagttaaagtgtccagtgcagaataagcacaagtgtgaagagaactacttctcttgtccatcaggacgctgcatcctcaatacttggatttgtgatgggcaaaaggattgtgaagatggacgcgacgaattccactgtgacagtagctgtagctggaatcagtttgcttgcagtgctcagaaatgcatcagtaagcactggatttgcgacggagaagacgattgcggcgatggcttagacgaatcagacagcatttgtggggctataacatgtgctgcggatatgttctcttgtcaagggtccagggcttgcgtgccgaggcactggctatgtgacggcgaacgtgactgtcccgacggctctgatgagctctccacagcaggatgcgctcctaataatacttgcgacgagaacgcgttcatgtgccacaataaggtctgcataccaaaacagtttgtgtgcgatcatgatgacgattgtggagacggctcagatgagtctccacagtgcgggtatagacagtgcggaacagaggaatttagttgtgccgacggcagatgtctgttgaacactcagtggcagtgtgatggagattttgattgtcccgaccacagcgatgaagcacctctgaatccaaagtgcaagtccgccgagcagtcctgtaactcaagtttctttatgtgtaaaaacggcagatgcattccctccggtgggctgtgcgacaataaggacgattgcggcgacgggagcgacgaacgcaattgccatattaacgagtgcctgtcaaaaaaggtcagcggctgttcccaggattgtcaggatctacccgtgtcatataaatgtaagtgctggccaggttttcagttgaaggacgatggtaagacttgcgtggatatcgacgaatgctcgtcaggatttccttgttcccaacagtgtataaacacatatgggacctataaatgcctttgcacggatggctacgaaatccagccggataaccctaacgggtgcaagtccttatccgatgaggagccttttctgatactcgcagatcatcacgaaattcggaagatatctactgatgggtccaactacaccctgctgaaacaggggctgaacaatgtcatagctatcgacttcgattaccgggaggagtttatatactggattgactcatcccgtcctaacggaagcaggattaacagaatgtgccttaacggatcggacattaaggttgtgcataacaccgcagtccccaatgctctggcagtggactggatcggcaagaatctctattggtctgacacagagaaaagaataatcgaagtatctaaactaaacggattgtatcccacgatactggtcagtaagcgcctgaaattcccacgagatttatccctggacccacaggctgggtatctgtactggatcgactgttgcgaatatccacacatcggtcgggtgggcatggatggaactaaccaatcagtcgtgattgagacgaaaatcagtcgacccatggctcttaccatagactatgtgaatagacgcctctactgggcagacgagaaccatattgagtttagcaacatggatgggtcccatcgccacaaagtgccgaatcaagatattccgggagtaattgccctcacattgtttgaggattacatatactggacggacggaaagacgaaatccctctcaagggcacacaagactagcggcgctgataggctgagcctcatctattcgtggcacgcaataacagatattcaagtgtaccattcttaccgacagcctgatgtttcaaagcacctgtgtatgattaacaatggaggatgttctcacctctgcctgctcgccccaggaaagacgcacacctgtgcttgccctaccaacttttacctggccgctgacaataggacctgtctcagcaattgtacagcgtcccagtttcgctgtaagacagacaaatgcataccattctggtggaaatgcgatactgttgatgactgtggagatgggtctgacgagcccgacgactgtcctgagttccgctgccagcccggacggttccagtgtggcacaggcctgtgtgctctcccagccttcatctgcgacggagagaatgattgcggggataactccgatgagctcaattgcgatactcacgtttgtttgtcgggacagtttaaatgtaccaagaatcagaaatgcattccagttaacctcagatgtaatggacaggatgactgtggtgatgaggaggatgagagggattgccccgaaaatagttgtagccctgactactttcagtgtaaaactacaaaacactgtatatctaaactgtgggtctgcgacgaggaccctgactgcgcagatgcctccgacgaggcaaactgtgacaagaagacatgtggtcctcatgagttccaatgtaagaacaacaattgtatccccgaccactggcgctgcgactctcagaatgactgcagcgacaactcggacgaggagaactgcaagccccagacatgtacactcaaggattttctctgtgcaaatggtgactgtgttagttcacgtttctggtgcgacggcgatttcgactgcgcagatgggtcagatgaaagaaactgcgaaactagttgcagcaaggatcagtttcggtgctcaaacggtcagtgtatcccagctaagtggaagtgcgatggacacgaggactgtaaatatggcgaggatgagaagtcctgcgagcctgccagccccacttgtagctcgagggagtatatatgcgcatccgacgggtgcatttcagccagcctgaagtgtaatggggaatatgactgcgctgatgggtccgacgaaatggactgtgtaacagaatgtaaagaagatcagtttagatgcaagaacaaagctcactgcatacctattaggtggctgtgtgacgggatccatgactgtgtggacggaagtgacgaagagaattgcgaacgtggaggcaatatttgccgtgcagatgaatttctgtgcaacaactcactgtgcaagctgcatttctgggtttgtgacggtgaggacgattgcggtgacaactccgacgaggctccagacatgtgtgttaagtttctatgtccgtccacccgcccacatcgatgccgcaacaacaggatttgtctccagtctgaacagatgtgcaacggcattgatgagtgtggcgataattctgatgaagatcactgcggtgggaaactgacgtataaggcgcgaccttgtaaaaaggatgaatttgcttgcagtaataaaaagtgtatcccaatggacttgcagtgtgaccggcttgatgattgcggcgatggctcagatgaacaggggtgtcgtattgccccaactgagtacacttgcgaggataacgtgaacccatgtggcgacgatgcatattgcaatcaaattaaaacaagcgtgttctgcagatgtaagccgggatttcaaagaaacatgaagaaccgccagtgtgaggacttaaatgaatgcctggtgttcggcacctgcagtcaccagtgcatcaacgtcgaggggtcctacaagtgcgtctgcgatcagaactttcaagagcgcaataacacgtgcatagctgagggcagtgaggatcaggtactgtatatagccaatgacacagacatcctgggtttcatttatccctttaattattctggcgaccaccagcaaatttctcacattgagcataattcaaggattactggcatggacgtttactaccagagggatatgatcatatggagtacacagtttaatccaggcggaatattctacaagcgtatacatgggagagagaagaggcaggccaactccggattgatctgccctgagttcaagcgccctcgtgacattgccgtcgactgggtggcgggaaatatatactggactgatcactctcgtatgcactggttttcatattataccacacactggacttctctgcggtattccatcaacgtggggcagctcaacggtcccaattgcactcggctgctgactaacatggcaggcgagccatacgcgatcgctgtgaatcctaagcggggaatgatgtattggaccgtggtaggcgaccactcacacatcgaggaggcagccatggatggcacactgaggcgtatactcgtacaaaagaacctgcagaggcccaccgggcttgccgtcgactacttctccgaacgcatttactgggccgatttcgagctgtcgattatcgggtcggtgctctatgacgggtcaaatagtgtggtatctgtaagttccaaacaggggttattgcatccgcatcggatagacatattcgaagactacatctacggtgccggaccaaagaatggcgtgttccgcgtgcagaaattcggccatggatcagtagagtatctggcactgaacatagacaaaaccaagggggtgctcatctcccaccggtacaagcagctggacctgcctaacccttgcctggacctcgcgtgcgaatttttgtgtttgttgaatccgtctggggctacctgcgtttgtccggagggaaagtacctgatcaacgggacttgcaatgatgactcgctgcttgacgactcctgtaaactgacatgtgagaatggaggcagatgcattttgaatgagaaaggtgacttgaggtgccactgttggccttcctactctggagagcggtgtgaggtcaatcactgcagcaattactgccagaacggagggacttgcgttccctcggttctcggaagacctacttgttcctgtgcattagggttcaccggtccaaactgtggaaaaacagtttgtgaggatttttgtcagaatggtggaacttgcattgttactgcagggaatcagccatattgccattgccagccagagtacacaggggaccgttgtcagtattacgtctgccatcactactgtgtgaattcagagtcctgcaccataggagacgatgggagtgtcgaatgtgtgtgcccgacgagatatgagggtcctaagtgcgaggtcgataaatgcgtgcgctgtcatgggggacattgtattatcaacaaggactctgaagacatcttctgtaattgcaccaacggcaagattgcgagcagctgtcaactttgcgatggctactgttataacggtggtacctgccagctggatcctgagacgaacgtgcctgtgtgcctctgcagcacaaattggtcagggactcagtgtgagcgcccagccccaaaaagctccaagagtgaccatatctccacccgcagtattgccatcatagttccgctggtgctgctggtcaccctgatcacaactcttgtaattggcctagtgttgtgtaagcggaagcgaagaacgaagacaattaggagacagccgatcatcaacggaggcattaatgtggagatcggaaatcctagctataatatgtatgaagtggatcacgaccacaatgacgggggtctgctggacccgggttttatgatcgaccccaccaaggcgagatacatcggaggagggcctagtgcctttaaactgcctcacaccgcaccccctatatacctcaactctgaccttaaaggccctctcaccgcaggtcccaccaattattcgaatccagtgtatgcgaaactctacatggacggtcagaactgtagaaatagcctcgggagtgtggatgagcgaaaggaactgctgccgaaaaaaatcgaaatcggaatacgggagacggtagcctaa

SEQ ID NO: 29286 - DNA, 2349 bp, synthetic construct
  misc_feature 1..2349: note = Description of Artificial Sequence: Synthetic coding sequence
  source 1..2349: mol_type = other DNA
atgagcgagtttctgctggccctcttgaccctttcaggtttattgcctatcgctcgagtgttgacagtgggcgctgacagagaccagcagctttgcgaccccggagaatttctgtgtcatgaccatgtgacctgtgtcagccagtcctggctgtgcgacggcgatccggattgccccgatgattccgacgagtctcttgacacctcacgcacatgccaggtggaccagttctcctgtggcaacggtagatgtatcccgagagcttggctgtgcgaccgggaggacgactgtggagatcagacagacgagatggcaagttgcgagttcccaacctgcgagccgctgacccagttcgtttgcaagtcaggcagatgcatttccagcaagtggcactgtgactccgacgacgattgcggcgatggatccgacgaggtgggttgcgtgcatagttgctttgataaccagttccgttgttcaagcggtcgatgcattcccggacattgggcgtgtgatggggataacgattgtggcgatttctcagatgaggcgcagattaattgcacgaaggaagagatccacagcccagctggttgcaacggcaacgaatttcaatgccatcctgacggaaactgtgttccggatctctggaggtgcgatggagagaaagactgcgaggatggaagcgacgagaagggctgcaatggtacaattcggttgtgcgaccacaaaaccaagtttagctgctggtcaaccggaaggtgtataaataaagcctgggtgtgcgacggcgacattgactgcgaggatcaatccgacgaagatgattgtgatagcttcctgtgcgggcctcccaagcacccatgcgcaaatgatacttctgtctgcctgcagcctgaaaaactgtgcaacggcaagaaggactgcccagatgggtcagacgaagggtatctgtgcgacgagtgttccttaaacaacggcggatgctctaaccattgcagcgtagtgcctggtcgagggatcgtctgtagttgccccgaaggactgcaactgaacaaagataataaaacctgtgaaatagtagattactgcagcaatcatcttaagtgttctcaagtttgtgagcaacacaagcacaccgtgaagtgttcctgttatgaagggtggaagttagatgtggacggagagagctgtacttcagtggaccccttcgaagccttcataatctttagtattaggcacgaaatacgcaggatcgatctgcacaagcgcgactactctctcctggttcctggtttgcgaaacaccatagcactcgactttcactttaatcagagcttgctttactggaccgacgtggtggaggacaggatatatcggggaaaattaagcgaatcggggggtgtttccgcgatagaagtggtggtggagcatggactcgccacccctgaaggactgactgttgattggattgccggaaacatctactggattgattcgaatctcgaccagattgaggtggccaagttggatggctctctacgaactaccttgatagccggagctatggagcaccccagggctatcgccctggaccctagatacggaattctgttctggacggattgggatgctaattttcctaggattgaatctgcctcgatgtcaggagccggacgtaaaactatatacaaggacatgaaaacgggcgcatggccaaatggtctgactgtggaccatttcgagaaacggattgtctggactgatgctcggtcagacgccatttatagcgctctgtacgatggaactaatatgatcgaaattataaggggccatgagtatctgtcccacccatttgccgtgtcactctatggctcggaggtgtattggacagattggcggaccaatacactgtctaaagccaataaatggactggacagaacgtgtctgtgatacagaagaccagtgcacagcctttcgatctccagatatatcacccatctaggcagccccaggcccctaatccttgtgcagctaatgacggaaagggaccctgtagccacatgtgcctgattaatcataataggagtgccgcttgtgcctgtccccacctgatgaaactgagtagcgacaaaaagacatgctatgagatgaaaaaatttctcctctacgctagacggagtgagatacggggtgttgacatcgataacccgtatttcaatttcattaccgcatttactgtacccgacatcgacgatgttacagtgattgatttcgatgcctccgaggaaaggttatattggaccgatattaagacgcagacgatcaagcgggcatttatcaacgggtag

SEQ ID NO: 29287 - DNA, 13614 bp, synthetic construct
  misc_feature 1..13614: note = Description of Artificial Sequence: Synthetic coding sequence
  source 1..13614: mol_type = other DNA
tttttacatagcggccctgaagaggtggagattaagtgccccctgaaccacatagcatgcctaggcacaaacaaatgcgttcacttaagtcagctctgtaacggggttttggactgccccgatggctacgatgaaggggtacattgtcagggtgaaagtatatgccagcaactgaactgcacaatgtataagtataaatgcactatggtacgcaatagcaccagatgctactgcgaggacggatttgagatcaccgaagatggaaggtcttgtaaggaccaggacgaatgcgcggtctacggaacctgtagtcagacctgccggaacactcatggatcctacacatgcagctgtgttgaaggctatcttatgcaaccagataacaggagctgcaaagccaagatagaacctactgaccggcctcctatattgctcattgcaaattttgagactatcgaagtgttttacctgaacggatcaaagatggcgaccctttctagcgtgaacggtaatgagattcacacgctcgattttatttataacgaggacatgatctgctggatcgaatctagggagtcaagtaaccagctgaagtgtattcaaatcacaaaagctggaggattgacggatgaatggactatcaatatattgcagtccttccataatgtacagcagatggccatcgattggctcacccgtaacctgtactttgtggatcacgtcggtgaccggatatttgtctgcaacagtaatgggtctgtttgcgtgacgctcatagacctggaattacataatcctaaagccatcgccgttgaccccatcgctggtaaactgttctttacagattatggaaacgttgccaaagttgagagatgtgatatggacggtatgaatcgtacacggatcatcgatagcaagacagaacagcctgccgcattggccctagacttggtaaataagctggtctattgggtcgatttatacttggattacgtcggggtcgtggattaccagggcaagaataggcacaccgtcattcagggacgccaggtgagacacctgtacggcattactgtgtttgaggactacctgtacgccactaatagtgacaactataatatcgtgaggatcaatcggttcaacgggaccgacatacattccctgattaaaatcgaaaacgcgtggggcattcggatctaccagaagaggacccaacctacagttcggtctcacgcgtgtgaagtcgacccatacgggatgcccggagggtgctctcatatctgcctgctgtcaagcagctacaagacgcggacgtgcaggtgtcgaactggattcaatctcggttccgacggacgttcttgtaagaggccgaaaaatgagctcttcctattttacggtaagggccgacccggtatagtgcgcggaatggacctgaacacgaagatagcagacgagtatatgattcccattgagaacctcgtgaatcccagagctctagatttccacgcagagaccaattacatttactttgctgataccacttcctttcttattggcaggcagaagattgacggcacagagagagagactattttgaaggatgacctggacaacgtcgaaggaatcgctgtggattggatcgggaataatctttactggaccaacgacggacacaggaaaacaattaacgttgcaaggttagaaaaggcgtcgcagtctagaaaaaccctgctggaaggcgaaatgtcacaccccaggggaatcgtggtggatccagtcaacggatggatgtactggactgactgggaagaggatgaaatcgatgattctgtcgggaggattgaaaaagcttggatggacggatttaaccgccagatctttgtcacttcaaagatgctctggccaaatggtttaactctcgatttccatactaacaccttgtactggtgcgacgcttattatgatcatattgagaaagtattcctgaatggtacccatcggaagatcgtctactctggccgtgaattgaatcaccccttcggactgagccaccacgggaactatgtcttttggacagactatatgaacggcagtattttccagttggacctgattacatccgaagtgacactcctgagacatgaaaggcccccacttttcggcctgcagatctacgacccaagaaagcaacagggggacaatatgtgtagggtgaacaacggagggtgtagcactctctgcctggctatcccaggaggtagagtatgtgcctgtgctgacaaccagctgctggatgaaaacggtacgacctgtacattcaatcccggtgaagccctgcctcacatttgcaaagctggtgaattcagatgcaaaaacaggcactgcatccaggccagatggaaatgtgacggagacgacgattgtctagatggaagtgacgaagatagcgtgaactgttttaatcacagttgtccagatgatcaattcaagtgtcaaaataatcgctgtattcctaagagatggctctgtgatggggctaacgactgcggttccaacgaggacgagtctaaccaaacctgcactgcacgcacatgtcaggtcgatcagttttcatgtggaaatggacgttgcatcccccgagcgtggctctgcgatcgcgaagatgactgcggggatcagacagatgaaatggccagctgtgaatttccgacatgcgagccactgactcagtttgtgtgcaagtctgggaggtgcatatcaagtaaatggcattgcgactctgacgacgactgtggagacggtagcgatgaggtaggatgtgtgcatagctgtttcgataaccagtttagatgtagcagcggacgatgtatacctggccactgggcatgtgatggagataacgattgtggcgatttcagcgatgaagcgcagattaattgtacaaaggaggagatacatagcccagccggatgtaacggtaacgaattccagtgccaccccgatgggaactgcgtcccagacctttggcggtgtgacggggaaaaggactgtgaggacggttctgacgagaaaggctgtaacggtaccatccgcctgtgtgaccataagaccaagtttagctgctggagcacggggaggtgcattaacaaggcttgggtgtgtgatggggacatagattgcgaggaccaatccgacgaagatgattgcgactcctttttgtgcgggccaccaaagcacccatgcgctaacgatacctctgtgtgcttgcagcctgaaaaactgtgtaacggaaaaaaggactgcccagatggctccgatgagggatatctgtgcgacgagtgctccttaaacaatgggggttgcagtaatcattgtagcgtggtgcctggacgcggtattgtatgctcgtgtcctgagggcctgcaattaaataaggacaataaaacctgtgagattgtcgattattgttctaaccacttgaagtgttcgcaggtctgtgagcagcacaagcacaccgtgaagtgtagctgctatgagggatggaagttggatgtcgatggagagtcttgtacttcggtcgacccttttgaggccttcattatcttctcaattcgccacgagatacggagaattgacttgcacaagcgagattattctttgctcgtacctggtttacgcaatacaattgctcttgacttccactttaaccagtcattgctctactggaccgacgtagtcgaggatcgcatttaccgcggaaagctgtccgagtccggcggtgtgagcgcgatagaggtggttgttgaacacgggctagccacgccggaaggcctgaccgtggactggattgcaggtaacatctactggatcgatagcaacctagaccagattgaggtggccaagctagatggatcattacgcaccacattgatcgctggcgcaatggaacaccctagagccatcgcactggatccacgttacggcatcctgttttggactgactgggatgcgaatttccctaggattgaatccgcctctatgtctggagccggtcggaaaacaatatataaggatatgaaaactggcgcatggccaaacggcctgaccgtcgaccattttgagaagagaatcgtgtggacagatgcgaggtcagacgcaatctattccgctctgtacgatggtaccaacatgatcgaaatcatacgagggcacgagtaccttagtcatcctttcgccgtgtcactgtatggtagtgaggtgtattggacagattggagaacaaacactttatccaaggcaaataaatggacagggcagaatgtttcagtgatccagaaaactagtgctcaaccatttgacctgcagatttatcatccttcaaggcagcctcaggcacccaatccttgcgcagctaatgacggaaaaggcccatgctcccatatgtgcctgatcaatcacaacagatctgccgcatgcgcttgtcctcatctaatgaagctgtcttcggacaaaaagacctgttatgaaatgaaaaagttcctcctctacgcccgtaggtcagagatccgcggtgttgatattgacaacccctactttaattttatcaccgcatttacggtaccagacattgatgatgtgacagttatcgacttcgacgcctccgaagaacggctgtattggacggacattaaaacgcagacaatcaagcgagcatttatcaacggcactggattggagaccgttattagcagggacattcagtccataagaggcctggctgttgattgggtgtcccgcaacctgtactggatttcaagcgagtttgatgagactcagataaacgtcgccagactggacggctctctgaaaacgtctatcattcatggaatcgacaagcctcagtgcctggccgctcaccccgtgagaggaaaactgtattggaccgacggcaacaccatcaacatggctaatatggatggatctaactcaaagatcctgtttcagaaccagaaagaaccagtgggtttgtcgattgactatgttgagaataaactgtactggatctcttctggcaatggaacgattaatcgctgtaacttagatggcggtaatctggaggtgattgagtccatgaaggaggagctgacaaaagctaccgctttgaccattatggataagaagctgtggtgggccgatcaaaacttggcgcagttggggacatgctcgaagcgggatgggaggaaccctaccattctgaggaataaaacaagcggcgtggtgcatatgaaggtgtacgacaaagaggctcagcagggaagtaactcttgccagcttaacaatggagggtgcagccagctttgcctgcctaccagcgagaccacgagaacttgtatgtgcaccgttggatactacctgcagaagaatcgtatgagctgccagggtatcgagtcgttcctgatgtacagcgtacatgaaggcatccggggtatcccactagaacctagtgataaaatggatgccctgatgcccattagcggaacctccttcgccgtcgggattgacttccacgccgagaacgataccatctactggacagatatggggtttaacaagatctctcgcgctaagcgggaccagacctggaaggaggatatcattacaaacggactgggccgagtggagggtatagccgtcgactggatagctggaaacatctactggactgaccatggattcaacttgatagaggtggccaggctcaacggttccttcagatatgtcatcatcagtcaaggactggatcagcctcggagtattgccgtccacccagaaaagggcctgctcttctggacagaatggggccaaatgccttgcataggcaaagctagactggacggaagcgagaaggtcgtgttggtatcgatggggatcgcgtggcccaatggcatatcaatagactacgaagaaaataaactctactggtgtgacgcgaggacagataagattgaacggatcgatttggaaacaggcggaaacagggaaatggtgctgtcaggttcaaacgtggatatgtttagtgtggccgtgtttggcgcatatatctattggagcgaccgggcacacgctaatgggtccgtacggcgaggacacaagaacgatgccaccgaaactatcacgatgaggactggtctgggggttaatctaaaggaggtgaaaatcttcaacagagtaagggagaaaggcactaatgtatgtgccagagataatggcggatgcaagcaactgtgcctgtaccgtggcaactcccgacggacctgcgcttgcgctcatggttatctcgctgaagacggggtgacctgcttgcgccacgaaggttacctgctgtattccggtcgaactattctgaaaagcattcacttaagtgatgagaccaatctgaactcacctataaggccttatgagaacccacgctactttaaaaacgtgatcgccctcgctttcgactacaaccagcggcgtaaaggcactaacaggattttttacagcgacgctcattttggcaatatccagttaatcaaagacaactgggaggatcggcaggtgatagtggagaacgtgggcagcgtcgaggggctcgcttatcatcgcgcttgggacaccctttactggactagctcaaccaccagcagtattacccgtcacaccgtggaccagaccagaccaggggcttttgaccgggaagctgtgattaccatgtccgaagacgaccacccacacgtgctagctttggatgagtgccagaacttgatgttctggactaactggaacgagcagcatccatccatcatgcgctcaacactgactggcaaaaatgcacaggtcgtcgtgtctacagacattctgaccccgaatggactgaccattgactatcgggctgaaaaactttatttttctgatggatcattgggcaagattgagagatgtgaatatgatggcagccagcggcacgtgattgtgaaaagtggccctggtactttcctgtcactcgctgtctatgacaactacattttctggtcagactggggcaggagggctattctacggagtaataagtataccggcggagatacaaaaatcttgcggtcagacatcccccaccagccgatggggattatcgccgtagcgaatgataccaactcctgcgaactgtcaccgtgcgcgctcttgaatgggggatgtcacgatctgtgcttgctcactccaaacggaagagtcaactgcagctgtaggggggaccgcattctgctggaggataatagatgtgtcacgaagaactcttcttgtaacgcgtacagtgagttcgagtgcgggaacggtgagtgtatcgactaccaattgacatgcgatggaatcccccattgtaaagacaaaagcgacgagaaattgctctattgtgagaaccgatcctgtcggagaggcttcaaaccctgttacaatcggagatgcataccgcacggaaaactgtgcgatggagagaatgattgtggagacaattcagacgagctcgattgtaaggtcagcacctgcgccaccgtggagttccgctgtgcggacggcacctgtatccccagaagtgccagatgtaaccagaacattgattgtgccgacgcttctgacgagaaaaactgcaacaatactgattgcacacacttctacaagttgggcgtgaagaccaccggcttcatcaggtgtaattccacatccctgtgcgtgttgcctacctggatttgcgacggaagcaacgactgcggtgattattccgatgaactcaaatgtcccgttcagaataagcacaagtgcgaagaaaattacttctcttgcccgagcggaagatgcatcttaaacacatggatttgcgatgggcagaaagactgcgaggacggaagagatgaatttcattgcgacagcagttgcagctggaatcaattcgcatgctcagctcagaaatgcatctctaagcactggatctgtgacggcgaagatgattgcggtgatggtctcgacgagtccgattctatttgcggcgcaatcacatgcgccgctgatatgttctcttgccagggatcacgggcttgcgtgccgaggcattggctgtgcgacggagaacgtgattgtccagatgggagcgatgaactgagcacagcaggttgcgcgcctaataatacctgtgatgaaaacgctttcatgtgtcacaacaaagtgtgtatccccaaacagtttgtatgcgatcacgatgacgactgtggcgatggatccgacgaaagtccgcaatgcggctacaggcagtgcgggaccgaagagttttcttgcgcagatggtagatgcctgctgaacactcagtggcagtgcgatggcgacttcgattgtcccgaccactccgacgaagcccctcttaatcccaaatgtaagagcgctgagcagagctgtaactcaagtttctttatgtgcaagaacggacgctgcatccccagcggtggtctatgcgataataaagatgactgcggggacggaagtgatgagcgcaattgccatattaatgaatgtctttccaaaaaggtgagcgggtgctctcaggattgtcaggatcttcccgtctcttacaaatgcaaatgttggccaggattccaactgaaagacgatgggaagacgtgtgtggatatcgacgagtgctccagtggttttccctgcagtcagcagtgcattaacacttatgggacgtacaagtgcctttgcaccgatggctacgaaatacagcccgacaaccctaacggatgcaagtctctgagcgacgaggagcccttccttattctcgccgaccaccacgagatacggaaaatttccacagatggctcgaactacactcttttaaagcaaggactcaataatgtcatcgcaattgactttgattatagggaggagtttatctattggattgattcatctaggcctaatggtagccgcatcaataggatgtgcttaaacgggtccgacattaaagtggtccacaacactgccgttcccaacgctctggctgtcgattggattggcaaaaacttgtactggtccgacaccgagaagcgcatcatagaggtctctaagctcaatggcctctacccaacaattctcgtgagcaagcgcttaaaattcccacgagatctgtcactggatccccaggctggatacctgtattggatcgattgttgtgagtatccccacatcgggagagttggtatggacgggacaaaccagtcggttgtgatagaaaccaagatcagtagacccatggccttaaccatcgactatgtgaacaggaggctgtattgggccgacgagaaccatattgagttctcaaatatggacgggtcccaccgccacaaagtgcccaaccaagacataccgggtgtgatcgcattgacactgttcgaggactatatctattggactgatgggaagactaagtccctgtcacgcgctcataaaacaagtggcgcagatcggctatcgctaatctattcctggcatgccattacagatattcaagtgtaccactcctatcgccaaccagacgtgtcaaagcacctgtgtatgataaacaacggtggctgcagtcacttgtgtctgttagcacccggaaagactcacacctgcgcatgcccgacaaacttttatctggccgctgacaacagaacgtgcctatcaaattgtacagcttcacaattcaggtgtaaaaccgataagtgtatccccttttggtggaagtgcgatacagttgacgactgcggggatggttccgatgagcccgatgactgcccagaattccgttgccagccgggacgttttcaatgcggaaccggactgtgcgcactgcctgccttcatctgcgatggggagaatgactgcggcgacaacagcgacgagctcaactgcgacacccatgtgtgcctcagcggccaattcaagtgcacgaaaaatcagaaatgtatccctgttaatttgcgttgcaatgggcaggacgattgtggtgacgaggaagatgaacgggattgcccggagaactcatgtagtccagattacttccagtgtaaaacaaccaaacactgcatttccaagttgtgggtttgcgacgaagacccagattgtgctgacgcctctgacgaagccaattgtgataaaaagacttgtggtccacacgagtttcagtgcaagaacaataattgcatacccgaccactggcgttgcgactcacagaacgactgctcagacaattccgatgaggaaaattgcaaaccccagacatgtaccctgaaggacttcctgtgcgctaacggagattgcgtgtcgtcgaggttttggtgcgacggggacttcgattgcgcagacggcagcgacgagcgcaattgcgagacatcatgttctaaggaccagtttcggtgctccaatggacaatgcatacccgctaaatggaagtgtgatgggcacgaggattgtaagtatggagaagatgaaaaaagttgcgaacccgcttctcccacgtgctctagcagggaatatatctgcgcatccgatgggtgtatatcagcaagcctcaagtgcaacggcgaatatgactgcgccgatggttcagacgaaatggattgcgtgactgaatgtaaggaggatcaatttcggtgcaaaaataaggcgcattgtatccccattagatggctgtgcgacggtatccatgattgcgtcgacggatctgatgaggaaaactgcgaacggggaggtaacatatgcagggctgacgagttcctgtgcaacaactcactgtgcaaactacatttctgggtgtgcgatggagaggacgattgcggtgacaattccgacgaggcgccagatatgtgtgttaaattcttgtgtcctagcacgcggccacatcgctgtcggaacaatagaatttgtcttcagtctgagcagatgtgtaatgggattgatgaatgcggagacaatagtgacgaggatcactgtggaggtaagctgacgtataaggcacggccttgcaagaaagatgaatttgcctgttccaataaaaaatgcattcctatggaccttcagtgcgaccgattggatgattgtggagacggctcagatgagcagggctgccgcatcgcgcctactgagtatacatgcgaagataacgtgaacccctgcggagatgacgcatattgcaatcaaattaagacgtccgttttttgcagatgtaagccaggcttccagcggaacatgaagaaccggcagtgtgaggatctgaatgaatgcctcgtttttggaacgtgctcccatcagtgtattaacgtggaggggtcctacaagtgcgtctgtgaccagaatttccaagaaagaaataatacctgcatcgccgagggtagcgaggatcaagtgctgtacatcgctaacgatacagacatcctcggctttatttaccccttcaattattctggtgatcaccagcagatcagccatatcgagcacaattcaaggatcaccggcatggacgtgtattatcagagggatatgatcatctggtccacccaatttaaccccggaggcattttctacaaaagaatccacgggagggagaagcggcaagcaaattccggcttgatctgtcctgaattcaaacggcctcgcgacatagctgtcgactgggtggctgggaatatttattggaccgaccatagccggatgcactggttctcatattacaccacccactggaccagcctacggtacagcatcaatgtgggtcagctcaacggcccaaactgcacaaggcttctgacgaatatggccggagagccctacgccatcgctgtgaatcctaagaggggcatgatgtattggacagtggttggcgaccattcacacatagaagaagctgcgatggatggtaccctgagacgcatcctggtgcagaaaaatctgcagagacccacagggcttgccgtcgattacttttcagaaaggatctattgggccgactttgagctcagcattattgggagcgtactgtatgacggctctaactccgtagtcagcgtttcctcaaagcagggccttctccacccccatcgaattgatatctttgaggattatatctacggagctggacccaaaaatggggtatttcgcgtgcagaaatttgggcatgggtcggttgagtatcttgccctcaacatcgacaagactaaaggcgtgctcatctcgcacaggtacaagcaactggatctgccaaacccgtgcctggatcttgcctgcgaattcttatgcctcctcaacccttccggcgcaacttgcgtgtgtcccgagggaaagtacctgataaatggcacttgcaacgatgacagcttgcttgacgattcctgcaagctgacctgcgagaatggcggacggtgcatactgaatgaaaagggggacctgcggtgccactgctggcccagttattccggagagaggtgcgaagtcaaccattgctccaattattgccaaaacggaggaacgtgcgtgccctctgtgctcggacgccctacctgttcctgtgctctgggatttaccggccctaactgtggcaaaaccgtctgcgaggacttctgtcaaaacggcggaacctgcattgtcacagctggtaaccagccatactgccactgccagccagaatacaccggcgaccggtgtcaatactatgtgtgccatcactactgcgttaactctgaaagctgtacgatcggagacgacgggtctgtcgaatgcgtatgtcctactcgctacgaaggtccaaagtgcgaagtagataaatgcgtcagatgtcatgggggtcactgtattatcaataaggactccgaagatattttctgcaactgcaccaacgggaaaatcgcctcctcttgtcaactgtgtgatgggtattgctataacgggggaacatgccagctggaccccgagactaatgtccctgtttgcctgtgcagcacgaactggtctggcactcagtgcgaaagacccgcacctaagtcttcaaagtccgaccatatcagtacccgatcaattgccatcatcgttcctctagttcttctcgtgaccctcattaccaccctggtgattggcttagtcttgtgcaagcgaaaacgtcgcacgaagaccatacgcaggcagcctattatcaacggcggtatcaacgtagaaataggtaatccctcctacaacatgtacgaggtagatcacgatcacaacgatggaggcctgttggacccagggttcatgattgatcctacgaaggctcgatatatcgggggagggcctagtgcattcaaattaccacacacagcccctcccatttacctgaactcggatctgaaaggcccactcaccgcaggacccaccaactacagcaaccccgtgtatgccaagctgtacatggacggccagaactgccgcaactctctaggcagtgttgatgaaagaaaggaactattacctaaaaagatcgagataggtattcgcgagacagtggcctaa

SEQ ID NO: 29288 - DNA, 843 bp, synthetic construct
  misc_feature 1..843: note = Description of Artificial Sequence: Synthetic coding sequence
  source 1..843: mol_type = other DNA
atgtgtcccccacaggcacaagcagaggttggcccaacaatgaccgaaaaagctgaaatggtttgcgccccatcccccgcacctgcaccccctcccaagcccgctagccccggacccccacaagtcgaagaggtggggcatagaggcggttcatcgccgcctcggctgccacctggtgttcccgtcatctctctcggccactcaaggccacctggagttgccatgcctacaaccgaactcgggacgctgaggccacccctcctccagttatccacattgggtaccgcccctccaactctcgcgctgcattatcaccctcacccttttttaaattcagtatatatcggccctgccggaccattttccatttttccctcaagcaggctcaaacggcgtccctcacactgcgagctggatctcgccgaaggccaccagccgcagaaggttgcacgtcgcgttttcaccaactcccgtgagcggtggcgccagcaaaatgtcaacggcgcttttgctgaattgagaaagctcttacccactcacccaccagataggaaactcagcaagaatgaagtcctccgactggccatgaagtacattggtttcctggtgaggctactgcgcgatcaggccgcagccctcgcagccggaccaaccccacccggaccacgcaaacggcctgtccatagagtccccgacgacggtgctagacgtggatcgggacgtcgtgctgaggcggctgcccgttcccagccagcccctcctgcagacccggatgggagcccgggaggtgctgcacggcctatcaaaatggaacagaccgctttgagccccgaagtcagatag

SEQ ID NO: 29289 - DNA, 1620 bp, synthetic construct
  misc_feature 1..1620: note = Description of Artificial Sequence: Synthetic coding sequence
  source 1..1620: mol_type = other DNA
atgggctgcggctgcagttctcatcctgaggatgattggatggagaacattgacgtctgtgaaaactgtcactaccctatcgtccctcttgacgggaaggggacgcttctcattaggaacggatccgaggtccgcgatcccttagtaacatacgagggctcaaaccctcccgcatcccctctgcaggacaacctggttatcgctctgcactcttacgaaccttcacacgatggcgaccttgggtttgaaaaaggcgaacagttaagaatccttgagcagagcggagaatggtggaaggcccaatctctgaccactggtcaagaaggcttcattccctttaactttgtcgcaaaggccaacagtctggagccagagccatggtttttcaaaaatctgagcaggaaagacgcagagcgacagttgctcgcccctggcaacactcatggatcttttctgattcgcgagtctgagagtacagccggaagctttagtctgagcgtccgcgattttgaccaaaatcagggcgaggtcgttaagcattacaagatacgcaaccttgacaatggcggattttacatctctccccgtatcacatttccaggcttgcatgaattggtgagacattatacaaatgcttccgacggactctgcaccagactcagtcgcccatgtcagacccaaaaacctcagaaaccatggtgggaagacgaatgggaagtcccgcgtgagaccctgaagctcgtggagcggctgggcgcagggcaattcggggaagtgtggatgggatattataatgggcacaccaaggtagccgtgaagagtttaaaacaaggctcaatgagcccagacgctttcctcgctgaagccaacctgatgaagcagttgcagcatcagcgactcgtgcggctctacgctgtggtaacccaggaaccgatttacatcattacagagtatatggagaatgataccctgctggattctcagttggaggagaaaggtctgggtgccagcccgtgggggaatctggggcagcagctgcttctcctccccacagggagcctcgtggatttcctcaaaactccttctggaatcaaactgaccattaataaactgctcgacatggctgcccagatagcagagggcatggctttcatcgaggagaggaactatattcatagggacctgcgggcagccaatatcctggtttccgacactttgagctgcaaaatcgccgactttgggcttgcgagattgattgaggataatgagtatactgctcgcgaaggcgctaaattccccattaagtggactgcgcctgaggccattaattacgggacatttaccattaaaagcgatgtatggtcatttggcatcctgctgacagagattgtgacacatggaagaatcccttacccgggtatgacgaatcccgaggtgatccagaatctcgaaagggggtacaggatggtccgaccagataactgcccagaagaattgtatcagttaatgaggctgtgctggaaagagcgacctgaggataggccaacatttgactatttgcgttccgtcctggaagacttcttcaccgccacagaagggcagtaccagccgcagccatag

SEQ ID NO: 29290 - DNA, 1530 bp, synthetic construct
  misc_feature 1..1530: note = Description of Artificial Sequence: Synthetic coding sequence
  source 1..1530: mol_type = other DNA
atggggtgcggatgcagctcacaccccgaagacgactggatggagaatattgacgtctgcgaaaactgtcactatcccatcgtccctctggatgggaagggcacactcttaatcagaaacgggtcagaagtccgggatcctttggtcacatacgaggggtcgaacccaccggctagtccactgcaagacaatttggtgatcgcattacatagttacgaacctagccacgacggcgacctgggctttgagaagggcgagcaattacggattctggaacaatctggcgagtggtggaaggcccagtccctcactacaggacaggaggggttcatccccttcaacttcgttgccaaggctaattcccttgaacctgaaccttggttctttaaaaatctcagcaggaaggatgctgagcggcaacttctggccccaggtaacactcacgggtcattcctgattcgcgaatccgagagcacagccggaagcttctccctgagcgtgagagatttcgaccagaaccaaggcgaggtggtcaagcactacaaaatccgaaatcttgacaatggaggattttatatttctcccaggataacctttcccggattgcatgagctggtgagacactacacgaatgcctcagacggactctgtacccggctgagtcggccttgtcagacccagaaacctcagaaaccgtggtgggaggacgagtgggaagtacccagggagaccctcaagctagtggagcgcctgggggcaggacagttcggtgaggtttggatgggctactataacgggcacactaaggtagccgtgaagtcactcaaacagggatcaatgtcccccgacgcatttctggccgaggcgaatctgatgaagcagttgcagcatcagcggctcgtacgcctgtatgcggtggttactcaggagcctatctacattattactgaatacatggagaatgggagtctcgttgacttcctgaaaactcccagtggaatcaagttgacgatcaataagctgcttgatatggcagcccagattgcagaaggcatggcttttattgaagaacggaactacattcaccgagatcttagggcggcaaatattcttgtaagtgatacattatcttgtaaaatcgctgattttggcctagctagactcatcgaggataatgaatacactgctcgcgagggggcaaagttccctatcaagtggacagcccctgaagccatcaactacgggacctttactatcaagagcgatgtctggagcttcgggatcctactgactgaaatcgtgacccatgggagaataccctaccccggaatgaccaatcctgaagtcattcagaacctggaaagaggctatcgtatggtgagaccagacaattgtccagaggagctttaccagctgatgcgcctctgttggaaagagcggccagaagatagaccgaccttcgactaccttaggtccgtgcttgaggacttcttcactgccactgaaggtcaataccagccacagccgtag

SEQ ID NO: 29291 - DNA, 1551 bp, synthetic construct
  misc_feature 1..1551: note = Description of Artificial Sequence: Synthetic coding sequence
  source 1..1551: mol_type = other DNA
atggggtgtggatgttcgtcacatccagaggacgactggatggagaacatcgacgtttgtgaaaactgtcactaccccatcgtgcccctggacggcaaaggaacactactgatccgcaacggcagtgaagtgagagatcccctggttacttacgaagggtcaaatcctccggcttctccattacagggggaccccagacagcagggactgaaagacaaggcctgcggatctctggccgtggggttccacctgagtcctacatattttctgcccggactggcttttctggtgccccatcctgttacccctgggtttctgccaatccctgcgagattctcactgatgccacttgtgtttaccgacaacctagtgattgctctccattcgtatgaaccatctcatgatggggatttaggctttgagaagggggaacagctgcgcatcctggaacaatcaggagaatggtggaaagcccaaagtctcacaacaggccaagaaggatttattccttttaatttcgtcgccaaggccaacagtctagagccggaaccctggttttttaagaatctgtccagaaaagacgcggaacgccagctcctcgcgcctgggaacacccacggcagctttctgatcagagagtcagaaagcactgccggatcgttctccctgagtgtgcgcgattttgaccagaaccagggcgaggttgtcaagcactataagatcagaaatctggataatgggggattctatatcagtccacgtattacattccctggattgcatgaattggtccggcattacactaggtactacaatgggcacactaaagtagcagtgaagtcgctaaagcaggggtctatgtcccccgatgcgtttctggcggaagctaaccttatgaaacagctgcaacaccaacgtcttgtgcgcctctatgcagtggtgacacaggagccgatctacatcatcactgagtatatggaaaatggctcccttgttgatttcctaaagacgcctagtggaattaaactcaccatcaacaagctgctcgatatggccgctcaaattgcggaaggaatggcattcatcgaagagaggaattacattcaccgggacttgcgagcagccaacatactcgtgagcgatactctctcatgtaaaatcgctgattttggcctggctcggttgatcgaggacaacgaatacacagcaagggagggcgcaaagtttccaattaaatggaccgcacctgaagcgatcaactacgggaccttcactattaaaagcgatgtgtggtcgttcgggattctgctcaccgaaattgtgacacatgggaggataccgtatccgggaatgactaaccccgaggtcattcagaatttagagaggggatacagaatggtgagacccgataactgcccagaggagctctaccaattgatgcggctctgttggaaagaaaggcccgaagaccggccaaccttcgattatctccgaagcgtcctcgaggatttcttcactgcaacagagggccagtaccagccgcagccttag

SEQ ID NO: 29292 - DNA, 750 bp, synthetic construct
  misc_feature 1..750: note = Description of Artificial Sequence: Synthetic coding sequence
  source 1..750: mol_type = other DNA
atgggttactataatggtcacaccaaggtggccgtgaagtctctgaaacagggtagcatgtctccagatgctttcctggcagaggcgaatttaatgaagcagcttcagcatcaaagactcgtccggctgtacgcggtcgtcactcaagagccgatctacataataacagaatacatggaaaacggatcactcgtcgacttcttgaagaccccttccggaatcaagctcacgattaacaagttactagacatggccgctcaaatcgcggaggggatggcctttattgaagagagaaactacatacacagagacctacgggcagccaacatactcgtgtctgataccctcagttgcaagatcgccgatttcggactagctagactgattgaggataacgagtatactgctagagagggcgcaaaattccctataaaatggactgcaccagaagcaatcaattacggtacctttactataaagtccgatgtgtggtcttttggcatactcctgactgaaatagtcacccacggtcggattccttaccccggaatgacaaatcctgaggttattcaaaacttagagaggggttacagaatggtccgccctgataactgccctgaagaactgtaccagctgatgcgactctgctggaaagagcggcctgaggacagacctaccttcgactatctgcgttctgtgctggaggactttttcaccgctaccgagggccagtatcagccccagccttag

SEQ ID NO: 29293 - DNA, 1611 bp, synthetic construct
  misc_feature 1..1611: note = Description of Artificial Sequence: Synthetic coding sequence
  source 1..1611: mol_type = other DNA
atgggaattcccggttcacataatttgcgctatttttggaactttcccggtcaggggcctataatcagcgatgtcggtggagcggacttgggaggcgcaccctctgcccctagctctattccttcgggtaccatggggtgcggttgttccagccatcccgaagacgattggatggagaacatagacgtttgtgagaattgtcactatccaatcgtccccctggacggcaagggcacgctgttgatacgcaacggctccgaagtacgagaccccctggtgacttatgagggctctaatccgccagcatctcccctgcaagacaatctggtcatcgcactgcactcctacgagcccagccacgatggggacttgggatttgagaaaggggagcagctcaggatcttggaacagtccggagagtggtggaaagcacagtccctcaccactggccaagaaggttttattcccttcaactttgtcgctaaagcaaacagtttggaacccgaaccttggttttttaagaacctctcaaggaaggacgctgagcggcagctgctcgcaccaggcaatacgcatgggtctttcctgattagggaaagtgaaagtactgccggatctttcagcctttccgtccgggacttcgatcaaaaccagggagaggtggttaagcactacaagatccgaaacctagacaacggtggattctatataagcccaagaatcacttttcctggcctccacgagcttgtccggcactatacaaacgcctcagatgggctctgtactcgactcagcaggccgtgtcaaacccagaaaccccagaagccgtggtgggaagacgaatgggaggtgccacgagaaacgctcaagctggtcgaaaggcttggagcgggacaatttggggaagtgtggatggggtactataacgggcacacaaaagtagcggtgaagtctcttaagcaaggttcaatgtcacctgacgcgttcctggcagaagccaacttgatgaaacagctccagcatcagaggctcgtccgcctgtatgccgttgtaactcaggagccgatctacattatcacggagtatatggagaatgggtcactggtcgatttccttaaaactccctcaggaattaaactcactatcaataaattattggatatggctgcccagatagccgagggtatggccttcatagaggaaaggaactacattcacagggacttgagagctgccaacattctggtctcagacacactgagttgtaagatagccgatttcgggctagcacggctcattgaagacaatgaatacacagccagagaaggagctaagtttcctataaagtggactgcgcctgaggctattaattatggtacattcacccacggcagaataccttatccaggcatgaccaaccctgaagtaattcagaatctggaacggggataccgtatggtgagacctgataattgcccagaagaactctaccaactgatgcggttatgttggaaggagcgccctgaagataggcctacttttgattaccttcggtccgtgctcgaggacttctttaccgcaaccgaagggcagtatcaaccccagccctag

SEQ ID NO: 29294 - DNA, 1200 bp, synthetic construct
  misc_feature 1..1200: note = Description of Artificial Sequence: Synthetic coding sequence
  source 1..1200: mol_type = other DNA
atgccccaactcagcggagggggtgggggtggtggtggagaccctgagctttgtgctaccgacgaaatgataccctttaaggatgagggtgatccccagaaagaaaaaatcttcgccgaaatctcacatcccgaggaagaaggtgatcttgcggatatcaagagctcactcgtgaacgaaagcgaaattattcctgcatctaacggccatgaagtcgctcgccaagctcagacctcccaggaaccctatcatgacaaggcaagggaacatcctgatgacggtaaacatcccgacgggggactgtacaacaaaggtccgtcatattcaagttattcggggtacattatgatgcctaatatgaataatgatccatacatgtctaacgggagtctatctcccccaatcccacggacaagtaataaagtccccgttgtgcagccaagtcatgccgtccatcccctcaccccccttataacctacagcgatgagcacttcagtcctggttcacatccctcccacatcccgtcagacgtgaactcaaagcagggtatgagcagacacccgcctgcacctgatatacccactttctaccccctcagccccggtggggtcggtcagataacccctccactcgggtggcagggccagcctgtctaccctatcaccggagggttcagacagccgtatccatcttcactatctgtggatacatcaatgtcgagattttcccatcacatgattcccggaccacctggccctcatacgaccggtatacctcacccggctattgtgacacctcaggtgaagcaggagcatcctcacactgatagcgatctaatgcacgtgaagcctcagcatgaacagcgaaaggagcaggagcccaaacggccacacattaagaagccactgaatgccttcatgctatatatgaaagagatgcgagctaatgtcgtggccgagtgtactctgaaggagtcagcagcaattaatcaaatccttggaaggaggtggcacgcgctgtcgcgtgaggaacaagctaagtattatgagctcgccagaaaagaaaggcagttacatatgcaactctatcccggttggtcagctcgggataattatggcaagaagaagaaacggaagagagagaagctgcaggagtcagcttccgggaccggccctcggatgacagccgcttacatctag

SEQ ID NO: 29295 - DNA, 1161 bp, synthetic construct
  misc_feature 1..1161: note = Description of Artificial Sequence: Synthetic coding sequence
  source 1..1161: mol_type = other DNA
atgccacaattatcgggaggagggggaggcggtgggggagacccggaattatgtgcaacagacgaaatgatccccttcaaagacgaaggagacccacagaaggagaagatctttgccgagatctctcatcccgaggaggaaggagacctcgccgacatcaagagcagtctggttaacgagtcagagatcatacccgcatcaaatgggcatgaagtagcccgacaggcccagaccagccaagagccgtaccacgacaaggcgagggagcatcccgacgacggaaagcaccccgatgggggattgtacaacaaagggccatcttactctagttatagtggatacattatgatgcccaatatgaataatgacccctatatgtccaacggctctctcagtccacctattccccgaacttccaacaaagtaccggttgtacagccctcccatgccgtccatccgctgactcccctgatcacatactcagacgagcatttctccccagggagccatccctcgcacatacccagtgacgtgaacagtaaacaggggatgtccagacaccctcctgcccctgatatccccactttctacccactgagtcccggtggggtggggcagataaccccaccactgggctggttctcacatcacatgatccccggtcctcctggccctcatacaacaggcatcccccatcctgcaatcgtaacaccgcaggttaaacaggagcaccctcacaccgatagtgacctgatgcacgttaagccacagcacgaacagcgaaaagaacaggagccgaagagaccacacatcaagaaacctctgaacgccttcatgttatatatgaaggagatgcgcgcaaacgtggttgcagaatgcactttgaaggaaagcgccgctataaaccagatcctaggacgcaggtggcacgccctgtcccgcgaggagcaggccaaatactatgagcttgcccgaaaagagcgccagttacatatgcagctctacccaggttggtctgcgagagacaattatgggaagaagaagaagcgaaagagagagaaacttcaagagtcagccagcggtggtaaacgttccagctttcccacgtgtaaggccaaagccgctaccccgggacctctgctggagatggaggcttgctag

SEQ ID NO: 29296 - DNA, 1116 bp, synthetic construct
  misc_feature 1..1116: note = Description of Artificial Sequence: Synthetic coding sequence
  source 1..1116: mol_type = other DNA
atgccacagctctccgggggaggcggagggggaggcggagatccagaactctgcgccactgacgaaatgatcccatttaaagacgagggtgacccgcaaaaggagaaaatctttgctgagatctctcaccctgaagaagaaggagatctggcggatataaaaagttctctcgttaacgaatcggaaatcattccagcgagtaacggacacgaagttgcgcgacaggcccagacatctcaggaaccatatcacgataaggctcgggagcacccggacgacggcaaacacccagacggagggttatacaacaaaggaccctcttacagctcctactctggatatatcatgatgcccaatatgaataatgacccctacatgagcaacggatcattgagcccgccaataccacgaactagtaacaaagtccccgttgtgcagccgtctcatgcagttcaccctctaacccctctgattacttactcagacgagcacttttcacccggatcccatccgtcgcatatcccgagcgatgtcaattctaagcagggtatgagcagacatcctcccgctccagacataccgaccttctatccgctgtccccgggaggtgtcgggcagattacccctcctctggggtggttttctcaccacatgatcccagggcctcccggaccacacactacaggtattccccacccagcgatcgtgacaccccaggtgaaacaggagcatcctcataccgattctgaccttatgcacgtgaagcctcaacacgagcagaggaaagagcaggaacctaaacggcctcacatcaaaaaacccctgaacgcctttatgctgtatatgaaggagatgagagctaatgtggtcgccgagtgcactctgaaggagtctgccgctataaatcaaattctgggacgccgttggcacgccctaagccgagaggaacaggctaagtactacgaattggctcgtaaggagaggcagttgcatatgcagctgtatcctggttggtctgcgagggataattacggcaagaagaaaaagcggaagcgggagaagctacaagaatccgctagcggaactggtcccagaatgacagcagcatacatctag

SEQ ID NO: 29297 - DNA, 912 bp, synthetic construct
  misc_feature 1..912: note = Description of Artificial Sequence: Synthetic coding sequence
  source 1..912: mol_type = other DNA
atggccgaggtggcgaggcaggcccagacgtcgcaggagccctatcatgacaaagcaagggagcatccagatgatgggaagcatccggatggcggattgtataataagggaccttcatactctagctacagcggatatataatgatgccaaacatgaacaacgatccttacatgagtaacggttctctgagtcctcctataccaaggactagcaacaaggtccccgtggtacagccctctcacgccgtccacccattgacccccctaattacatactcggatgagcacttctctcccggttcacacccgtctcacatcccttctgatgtgaactccaagcaaggcatgtctcggcacccacccgcacctgatatcccaactttctatcctctgagccctggcggagtgggacagataacccctccgctcgggtggttctcacatcacatgattcctggtccccctgggcctcacactaccgggatcccgcatcctgcaattgtgacaccccaggttaagcaggaacatcctcacacggattccgacctaatgcacgtgaaaccacagcatgagcaacggaaggaacaggagccaaagagaccccacattaagaaaccattgaatgcattcatgctctacatgaaggaaatgcgagccaacgtcgtggcggagtgcacgctgaaggagtctgccgctatcaatcagattcttgggagaaggtggcatgcactgtcaagagaagaacaggcgaagtattatgaactagctcggaaggagcggcagctgcacatgcagctatatccagggtggagtgctcgagataattacggcaagaagaagaaacgcaagagggagaagctccaggagagcgcatcaggaacaggcccacgaatgactgcagcctacatatag

SEQ ID NO: 29298 - DNA, 1500 bp, synthetic construct
  misc_feature 1..1500: note = Description of Artificial Sequence: Synthetic coding sequence
  source 1..1500: mol_type = other DNA
atgaatgacgacccgagcatggaggagaatggtgtggagcgggtgtgccccgaaagcctgttgcagagcagagagtattcttccttgccgcttccgaggcatactagtagcacggacggtaccatcacctcatctgacccaggtttggagattcttaacatggcgtcctgcgacttggacagaaatagcttgtgcaagaaggaagaagatacacgctctgcctcaccaactattgaagcacagggaacatcacccgcacatgacaacatcgccttccaggactcaacttctaaagacaagaccattcttaacctggaagctaaggaagaacccgagacaattgaagaacataagaaagagcacgctagtggagacagcgtggtcagccccctcccagtgaccaccgtgaaaagtgtgaacctgaggcagtccgaaaacacctccgctaatgagaaggaagttgaggctgaattccttcgattgagcctgggctttaaatgtgattggttcactcttgagaaacgggtgaagttggaggagcgttcacgcgatctggccgaggaaaaccttaagaaggagatcaccaattgcctcaagttgttggaaagcctgaccccgttatgcgaagacgacaaccaggctcaggaaatcattaagaaactcgaaaagagcatcaagttcctgtcccagtgcgcagcacgcgtggcatctagagcagaaatgttaggcgcaattaatcaggagagccgagtctctaaagccgtggaagtgatgatacaacacgtggaaaacctgaaacgtatgtatgcaaaggagcacgccgagctggaagaactgaagcaggtcctcctgcaaaatgaacgctctttcaatcctttagaagacgacgacgactgccagattaaaaaaagaagtgcgtcattgaacagcaagccttcctccctccgacgtgtgactatagcttcactccctcgtaatatcggcaatgccggtatggtggccggaatggagaacaatgatcggttctcccgaagaagctccagttggcggatactcggctctaaacagtctgaacaccggcctagcctccccagatttattagcacatactcatgggccgacgcagaggaagaaaagtgtgagctgaagaccaaggatgactccgaaccaagtggggaagagaccgttgagcgaactcggaagccgtccctcagcgagaaaaaaaacaacccatcaaagtgggacgtatctagcgtgtatgatactatcgcttcatgggctacaaatctgaagtcaagtattaggaaggccaataaagcactgtggcttagcattgccttcattgtgttgttcgccgctctcatgtcattccttaccggccagctctttcagaaaagcgtggatgcggctcccacacaacaggaagattcttggacgagtctagagcatatactctggccgtttactaggttgagacacaacgggccaccgcctgtttag

SEQ ID NO: 29299 - DNA, 1500 bp, synthetic construct
  misc_feature 1..1500: note = Description of Artificial Sequence: Synthetic coding sequence
  source 1..1500: mol_type = other DNA
atgaacgacgatccgtctatggaggaaaacggcgtggaaagggtgtgcccagagtctctcctgcagagtcgcgaatactctagtctacctctaccacgtcacactagctcaacggatgggactatcacctcaagcgatccgggtctggagattctgaatatggcctcctgtgacttagatagaaacagcttgtgtaagaaggaggaggacacaaggtctgccagccctacaatcgaggctcaagggacaagccccgcacacgacaacattgcatttcaagacagtacttccaaagataagaccatcctcaacctggaagccaaggaggagcctgagactattgaggagcataagaaggaacatgcctccggagattctgtcgtgtcgcctttgcctgtgactaccgtcaagtccgtaaacttgcggcaatcagagaacaccagtgccaatgaaaaggaggtcgaagctgagtttcttcggctatcactgggttttaaatgtgattggtttactttggagaaaagggtgaaacttgaggaacgatctcgcgacctggccgaggagaacctgaaaaaggagatcacgaattgcctcaaacttcttgagtcactgactcccttgtgcgaagatgacaatcaggcacaggaaattataaagaagctggagaagagtattaaatttctttcccagtgtgccgctcgggtggcttcaagggcggaaatgttgggcgctattaatcaggagagccgagtgtctaaggcagttgaggtgatgattcaacatgtcgaaaacctgaagcgcatgtatgcaaaagaacacgccgagctcgaagagctgaagcaggtattgttacaaaacgagaggtctttcaatcccctcgaagacgacgacgactgccagattaagaaaagatccgctagtctgaattcaaagccttcctccctgcgcagagtgaccatcgcttctctgcctcgaaatatcggaaacgcaggaatggtggccggtatggaaaataatgacaggtttagccggcgaagctctagctggcgcattctcggttccaagcagagtgagcacagaccaagcttacccagatttatcagcacctactcatgggccgacgcagaggaggagaaatgcgagctgaaaacaaaagacgactcagagccctcgggggaggagactgtggaaaggactaggaagcccagtctgtccgagaagaagaataaccccagcaagtgggacgtgagcagtgtttacgataccatcgcatcctgggccaccaatctaaaaagctcgatccgcaaagctaataaggctctctggttgagtatcgcctttattgttctattcgctgcgctgatgtcctttctcaccgggcaactgttccagaagtctgtagacgctgctcctacccaacaggaagactcttggacatccctcgagcacattctgtggcctttcacacgcctgcggcataacgggcctcctcctgtttag

SEQ ID NO: 29300 - DNA, 1500 bp, synthetic construct
  misc_feature 1..1500: note = Description of Artificial Sequence: Synthetic coding sequence
  source 1..1500: mol_type = other DNA
atgaatgatgatccctctatggaagagaacggcgtcgagagggtgtgtcccgaaagcctgctccagagtagggaatacagttcattgcctctgccaagacacacatcttcaacagatggcacaattacaagctcagaccccggactagagatcttaaacatggctagctgtgatctggaccgcaatagcctgtgcaagaaagaggaagacacacgcagcgcatcccccactattgaagcccaaggcacctctcctgcgcacgacaatatagccttccaggattcaacgtccaaagacaaaacaatcctgaaccttgaagccaaggaggagcctgagacaattgaagaacacaaaaaagaacatgcctctggagattcggtcgtttcacctttacccgtgactacagtcaagagcgtcaatttgcgtcaatcggagaatacatccgcgaatgagaaggaggtggaggcagagtttcttcggttgtcactgggtttcaagtgcgattggttcaccctggaaaaacgggttaaactagaagagaggtcacgcgacctggccgaggagaacctgaaaaaggaaattactaactgcctgaaactacttgagtcactcacacccctgtgtgaagacgataaccaagcacaagaaatcatcaagaaactagagaagagcatcaagttccttagtcagtgcgccgcacgtgtggcgagccgagcggaaatgttgggcgctataaatcaggagagtcgggtgtcaaaggccgtcgaggtcatgatccaacacgtggaaaacttgaaaagaatgtacgctaaggagcatgccgagctggaagagcttaagcaggtgcttctgcagaatgaacgctccttcaacccactggaggatgacgatgactgtcagattaaaaaacggagcgcctctctgaacagcaagccatcctctctccgaagggttacaatcgcttccctgccaaggaatatagggaacgcaggtatggtggcagggatggaaaataacgatcgcttctccaggcggtctagtagctggcgaatcttggggagtaaacagtccgaacataggccttcattacctagatttatatcaacctactcttgggccgacgcagaggaggagaagtgcgagctgaaaactaaagacgattccgagcctagcggcgaagagaccgtcgaacggacgaggaagccgtccctaagcgaaaagaagaataatccatctaagtgggatgtatcctccgtctacgataccatcgccagctgggctacgaacctcaaatcctcaatccggaaggccaacaaagctctgtggctgtctatcgccttcatcgtgttgttcgctgctctcatgtcattcctgacaggacagctgtttcagaaaagcgtggacgcagcccctacgcagcaggaggactcctggacctccttagaacacattctgtggccttttacgcgattaaggcacaacggcccaccccctgtgtag

SEQ ID NO: 29301 - DNA, 234 bp, synthetic construct
  misc_feature 1..234: note = Description of Artificial Sequence: Synthetic coding sequence
  source 1..234: mol_type = other DNA
atgaatgatgatccgagcatggaagaaaacggggtggagcgcgtctgtccagagtcattactgcagtctcgggagtacagcagcctgcccctacccagacacacctcttctaccgatggtactatcaccagcagcgatccaggtctcgaaatactgaacatggcaagttgtgacctagatcgtaattccctgtgcaagaaagaagaggatactaggtctgcctctcccacttag

SEQ ID NO: 29302 - DNA, 27 bp, synthetic construct
  misc_feature 1..27: note = Description of Artificial Sequence: Synthetic coding sequence
  source 1..27: mol_type = other DNA
atgaacgacgacccgtcaatggaatag

SEQ ID NO: 29303 - DNA, 618 bp, synthetic construct
  misc_feature 1..618: note = Description of Artificial Sequence: Synthetic coding sequence
  source 1..618: mol_type = other DNA
atgacacctcccgagcgcctgttcttgccacgggtacgtggtacaaccttgcacctattgttgctggggctgctgttggttctcttgccaggtgctcagggtctacccggagtagggctaaccccttccgctgcgcaaactgccaggcagcatccaaagatgcacctcgctcatagtaccctcaaacccgcagcccacttaatcggtgacccttccaaacagaactccctgctgtggcgggcaaacactgatcgagcttttcttcaagatgggttcagcctgtcaaataatagtctgctggtgcccacatctggcatctatttcgtctatagtcaggtggtgtttagtgggaaagcgtacagtcctaaagctacatcaagtccactgtacctagcccacgaggtacagctgttctcgagccagtacccatttcacgtacctctgttgtcctcacaaaagatggtgtaccccggtttacaggaaccctggctgcacagtatgtatcacggcgcagccttccagctgacacagggcgatcagctttcaacccacaccgacggaatcccccatctcgtcctgagccctagcacggtgtttttcggcgctttcgcactttag

SEQ ID NO: 29304 - DNA, 618 bp, synthetic construct
  misc_feature 1..618: note = Description of Artificial Sequence: Synthetic coding sequence
  source 1..618: mol_type = other DNA
atgacgcctccggagcgattgtttcttcctcgggtgcggggaaccacacttcatctgctgctgttaggcctcctactagttctcctaccaggagcccaggggctaccaggggtcggtttaacaccctctgctgctcagactgcacggcagcatccgaaaatgcatctggcccattctacattgaaaccagccgcacaccttattggcgatccttccaaacaaaactccctgctgtggagggccaatacggatcgggcttttctccaagacggcttttccctgagcaacaacagcttactcgttccaactagtggaatctactttgtctacagccaggtggttttctcaggcaaagcttattcccccaaagcaacctcctctcctttatacctggcccacgaggtacaactgttctccagccaatatcctttccacgtcccactcctgtctagccagaagatggtgtatcctggtctccaggagccatggttacactcaatgtaccatggagccgcattccagctgacccagggcgatcagctgagcacccacacagatgggataccccacttggtcttgtcaccgtcaactgtctttttcggcgcattcgcactttag

SEQ ID NO: 29305 - DNA, 417 bp, synthetic construct
  misc_feature 1..417: note = Description of Artificial Sequence: Synthetic coding sequence
  source 1..417: mol_type = other DNA
atgactccaccggaaagattatttttgcccagggtgcgtggcacaactctgcacctactcttgctgggccttctgcttgtgctgctccccggagcccagggcctgcccggtgtgggactgacacctagcgccgcacaaacagctcgacagcacccaaagatgcacctcgctcactcaactttgaagcccgcagcccatctcattggtgatccttccaagcaaaactcccttctctggcgcgctaataccgaccgagccttcctgcaggacgggttttctttgtcaaacaatagtctcctggtgcctacctcagggatttatttcgtgtacagtcaggggtccagcccacccctcctctggccatttcagcagctgaagtccagtttgataaagagccctgaactatcgaaaaagtag

SEQ ID NO: 29306 - DNA, 2010 bp, synthetic construct
  misc_feature 1..2010: note = Description of Artificial Sequence: Synthetic coding sequence
  source 1..2010: mol_type = other DNA
atggaaggtaacaagctggaggaacaggacagcagccctcctcagagtaccccagggctgatgaagggcaacaagcgcgaggaacagggactgggaccagagcctgcagccccacaacagcctacagccgaggaggaagccctgattgagttccaccggtcctatagagaactgttcgagtttttttgcaataacaccactattcacggcgcaatccggctagtatgtagtcaacataaccgcatgaagacggccttttgggccgttctctggctctgcacattcggcatgatgtattggcagtttggcttgctatttggcgaatatttcagttaccccgtttcgctcaacattaacctgaatagcgacaaacttgtcttccccgcagtcacgatctgcactctcaacccttatcgttaccctgaaatcaaggaggagctggaagaacttgaccgcattaccgagcagaccttgttcgatctgtataagtactcctcattcactacattggtagctggcagcagaagccgaagagatctgcgtggaacacttccacatcctctgcagagactgagagtcccaccgcctcctcacggtgccagacgggctcggagcgtcgcttcgagtctccgtgataataaccctcaggtcgactggaaagattggaagattgggttccagctgtgcaaccagaataagtccgattgtttttaccagacttactcttccggagttgacgccgtcagagagtggtataggttccactacataaacatcttaagccgattacctgaaaccttgcctagcctcgaagaggatacgttgggtaattttatctttgcatgtcgcttcaatcaggtcagctgtaaccaggcaaattatagtcactttcaccacccaatgtacggcaactgttacacattcaatgacaaaaacaactctaatctctggatgtctagcatgccgggaatcaacaatgggctgtcactgatgttgcgagccgaacagaacgattttataccccttctgagcaccgtcaccggggcaagagtgatggtgcatggccaggatgagcctgccttcatggatgatgggggttttaacttgcgccctggcgttgagacgtccatttcaatgagaaaggagaccctggacagactggggggtgattatggcgactgcactaagaacggctctgatgttcctgtcgagaatctgtacccctcaaaatacacgcagcaagtttgcattcactcctgtttccaagagagcatgatcaaagaatgcggctgcgcttatattttctatcccagaccacagaatgtagagtactgtgactatcggaagcactcttcgtggggctattgctactataagctccaagtggacttttcaagcgaccacctggggtgttttaccaaatgccggaagccttgttctgtgacatcttatcagctgagcgctggctatagccggtggcctagtgttacttcccaggagtgggtgtttcaaatgttgtctcgacagaacaattatacggtgaataataagaggaatggcgtcgccaaagtgaacatatttttcaaggaattgaattacaaaaccaattcggagtccccctcagtgaccatggtcacccttcttagcaatctcgggagccagtggtctctgtggtttggctcgtcagtgctgtccgttgtcgagatggctgagctggtgtttgatcttctggtcatcatgtttctaatgctgttgcggcgatttcggagtcgctactggtcgccaggcagaggtggcaggggcgcacaggaagtggcgtctacactggcttccagcccaccatcccatttttgcccacacccaatgagcctgtccctgtcccaacctggaccagcgccatcccccgctttgactgctccgccaccggcttacgccacgttagggcctagaccaagccccggagggagcgcgggagctagttcctcaacgtgcccccttggcggtccatag

SEQ ID NO: 29307 - DNA, 987 bp, synthetic construct
  misc_feature 1..987: note = Description of Artificial Sequence: Synthetic coding sequence
  source 1..987: mol_type = other DNA
atggggctcgaagaaatcgccccttgtaccagtaaaagaaagactcagtgtcggtgccagccaggcatgttctgcgcagcttgggcgctggaatgtacacactgtgagcttctctcggattgcccaccagggaccgaggcggaactgaaggatgaagtgggcaaagggaataaccactgtgtgccgtgcaaagcaggacactttcagaacacatctagccccagtgctcgatgtcagccacacaccaggtgcgagaatcagggactggttgaagccgcaccaggtaccgcacaatcagataccacctgtaaaaatccactcgaacctctaccaccagagatgtctggcacaatgctgatgctggcggtgctactgcctcttgcattcttcctcctcctggcaaccgtgttttcctgtatctggaaatcacatccttcactctgtcggaagctgggctctctcctgaaacgtaggcctcagggggaggggcctaatcccgtagcaggctcttgggagcctcccaaggcccacccctacttccctgacctcgtgcaacccctgctgccgatcagtggagatgttagcccggtgagtacaggtcttcccgcagctcctgtcctggaggccggagtgccacagcagcagagtcccctcgacctcacccgagagcctcaactggaacctggcgagcagtctcaggtcgcccatggaaccaatggcatccacgttacagggggatcaatgaccatcacggggaacatctatatatataacggtcccgtgctggggggtccccctggccctggcgatcttccagcaacgccagaacctccatatccaatacctgaagagggagaccctggaccgccaggtttgagcactccacaccaggaggacggtaaagcctggcatttggcggaaaccgagcattgtggagccacccctagtaaccgtggaccgaggaatcaattcattacacacgactag

SEQ ID NO: 29308 - DNA, 1725 bp, synthetic construct
  misc_feature 1..1725: note = Description of Artificial Sequence: Synthetic coding sequence
  source 1..1725: mol_type = other DNA
atggctctcgcccgtgggagcaggcagctaggtgcacttgtctggggggcatgcctgtgtgtcctggtccacggacagcaagcacaaccaggccaggggtctgacccggcaagatggagacagctcattcaatgggagaataatggacaggtctatagcctactgaattccggtagcgaatatgtgccagctggtccacagcgtagcgagtctagtagccgggtgctgctagctggcgcaccacaagcccaacagaggagatcacacggcagcccacggaggcgacaggcgcctagtttgccattgcccggtcgagtgggcagcgacacagtcagaggacaagcaagacaccctttcgggttcggccaagtgcccgataattggcgcgaggtggccgttggcgactcaaccggtatggccagagccagaacgtccgtgtcccaacagagacatggaggcagcgccagttctgtgtctgcaagtgcatttgctagcacctaccgccagcaaccctcttatccccagcagttcccgtacccacaggctccattcgtgagccaatacgagaattatgaccccgcatcacggacatacgaccagggcttcgtgtattaccggcctgcaggagggggtgtcggcgctggagctgcagctgttgccagcgccggagtaatctacccctatcagccacgcgctagatatgaggaatacggcggaggcgaggagctgccagagtatcctccacaagggttttatccagcacccgaacgtccctatgtgccaccccctccaccacctccagacggcctggacagaagatactctcattcgctgtacagtgagggaacacctggtttcgagcaagcctaccctgaccctggccctgaagctgcgcaggctcatggtggggatccgagactgggctggtatccaccttacgccaatccccctcccgaagcttatggccctccccgtgcactggaacccccatatcttcctgtacgctcctcagatactccacctcctggaggagaacgcaatggtgctcagcaagggagactcagtgtggggtcagtctatcggccaaaccagaacggacggggtctacccgacctagtgcccgaccctaactacgtccaggcctccacctatgttcagcgtgcacacctgtactctctccggtgcgcggcagaggaaaaatgcctggcctcgacggcttacgccccagaggccacagattatgacgtcagggtcctactgcgtttcccacagcgtgtgaaaaatcagggtacagctgatttcctcccgaatcgacctaggcacacctgggagtggcattcctgccaccaacattatcactctatggatgagtttagccattatgacctcttggatgcagccacgggcaagaaggtggccgaagggcacaaagccagcttttgcctggaggattccacctgtgacttcggtaacctaaaaaggtacgcgtgtacgtcccatactcagggtctctctccagggtgctatgacacatataacgccgatattgactgccagtggattgatattactgatgtacagccaggcaattacatcttgaaagttcacgttaatcctaagtacatcgtgttggagtcggactttacaaataacgttgtaagatgtaacatccactacaccggacgctacgtctcagctaccaactgcaaaattgtgcagtcatag

SEQ ID NO: 29309 - DNA, 1311 bp, synthetic construct
  misc_feature 1..1311: note = Description of Artificial Sequence: Synthetic coding sequence
  source 1..1311: mol_type = other DNA
atggctcgcgctcggacttctgtgagccagcaaaggcatgggggttctgcttctagcgtatccgctagcgcgttcgcaagtacatatagacagcagccctcgtacccccaacagtttccgtacccgcaggcacctttcgtctctcagtatgaaaattatgatccagcttctcgcacctatgaccagggattcgtgtactatcgcccagccggtgggggtgtcggcgctggagcggctgccgtcgcctccgcaggtgtgatatatccgtaccagccgcgtgctcgatatgaggagtacggtggcggagaggagctgcctgaatatccacctcaggggttctaccccgcaccggagcgaccttacgtgcctcccccacccccacctcctgatggactcgatcgcagatactctcattcactctactctgagggcaccccaggtttcgaacaggcttatccagaccctggtcccgaggccgctcaagcccacggtggtgatcccaggcttggatggtatcccccttatgcaaatcccccacccgaagcttatggtccccctagggccctggagcctccctacctgccagtgcgctcctctgacacaccacctccaggtggagagcgtaatggagcccaacagggacgactctcagtgggctctgtgtatagaccgaaccaaaatggaagagggcttcccgatctagtacctgaccccaactacgtacaggccagcacctatgtgcagcgcgcacatctctactccctcagatgcgcggctgaggagaagtgcctggcctcaactgcatatgctccagaggccaccgattacgacgtgagggtgctcctgagattcccgcaacgggtgaaaaaccaagggactgccgatttcctaccgaatcggccacggcatacctgggagtggcactcctgtcaccagcactaccactcaatggatgaattctctcattatgacttgttagacgctgctacggggaagaaagtagcggaagggcataaagcttcattctgcctagaggacagtacctgtgattttgggaacctgaagagatatgcctgcacctcccatactcagggcctgtcccctggttgttatgatacttacaacgctgacatcgattgccagtggattgatattaccgatgtccagccagggaattacatactgaaagtgcatgtgaatcctaagtatatcgtcttggagtctgacttcacaaacaatgtggtgaggtgcaatatccactataccggaaggtatgtatcggccaccaattgcaaaatagtccaaagttag

SEQ ID NO: 29310 - DNA, 636 bp, synthetic construct
  misc_feature 1..636: note = Description of Artificial Sequence: Synthetic coding sequence
  source 1..636: mol_type = other DNA
atgaccaccctgacgagacaggacctgaacttcggtcaggtggttgctgacgtgctctgcgaattccttgaagtggcggtacacttaatcctgtacgtgagagaggtgtatccagtgggtatcttccagaaacggaagaaatacaatgtgccggtacaaatgagctgtcatcccgagctgaaccaatatatccaggataccctgcactgtgtcaaacctcttcttgagaagaatgatgtggaaaaggtggtcgtggtgattctcgacaaggaacacagacccgttgaaaagtttgtatttgagataacccagccgccattgctgagtatctctagcgattctctgcttagccacgtggagcaactcctgagagcattcatcctcaagatttctgtgtgcgacgctgtcctggaccacaatcctcccggatgcacttttactgtgctggttcacactcgggaggcagccacacgcaacatggagaagatccaggtcattaaggacttcccctggatactggccgatgaacaggatgtgcatatgcatgatccaagactgatcccgttgaagaccatgactagtgatattttgaagatgcaactttacgtagaggagagggctcataagggctcctag

SEQ ID NO: 29311 - DNA, 318 bp, synthetic construct
  misc_feature 1..318: note = Description of Artificial Sequence: Synthetic coding sequence
  source 1..318: mol_type = other DNA
atgaccacgctcacaagacaggatctcaacttcggacaagtcgtggcggacgtcctgtgcgagtttctggaagtggcggttcacctaatactctatgtccgagaagtctaccccgtgggcatcttccagaagagaaagaaatacaacgttcccgtgcagatgtcatgccacccagagttgaatcaatatatccaagacactcttcactgcgtgaagcctcttctggaaaaggtgcgagtgcactgggcgccacagccttcccatccgatgctgacccctgtaccagtctgctcccagagcaacagcggcatgggatag

SEQ ID NO: 29312 - DNA, 531 bp, synthetic construct
  misc_feature 1..531: note = Description of Artificial Sequence: Synthetic coding sequence
  source 1..531: mol_type = other DNA
atgaccactctaacccgccaggacctgaattttggccaggtggtggcggacgtcttatgtgaattcctcgaggtggccgtacatttgatcctgtacgtcagggaggtgtatcccgtcggaatcttccagaaaagaaaaaaatacaacgtacccgttcagaatgatgtggagaaggttgttgtggtgatcttggataaagaacacaggcccgtagagaagtttgtctttgaaatcacccagcctcccctcctctcaatcagttctgatagtctgctcagccatgtggaacaactcctccgcgcatttattttgaaaatttcggtgtgcgatgcagtgctggaccacaatccgcctggggtgagcacaccacaccccctcttcccttggcactttcatgggtacctgggccttgtgtgtgtgcctaggtctatgttcggctgcagcgagacccacctgttcctgactttgagggtacacctgctttgggaagccagcctgatagattccacttggctgcccagtccatactag

SEQ ID NO: 29313 - DNA, 636 bp, synthetic construct
  misc_feature 1..636: note = Description of Artificial Sequence: Synthetic coding sequence
  source 1..636: mol_type = other DNA
atgactacgttgacaaggcaggatttgaactttgggcaggttgttgcagacgttctatgcgaatttctggaggtcgcagtgcacttgatactgtatgttagagaagtctaccccgttggcatctttcaaaagcgcaaaaagtacaatgttcctgtccagatgtcttgtcatccagagctcaaccagtacatccaggacacgctgcactgcgtgaagcccctgctggaaaaaaatgatgtggaaaaggtggtggtagtcatcctcgacaaggagcaccgacccgtcgagaagttcgtgtttgagatcacccagccaccactgctgtctatctcatcagacagcttgctttctcacgttgagcagcttttgcgggctttcattctcaagatcagcgtgtgcgacgctgtgctcgatcataatccaccgggttgtaccttcacagtccttgtgcataccagggaggctgctacgcggaacatggaaaaaattcaagtgataaaggattttccatggatcctagcagacgaacaggacgtccatatgcacgatccaagacttattcccttgaagacgatgacaagcgatattctcaagatgcagctttacgtagaggaacgcgctcacaagggctcatag

SEQ ID NO: 29314 - DNA, 675 bp, synthetic construct
  misc_feature 1..675: note = Description of Artificial Sequence: Synthetic coding sequence
  source 1..675: mol_type = other DNA
atgaccactttaacacgccaagacctaaatttcggccaggtcgtcgcggacgtgctgtgcgaattcctggaggtggcggtccacctcattctgtatgtcagggaggtatatccagtcgggatcttccagaaacggaagaagtataatgtgcctgtgcagatgagctgccatccagaattgaaccagtacattcaggacacactgcactgcgttaagcccctcctggagaagaacgacgtggaaaaagtggtggtggtcatcctcgataaggaacacagacccgtggaaaaattcgtgtttgaaatcactcaaccgcctctgctgtccatacgatgggccgcacctgccccaagaccactcgcaggcatttctagcgattccttactgagccacgtcgagcagctgctacgggcatttatactgaagatttctgtgtgcgatgctgtgcttgatcacaaccctcccggatgcacattcaccgttttagtgcatacacgggaagccgctacacgcaatatggagaaaatccaagtgataaaggattttccttggatcctggctgatgagcaggatgtccatatgcatgatccacgcttaattcccctgaaaactatgacatctgacattcttaagatgcagttatatgtcgaagaacgggcacataagggctcatag

SEQ ID NO: 29315 - DNA, 675 bp, synthetic construct
  misc_feature 1..675: note = Description of Artificial Sequence: Synthetic coding sequence
  source 1..675: mol_type = other DNA
atgacaaccctgactcgtcaggacctcaatttcgggcaggtggtagccgacgtactgtgcgagttcctggaggtcgccgtccacctgatcctctacgtccgcgaagtataccccgtgggcatattccaaaaaaggaagaagtataatgtgcccgtccaaatgagttgccacccagagcttaaccagtatattcaggacacactccattgcgtaaaacctctgctggagaagaacgacgttgaaaaggtggtcgtggtgatcttggacaaagagcatcgacccgtggagaagtttgtgtttgaaatcactcagccgcctctactgtctatccgctgggccgcacctgcgcctcggcctcttgccggtatttcatcagacagtctactgagccatgtggaacaattgctgcgagccttcattctgaagatctcggtgtgcgacgcagtgcttgatcataatccccctggatgcacatttaccgttctggtgcacacacgcgaggcggcaactagaaatatggaaaagatccaggtcattaaagacttcccatggattcttgccgacgaacaggacgtgcatatgcatgatccacgcttgatcccgctgaagaccatgacatctgatatattaaagatgcaactctacgttgaagagcgcgcacacaagggtagttag

SEQ ID NO: 29316 - DNA, 636 bp, synthetic construct
  misc_feature 1..636: note = Description of Artificial Sequence: Synthetic coding sequence
  source 1..636: mol_type = other DNA
atgaccacactaacccggcaggatctgaacttcggccaagtggtggctgatgttctgtgcgagtttctggaagtggcggtccacttaatcctgtacgtccgggaagtctacccagttgggatttttcagaagagaaagaagtacaacgtgcccgtccagatgtcttgccacccggaattgaaccaatacatacaagacacacttcattgtgtcaagccactccttgagaagaacgatgtcgagaaggtggttgtggtgattctggataaggagcatagaccggtggaaaagttcgtctttgagataacacagccccctctcttgtccatttcctccgattctctcctgtcccatgttgaacaacttctgagggccttcatactgaaaatcagtgtttgtgacgccgttcttgaccataatccaccaggctgtacatttactgtgttggtgcatacacgtgaggccgctacccgcaatatggagaagatacaagttattaaggatttcccgtggattctggcagacgaacaggatgtgcacatgcacgacccaagactgatccctctgaagaccatgacatctgacatactcaagatgcagttgtatgttgaggagcgcgcacataaggggagctag

SEQ ID NO: 29317 - DNA, 597 bp, synthetic construct
  misc_feature 1..597: note = Description of Artificial Sequence: Synthetic coding sequence
  source 1..597: mol_type = other DNA
atgaccaccctcacccgccaggacctcaacttcggacagggaagagaagccggaccagcagggcctggggctggggcatccgggcctgccggatttttagagagagctactgggctgtgtccacccgcagtagttgccgacgtgctgtgtgagttcttagaggttgccgtccacttgattctatatgtgagagaagtctacccagttggaattttccagaagcggaaaaagtacaatgtgcccgtgcagatgtcgtgccacccggagcttaaccagtacatccaggataccctccattgcgtgaaaccgctcctggagaaaaatgatgtggagaaagtcgtggtggttatcttggacaaagagcatagacccgtcgaaaagttcgtcttcgagatcactcagccacccttactgagcatctcatctgatagcttattgagccacgtggaacagctgttgcgggcttttatcttaaaaatttcagtctgcgacgccgtcctagaccataatccacctgggtgcaccttcacggtgctagtgcacacaagagaagctgctacccggaacatggagaagattcaggtgatcaaggtatag

SEQ ID NO: 29318 - DNA, 504 bp, synthetic construct
  misc_feature 1..504: note = Description of Artificial Sequence: Synthetic coding sequence
  source 1..504: mol_type = other DNA
atgaccactttgacgcggcaggatctgaactttggacaggtagtagccgacgtcttgtgcgagttcctagaggttgctgtgcacctcatcctgtatgtccgggaggtgtaccctgttggtatctttcagaaacgaaagaaatataacgtaccggtccagatgagttgtcatcccgaactgaatcagtacattcaagacaccctacattgcgtcaagccgttactggagaagaacgatgtggaaaaggtcgttgtggtgatattggacaaggaacacagacccgtggaaaaattcgtctttgagattactcagcctcccctccttagcatctcctccgactctctgctgtcacacgtcgagcagttactgagggcgttcatactcaaaatatccgtatgcgacgcggtactggaccacaatccccctgggtgtaccttcacagtgctcgtacacacaagagaggctgcaactaggaatatggagaaaatccaagtgattaagtag

SEQ ID NO: 29319 - DNA, 3159 bp, synthetic construct
  misc_feature 1..3159: note = Description of Artificial Sequence: Synthetic coding sequence
  source 1..3159: mol_type = other DNA
atggcaggaatggattccgggaacctgaaaaccgccaggttgtggcgagatgcagcactccgtgcccgaaagttacgctcaaatctccgtcaacttactctgacagctgccggagcgtgtcccggtgccggtgcagatgccctcgagtcccccgcatctccccagttggtgctcccagcgaacctgggcgacatcgaagctttaaacctgggcaataacggtctggaagaggttcccgagggtttggggagcgccttgggctctctgcgggtccttgtactcagaaggaaccgcttcgcgagactgcctccagccgtggcggaacttggccaccatctcactgaattagacgtgagccataaccggcttaccgcgctcggggctgaggtagttagcgcactaagagagcttcgtaagctaaacctgagtcataaccagctgccggctctacctgcccagcttggcgcactggcacatctggaggaactggacgtctcattcaaccggctcgcccatctcccggactctctttcttgtctttcccgcctccgcacccttgacgtcgaccacaatcagctgaccgccttcccaagacagcttttgcagttagtggcactcgaggagctcgatgtttcttccaatcgtcttcggggattgcccgaagatatctccgctctccgagctctaaaaattttgtggctttctggggctgaattaggcaccctccctgctggcttctgtgagctcgcctcactggagagcctgatgctggataataacgggctgcaggccttacctgcccagttttcttgtctgcaaagactgaagatgctgaatttgagctctaatttgtttgaggagttccccgcagctctgctccccctggccggtctcgaagagctttacttatcaaggaatcagctgacctctgttccgagtctgatctctggcttagggcgtctgctaactttatggttggataacaatcgaattcgatacttgccagacagtatcgtcgagttaaccggacttgaagagctcgttttacagggaaaccagattgccgtccttcccgatcatttcggacagcttagcagagtgggcctgtggaagatcaaggataacccgctcatccaaccaccttatgaagtgtgtatgaaggggatcccttacatcgctgcctaccagaaagaattagctcactcgcaaccagctgtgcagcccaggctgaaactccttttgatggggcacaaggcagccggaaaaactcttttgcgccactgcctgacagaggaaagggtcgagggatgccctgggggtggagacaaagaaaaatgctacccccctagcccgccacccgtgagcaagggcatcgaagttacttcttggactgcggacgcttccagagggctgcgcttcattgtctacgatctggctggcgacgagagctatgaggtcattcagcctttttttttgtctcccggtgcactctatgtactagtggtgaatcttgcgacatatgaacccaggcattttcccacaacagtcgggagtttcttacacagagtgggagcaagggtacctcatgctgtggtctgcattgttgggactcacgccgacttgtgtggcgagcgggagctcgaagaaaaatgcctggatatccatcgtcagatcgcacttcaggaaaagcacgacgccgaaggtttgtctaggctggctaaagtggtggacgaggccctggctcgcgactttgaactaaggagtgcaagcccccacgccgcatattatggcgtttcggacaaaaatctgagaaggcgtaaggctcactttcagtacctattaaaccacagactgcaaattctaagccccgttctgcccgtttcgtgccgtgatccgagacacctgcggagacttcgagataagctgttaagcgttgcagaacacagggagatctttccaaacctgcatcgcgtgttgcccaggtcatggcaggtgctggaagagctccactttcaaccccctcaggcccagaggctgtggctgagctggtgggacagcgcgagactggggctacaggccggtctgactgaagataggctccaatcggctctcagttacctccacgagagcggaaaactcttatattttgaggactctcctgcactgaaggagcacgttttccacaacctgacacggctgattgatatccttaacgtcttctttcagagggacccgtccctcttgctccataaactcctgcttggcactagtggcgaaggtaaagctgagggagagtcttcccccccaatggctaggagcacccccagtcaggagctgttgcgcgcaactcaactgcaccaatacgtggagggattcctcctgcacggtctgctacccgcacacgtgatcaggctcttgctcaagcctcacgttcaggctcagcaggatctccagctgctgctggaattgctggagaagatgggactctgttattgtctgaataagcccaagggaaagcctcttaatggcagtacggcttggtacaaatttccctgttacgtccagaacgaggtgcctcatgcggaggcatggattaacgggacaaatctcgcagggcagagtttcgttgctgaacagcttcagattgaatatagttttccctttacttttccactgggactgtttgcgagatacagtgtacagatcaattcccacgtggtgcataggtcagatggaaagttccagatattcgcttaccgcggaaaggtgccagtggtggtgtcatatcggccagcccgaggcgtgctgcaaccagacactttgagcattgctagtcatgcgtcactcccgaatatttggaccgcctggcaggcaatcactccactcgtcgaagaactcaacgtcttactccaagagtggcccggactccactataccgtgcatatcctgtgcagtaagtgcctgaagaggggctcaccgaacccccacgcgttccccggagagctcttatcacaaccacgcccagaaggagtggccgagatcatctgccccaaaaatgggtccgagagagtgaacgtcgccctagtgtatccacctacacctactgttatttctccctgctcgaagaagaacgtgggtgagaaacaccgaaaccagtag

SEQ ID NO: 29320 - DNA, 549 bp, synthetic construct
  misc_feature 1..549: note = Description of Artificial Sequence: Synthetic coding sequence
  source 1..549: mol_type = other DNA
atgggtaagggtaggtttgacgaaaaggaaaacgtgagtaactgtatccagttgaaaacctccgtgattaaaggcatcaagaatcaacttatagagcagtttcccggaatcgaaccctggctgaaccagatcatgcccaaaaaggatcctgtcaaaatcgtcaggtgtcacgagcacattgagatcttgacggtgaatggcgaactcctgttcttccgccagcgcgagggacctttctatcctactttgcggctgcttcataagtatcctttcattcttccacaccagcaggtcgataagggagctattaagttcgtgctgtcaggggcaaacatcatgtgtcctggacttacctcgccaggggctaaattgtatcccgctgccgttgacacaatcgtcgcaattatggccgaggggaagcaacacgctctctgcgttggtgttatgaagatgagtgcagaagatattgagaaagtcaataaggggatcgggattgagaatatacactatctcaacgacggtctttggcacatgaagacatataaatag

SEQ ID NO: 29321 - DNA, 546 bp, synthetic construct
  misc_feature 1..546: note = Description of Artificial Sequence: Synthetic coding sequence
  source 1..546: mol_type = other DNA
atgttcaaaaagttcgatgagaaagagaacgtttctaactgcatccagttgaagacttctgtaattaagggtattaagaatcagttgattgagcagtttcctggtatagaaccctggctgaaccagatcatgcctaagaaggatccggtgaaaatcgttaggtgccacgagcatatcgaaatattgacagtaaacggagaacttctgttttttaggcaaagggaaggaccattctaccctacgctgcgactgttgcacaagtatcctttcatcctcccccatcagcaggtggataagggagctatcaagttcgtgctgtctggcgcaaacattatgtgcccaggactgacatcacccggagccaaactgtatccggctgccgtcgacaccattgtagctattatggccgaggggaagcagcatgctttgtgcgtgggagtgatgaaaatgtctgcggaggatattgagaaggtaaataaggggattggtatcgaaaacattcactatctgaacgacggcctctggcacatgaagacctataaatag

SEQ ID NO: 29322 - DNA, 2226 bp, synthetic construct
  misc_feature 1..2226: note = Description of Artificial Sequence: Synthetic coding sequence
  source 1..2226: mol_type = other DNA
atggccctgttcaccccatggaagctgtcatctcaaaaactgggattttttcttgtcacttttggcttcatctggggcatgatgctgctacatttcacaattcagcagaggacacagcccgaatctagcagtatgctgcgggaacagattctcgacctgtctaagcgttatataaaagctttagctgaggagaataggaacgtggttgacggaccttatgctggggtcatgactgcttacgatttgaaaaagaccctggcagtgctcctggataacatccttcagcggattggcaagttagaaagtaaagtggataacctggttgtgaacgggacaggaactaattcaacgaacagcacgacagccgtgcctagcctggttgcgctggaaaaaatcaatgtggctgacattattaatggggctcaggaaaagtgtgtgctgcctcccatggatggctatccccattgcgaggggaaaatcaagtggatgaaggacatgtggaggtcagacccgtgctatgccgattatggcgttgatgggtctacctgctcttttttcatctacctttccgaggtggagaactggtgcccccacctgccatggcgggctaagaatccgtatgaagaagcagaccacaattcactcgccgagatacgcacagatttcaatattttgtattctatgatgaagaagcatgaggaatttaggtggatgcgtctgaggattagaaggatggctgacgcatggatccaagcaatcaagtctctggccgagaagcagaatcttgaaaaacggaagagaaagaaggtattggtccatctgggcttgctgacaaaagaatcaggatttaaaattgctgaaaccgcattttcaggcggacctctgggtgaacttgttcaatggtctgatcttatcactagcctgtatttgctgggtcacgatatccggatttcggcttccctggcagaattgaaggaaattatgaaaaaggtagtcgggaaccggagcggctgccctacagtcggggatagaatcgtggagctgatctacattgacatcgtaggcctggcccaatttaagaagactctcggaccatcatgggtgcattatcagtgtatgctccgtgtgctggactcatttgggactgaacctgaattcaatcatgctaactacgctcaaagcaagggacataagacaccatggggcaagtggaatctgaaccctcagcagttttacacgatgtttccgcacacccctgataacagttttctcggcttcgtggtggagcagcatctgaacagctccgacatccaccacatcaacgagattaaaaggcagaaccagagtcttgtttacggcaaagtggattccttttggaagaacaaaaagatctacttggacataattcacacctacatggaagtgcacgcgaccgtctatgggagttctacgaaaaacataccgagttatgttaaaaatcacggcatccttagcggcagggacctgcagtttttactccgcgagaccaaactctttgtgggactgggattcccctatgaaggacctgcacctttggaagcaatcgccaacgggtgcgctttcttaaatcccaagttcaacccaccgaaatcatcaaagaataccgacttcttcattggcaaaccaaccctgcgggagcttacatcgcaacacccctatgctgaggttttcattgggcgaccccatgtgtggaccgttgaccttaataatcaggaggaggtggaggacgctgtaaaggcgatcttaaaccagaaaatcgaaccctatatgccatatgagttcacctgtgaggggatgttacagcgcatcaacgctttcatcgagaaacaagatttttgccacggtcaagtgatgtggcctccactctcagcccttcaagtcaaacttgccgagcccggacaatcctgtaagcaagtttgccaagaaagtcaacttatttgtgagccatcatttttccagcatctcaataaggataaggatatgctaaaatacaaggtgacctgccagtccagtgaattggccaaggatattctggtaccttctttcgatcccaaaaacaagcactgcgtgtttcaaggggatctgctccttttcagctgtgccggagcccacccccgtcaccagcgtgtctgtccttgcagagacttcatcaaaggtcaggtggccctctgcaaagattgtctgtag

SEQ ID NO: 29323 - DNA, 2226 bp, synthetic construct
  misc_feature 1..2226: note = Description of Artificial Sequence: Synthetic coding sequence
  source 1..2226: mol_type = other DNA
atggcactgttcactccctggaagctgtcatctcagaaactcggcttcttcctggttacctttggatttatttggggaatgatgttactccacttcactatacaacaacgcacacagccagagagctcttccatgttaagagagcagatcctggatttatccaagcggtatattaaggcactcgctgaggagaatcgtaacgtggtggacggcccatatgcaggagtgatgacggcctacgacctgaagaaaaccctggccgtccttctcgacaacatactgcaacggattggaaagctggagtccaaggtagacaaccttgttgtcaacggcaccggtacgaactccaccaactccacaacagcagtacctagccttgtggccttagagaagatcaatgtggctgatatcattaatggcgctcaggagaaatgtgtcctgccccctatggatggctaccctcactgcgagggtaaaatcaaatggatgaaagacatgtggagatcagatccgtgttatgctgactatggggtcgatgggagtacttgcagtttcttcatctacctttccgaggttgaaaattggtgtccccacctgccgtggcgcgcaaaaaatccttatgaagaggctgaccacaactcacttgcagaaattcgcaccgactttaatatcctatactcaatgatgaaaaaacatgaggaatttaggtggatgagactgcgtatacgccgtatggctgatgcctggatccaagctatcaaatcactagcagagaaacaaaatctggaaaaaaggaagaggaagaaggtgctggttcacctgggcctccttaccaaagaaagtgggtttaagatagccgaaaccgcattctctggcggaccactcggggaattggtacaatggagcgatctcatcacaagtctgtatctgctcggccatgacatccgaattagtgcttccctggctgagctaaaagaaattatgaagaaggtggttgggaatcggtcgggatgccctaccgtgggggataggatcgttgaactaatctatattgatattgtaggcctcgcgcagttcaagaaaaccctcggaccttcttgggtgcattatcaatgtatgctccgcgtcttagacagcttcgggaccgagccagaattcaaccacgcaaattatgcccagtcaaaaggacacaaaactccatgggggaagtggaacctgaaccctcaacagttttatacaatgttcccccacacacctgataacagcttcctgggctttgtggtggagcagcatctgaattctagtgatatacaccacatcaacgaaatcaagcggcaaaaccagtcattggtttatggaaaagtggattcattctggaagaacaagaaaatatatctagatatcatccacacttacatggaggtccacgccactgtttatggctctagtaccaagaacattcccagttatgtgaagaaccacggaatattaagtgggcgagacctccaatttctgcttagggagacgaagctgtttgtcgggcttggtttcccttatgagggccctgctccactggaagccatcgcaaatggctgcgcattcctgaacccaaaatttaatcccccaaagagcagcaaaaatacagatttttttatcggaaaaccaacacttagagaactgacttcacagcacccttacgccgaagtgtttattggaagaccgcacgtgtggactgtcgatttgaacaaccaggaggaagtcgaggatgccgtgaaggctattctgaatcagaagatagagccttatatgccgtacgagttcacgtgtgagggcatgctccaaaggataaatgccttcatagagaaacaagacttctgccacgggcaggtgatgtggcccccactcagcgcccttcaagtcaagcttgcagagccaggacagtcatgcaagcaggtctgccaggagtcccagctcatctgtgagccttcatttttccagcacctgaacaaagacaaagacatgttgaaatacaaggtgacttgtcagtcttcagaactggcaaaagacattctagtgcccagtttcgacccaaaaaacaaacattgtgtcttccaaggcgacttgctcctgttcagttgtgcaggtgcacatccaaggcaccagcgggtatgcccctgccgagactttatcaagggtcaggtggccttatgcaaggattgcctgtag

SEQ ID NO: 29324 - DNA, 1410 bp, synthetic construct
  misc_feature 1..1410: note = Description of Artificial Sequence: Synthetic coding sequence
  source 1..1410: mol_type = other DNA
atgcactcttttcccccactgttgctcctgctattttggggagtggtgtcccattcctttccggctacgctagaaacccaggaacaagacgtagacctcgtgcagaagtacctagagaagtattataatcttaagaacgacggcagacaggtagagaaacgaagaaatagcgggccagtagtagaaaagctaaagcagatgcaggagtttttcgggctgaaagtgaccggcaaacctgacgcagagacccttaaagtgatgaagcaaccaaggtgcggcgtcccagacgttgcccagtttgtgctgactgaaggaaacccccgttgggagcagacacacttgacatatagaattgaaaattatacgccagacctgcctcgcgcagacgtagatcacgccatcgagaaggcgtttcaactctggtcaaacgtgacccctctgacgtttacgaaggtaagcgaggggcaggctgatatcatgatatcctttgtaagaggagatcacagggataattcgcctttcgatggccctggcggtaatttggcacacgctttccagcccggtcccggaattggtggcgatgctcacttcgatgaagacgagaggtggaccaataatttccgcgagtacaacctgcacagagtggccgctcacgagctgggacacagcctggggctgtcgcactccaccgacatcggcgctcttatgtacccgagctatacattttcaggcgatgtccagctggcacaggatgatatcgacgggatacaagccatctacggcaggagtcaaaaccctgtgcagcccatcgggccacagactcctaaggcctgtgacagtaaactcacttttgatgccattaccacaatcagaggcgaggttatgttttttaaggacaggttttacatgagaacaaatcctttctaccctgaggtggagctgaacttcatttctgttttctggcctcagctacccaatggtctggaggccgcttacgaattcgccgacagggatgaggtcaggtttttcaagggaaataagtactgggcagtgcagggtcagaacgtgcttcacggctatcctaaggacatatattcttctttcggctttcctagaaccgtgaagcacatagatgcagccctgtctgaagagaatactggcaaaacctattttttcgttgccaataaatactggaggtatgatgagtacaaaaggagcatggaccccggttacccgaagatgatcgctcacgatttcccaggtattggacacaaagtagacgcggtcttcatgaaggacggctttttttactttttccacgggacacgccaatacaagtttgatccaaaaaccaagagaattctgactctgcaaaaggctaactcatggtttaactgcaggaaaaattag

SEQ ID NO: 29325 - DNA, 1431 bp, synthetic construct
  misc_feature 1..1431: note = Description of Artificial Sequence: Synthetic coding sequence
  source 1..1431: mol_type = other DNA
atgatgcatctcgcctttctggtcttactgtgccttcctgtttgcagtgcctatcccctcagtggggcagctaaggaggaggactctaacaaagacctggcgcagcagtacctggaaaaatactacaacctcgaaaaagatgtgaagcagttcaggcgaaaggacagtaacctgatagtcaagaagatccaaggtatgcaaaaattccttggcttagaagtgaccggcaaactggatacagataccctggaggtcatgaggaagcccaggtgtggagtgcccgacgttggtcatttttcttcgttccctgggatgcccaaatggcgcaagacacatttgacctatcgcattgttaattatacgccagatttaccacgagatgcagtggattctgccattgagaaggctctgaaagtctgggaggaggtgactcctttgacgttctcacggttgtatgagggtgaagccgacatcatgatctcatttgctgtcaaggagcacggggatttttactctttcgatgggccagggcactccctggcgcacgcatatcctcctggccctgggctgtacggcgacatccactttgacgatgacgaaaagtggaccgaggacgctagtggcactaatctgtttctggtagccgctcacgagttaggccatagccttgggctttttcattctgccaataccgaagccctcatgtatccactgtacaactcctttactgagctcgctcagtttagattgagtcaggacgatgtgaacggtatacagagtctgtatggaccccctcccgcttccactgaggagcctctagttcccacaaagagtgtaccttctggatccgagatgcctgcaaagtgcgaccccgcactctcattcgacgctattagtaccctcagaggtgagtacttgtttttcaaggatcgctacttctggagacggagtcattggaatccggagcctgagtttcacctgatcagcgccttctggcccagcttgcccagctacttagatgcagcatatgaagtgaactcccgagacaccgtatttatctttaaaggcaatgagttctgggccattcgcggaaatgaggtacaggctggctaccccaggggcatacataccctgggattccctcctacgatccgaaaaatagatgctgcagtctcagataaggaaaagaagaagacctatttttttgcagctgataagtattggcgtttcgatgagaactcccagtctatggagcagggcttccctaggttgattgctgatgattttcctggggtggagcccaaggttgatgccgtcctccaggcattcggcttcttttacttcttcagtggatctagccagttcgagtttgaccctaacgccaggatggttacacacattctgaaaagtaactcctggttacactgttag

SEQ ID NO: 29326 - DNA, 930 bp, synthetic construct
  misc_feature 1..930: note = Description of Artificial Sequence: Synthetic coding sequence
  source 1..930: mol_type = other DNA
atgcctcgacactgtagcgcggcagggtgctgcacgagggacactcgagagaccaggaatagaggaataagtttccaccggctaccaaagaaagacaatcctcgtcgtggactctggctcgctaactgtcagcgcctcgacccgagcggccagggtctttgggatcctgcgtccgagtacatatatttttgctcaaagcactttgaggaggactgtttcgagctggtgggcatttctgggtaccacagactgaaggaaggcgctgtacccaccatcttcgagtcctttagtaagctcaggcgaacaactaaaacgaagggtcacagttatcctcccggacctgctgaagtctcaaggctgaggcggtgtagaaaacggtgtagcgaaggcagaggcccaactactccattctcaccaccaccgcctgcggatgtaacttgctttcctgtggaagaagccagcgcgccagctacgctgccagcgagcccggcaggcaggttggagcccggtttgagctccccattctccgatctgctgggcccactgggcgcacaggctgacgaggccggatgttctgcgcagccttctcccgagagacagccgagccccttggagcctagacctgtgtctccatccgcttacatgctgcggctgcctccgccagcaggcgcttatatccaaaacgagcactcctaccaggtggggtcagcactcctctggaagaggcgcgctgaagccgcactcgacgctttggataaggcacagcgtcagcttcaggcatgtaagcgcagggaacaacgccttagactgcgactgacgaaactccagcaagagcgagcaagagagaagcgcgctcaggctgatgccaggcagaccttaaaagaacatgttcaggactttgcgatgcagctctcaagttcaatggcctag

SEQ ID NO: 29327 - DNA, 1416 bp, synthetic construct
  misc_feature 1..1416: note = Description of Artificial Sequence: Synthetic coding sequence
  source 1..1416: mol_type = other DNA
atgcatcccggtgtgcttgcggcattcctgttcctgagctggactcattgccgcgcattgcccttgccatcgggtggggacgaggacgacctaagtgaagaggatctgcagttcgcggaacgttatttgagaagctactatcatcccaccaatttagccggtatccttaaggagaatgcagcttcctccatgaccgaacgactcagagaaatgcagagcttctttggcttagaggtcacgggcaaactagacgacaatacgctggacgtgatgaaaaaacctagatgcggagtgcccgacgtgggggagtacaacgtatttccgaggaccttgaagtggagcaagatgaacctaacctaccgaattgtaaattacacacccgatatgacccactcagaagtggagaaagcatttaagaaagcattcaaagtctggtcagacgtcacgcccctgaattttacccggcttcacgacggaatagctgacattatgatcagctttggaatcaaggaacacggtgacttttacccgtttgacggaccgtccgggctattggcacatgccttcccgccagggcctaattatggaggcgacgctcatttcgacgacgatgaaacttggacatcgtcttccaagggctacaacctgtttctggttgcagcacacgagttcggacattctcttggattggaccattcaaaggaccccggagcactcatgtttccaatttatacctacacaggaaagtcccactttatgctgccggatgacgacgttcagggtatacaatccctctacggaccgggagacgaggaccctaaccccaagcaccctaagactcccgataaatgcgaccccagtctgtccctggacgctatcactagtctaaggggggagactatgattttcaaagataggtttttctggaggctccaccctcagcaagtcgatgctgagttgtttctcacaaaatccttttggccagaattacccaataggatagatgctgcctacgaacaccccagccacgatctcatatttatcttccgagggaggaagttctgggcactcaacggatacgacatcctagaaggctaccctaagaagattagcgaactcgggttgcccaaggaggtaaaaaagatcagcgccgcagtgcatttcgaggacacaggcaagactctgctgttcagcggtaatcaagtgtggaggtatgacgacacaaaccatatcatggacaaggattaccccagactcatagaagaagatttccctggcataggtgacaaagtggatgcggtgtacgagaagaatggctatatttattttttcaacgggcctattcagttcgagtactccatatggtccaaccggatcgtgcgggtgatgcctgctaactctatcctgtggtgctag

SEQ ID NO: 29328 - DNA, 1470 bp, synthetic construct
  misc_feature 1..1470: note = Description of Artificial Sequence: Synthetic coding sequence
  source 1..1470: mol_type = other DNA
atgcatccaggagttttagcggctttcctttttctgagctggacacactgcagagcactcccactcccaagtggaggcgatgaggatgatttgagtgaggaagacctacagttcgccgagcggtatctgcgaagttactatcatcccactaatctggcgggtatccttaaggaaaacgccgcttcttctatgaccgaaaggctgcgcgaaatgcaaagcttttttggcttagaggtaacggggaagcttgatgataacacgctggatgtcatgaaaaaacctcgatgcggggtgcccgacgtaggtgagtataacgtgttccctcgcacactgaagtggtctaaaatgaatctgacctaccggatagtgaattacacccctgacatgacacacagcgaagtcgagaaagcttttaagaaggcttttaaagtctggagtgacgtgacgcccctgaacttcacacgtctgcacgacgggatagcggatatcatgatatccttcggcattaaagagcatggggatttctatccttttgacgggcctagtgggctgctcgcacacgccttccctcccggtcccaattatggaggcgacgctcactttgacgatgacgaaacttggacatcttccagtaagggatacaaccttttcctggtggccgctcacgagttcggccattctttgggactggatcattcgaaggatccaggggctctgatgttccccatttatacatacacaggcaagagtcatttcatgttgccagacgacgacgtccagggcatccagtctctgtatggacccggagacgaggaccccaacccgaaacacccaaaaacgcctgacaaatgtgacccttccctgagcctcgatgccataacttccctgcgtggagaaaccatgatctttaaagaccggtttttctggagattgcatccccagcaggtcgacgctgagttgtttctgacaaagtccttctggcctgaactgcctaaccgtatagatgccgcatatgagcatccctcccacgacctgatctttatcttccgcggtaggaaattttgggcactgaacggatatgacatcctggaaggctaccctaaaaagattagcgagctgggcttacctaaggaagttaaaaaaatcagcgcagccgtccatttcgaggataccggaaaaacactactcttctcagggaatcaggtttggcgttatgacgacaccaatcatataatggataaagattatcctcgactcatcgaggaggattttcccggaattggtgacaaggtggacgcggtgtatgagaaaaatgagagccatagtgttacccaagctggcgtgcactgtcgaaatctatctagtctgcagccgccaccacccggattcaagagattttcttgcctgagcctttggtcatcctgggactatagactttacctgttctttcagcggacccatacagtctag

SEQ ID NO: 29329 - DNA, 1152 bp, synthetic construct
  misc_feature 1..1152: note = Description of Artificial Sequence: Synthetic coding sequence
  source 1..1152: mol_type = other DNA
atgcaccccggagttctcgcagccttcctatttctgtcctggactcattgtagggcactcccactgccgtctggaggcgacgaggatgacctcagtgaggaagaccttcagttcgcagaacgctacctgagaagctattatcaccctaccaatctggccggaattctgaaagaaaatgcagcgtctagcatgaccgagaggctgcgcgagatgcagagcttctttgggcttgaggtgacaggaaagctggacgacaatactttggatgtgatgaagaagccacggtgcggcgtgcctgatgtgggcgaatataatgtcttccccagaacccttaagtggtcgaaaatgaatctgacctatcgaatcgttaactacaccccagacatgacccactcagaggtggagaaggcatttaagaaagcgttcaaagtgtggagcgatgtgacgccactgaacttcacaaggctgcatgatgggatcgctgacattatgattagtttcggtatcaaggaacacggggacttctatcctttcgatggcccttcaggacttctcgctcacgccttccctccgggacctaactacggcggagacgcacattttgatgacgacgaaacctggaccagctcctctaagggatacaatttgttcctcgttgccgctcacgagttcggtcatagcctcgggttggaccactctaaagacccgggtgctttgatgtttcctatctacacatataccgggaaatctcatttcatgctgcccgatgatgatgtgcaagggattcagagcctgtacggcccaggcgacgaagatcctaatccaaagcaccccaaaactcctgataagtgcgatccatcattatccctggatgctattacctctctgcgcggagaaaccatgatcttcaaggataggttcttctggagactccacccccagcaggttgacgccgagctgtttctcacaaaaagcttctggcctgagctgcctaaccgcattgatgccgcttacgaacacccaagccacgacctgatttttattttccggggaagaaaattttgggcactgaatgggtacgacatactcgagggttaccccaagaagatcagcgagttgggtctcccgaaggaagtgaataagctgcagtag

SEQ ID NO: 29330 - DNA, 1749 bp, synthetic construct
  misc_feature 1..1749: note = Description of Artificial Sequence: Synthetic coding sequence
  source 1..1749: mol_type = other DNA
atgagtccggctccgaggccaccaaggtgcctcttgctgccactcttgaccctggggactgcgctcgcttccctaggatccgcccagtcatcttcattctcccccgaggcatggcttcagcagtatggataccttccacctggagacctccggacgcatacacagaggtcgccccaaagtctttccgctgcaatcgctgccatgcagaaattctacggcctccaggtgaccggtaaggctgacgctgacactatgaaagccatgaggcggcctaggtgtggtgtgcccgataagttcggcgcagagataaaagcaaatgttaggagaaaaagatacgccattcaaggcttaaagtggcaacataatgagatcactttctgtatccagaactatacacctaaggttggcgaatatgccacttatgaggcgatccggaaagctttccgcgtatgggagagtgccactcctctcaggtttcgagaggtgccctatgcttacattagagaagggcatgaaaagcaagctgacatcatgatttttttcgctgaaggcttccatggcgactccactcccttcgacggcgagggtgggtttctggctcatgcatatttccctggtccgaatattggcggagacactcatttcgactccgcagaaccctggaccgtgaggaacgaagatcttaatggcaacgacatcttcctggtagccgtgcatgagcttggccacgccctgggcctcgagcattcgtccgatccttctgctattatggccccattctatcagtggatggacacggagaatttcgtgctgccggacgacgaccggaggggaatccagcagttgtatggcggagagagtggttttcccaccaagatgcctccccagcctagaaccactagcagaccaagcgtgcccgacaagccaaagaatcccacatatggccctaatatttgcgacggcaacttcgacactgtggcaatgctccggggagaaatgtttgtgtttaaggagcggtggttctggcgcgtcaggaataaccaggtcatggacggctaccctatgccaatcggacagttctggcggggactgcccgcttccattaatacagcctacgagagaaaggatggcaaatttgtgtttttcaaaggagataaacattgggtcttcgacgaggcttccttggaacctgggtatccaaaacacatcaaagaactgggcagaggtctccccactgataaaatcgacgctgccctgttttggatgccaaatggaaagacttatttcttcagggggaataaatactacaggttcaatgaggagctgcgtgccgtcgatagcgaatacccgaagaatatcaaggtgtgggaaggaattccagaatccccacgaggaagctttatgggctctgacgaggtgtttacctacttttacaagggaaataagtattggaagtttaataatcagaaactaaaagttgaaccgggttatccgaagtcagctctacgggactggatggggtgcccatctggcggaaggcctgatgagggcacagaagaagagacggaggtcataatcattgaagtggatgaagagggtggcggtgcggtgagcgccgctgcagtggtgcttcctgtgctcctcctgttattagtgcttgctgtcggcctcgccgtctttttcttcaggcgccacgggactcctagaagactactctattgccaaaggtccctgctagataaggtgtag

SEQ ID NO: 29331 - DNA, 2052 bp, synthetic construct
  misc_feature 1..2052: note = Description of Artificial Sequence: Synthetic coding sequence
  source 1..2052: mol_type = other DNA
atggccagcggcccagggtcccaggagagggagggactgctgatcgtgaaactggaggaagactgtgcctggagtcaagaactgccacctcctgatcctggcccaagccccgaggcttctcatttgcggtttcggcgtttccggtttcaagaggccgctggccctagagaggcattgtcaaggttgcaagaactatgccatggatggctaagaccagagatgcgaacaaaggagcagattctggagttactggtattggagcagttcctgacaattcttcctcaggaaatccagtcacgggtgcaggaactccatcccgaaagtggcgaggaggctgttaccctggtcgaagacatgcaacgagagctcggccgactgcggcagcaggtgactaaccacggccgtggtacggaggtcctgctggaggagccactccccctcgaaactgccagggagtcaccgagtttcaagcttgagcctatggaaactgagaggtctccgggtcctaggttacaagaactgcttggaccgagtcctcagcgggatccacaggcagtcaaggaacgagctctgtccgccccttggctgagtctctttccccctgaaggaaacatggaggacaaagagatgactggtccacagctgcccgaatcgctagaagatgttgccatgtatatcagtcaagaggagtgggggcatcaagacccttccaagagggcgctgagcagagacactgtccaggaaagctatgaaaatgtagacagcctggaaagccacatcccatcccaagaggttccgggaacccaggtcggtcaggggggaaaactgtgggatcccagcgtgcagtcatgtaaggaaggactgagcccaaggggacccgcacccggagaggaaaagttcgaaaatctggaaggtgttccgtccgtttgtagcgagaatatccaccctcaggttttgctcccggaccaggcacgtggcgaagtgccttggtctcccgagctagggagaccacacgaccgaagtcagggcgattgggcccctccaccagaaggcggtatggaacaggccctcgctggtgctagttctggcagggaactgggccgacccaaggaactgcagcccaagaagctccacttgtgcccgctatgtggcaaaaacttttctaacaatagcaacttgatccgccatcaacggatccacgcagccgagagactttgtatgggggtggattgtacagagattttcgggggtaaccctcgcttcctaagcttgcaccgcgctcaccttggagaagaggcccacaaatgtctggaatgcggcaagtgtttctctcaaaacacccaccttacccgccaccagcgaacccatacgggcgaaaagccctatcagtgtaacatctgcggtaaatgcttttcctgtaattctaatctgcaccgacatcagcgaacgcacacgggggaaaaaccatacaagtgtccagagtgcggggaaatcttcgcacatagctccaatctgttgcgtcaccagcgtatccacaccggagagcgaccttataagtgtcccgagtgcgggaagagtttcagccgcagtagccatctcgtcatccacgaaagaacacacgaacgagaacggttatacccattcagcgaatgcggagaggctgtctccgactccaccccattcctgaccaatcatggcgcacataaggccgaaaagaaactgttcgaatgtctgacttgtggcaaatcctttcgccagggcatgcacctcacacgccatcagcgcacacatactggggagaaaccctacaaatgcacactttgtggggagaactttagccaccgaagcaatctgatccggcaccagcgaatacataccggagaaaagccctatacatgccatgaatgcggcgatagcttcagtcattcctcaaatcggattcgtcacctcagaactcacaccggcgagcggccttacaagtgctcggagtgcggagagagtttcagcagatcttccagattgatgtctcaccaacgaacacacactggctag

SEQ ID NO: 29332 - DNA, 1755 bp, synthetic construct
  misc_feature 1..1755: note = Description of Artificial Sequence: Synthetic coding sequence
  source 1..1755: mol_type = other DNA
atgcaaaaatttttcggactcccccaaactggcgacctggaccagaatactattgaaacaatgaggaaaccgagatgtggcaaccctgacgtcgctaactacaacttctttcccagaaagcccaagtgggataagaaccaaattacttacagaatcattggatacacaccggacttagacccagagactgttgacgacgcctttgccagggccttccaggtctggagtgacgttactccattacgcttctccagaatccatgatggcgaggccgatataatgattaactttggcaggtgggagcacggcgatgggtatccctttgatggtaaggacggattattggcacacgcatttgctcccggaaccggtgtgggcggagactcccactttgatgatgatgaactgtggacgctaggcgaaggccaagtggtaagagtgaagtacggaaacgccgacggagagtattgtaagttcccctttttgtttaacggcaaagaatataactcgtgcaccgacacaggcagatcagacgggtttctgtggtgctccaccacgtacaacttcgaaaaagatgggaaatatggtttctgcccacatgaggccctattcactatgggcggtaatgcagagggacagccgtgtaagttcccattccgtttccaaggcacctcctatgattcctgtactactgaaggacgtacagatgggtaccgctggtgtggcaccaccgaggattacgatagagataaaaagtacgggttctgtcctgaaactgcgatgtcaaccgtcggaggcaatagtgagggcgcaccttgcgtgttccccttcacctttctggggaataagtacgagtcttgtacttcggccggtaggtctgatggaaaaatgtggtgcgctacaactgcaaactatgatgacgatagaaagtggggcttctgtcctgatcagggatactccctgttcctcgttgccgctcatgaatttggccacgctatgggtttagagcactcacaagatccgggtgcgctgatggccccaatctacacttatacaaagaactttcgactcagtcaggatgacatcaagggcatccaggagctatatggtgcgagccccgacattgacttgggtactggacccactcctacactgggccctgtgacccccgagatctgtaagcaggacatcgtgttcgatggcattgcccagatccgaggtgaaatcttcttcttcaaagaccggttcatctggcgcacagttaccccacgtgacaagccaatgggacctcttctcgtggcgaccttttggcccgaactcccagaaaagatcgatgctgtgtatgaggcccctcaggaggaaaaggcagtgttctttgccggtaatgagtattggatttattcggcttccactctggagaggggctaccctaagccactaacctccctggggctcccccctgacgttcagcgggtcgacgccgctttcaactggtccaagaacaaaaagacctatatctttgctggagacaagttctggcggtataatgaggttaaaaaaaagatggatccaggctttcctaaactaattgcagatgcatggaatgctataccagataatcttgatgcagtggttgacttgcagggtgggggacatagctatttcttcaaaggcgcttattacctgaagttagagaaccagtccctgaaatctgttaaattcggaagtattaaatccgattggctcggctgttag

SEQ ID NO: 29333 - DNA, 1434 bp, synthetic construct
  misc_feature 1..1434: note = Description of Artificial Sequence: Synthetic coding sequence
  source 1..1434: mol_type = other DNA
atgaagtcactcccaatcctcctgcttctctgcgtggccgtatgtagtgcttatccacttgatggggcagctagaggagaggatacaagtatgaatttggtgcagaaatatttggaaaactactatgacctaaagaaggatgttaaacaatttgtgcgcagaaaagatagcggacctgtggtgaagaagattcgagagatgcagaagttcttagggcttgaggtcaccggaaagctcgacagcgataccctcgaagtaatgcgaaaacctagatgtggcgtccctgatgtcgggcactttcgaactttccccggtatccccaagtggagaaaaacccaccttacatatcggattgtgaactatacgccagacctgccaaaagatgcagtggactcagccgtggaaaaggctctgaaagtgtgggaggaggtcacccctctgacgttcagcagattgtacgagggtgaagctgatattatgatatccttcgcggtccgcgagcatggcgatttttaccccttcgatggcccaggcaacgtcctagcacatgcgtacgctcctggacccggtatcaacggcgatgcccattttgacgatgatgaacagtggacaaaagataccacaggaaccaaccttttcttagtagctgcccatgaaattggccattcactgggtctgtttcactcagcgaacaccgaggccctgatgtaccctctgtatcattctctgaccgatctgactcggttccggctgtcccaggatgacattaacggaattcagagcctgtacggcccaccccctgattctcctgaaacaccactggttcccacggagccagtgccaccagagccgggtacgcctgccaattgtgatccagccctgtcatttgatgccgttagtacattaagaggtgaaatcctgatcttcaaggataggcatttctggagaaaatctctgaggaagctcgagccagaattgcatctcatcagctctttctggccctcactcccttctggcgtcgatgctgcctacgaggtgactagtaaggacctggtgtttatcttcaagggcaatcagttttgggcgattcggggaaatgaagtcagagcgggttacccacgaggcattcacactctgggcttcccgcctactgtcagaaagatagacgccgcaatttccgacaaagagaaaaataaaacatattttttcgtggaggacaagtattggcggttcgatgagaagaggaatagcatggagcctggattccccaaacagattgctgaagattttcccggtatcgattctaagattgacgctgtgttcgaagagttcggattcttctattttttcacggggtctagccagctggaatttgatccgaatgctaaaaaagtcacccacaccctgaagtccaattcatggttgaactgctag

SEQ ID NO: 29334 - DNA, 804 bp, synthetic construct
  misc_feature 1..804: note = Description of Artificial Sequence: Synthetic coding sequence
  source 1..804: mol_type = other DNA
atgagactgacagtgttgtgcgcagtgtgcctattacccggtagcctggctctcccattacctcaggaagcaggtggcatgtccgagctccagtgggagcaagcacaggattatttgaagagattttacttgtatgatagtgagacaaagaatgctaatagtcttgaagccaaactgaaagagatgcagaagttctttggcttacccattacaggcatgctgaattccagggtgatcgaaattatgcagaagccaagatgtggagtgcccgatgtggccgagtattccctcttccccaattccccaaagtggaccagcaaggtggtgacctaccggatcgtttcttacactagggacttgcctcatatcacagttgatcgcctcgtgtccaaagcccttaatatgtggggaaaagaaatccctctccattttcgtaaagttgtttgggggacggcagatatcatgatcggatttgcaagaggggcacatggagactcataccctttcgatggcccaggaaatactctggcgcacgccttcgcacctgggactgggctcggcggtgacgcccatttcgatgaagacgagagatggaccgatggaagttcccttggtataaatttcctatacgcagcaactcatgagcttgggcactccctgggaatgggtcatagcagtgatcctaacgccgtgatgtacccaacgtatggtaatggtgacccacagaatttcaagttgtcccaggatgacataaagggaatccagaaactgtatgggaaaagatcaaattccagaaagaaatag

SEQ ID NO: 29335 - DNA, 2124 bp, synthetic construct
  misc_feature 1..2124: note = Description of Artificial Sequence: Synthetic coding sequence
  source 1..2124: mol_type = other DNA
atgtctctttggcagccgctagtcctcgttctactggtgctgggttgctgttttgcggcaccccgacaaagacaaagtacgctcgtactttttcctggggacctacgtacgaacctcaccgaccgtcagttggccgaggagtacctgtacagatacggctatactagagtcgctgagatgcggggtgagagtaaaagcctgggacccgctctcctattactccagaagcagctgtcactgccagagaccggggagctggacagtgccaccctgaaagctatgcgtacaccgagatgtggggttccagatctcggtagattccagacctttgagggagacctgaagtggcatcaccacaatattacttattggatacagaactacagcgaagacctgcccagggccgtgattgacgatgcattcgcgagggccttcgccctgtggagtgcagtgactcctctcactttcacccgggtgtactccagagacgcggatattgtgatccaatttggagtggccgaacatggggatggttatccctttgacggcaaggatggcctgttggcacacgctttcccgcctggccctggcatacagggtgatgctcactttgatgatgatgagctgtggagtctgggcaagggcgtggtagtgccgactcggtttggcaacgctgatggcgcagcttgtcacttccccttcatcttcgaaggccgttcgtacagcgcctgcaccactgatgggaggagtgacggtttgccatggtgcagcacgacagccaactacgataccgacgatagattcgggttttgtcccagcgaacgattgtacactcaggacgggaacgccgatggaaagccatgtcaatttccgtttattttccagggtcagagctattcagcttgcactacagatggccgaagcgacggctatcgctggtgcgccacaaccgctaactacgaccgagataagctttttggcttctgccctaccagggcggacagtactgtgatggggggaaattccgccggtgaattatgcgtgtttccgttcaccttccttggtaaggaatacagcacttgtacgtccgaggggagaggagacgggagattatggtgcgcaacgacctcaaatttcgattcagataagaagtggggcttctgccccgatcaggggtacagccttttcctggttgctgcgcacgagttcggacacgccctgggtctggaccattcatccgttccagaggcccttatgtacccaatgtatcggttcacggaggggcctccattgcacaaagatgacgtcaacggcatacggcatctctacgggcctaggcctgaaccagagcctcggcctcccactacgaccacaccccagccaaccgctccgccaactgtttgcccaaccgggccaccaactgttcatccctctgaaagacctaccgctgggcctacggggccaccatctgccggaccaaccggccctcccacagccggacccagcaccgcaaccacagtgcccttgtcaccagtcgacgacgcctgcaacgtcaatatttttgatgccattgctgaaattggaaatcagctttacctctttaaggatggaaaatattggcggttctccgagggtagggggagccgccctcagggaccattcttgatagccgataagtggcctgccctcccgaggaaacttgactctgtgttcgaagagaggttgagcaagaagctgttctttttttccggccgtcaggtttgggtctacaccggcgcttcagtcctgggcccacgtcggcttgacaaactgggattaggggcagacgtggcccaagtcaccggagcgttgcgatcaggcagaggcaaaatgctgctgttctctggcagaaggttgtggcgattcgatgtgaaagcccaaatggtggacccgaggagcgctagcgaagtagacagaatgttccctggagtgcccctggatactcacgatgtgttccagtacagagagaaggcatacttttgccaagaccggttttactggagggtaagttctcgatccgagctgaaccaggtcgatcaagtcggctacgtgacatacgacattctccaatgtcccgaggactag

SEQ ID NO: 29336 - DNA, 834 bp, synthetic construct
  misc_feature 1..834: note = Description of Artificial Sequence: Synthetic coding sequence
  source 1..834: mol_type = other DNA
atgggaggtaactccgccggagagctatgtgtctttccttttaccttcctcggtaaagagtactctaacttcgatagtgataagaagtgggggttctgcccggaccaaggttattcgctttttctcgtggccgctcacgaattcgggcacgccctgggactggaccacagtagcgttcccgaggcacttatgtaccccatgtaccgatttaccgagggcccaccactgcacaaagacgatgttaacgggatcagacatttgtatggccctcggcctgagcccgaaccaaggcccccaacaaccacaaccccgcagcctactgcgccacccactgtgtgcccaacaggcccaccaaccgttcatccccctttcctgatcgcagacaagtggcctgctcttccccgtaagctggattccgtgttcgaggaaagactgagcaagaagcttttctttttttctggtcggcaggtttgggtttacacaggtgccagcgtgttaggtccgaggagattggataagctgggactgggcgctgacgtcgcccaggtgacaggggctctcagaagcggacgcggaaagatgctgctctttagtggcagacggctgtggcgatttgatgtgaaagcccagatggtggacccgaggtctgcttctgaggtggacaggatgttccccggagtcccactggatacacacgacgtgtttcagtatcgtgaaaaggcctatttctgccaagaccgattctattggagagtaagtagcagatccgaactgaaccaggtcgaccaggtggggtacgtgacctacgatatcctacagtgcccagaggattag

SEQ ID NO: 29337 - DNA, 324 bp, synthetic construct
  misc_feature 1..324: note = Description of Artificial Sequence: Synthetic coding sequence
  source 1..324: mol_type = other DNA
atggccggagaggacgtgggagcccctccggatcatctttgggtgcatcaagaggggatctacagggatgagtaccagaggacatgggtggcagttgtggaagaagagacctcgtttctccgagccagagttcagcaaatccaggtgcctttgggcgacgctgccaggccctcccatctgctcaccagccagcttcctctgatgtggcagctttacccggaagaaagatatatggataacaactcgagactgtggcagatccagcaccatttgatggtacgtggggtccaggaattactcctgaagctgctgcctgatgactag

SEQ ID NO: 29338 - DNA, 324 bp, synthetic construct
  misc_feature 1..324: note = Description of Artificial Sequence: Synthetic coding sequence
  source 1..324: mol_type = other DNA
atggctggcgaagacgtgggcgctcctcctgaccacctgtgggtacaccaagaaggtatttatagggatgagtaccagaggacctgggttgccgttgtcgaggaggagacctctttcctacgggctcgcgtgcaacagattcaggtgcctcttggagatgccgctcggcctagtcaccttctgactagccaattgcctctgatgtggcagctgtatcctgaggagaggtacatggacaacaactctcggttgtggcagatccagcatcacctgatggtacgcggagtgcaggagctattacttaagttactccctgacgattag

SEQ ID NO: 29339 - DNA, 1329 bp, synthetic construct
  misc_feature 1..1329: note = Description of Artificial Sequence: Synthetic coding sequence
  source 1..1329: mol_type = other DNA
atggtgcgttcacgccagatgtgtaataccaatatgtctgtcccgacggatggcgcagtcaccacttctcagatccctgccagcgaacaggaaactctggtgcgcccaaagcccctactcttaaaactgctgaagtctgttggagcacagaaggatacgtacactatgaaagaggtactgttctacctaggccagtatatcatgaccaaaagattgtacgacgagaagcaacagcatatcgtgtattgttccaatgatctgctgggggatctcttcggtgttccctccttttcagttaaggagcatcggaaaatttacaccatgatttataggaacctggtcgtagtcaaccagcaggaggaaaacagcgatgaactaagtggtgagaggcagcggaaacgtcataagagtgactctatcagtctgtcattcgacgaaagcctggcactctgcgtgatccgcgaaatctgctgcgagaggtcatcatctagcgaaagcacgggaacaccgagcaatcctgacctcgacgccggagtctcggagcactctggcgactggttggaccaagactctgtgagcgaccagttcagcgtcgaatttgaggtggagagtctggactccgaagattatagtctgtctgaggaggggcaggaactgagcgatgaagatgatgaagtgtatcaagtgaccgtttaccaagctggcgaatctgatacagactcattcgaagaggaccccgaaatttccctggccgactactggaaatgcactagttgtaatgagatgaaccctccgctcccatcacactgcaataggtgttgggccctccgggagaattggctcccagaggacaaggggaaggacaaaggcgagatctctgaaaaggcaaaattggagaattcaacccaggcagaggagggttttgatgtgcccgattgcaagaagactatcgtcaatgactcaagagaaagttgcgtagaagagaacgatgataagatcactcaggcctctcaatcccaggaaagcgaggattattcacagccctctacgtcatcctcaatcatctattcgtcgcaggaggacgtcaaggagtttgagagggaggagacacaagataaggaggaaagtgtcgaatcctccttacctctcaacgctattgagccatgtgtcatctgccaggggaggcccaagaacgggtgtatcgtgcatggaaagaccggccatctgatggcctgcttcacatgtgccaagaaactaaagaagcgcaacaaaccatgtccagtatgcaggcagcccatccaaatgatagtgctgacatattttccgtag

SEQ ID NO: 29340 - DNA, 1311 bp, synthetic construct
  misc_feature 1..1311: note = Description of Artificial Sequence: Synthetic coding sequence
  source 1..1311: mol_type = other DNA
atgtgtaacacaaacatgagcgtgcctaccgatggcgctgtcacaactagtcaaatccccgcaagtgaacaggaaaccctggtgcgcccaaaacccctgctgctcaaattgctgaagagtgtcggggcacagaaagatacgtacacgatgaaagaggtgttattctatcttggacagtacattatgaccaaacgtctatacgatgaaaaacagcaacatatcgtgtactgtagcaacgacctcctgggagacctttttggcgttcccagtttctccgttaaagagcatcggaagatttacactatgatttatcgtaacttggtggtcgttaatcaacaggaagaaaatagcgatgagctctctggggaacgacagcggaaaagacataaaagcgactccatatccctttcctttgatgagagtttagcactgtgcgtgattagagagatctgttgtgagagaagctcgtctagcgaatctaccggcactccaagtaatccggacctggatgcaggcgtgagtgagcacagtggagactggttggatcaggatagcgtcagtgaccaattctccgtagaatttgaggttgagtcactcgattcagaggactatagtctttccgaagagggccaggaactttcagacgaggatgacgaggtgtaccaggttaccgtgtatcaggccggtgagagcgacactgactccttcgaggaagaccccgaaatctccctcgccgactactggaaatgcacgagttgcaacgagatgaacccaccgctgccctcacattgtaaccgttgctgggctctgcgtgaaaactggctgcctgaagacaaaggtaaagacaagggagagatttcagagaaagcaaagctcgaaaactctacccaagctgaggaggggttcgatgtacctgattgcaagaagacaatagtgaatgactctcgggagagctgtgtagaagagaatgacgataagattactcaagcgtcccagagccaggaaagtgaagactatagtcagcctagcacaagttctagtataatttacagtagccaggaggatgtgaaagaatttgaacgggaagaaacacaggacaaggaagaatccgtcgagtcttctctgcccctaaacgctatcgaaccctgcgtgatttgccagggacgccctaaaaatggatgtatagtgcacgggaaaacagggcacctcatggcttgttttacatgcgcaaaaaagttgaagaaaaggaataagccatgccctgtgtgcaggcaaccaatccagatgatagtcctgacctacttcccatag

SEQ ID NO: 29341 - DNA, 966 bp, synthetic construct
  misc_feature 1..966: note = Description of Artificial Sequence: Synthetic coding sequence
  source 1..966: mol_type = other DNA
atgtgcaacacaaatatgagcgtgcccacagatggtgctgtcaccacttctcagattcccgcaagcgagcaagaaaccctggtgcgcccaaaacctctgctgctgaagctgttgaagtcagtaggcgcacagaaagacacttataccatgaaagaggatctggatgcaggagtttcagagcactccggagactggctggatcaggattctgttagcgaccaatttagcgtagagttcgaagtcgaatctttggactccgaggattattctctttccgaagagggccaagaattaagcgacgaggatgatgaagtctatcaggttactgtttatcaagcaggagagagcgacaccgattcattcgaagaggaccctgagatttcactggcagattactggaaatgcacctcctgcaatgaaatgaaccctccactgccaagtcactgcaaccggtgctgggccctcagggaaaactggcttccagaagacaagggcaaggacaaaggcgaaatctccgaaaaagctaaactagagaacagcacacaggcggaagaggggtttgatgtcccagattgtaagaaaaccatcgtgaacgattcaagggagagttgcgtcgaagagaacgacgacaagataactcaggcatcgcaaagtcaggagtcggaagactattcccaaccgagtacgagttcttctatcatttactcatctcaggaggacgtgaaggagtttgagcgcgaggagacacaagacaaagaggaatccgtagagtccagtctacccctgaacgctatcgagccttgtgtgatctgtcagggacgcccaaaaaatggttgtatcgttcacgggaagactggacacctgatggcttgtttcacctgcgccaaaaaactgaaaaagaggaacaagccttgtcccgtgtgtcgccagcctatccagatgatcgtgttaacctattttccatag

SEQ ID NO: 29342 - DNA, 1359 bp, synthetic construct
  misc_feature 1..1359: note = Description of Artificial Sequence: Synthetic coding sequence
  source 1..1359: mol_type = other DNA
atggtgcggtctcgacaaatgtgcaataccaacatgagcgtaccgactgacggtgcagtaacaactagccagatccctgctagcgagcaagagaccttggtgcgtcctaaacccctgttactcaagctgttgaaatctgtgggggctcaaaaggacacatatacgatgaaagaaaagatttacaccatgatctatagaaatctggtagtcgtgaatcaacaagaatcatctgacagcgggaccagcgtgagcgaaaacagatgccatctggagggcggaagcgatcagaaagatttggtgcaggaactccaagaggagaaacccagcagttcccaccttgtgtcaagaccttccacatcctctcgacgaagagctatatctgaaacggaggagaattccgacgagttatcaggcgagaggcagcggaaacgccacaaatccgacagcatctcgctgtccttcgacgaatccctggcactctgtgtcatccgggaaatctgttgtgagcgttcatcttcatccgagtcaaccgggacacccagcaatcccgacctggacgcaggtgtgtctgagcattccggggattggctggaccaggactctgtcagcgaccagttcagtgttgagttcgaagtagaatcacttgattccgaggattacagcttaagtgaagagggacaggaattatctgacgaggatgacgaagtgtatcaggtcacagtttaccaagctggcgaatcggacacggattcgtttgaagaggatcccgagatctctctggcggactattggaagtgtacgagttgcaatgaaatgaatccacctcttcctagtcattgcaatcggtgctgggcactgagagaaaattggctgcctgaggacaagggaaaggacaagggtgaaatttctgaaaaggcaaagctcgaaaacagcacacaggctgaagagggttttgatgtccccgattgcaaaaaaactatagtcaacgattcaagagaaagttgtgttgaagagaatgatgataagattacccaggcgagccagtcccaagagtccgaggattacagtcagccctcgacctctagtagcattatttattcatcccaggaggatgtgaaagagtttgagagagaggaaactcaggacaaagaggagagcgtggaatcctcactcccactcaatgccatcgagccctgcgtgatttgtcagggtcgacccaaaaatgggtgtattgttcatggcaaaaccggacatctgatggcgtgcttcacatgcgccaagaagttaaagaagcgaaacaaaccctgccccgtttgtcggcagccaattcaaatgattgtcctcacttactttccctag

SEQ ID NO: 29343 - DNA, 771 bp, synthetic construct
  misc_feature 1..771: note = Description of Artificial Sequence: Synthetic coding sequence
  source 1..771: mol_type = other DNA
atgtgcaacactaatatgtctgttccaacagacggcgctgtcacaaccagtcagatacctgccagcgagcaagaaaccctcgtccgccctaaacctttattactcaagcttctgaagtcagtcggcgcacagaaggacacctacaccatgaaggaagtgctattctatctcgggcaatacataatgacaaaaaggctctatgatgagaagcaacagcacatagtgtattgtagcaacgatctgctaggcgacctcttcggggtgccctcgttttccgttaaggagcaccgaaaaatctacacaatgatttacagaaacctcgttgtggttaatcagcaagaaagcagtgattccggtacctcagtgagcgagaaccgctgtcacttagagggtggcagtgatcagaaggatttggttcaagagctccaggaggaaaaacccagctcttcccatcttgtaagccgaccttccacatcaagcagaaggcgagctattagcgaaacggaggaaaactccgatgagctgtctggcgagagacaacgtaaacggcacaagagtgacagcatcagtttgagcttcgatgagtccttggccctttgtgtgatcagagaaatatgttgtgaacgatcatcctcctctgagtctacaggcaccccctctaaccctgatctcttgctgggagtgtatcaggtcacagtttaccaggctggggaatcagatactgattctttcgaagaagatcctgagatctctcttgcccactacctgtag

SEQ ID NO: 29344 - DNA, 798 bp, synthetic construct
  misc_feature 1..798: note = Description of Artificial Sequence: Synthetic coding sequence
  source 1..798: mol_type = other DNA
atgagcgtgccaacggatggagccgtcaccacttctcagataccggcttctgaacaggagacactggacctcgatgcaggggtatctgagcacagtggtgattggcttgaccaggactccgtctctgaccagttctccgtggaatttgaggtcgaaagcctggattcggaagactacagcttgtcagaagagggacaggaactctccgatgaggacgacgaagactattggaagtgtactagctgcaacgagatgaacccccctttgcctagccattgcaatagatgttgggcactgcgcgaaaactggctgcccgaagataaaggcaaggataaaggggagataagcgaaaaagctaagctggaaaattccactcaggccgaggaggggtttgacgttcccgactgcaagaaaacaatcgtgaatgattcacgcgaaagttgtgtggaggagaacgatgataaaatcacccaagcatcccaaagccaggaaagtgaagattacagtcaaccctcgacttcaagctcgatcatttatagcagccaggaggatgtaaaagagtttgagcgggaggaaactcaggataaggaagagtctgtggaaagcagcctgcctttgaatgccatcgagccctgtgtcatatgtcagggcagacccaagaacggatgtatcgtgcacgggaagactggccaccttatggcctgctttacttgcgcaaaaaaactgaaaaagcggaataagccctgccccgtgtgcaggcaaccgattcagatgattgtgctgacctactttccttag

SEQ ID NO: 29345 - DNA, 1401 bp, synthetic construct
  misc_feature 1..1401: note = Description of Artificial Sequence: Synthetic coding sequence
  source 1..1401: mol_type = other DNA
atgtgtaataccaatatgtcagtgcctactgatggtgccgtgaccacatctcaaatccctgcatcagaacaggaaacacttgttctgttttacctgggacagtatattatgaccaaaagactgtatgatgagaaacagcagcacatagtgtactgttccaatgatcttctcggcgacctttttggggtgccgagctttagtgtgaaggaacatcgcaaaatttataccatgatttaccgcaacttggtggtggtgaaccagcaggagtcatcagattctggaacctccgtttccgagaataggtgccatctcgaaggaggctctgaccaaaaagatcttgtacaggagctccaggaggagaaaccctcttcgtcccacctggtctctaggcccagcacatcgagcaggcggagggccattagtgaaaccgaggaaaactctgacgagctctctggcgagagacagaggaagaggcataagtcggattccatctccttgtcattcgacgaaagtctggcgttatgtgtcattcgcgagatctgttgcgagcggtcttccagctccgagtcgaccggaacaccttctaatccagacttagatgctggtgtttccgaacactcaggggattggcttgaccaagacagtgtctcagaccagttctccgtcgaatttgaggtggagagtctggacagcgaggactactccctgagcgaggagggccaggaactcagcgatgaagatgacgaggtctaccaggtgaccgtgtaccaggccggagagtctgacaccgattcgttcgaagaggacccagaaatcagcctcgctgattactggaagtgtacatcttgtaacgagatgaaccctcctctgccttcccactgcaacaggtgctgggccctacgggagaattggcttccagaggacaagggaaaagacaaaggggaaatctcagagaaggcgaagctggaaaacagcacacaggcagaagaggggtttgatgtacccgattgcaaaaaaactattgtcaacgatagccgcgaaagctgtgtcgaggagaatgacgacaagataacacaggcctctcagagccaggaatctgaggattatagtcaaccctccacgtcatcatctatcatctatagcagtcaagaggatgtaaaggaatttgaacgtgaagaaactcaggataaagaagagtcagtggaatcctctctgcctcttaacgccatagagccctgcgtgatttgccagggtcggccaaaaaacggctgtattgtgcacgggaaaacagggcatctaatggcatgctttacatgcgcaaaaaagttgaagaaacggaacaaaccctgtcccgtctgtaggcagcctatacagatgatcgttcttacgtatttcccctag

SEQ ID NO: 29346 - DNA, 966 bp, synthetic construct
  misc_feature 1..966: note = Description of Artificial Sequence: Synthetic coding sequence
  source 1..966: mol_type = other DNA
atgtgcaacaccaacatgtctgtccccactgacggagctgtaacaacttcgcagatccccgcttctgagcaggaaaccctggtgcgccctaagccgctgctgttaaagcttctcaaaagtgttggggcacaaaaggacacctataccatgaaggaggatctggatgctggcgtttcagaacacagtggagattggttggaccaagactcggtgagcgaccagtttagcgtggaattcgaggtggaaagcctggattctgaggactactctctgagcgaggagggccaagagctttcggacgaagatgacgaggtataccaggtgacggtgtatcaggctggtgaatccgatactgattctttcgaggaggaccctgaaatcagtctggccgactactggaagtgtacctcttgcaacgaaatgaaccccccactgccttcccattgcaataggtgttgggccttgcgtgagaattggctcccagaagataaaggaaaggataaaggtgaaatctccgaaaaagccaagctggagaactcgacacaggcagaagagggatttgacgttcctgattgcaagaagacaatcgtcaatgactctcgcgagagctgcgtggaagaaaacgacgacaaaatcacccaggccagccagtcacaggagtccgaagattacagtcagccttccacgtcctcctcgatcatttactcctctcaggaggatgtcaaagagttcgagcgcgaagagacacaggacaaagaagaatcagtggagagctccctcccactgaatgctatagagccatgtgtcatctgtcaaggcaggccgaagaacggttgtattgtgcatggcaaaacaggccatctcatggcctgcttcacttgtgccaaaaagttaaagaagcgtaataagccatgccccgtgtgtagacaacccatacagatgatcgtcctgacctatttcccatag

SEQ ID NO: 29347 - DNA, 480 bp, synthetic construct
  misc_feature 1..480: note = Description of Artificial Sequence: Synthetic coding sequence
  source 1..480: mol_type = other DNA
atgtgtaacacgaatatgtccgtaccaaccgacggcgctgtaaccacttctcaaatccctgcctcagagcaggagaccctggtcaggcctaagcctctgcttctcaaactcttaaagtctgtgggggcacagaaggatacatacaccatgaaagaggacctcgacgccggtgtgagcgaacattcaggtgattggctggatcaggactctgtgtccgaccaattttcagtcgaatttgaagtggagagcctcgatagcgaggattattcactgagtgaggaaggacaagaactttcagacgaggacgatgaagtgtaccaggtcacagtgtaccaggcaggcgagtcagacaccgattctttcgaagaagacccagagatttctcttgccgattattggaaatgcctgaagaaaagaaataaaccttgcccagtctgtcggcagccaatacagatgattgttctgacatacttcccttag

SEQ ID NO: 29348 - DNA, 891 bp, synthetic construct
  misc_feature 1..891: note = Description of Artificial Sequence: Synthetic coding sequence
  source 1..891: mol_type = other DNA
atgtgcaacactaatatgagcgtccccacagatggagctgtgacaacctcccaaatcccagcgtcagaacaggaaaccctcgatcttgacgccggagtctccgagcacagtggcgattggttggatcaggatagcgtgagtgaccaattttcagtggagtttgaggtggaatcactggattcagaggactattctctgtcagaggaggggcaagagctatcagatgaggacgacgaggtgtaccaagtgacggtgtaccaggcaggtgagtcggataccgacagttttgaggaggatccagagatctctctcgcagattattggaagtgtacaagctgtaacgaaatgaacccccctctcccaagtcactgtaacaggtgctgggccctgcgcgagaactggctgccagaggataaaggtaaagacaagggggaaatatctgaaaaagcaaagctcgaaaactccacccaagccgaagaagggttcgacgtcccagactgcaaaaagacaattgttaacgattcaagagaatcgtgcgtagaggagaatgatgacaagatcacgcaggcctcacaatcccaagagagcgaggactactctcagccatctacgtccagctctataatttactcaagccaggaggacgtcaaagaatttgagagagaggaaactcaggataaggaagaatcggtggaaagcagcctgccccttaacgcaatagagccttgcgtcatttgtcagggtaggcccaaaaacggatgtatcgtccacggcaagactggtcatcttatggcttgttttacttgtgctaaaaagctcaaaaagcggaataagccatgtcccgtctgccgccaaccaattcagatgatcgtcctgacctactttccatag

SEQ ID NO: 29349 - DNA, 732 bp, synthetic construct
  misc_feature 1..732: note = Description of Artificial Sequence: Synthetic coding sequence
  source 1..732: mol_type = other DNA
atgtgcaacaccaacatgagcgttcccaccgacggagccgtgactacctcgcagattccagcaagtgagcaggagacgcttgtccgacctaaacctttattgctgaagctcctgaagtccgtgggtgcccagaaggatacgtacacaatgaaggaagactactggaagtgcacgtcctgcaatgaaatgaacccccctctgccaagtcactgtaaccgttgttgggcactcagggagaactggctgccagaagacaaggggaaggataaaggagagatttcagaaaaggcaaaattagagaattcgacgcaagcagaggaaggattcgacgtgcctgattgtaaaaagacaatcgtgaacgattcgagagagtcctgcgtggaagagaatgatgacaagatcacccaggcttcacagtcccaggagtccgaggactactcccaaccctctaccagttcgtcaattatatattcttcccaggaggacgtgaaagaattcgagcgtgaagagactcaggacaaagaggagagcgtcgaaagctctctgccactaaacgccatcgagccttgtgtgatttgtcagggcagacctaagaacgggtgcatcgttcacgggaaaacaggccaccttatggcctgctttacttgcgctaagaagctgaagaaacgaaacaagccgtgtcccgtctgcagacaaccgatccagatgatcgtgttaacctactttccttag

SEQ ID NO: 29350 - DNA, 657 bp, synthetic construct
  misc_feature 1..657: note = Description of Artificial Sequence: Synthetic coding sequence
  source 1..657: mol_type = other DNA
atgtgtaatacaaatatgtctgtgcccaccgacggtgccgtgaccaccagtcagattcctgcttcagaacaggagacactggactattggaaatgtacctcatgcaacgaaatgaatccacccttgcctagccactgtaatcggtgctgggctctgagggaaaactggcttcccgaggacaaaggtaaggacaagggtgagatttctgagaaggctaaactggagaactccactcaggctgaggaaggcttcgacgttccagactgcaagaagaccatcgtgaacgacagtcgagagtcctgcgttgaggagaatgatgacaaaatcactcaggcttcccagagtcaggagtccgaggattactcacagcccagcacttccagctcaatcatatactcttctcaggaggatgtgaaagagtttgagcgtgaggagacccaggataaggaagagagcgtcgaatccagcctgcccctgaacgccattgaaccatgtgttatctgtcaggggaggccaaagaatggttgtatagtgcacgggaaaaccggtcacctgatggcttgtttcacttgtgccaaaaagctgaagaaaaggaacaaaccatgccctgtctgccggcagccgatacagatgatcgtgttgacttacttcccctag

SEQ ID NO: 29351 - DNA, 657 bp, synthetic construct
  misc_feature 1..657: note = Description of Artificial Sequence: Synthetic coding sequence
  source 1..657: mol_type = other DNA
atgtgtaatactaacatgtcagtgcctaccgatggagccgtgacaacgtcccaaatccctgccagtgaacaggagacactcgactattggaagtgtaccagttgtaacgaaatgaatcccccactcccatctcattgtaacagatgctgggcattgcgcgaaaactggttgcctgaagacaagggaaaggataagggggagattagcgagaaggctaagcttgaaaacagcactcaggcagaggagggctttgatgtacccgactgcaaaaagaccatcgtcaacgacagtagagagtcctgcgtcgaggaaaacgatgataagataactcaggcatcccagtcccaggagtcggaggactattctcaaccaagtacttccagttctattatttacagctcacaggaggatgtcaaagaattcgaaagagaagagacccaggataaagaggagagtgttgaatcctcgctgcccctgaacgccatcgaaccctgcgtcatttgtcaaggtcgaccaaagaatggttgtattgtgcacggaaaaaccggacacttgatggcttgcttcacctgtgcaaagaaactaaagaagcggaacaagccttgccctgtgtgccgccagcctattcagatgatcgtgctgacatacttcccctag

SEQ ID NO: 29352 - DNA, 771 bp, synthetic construct
  misc_feature 1..771: note = Description of Artificial Sequence: Synthetic coding sequence
  source 1..771: mol_type = other DNA
atgtgtaatacaaatatgagcgtgcctactgatggagctgtaacgacctctcaaatccccgcttcagagcaggagacactggtgcggccaaagcctctgctgctgaagctgctaaagagtgtgggcgctcaaaaggacacttacacaatgaaagaggttctgttctatctggggcagtatatcatgaccaagagactctacgatgaaaaacagcagcatattgtgtactgttccaacgatctgctgggcgacctttttggcgtgcctagctttagcgtgaaagagcacaggaaaatctacaccatgatctaccgtaacttggtggtcgttaatcaacaggagagctcagattctggaacaagcgtctctgagaatcggtgtcacctcgagggtgggtcggatcaaaaagacctagtccaagagctgcaggaagagaaaccctcatctagtcatctcgtttcgagaccctcaacaagctcaaggcgcagggcaattagcgaaactgaggagaacagtgatgagttgtccggagaaaggcagaggaagcggcataagtctgatagcatatcattgtctttcgatgagagtttggcgctttgtgttatccgggaaatctgttgtgagcggtcatccagttcagaatccacaggcaccccatcaaaccctgacctagacgctggagtttatcaagtgacagtgtaccaagctggcgagtcggatacagattccttcgaggaggaccctgaaatcagcctcgctgattactggtag

SEQ ID NO: 29353 - DNA, 813 bp, synthetic construct
  misc_feature 1..813: note = Description of Artificial Sequence: Synthetic coding sequence
  source 1..813: mol_type = other DNA
atgtgcaacaccaacatgtcagtgccaacagatggtgccgtgactacctcccagatccctgcgagcgaacaggaaacactggatctggatgccggtgtctccgagcactcaggggattggctggatcaggactcggttagcgatcagttttccgtggagttcgaggtggagtcgttggatagcgaagattattctttaagcgaggagggacaggaactgtcggacgaggatgacgaggattattggaagtgtacatcctgtaacgagatgaatcctcctcttcctagtcactgtaaccggtgctgggcactcagggaaaactggctgccggaggataaggggaaggataagggcgagatttccgagaaggccaagttggaaaattcaacacaggcggaagagggattcgacgtgccagactgtaagaaaaccattgtcaacgatagccgggagtcttgcgttgaagagaacgatgataagattactcaggcctcccagtcacaggagtctgaagactattctcagcccagcactagcagcagcattatctatagtagtcaggaggacgtaaaagagttcgaacgtgaggagacccaggataaggaggagagcgtagaaagttctctccctttaaacgccattgagccctgtgtgatttgtcaaggtagaccgaagaatggctgtatagtgcatgggaaaactggccaccttatggcttgttttacctgcgcgaaaaagctgaagaagagaaacaagccctgccctgtgtgtagacagcccattcagatgattgtcctgacctactttccatag

SEQ ID NO: 29354 - DNA, 1494 bp, synthetic construct
  misc_feature 1..1494: note = Description of Artificial Sequence: Synthetic coding sequence
  source 1..1494: mol_type = other DNA
atggttcgtagtcggcagatgtgtaacactaatatgtccgtccccactgacggtgcagtgacgacctcgcagattccggcaagtgagcaagagacattggtccggcctaagcctcttcttcttaaactcttgaagagcgttggggcacagaaagacacatacacaatgaaagaggtgctgttttacctagggcaatatatcatgaccaagcggctgtacgatgagaagcaacagcatattgtttattgctccaatgatctgctaggggacctctttggtgtgcctagtttctctgtgaaggagcacagaaaaatatacaccatgatctaccgcaatctggtagtggttaatcaacaggagtccagtgacagtggtacatccgttagcgagaatagatgtcacttggaagggggaagtgaccagaaggatctcgtccaggaactacaagaggagaagccgtcctcgagtcatcttgttagcagaccaagcaccagcagtcgcagacgtgccatcagcgagacagaagagaacagtgacgaattaagcggggagcggcaaaggaaacggcacaaaagcgactcaatcagtctgtcttttgatgaatctcttgccctgtgcgtaatcagagagatttgttgcgagcgctctagttcttcagaaagcacgggcaccccaagtaatcctgatctcgatgcaggcgttagtgagcactccggggattggctggaccaggattctgtatccgatcagttctcggtggagtttgaggtggagtccctagactccgaagattattcactatcagaggagggacaggaactcagtgatgaagacgacgaagtttaccaagtgactgtataccaagcgggtgagtccgacacagattctttcgaagaagatcccgaaatttcactggcagattattggaagtgtacttcatgtaacgaaatgaacccacccctcccctctcattgcaaccgttgttgggcactaagggagaactggttgccagaggacaagggcaaagataagggagagatctcagaaaaggctaagttagagaattccacacaggccgaggaagggttcgacgtacccgactgcaagaaaacaatcgtgaatgactctcgtgaaagctgcgttgaggagaatgacgacaagattacccaggcttcccaatcccaggagtcagaggactattctcagccctctacaagctcatccattatatatagttctcaggaagacgtgaaagaattcgagcgagaagagacacaggataaggaagagagcgtagagtcgtccctacctctgaacgccatagaaccgtgtgttatctgtcaaggacgccctaaaaatggatgtatcgtccacggaaaaacagggcacctgatggcctgtttcacctgcgcaaagaaattgaaaaagcgcaacaaaccatgccctgtgtgccggcagccaatccaaatgatcgtacttacctactttccatag

SEQ ID NO: 29355 - DNA, 393 bp, synthetic construct
  misc_feature 1..393: note = Description of Artificial Sequence: Synthetic coding sequence
  source 1..393: mol_type = other DNA
atgtgcaacaccaatatgagcgtgcccactgatggcgcagtaaccacatcacagattcccgcaagcgagcaagagaccctggtgcgcccaaagcctttgcttcttaaattactgaagtcagtgggggctcagaaggacacatatactatgaaggagttcgagagggaggaaacccaggataaggaggaatcagtggagtcgagtctgccccttaacgctattgagccatgcgttatctgtcagggtcggcctaaaaacggctgcatagtacacggcaagacagggcatttgatggcttgcttcacatgtgcgaaaaagctgaaaaagcgcaataaaccttgccctgtgtgccgccaacccatccagatgatagtactcacatacttcccctag

SEQ ID NO: 29356 - DNA, 774 bp, synthetic construct
  misc_feature 1..774: note = Description of Artificial Sequence: Synthetic coding sequence
  source 1..774: mol_type = other DNA
atgtgtaataccaatatgagcgtgccaacggacggtgcggtcaccacgagtcagatccccgcatccgaacaggagactctcgtacgtccaaaaccgctgcttttgaaattgcttaaatcggtgggggcacagaaggatacatacaccatgaaggaggtgcttttctatttgggtcagtatatcatgactaaacgtctttatgatgaaaagcaacagcacattgtttattgctcaaatgatttacttggggatctgttcggagtgccaagtttcagcgtaaaagagcatcgcaaaatctacacgatgatctaccgtaatctggtggttgtgaaccagcaggagtcatcagactctggcaccagcgttagcgagaacaggtgccacctggagggcggatcagaccagaaggacttggtgcaggaactccaggaggaaaagcccagctcctcgcacctggtttcacgcccatccacttcctcccgcagacgcgcaatcagtgagacggaggagaactctgatgagttatcaggtgaaaggcagcgaaagaggcataagagtgattctatttcactctcctttgacgaatccttagctttatgtgtgatccgggagatttgttgtgaacgctcctcatccagtgaatctaccggaaccccgagcaaccctgacctcgacgctggagtgagtgaacactctggagattggctggatcaggattctgttagcgatcagttctccgtggagttcgaggtggagtccctggatagtgagtag

SEQ ID NO: 29357 - DNA, 891 bp, synthetic construct
  misc_feature 1..891: note = Description of Artificial Sequence: Synthetic coding sequence
  source 1..891: mol_type = other DNA
atgtgcaatacgaacatgagcgtccctacagatggcgcagtgacgacctctcaaatccctgccagcgaacaggaaacactggacctggacgccggagtgtccgagcactctggcgattggctggaccaggactccgtcagtgatcagttcagcgtcgagttcgaagtagaaagtcttgactctgaagattactctctgtctgaggagggacaggagctgtcagatgaagatgatgaggtgtatcaggtgactgtttaccaagcaggcgaatccgacaccgactccttcgaagaggatcccgaaatatctctcgccgactactggaaatgtacctcatgtaacgaaatgaaccccccactgccaagccactgtaacaggtgttgggctttgcgggaaaactggctgcctgaggacaagggtaaagataagggcgagatatcggagaaagctaagttggagaactctacacaggcggaggagggatttgatgtgcccgattgcaagaagactattgtaaatgattcacgcgaaagctgcgtggaagagaatgatgacaagatcacccaagcttcacaatcccaggaatctgaggattacagccaaccgtctactagtagctctatcatttattcaagtcaggaggacgtgaaagagttcgaacgggaagaaacccaagacaaggaggaatctgtggagagctctctcccccttaacgcaattgagccatgcgtcatttgtcagggacgacctaagaacggttgcattgtgcatggaaagaccggacatctcatggcatgcttcacctgcgcaaaaaagctcaaaaagcggaacaaaccctgtccagtctgcagacagccaatccagatgattgtgctcacctattttccttag

SEQ ID NO: 29358 - DNA, 1341 bp, synthetic construct
  misc_feature 1..1341: note = Description of Artificial Sequence: Synthetic coding sequence
  source 1..1341: mol_type = other DNA
atgtgcaacacaaacatgagcgtgcccactgacggcgctgtcacaacttctcagatcccggcatccgagcaggaaacgctcgtgagacccaagcccttgttgctgaagttgttgaaaagcgtcggcgctcaaaaggacacgtataccatgaaagagaagatttacacaatgatttaccggaacctggtggtggttaaccagcaagaatcaagtgattcagggacatctgtatccgagaatagatgccatctggagggcggttctgatcagaaggatctggtgcaggaactgcaggaagaaaaaccatcttcctcacacctcgtgtcgcgaccctctacgtctagcaggcgtcgcgctatctccgaaacggaagagaacagtgacgagctcagcggagaaaggcagcgcaagcgccacaagagcgacagtatctccctgtctttcgacgagtccctggcgctctgtgttatccgcgagatttgttgtgagaggtcaagttctagcgaatcaaccgggactcctagtaatccggacctcgacgcgggagtgagcgaacactcaggtgactggctggaccaggactctgtgagcgaccaattttctgtggaattcgaggtggaaagcctagactcagaggactactcactgtccgaagagggacaggagctgagcgatgaggacgatgaagtttatcaggtgacggtgtatcaggccggagaaagcgatacggatagcttcgaggaggatcctgagataagcttagcagactattggaaatgtacgagctgtaatgagatgaatcccccacttcctagccattgcaatcggtgttgggccctgcgtgaaaactggctgcccgaggacaaaggcaaagacaagggcgagatcagtgagaaagctaagttggaaaattcaactcaggccgaagaagggttcgacgtaccagattgtaagaagaccatcgtaaacgattcccgagaaagctgtgtggaggaaaacgacgataaaatcacgcaggcgtcacagtctcaagaatcggaggactactcccaaccctccacgtcctccagcatcatctacagctcgcaggaggacgtcaaagagttcgaaagagaggagacacaagacaaagaagaatccgtggaatcatccctgccactgaacgccatagagccctgcgttatttgtcaagggagacccaagaacggctgcattgtccacggaaagacagggcacttaatggcttgtttcacatgtgctaaaaaattgaaaaagcggaacaagccctgtcctgtgtgccgccagccaattcagatgatcgtgttgacctatttcccgtag

SEQ ID NO: 29359 - DNA, 642 bp, synthetic construct
  misc_feature 1..642: note = Description of Artificial Sequence: Synthetic coding sequence
  source 1..642: mol_type = other DNA
atgcctaattttgttgtggactggagggtgtatactgacagcttgttcttgaccgtcgattttggactgtgcgccgaagagtcctcaacctctaggaaaagaaccaccgaagatgatattcctacacttcctaccagtgaacataagtgtatccatagccgcgaggatgaagacctcatagaaaatctagcacaggacgagacctccagactagatctgggtttcgaagagtgggatgttgcgggactcccgtggtggttcctgggcaatctgcgctccaactatacacctcggagcaacggatccacagatctccagaccaatcaggacgttggcaccgccatcgtatctgacacaaccgatgatctctggttccttaacgagagtgtgtccgagcagttgggcgttgggatcaaagttgaagctgcagacaccgagcagaccagcgaggaggtggggaaggttagcgataagaaagttattgaggtgggtaagaatgacgacctcgaggactcgaagagcctatccgacgacacagatgtggaggtgactagcgaggatgagtggcaatgtacggagtgtaagaagtttaatagcccatcgaagaggtactgttttcgctgctgggcgctcaggaagtag

SEQ ID NO: 29360 - DNA, 396 bp, synthetic construct
  misc_feature 1..396: note = Description of Artificial Sequence: Synthetic coding sequence
  source 1..396: mol_type = other DNA
atgacatctttctcgacatccgctcagtgttcaacctctgattcagcttgcaggattagccctgggcaaatcaaccaggtgaggcccaaacttccccttctcaagatcctgcacgcagcgggagctcagggggagatgtttacagtgaaggaggtaatgcactacctgggccagtacataatggttaagcagctgtacgaccagcaggagcaacatatggtgtactgcggtggagatcttttgggggagctacttgggcgtcaaagcttcagcgtcaaagacccttcaccactatacgatatgttaaggaaaaatttagtgaccctggctacggctaccacagagatgggacatcttttctgccgaatcagccacgccctggagctcgcagactag

SEQ ID NO: 29361 - DNA, 1473 bp, synthetic construct
  misc_feature 1..1473: note = Description of Artificial Sequence: Synthetic coding sequence
  source 1..1473: mol_type = other DNA
atgaccagtttcagcacttctgcacagtgttctacctccgactcagcatgccggatttccccagggcagatcaatcaggtgaggcctaagctgccgctgctaaagatcttgcatgctgctggcgcacaaggcgagatgttcacggtcaaggaggtcatgcattacctcggccagtacataatggtcaagcagctctatgaccagcaggagcagcacatggtctattgtggaggagacttgctcggggaactgctgggacgacaatccttttctgttaaggatcctagtcctttatacgacatgctgcggaagaacttggtgaccctggccacggcgactaccgatgcggctcagaccctggccctcgcgcaagatcacagcatggacatacccagtcaagaccagttgaaacagtccgccgaggagtctagcacgagcagaaaacgtacaactgaagatgatattccaactctgccaacctccgaacacaagtgtattcactcccgggaagatgaggaccttatcgagaacttggcccaggatgagacctctcggttggatctgggcttcgaagaatgggacgttgccggactgccttggtggtttctgggcaacctgcgctctaattacactccccgttctaatggatcgactgacctgcagaccaatcaggacgtcggcacagccatcgtgagcgacaccacagatgatctgtggtttctaaatgagtccgtatctgagcagctcggcgtcggtatcaaggtcgaggctgccgataccgaacagacatccgaagaggttggcaaagtttccgataaaaaggtgattgaggtgggcaagaatgatgacctcgaggattctaagtcactgtctgatgacactgacgtggaagtgaccagtgaggacgagtggcaatgcacggaatgcaaaaaattcaattccccctccaagcggtattgtttccgatgctgggctctgcgaaaggattggtattccgattgttcgaaacttactcacagcctatcgacatcagatattacagctatccccgagaaagagaacgaagggaatgacgtccccgactgcaggcgaactatttccgccccagtggtccggccaaaagacgcttatattaaaaaagaaaatagcaagttgttcgatccatgcaattccgtggaatttctcgatctagcccacagctcagagagtcaagaaaccatctccagcatgggtgaacaactggacaacctgtcagagcaaagaacagatacggaaaatatggaagactgtcagaatcttctgaaaccctgcagcttatgcgaaaagaggcctagggatggcaatatcatccatggtagaacgggccacctcgttacctgctttcattgcgccagaaggcttaagaaagcgggagcctcctgtccaatatgtaaaaaagaaattcagcttgttataaaagtcttcatcgcctag

SEQ ID NO: 29362 - DNA, 495 bp, synthetic construct
  misc_feature 1..495: note = Description of Artificial Sequence: Synthetic coding sequence
  source 1..495: mol_type = other DNA
atgaccagtttctccacgtcagcccagtgtagcacttcagactctgcctgtcgaataagcccgggtcagatcaatcaggaaaatgagggaaacgacgtccctgactgcaggcggaccatctccgctccagtggtccgaccaaaagatgcctacattaagaaggagaacagcaagctatttgacccctgcaatagtgtcgaattccttgatcttgcacactcgagcgagtcccaggaaacgatcagctccatgggagaacagctggacaatctgagcgagcagcgcaccgacaccgaaaacatggaggactgccaaaacttgcttaagccatgctctctatgtgagaagcggcctagagacgggaacataattcacgggcgtacgggccacctggttacctgctttcactgcgcacgccgactcaagaaagcaggcgcttcctgtcccatctgtaaaaaggagattcagctcgttatcaaagtgttcatagcatag

SEQ ID NO: 29363 - DNA, 423 bp, synthetic construct
  misc_feature 1..423: note = Description of Artificial Sequence: Synthetic coding sequence
  source 1..423: mol_type = other DNA
atgacttccttcagcacttctgcgcagtgctccacaagcgatagtgcgtgccgaattagccctggacaaataaaccaggtgaggcctaaactcccccttctgaagattctgcacgcagctggcgctcaaggagaaatgttcactgtgaaggaggtgatgcattatctgggacagtacatcatggtcaaacaattgtacgaccagcaggagcaacatatggtgtactgcgggggagacctgttgggtgagcttttggggaggcagagcttctcagtgaaggacccatcccctctgtacgatatgctcaggaagaatctcgtgaccctggcaacagcaaccacagccaaatgtaggggaaagttccacttccaaaagaagaactaccggagacgatacccccacacagcgtacctgcgtgcttag

SEQ ID NO: 29364 - DNA, 516 bp, synthetic construct
  misc_feature 1..516: note = Description of Artificial Sequence: Synthetic coding sequence
  source 1..516: mol_type = other DNA
gatctgatagagaaccttgcgcaggatgaaacgagcagactggaccttggcttcgaggagtgggatgttgcagggttaccatggtggtttctaggcaacttgaggtcgaactacactccccgaagtaacggaagcaccgatttacagaccaaccaggtgatcgaagtgggcaagaatgacgacctggaagatagtaaaagcctttccgacgatactgacgtagaggtgacttcagaagatgaatggcagtgtacagagtgtaagaaatttaattccccatccaaaaggtactgttttcgctgctgggcactgcgcaaggattggtacagcgactgtagcaagctcacccactctctgagcacatcagatattaccgccattcctgaaaaggagaacgagggtaacgatgtacccgactgtcgacgtaccatctcggctcctgttgttcggcctaaggacgcatacataaagaaagaaaacagtaagctgttcgacccgtgtaactccgttgaatag

SEQ ID NO: 29365 - DNA, 1323 bp, synthetic construct
  misc_feature 1..1323: note = Description of Artificial Sequence: Synthetic coding sequence
  source 1..1323: mol_type = other DNA
atgacatcattctccactagcgcacagtgcagtacttctgatagcgcctgtaggatcagccctggacagataaaccaagtgaggccaaaactcccattgctcaagatcctgcatgcagcgggagcccagggcgagatgtttactgtgaaggaagtgatgcactacctaggacagtacataatggtgaagcagctgtatgaccagcaagagcaacacatggtgtattgcggtggcgatttgctgggtgagctcctcgggagacagagcttttccgttaaggatcctagcccgctatatgacatgcttagaaagaatctggtgaccctcgcaactgccaccactgacgcggcacagactctggcgctggctcaagaccattccatggatatacctagccaggatcagcttaagcagtctgcggaggagagcagtacaagtcggaaacggacaactgaagacgatatccctactctgcctacgtcagagcacaagtgcatacattcccgggaggatgaggatctcatcgaaaacctggcccaggacgaaactagtagacttgacctcgggttcgaagagtgggacgtggccggtctgccttggtggttcctcggcaacctccggtccaactacaccccaaggtcaaacggctccactgacctccaaaccaatcaggttattgaagtgggcaaaaatgatgatctggaagattcaaagagcctgagcgacgacacagacgtggaagtgacctctgaagacgagtggcagtgcaccgagtgcaaaaagtttaattcaccgagtaagagatactgctttaggtgctgggccctgaggaaagattggtactcagactgctctaagcttacacattctctgagcacatctgacatcacagccatccccgaaaaggaaaacgaagggaatgacgtacccgactgtaggcgcacgataagcgccccagttgtgaggccgaaggatgcatacattaagaaggaaaacagcaaactgtttgatccctgcaactcagtagagttcctggatcttgcacacagttccgagagccaggagactatctcctccatgggtgagcagctggacaacctcagtgaacagaggaccgacactgaaaatatggaagattgccagaatctgcttaagccatgttctttgtgcgagaaacggcctcgcgatggaaacatcatccatggaagaacagggcacttagtaacgtgtttccactgtgctcgaagactcaaaaaggcaggcgcatcatgccccatctgcaaaaaggagattcagctggtcattaaagtgtttatcgcttag

SEQ ID NO: 29366 - DNA, 384 bp, synthetic construct
  misc_feature 1..384: note = Description of Artificial Sequence: Synthetic coding sequence
  source 1..384: mol_type = other DNA
atgacttccttctcaacttctgcccagtgctccacaagcgactctgcatgtagaatttcccctgggcagattaatcaggttagaccgaagctgccactgctaaaaatactgcacgcagcgggtgcccagggcgagatgtttactgttaaggaagtaatgcactatcttgggcagtacattatggtgaagcagctgtatgaccagcaggagcagcatatggtctattgtgggggagatttgctgggggagctactgggacggcagtctttctcggtgaaggacccgtctcccctttatgatatgttgaggaagaatttagtgactctggccaccgccacgacaggttgtcagcgcagggtgaacgggccacagagagcctggtag

SEQ ID NO: 29367 - DNA, 462 bp, synthetic construct
  misc_feature 1..462: note = Description of Artificial Sequence: Synthetic coding sequence
  source 1..462: mol_type = other DNA
atgactagtttctcaacctccgctcagtgctccaccagcgattccgcctgcaggatatctccgggacagatcaatcaagtgcggccaaaactacctctgttaaaaatcttacacgccgctggcgcacagggggagatgtttaccgtgaaagaggtgatgcactacctggggcagtatatcatggttaagcagctgtatgatcagcaagagcagcatatggtgtactgcggtggagatcttcttggcgagctgttgggtcgacagagcttctcggtaaaggacccaagccctctttatgacatgctcaggaagaacctcgtgacactggctacggccaccacggggtctcagtacggttacagcaaaagtaggccaacagaagccaaatgtcggggaaagttccattttcagaaaaagaattatcgcagacgatacccgcatacagcatacctccgtgcatag

SEQ ID NO: 29368 - DNA, 7649 bp, synthetic construct
  misc_feature 1..7649: note = Description of Artificial Sequence: Synthetic coding sequence
  source 1..7649: mol_type = other DNA
atgttaggcaccggacctgcagccgctaccacagccgctacgaccagcagtaatgtatctgtgctgcaacagttcgcgtccggactcaagtcacggaacgaggaaacaagggccaaggccgcaaaagaactccagcactatgttacgatggaattgcgtgagatgtcccaggaggagagcactcgtttctacgatcagttgaaccatcatatattcgaacttgtgagttctagtgacgccaacgagcgtaaaggaggaatcttggcaatcgcttctttgataggagtcgaaggtggtaacgcaaccagaattggacgctttgccaactatctcagaaatctgctgccgagcaatgatcccgtcgtcatggagatggcgagcaaagccataggccgactcgccatggcaggtgataccttcactgccgagtatgtggaatttgaagtcaaaagagccttggagtggctgggcgctgacagaaacgaaggaaggcgtcatgccgctgtcctggtgctgagagaactggcaatctctgtgcctacctttttcttccagcaagtgcagcctttcttcgataatattttcgttgccgtgtgggacccaaagcaagctatccgggaaggcgctgtggccgcactgcgggcatgtctgattctcactacacagagagaacctaaggagatgcagaaacctcaatggtatcggcatacatttgaagaagccgaaaaggggttcgatgagactctcgctaaggagaagggcatgaaccgagacgatcgaattcacggggctctgctgattcttaatgaactcgtgcggatttcctccatggaaggcgaacggctgcgcgaggaaatggaggagatcacacagcagcagctggttcatgacaagtattgtaaggatctgatgggattcgggactaagccgaggcatatcactcccttcacttcatttcaggccgtccagccgcagcagtcaaatgcactagtcgggttgctcggttactctagccaccaggggttgatgggcttcgggacttcaccctcccctgccaagagcacattggtggaatccagatgttgtcgtgacctgatggaagaaaagtttgatcaggtgtgtcagtgggtgctaaaatgtcgaaatagtaaaaattctctaattcagatgaccatcctaaacctgcttcccagattggctgcgttcaggccctccgcatttaccgacacacaatacttgcaagacacaatgaatcacgtgctaagctgcgttaaaaaagagaaggaacgcaccgcagcctttcaggcacttgggctgctgtccgtcgccgtccggagcgagttcaaagtgtacctgcccagggtgctggatattatccgggctgctctgccacctaaagattttgcccacaagcggcagaaagcaatgcaggtggacgccaccgtgtttacctgcataagtatgttggcaagagctatgggacctggaatacagcaagatataaaggagctgctcgaacccatgttagcggtgggcctaagccccgcactgaccgcagttctttatgatctgagccgccagatcccacaattgaagaaagatatccaggacggcctgctgaaaatgctgtctctggtcctcatgcacaagcctctgcggcaccctgggatgcctaagggactcgcccatcagcttgcctctccaggactgaccaccctcccagaagcctcggacgtgggaagcatcactcttgcactacgaactcttggctcgtttgaattcgaaggacacagcctcactcaatttgtaaggcattgcgccgatcacttccttaactcagaacacaaggagatccgtatggaagcagccagaacttgctctaggctactgaccccttctatccacctcataagtggtcacgcacatgttgtttctcaaacagctgtacaggtggtcgcagacgtcttgtccaagctgctggtggtagggatcacagaccccgatccggatatacgctactgcgttctggcaagtctggatgagcggtttgacgcacacctggcacaggctgagaacctgcaagccctcttcgtcgccctgaatgatcaggtgtttgagataagggaactggccatttgcacggttggcaggctgtctagtatgaaccccgcatttgtgatgccttttctacgaaagatgctaattcagatattgaccgaattggaacacagcggaattgggcgaattaaggaacagtctgctcggatgttgggacatttggtgtccaacgcccctcggctgatccggccttacatggaacccattttaaaagccctgatcctcaaactgaaggaccccgatcccgatcctaaccccggtgttattaataacgttctggccaccataggggagctggcgcaggtttcaggcctggagatgcgtaagtgggtcgacgagctattcattatcattatggacatgctccaagatagtagtctgctggctaagcgccaagtagctttgtggacacttgggcagttggtggcttccacaggttacgtcgttgagccatacaggaagtatcccactttgttggaagttctgctcaacttcctcaagactgagcagaaccagggaacccgcagagaagccataagggtcctcggcctgcttggagcgctcgatccatataagcacaaggtcaatatagggatgatcgaccaatcaagggatgccagcgcagtcagtctgtctgagtcaaagagtagccaggatagttccgactactctacctccgagatgctggttaacatgggaaatttgcctttagacgagttctatcccgcagtgagtatggtggcattaatgaggatattcagagaccagtctctctcacatcaccatacaatggtggtacaggctatcacttttattttcaagtctctgggcttaaaatgcgttcaattcttgccccaggtgatgccaacgtttttaaacgtgattagggtgtgtgatggagcaattcgagagtttctttttcagcaactaggcatgctggtttcattcgttaagagtcatatacggccatacatggatgaaatagttaccctgatgcgcgagttctgggtaatgaacacttctatacagtctaccatcatcctacttatagaacagatcgtcgtggccctgggtggcgagttcaagctttatctcccacagctaatccctcacatgctgcgcgttttcatgcatgacaactcccccggaagaatcgtgtcaatcaaattgcttgcagccattcagctcttcggagctaatcttgacgattatttacatctactgctgccaccaattgtgaaactcttcgacgcgccagaggctccgctgcccagccgaaaggccgcattagagaccgtagacagactcacagagtcactggactttaccgactacgcaagcagaatcatacatcccattgtgcggacactggaccaatccccagagctacgctctaccgccatggatacattatcctcactcgtttttcagcttgggaagaaataccagatcttcatccctatggttaataaagtgctggttagacaccggattaaccaccaaagatatgacgtattgatttgtaggatcgtgaagggctacaccctggccgacgaggaggaagacccactgatttaccagcaccggatgttgcggtctggacagggagacgcccttgcgtccgggccagtggagacggggcctatgaagaagctgcatgttagcacaataaacctgcagaaggcgtggggcgctgccaggagggttagcaaagacgactggctggagtggctccggaggctgagcctggaactccttaaggacagctcgtctccgagtctcagatcatgctgggcattagcccaggcctacaacccaatggctcgggacctgtttaacgccgcttttgtttcctgttggtctgaactgaatgaagaccaacaggacgagctgatccgcagcatcgagctagcactgaccagccaagatatcgccgaagtgacacagacactgcttaatctagccgaatttatggagcattctgacaagggtcccctacccttacgggacgataacgggatcgtcctgttgggagagagagctgccaagtgccgcgcatacgcgaaagctctgcactacaaagagctggaattccaaaagggtcccacgccagcaatccttgagtctttaatcagcattaacaacaagttgcagcagccggaggctgccgcaggagttttagagtatgctatgaagcacttcggagaactggagattcaagccacctggtacgagaaacttcacgagtgggaagacgctctggttgcctacgacaagaaaatggacaccaataaagacgacccggaactcatgctaggcagaatgaggtgcctggaagccctgggggagtggggccagttgcatcagcagtgttgtgaaaagtggaccttggttaacgatgagactcaggccaagatggcaaggatggccgctgccgctgcatggggactggggcaatgggattcaatggaggagtatacctgtatgatccccagagatactcacgacggggctttttaccgcgctgtcctcgccttacaccaggaccttttttcactggcacagcagtgcattgataaggcccgtgatctgctggatgccgaactgacagccatggccggtgagtcatactccagagcctatggcgcaatggtgtcatgccacatgctgagtgagctagaggaggtgatccagtacaagctggtgccagagagacgggaaatcattcgtcagatctggtgggagcggctccagggctgccagcggatcgtggaagactggcaaaaaattctgatggtgagatcgcttgtggtctcaccgcatgaagatatgcggacttggctgaagtatgcatccctgtgcgggaagagcggcaggctagccttagcccacaaaaccttggtcctgttgcttggtgtcgacccgtccaggcagttagatcacccattgccaaccgtgcaccctcaagtaacttacgcatatatgaagaatatgtggaagtccgccaggaagattgacgcattccagcatatgcagcatttcgtccaaacaatgcaacagcaggcccagcacgctatagctaccgaagatcaacagcataaacaagagctgcacaagctgatggcgcgatgcttcttaaagttgggggaatggcagttgaatttacagggcatcaacgaaagtacaatcccaaaggtgctccaatactacagcgcggctactgaacacgacagaagctggtataaagcgtggcacgcgtgggccgtcatgaactttgaggctgtattacattacaagcaccagaatcaagctagggacgagaaaaaaaaactgagacacgcctcgggggcaaatattactaacgccaccacagcagctactactgcagctacagccaccacaacagccagcaccgagggctctaattctgagtccgaagcagagtcgacagagaactcccccactccgtccccacttcagaaaaaggtcacggaagacctgagtaaaacactgctgatgtatacagtgcctgctgtccaaggcttcttccgttcaatctccttgagccgtgggaataaccttcaagatacccttcgagtgctgacactttggtttgactatggtcactggcctgatgtcaacgaagctctggtggaaggcgttaaagcgattcagatagacacttggttacaagtgattccgcagctgatcgcacggatagacactccgcgacccctggtaggaagattgatccaccagctgcttacagacatagggaggtatcatccccaagcccttatctatcctcttactgtggcttcaaagagcactacaacagctagacataatgctgccaacaagattctcaaaaacatgtgcgagcattcgaataccctggtccaacaagccatgatggttagtgaggagctgatccgggtagccatactctggcatgaaatgtggcatgaaggcctagaggaagcatcacggctatacttcggggaacggaatgtgaaaggaatgttcgaggtgcttgaacccctgcacgccatgatggagcggggtccccaaaccctcaaggagactagctttaaccaggcttacggaagagacttgatggaagctcaggagtggtgccgtaagtacatgaaatccggaaacgtgaaagacctgactcaggcctgggacctatattatcacgtgttccgaagaatcagcaagcagctccctcagttgacgtctctcgagttgcaatacgtgagccctaaactgctgatgtgccgagacctggaattagccgtgccaggaacttatgatccaaaccagccgataattaggatccaatccattgcaccctctttgcaggtgatcactagcaagcagcgaccacggaaacttactttgatgggctctaatggccatgagttcgtgttcctcctgaagggtcacgaggaccttcgtcaggatgagagggttatgcagctgttcggcctcgtaaacaccctactcgccaacgatcctacttccttgcgtaagaacctgagcatccagcgatacgcggtgatccccttgagtaccaactctggcctgatcgggtgggttcctcactgtgacacgctacacgctttgatcagagactatcgtgaaaaaaagaaaatactgctcaacattgagcacagaattatgctccggatggcccctgactatgatcatctcacgctgatgcagaaggtcgaagtgttcgagcacgcagtgaacaacacagccggtgatgacctggctaagctgttgtggctcaagagccccagctccgaggtgtggtttgatagaaggaccaattatacgagatctctggctgtgatgtccatggtagggtacattctcggcttgggagacagacacccttccaacttgatgctggatagactgtctgggaaaatcctgcacattgatttcggggattgtttcgaggtcgctatgacacgcgaaaaatttccagagaaaatcccgtttagattgactcggatgttgaccaacgccatggaggtgacaggactggatggcaattatcgaatcacttgtcacacggtgatggaggtattgcgggagcacaaagattcagtcatggctgtgctggaagcttttgtttacgaccctctgctgaattggagactcatggacaccaataccaagggtaataaacgcagccgtacccgcactgattcctattcggccggacagagtgtggagattttagacggggtggaactgggggaacctgctcacaagaaaactggcaccactgtcccagaaagtatccatagctttatcggcgacggcttagtgaaaccggaggccttaaataagaaagcgatccagattattaacagggtgcgcgataaactcacaggaagagatttctcccatgacgatactctggatgtcccaactcaagttgaattactcatcaagcaggccacgtcccacgagaatttgtgccagtgttatatcggctggtgtcctttttggta

SEQ ID NO: 29369 - DNA, 2265 bp, synthetic construct
  misc_feature 1..2265: note = Description of Artificial Sequence: Synthetic coding sequence
  source 1..2265: mol_type = other DNA
atgaactttgaggccgtgcttcattacaaacaccaaaatcaggcaagggatgaaaagaaaaaactcagacacgcctctggtgccaatatcaccaacgccacaaccgctgctacaacagctgccacggcaactactacagcctcaaccgagggctctaattccgaatccgaagctgaaagtactgagaattcccccactcctagtccattgcagaaaaaggttactgaggatctatcaaagacactcctcatgtacactgtgcccgcagtgcagggcttctttaggagcatctcactgtcgcggggaaacaatttgcaggatacactgcgagttctaacactatggttcgattacgggcactggcccgatgttaatgaggcacttgttgagggcgtcaaggccatccagattgatacctggttgcaggtcattcctcagctcatcgccaggatcgacaccccgagacctctggtaggacgactcattcatcagctgctgacagacattgggcgttaccatccacaggctttgatttacccacttaccgtcgcttctaagtcgaccaccacagcacgtcataatgccgctaataaaatactcaagaacatgtgtgagcacagtaacactctggtgcagcaggcaatgatggtctcagaggagctgattcgggtggcaattctatggcatgagatgtggcatgaaggcttagaagaggcgtcccggttatatttcggggaaaggaacgtgaaagggatgttcgaagtgctggagcctttgcatgccatgatggagagggggccacaaacactgaaggagactagcttcaatcaggcttacggacgcgaccttatggaagcacaggagtggtgccgaaaatacatgaagagtggaaatgtcaaagatctgactcaagcctgggacttatactaccacgtgtttcgacgcatatccaaacaactcccgcaactgacttctctggagctacagtacgttagccctaagctactgatgtgtcgggacctcgaattggctgtacctggcacctacgaccccaatcagcctatcatcaggattcagagcatagccccttctctccaagtgatcacgtccaaacagcgtccgagaaaactgacactaatgggctcaaatggccacgaattcgtatttctgctgaaggggcacgaggatctgcgacaggatgaacgggtgatgcagctcttcgggcttgttaacacactcctggcaaatgatcccaccagcctgagaaaaaacctctctatccagagatacgcagttatcccactctctacgaatagtgggctgattggctgggtaccccactgtgatactcttcacgcactcatcagggactatagggagaagaagaagatccttcttaacatcgaacaccgtattatgctgcgaatggcaccagattatgaccacttgacccttatgcagaaagtggaggtgttcgaacacgccgtaaataataccgccggagatgacctcgctaaactgttgtggctgaagtctccctcttcagaagtttggtttgaccgaagaaccaactacactagaagcctcgccgtaatgtccatggtcggctatatcctcggcttaggtgacaggcatcctagcaatctgatgctcgaccggctaagtgggaaaattctccatattgacttcggggattgctttgaggtcgccatgacccgcgagaaattcccagaaaagatccccttcaggctgacccgcatgctcactaatgcgatggaagtgactggactcgatggaaactatcggatcacgtgtcacaccgtgatggaggtcctgcgcgaacataaggatagtgtaatggcggtgttggaggcctttgtctacgaccctctcctgaactggagattgatggacaccaacacaaaggggaacaaacggtccagaaccagaaccgacagctattcagcaggccagtctgtggagattcttgacggtgtggagctgggagaacccgcacataagaagacggggacaaccgttcctgaatccattcactcatttattggtgacggacttgtgaaacctgaggccctgaacaaaaaggctattcaaatcatcaaccgcgttcgagacaagttgacaggaagggatttttcacacgatgataccctcgatgttcccacccaggtggagctcctgatcaaacaggcgacctcccatgagaacctctgtcaatgttatatcggctggtgccctttctggtag

SEQ ID NO: 29370 - DNA, 486 bp, synthetic construct
  misc_feature 1..486: note = Description of Artificial Sequence: Synthetic coding sequence
  source 1..486: mol_type = other DNA
atgctggacaggctcagcggcaagatactccatatagatttcggcgactgctttgaagtagcaatgactagggagaagtttccagagaagatcccctttagactgacccgtatgctgaccaatgcgatggaggtgacgggtttggatggcaattatcgtattacatgccacactgtaatggaggtcctgcgggaacataaggatagcgtaatggccgttctcgaagccttcgtgtatgatcctctcctcaactggaggctgatggatacaaataccaagggtaataagcgctctaggactcgcacagactcctactccgctggtcagtcagtggagatacttgacggggtcgagttgggtgagcccgcacataagaaaactggcaccactgtgcctgagtcgattcactcttttatcggcgatggcctggtcaaacccgaggccctaaataaaaaggccattcagatcattaacagggtccggtag

SEQ ID NO: 29371 - DNA, 5186 bp, synthetic construct
  misc_feature 1..5186: note = Description of Artificial Sequence: Synthetic coding sequence
  source 1..5186: mol_type = other DNA
atgctcggtactggaccggcagctgccaccacagccgcaactacctcaagcaatgtctcggtacttcagcaatttgctagtggcttgaaaagtagaaatgaggagactagggcaaaggccgcaaaggagctccagcactatgtgactatggaactgcgcgaaatgagccaggaggaatccacccggttttatgatcagctcaatcaccatatcttcgaactggtatcatcctccgatgctaacgagcgtaagggtggaattctggcaattgcatcccttatcggggtggaggggggaaatgccacccgcattggcagattcgcaaactacctgaggaatcttctgccctccaatgaccccgtagtcatggagatggcttctaaagctatcgggcgtcttgccatggctggcgacacatttacagccgaatacgtagaatttgaagtgaagagggcactggaatggctgggtgcagataggaatgaaggacgcaggcacgccgcagtgctcgtgttaagagaactggctatatcagtccccacctttttcttccagcaagttcaacccttctttgataacatttttgtggccgtatgggaccctaaacaagcaatcagggaaggtgctgtggccgctttgcgggcttgcttgattttgacaactcagcgtgagcccaaggaaatgcaaaagccacagtggtaccgccatacattcgaggaggccgagaagggttttgatgaaactctggccaaagaaaaaggaatgaaccgcgacgataggatccacggagccctgctgatcttgaatgaactggttaggataagctcgatggagggggaaaggctccgagaagagatggaggagatcacccaacaacaactagtccatgacaagtactgcaaggacctcatggggttcgggacaaaaccccgtcacatcacgccatttacgagctttcaagcagtacagcctcagcagagtaacgcattggtcggtctgctgggatattcaagccaccagggcttgatgggattcggtacgtcgccatctcccgctaagtctacactggtggagagtcgctgctgcagagatctaatggaagaaaagtttgatcaggtgtgtcaatgggttctcaagtgccgcaactcaaaaaattctttgattcagatgacaatcttgaatctgctgccccgactagccgctttccggccttcggcttttaccgacacccagtatctgcaagacacaatgaatcacgtgttgtcatgtgtcaaaaaggaaaaagagagaactgcagcgttccaagcactcggcttgctgagcgtggcagtgagatccgaattcaaagtgtacctgccacgggtgctggacatcattcgtgctgcactcccaccaaaggactttgcccataaacgacagaaggctatgcaggtggacgccaccgtgttcacctgtattagcatgctcgcgagagccatgggacccggtattcaacaggacataaaagagttgctcgagcccatgctagccgttggactaagccctgctttaaccgcagtcctttacgacctcagtcgccaaattcctcagcttaagaaagatattcaggatggactattaaagatgttgtctcttgtgctgatgcataaacctttgcggcaccccggaatgccaaagggactagcccatcagctcgcatcacccggattaaccactctcccagaggcgagcgatgttggcagtatcacactggcactgcgaacactaggcagttttgagttcgaagggcacagcctcactcagtttgtcagacattgcgctgaccacttccttaactcggaacacaaagagataaggatggaggccgcaagaacctgtagtcggctgcttacacctagcatccacctgatttccggtcacgctcatgttgtcagccagacagctgtgcaagttgtggccgacgtgttgagtaagctgctggtggtcggaattacagaccctgatcccgatattcgatactgtgtgctagcgagcttagatgaaagattcgacgcgcacctggctcaagcagagaatctccaggctctttttgtggctcttaacgatcaggtgttcgaaattagagagctcgcaatctgcaccgtggggaggctcagttcaatgaaccccgcatttgtgatgcccttcctgaggaaaatgctcattcagattctgaccgagctcgaacatagtggtataggaaggattaaagagcaatccgcaaggatgttagggcatctcgtcagtaacgcccctcggctcattaggccatacatggaaccaatccttaaagcactcatccttaaactcaaagacccagatccggacccaaatcccggagtgattaacaatgtgctggccaccattggtgaactggctcaggtcagcggacttgagatgcggaaatgggtcgacgaattatttatcattatcatggatatgctccaggattcctctctgctcgcaaaaaggcaggttgcattgtggaccctgggccagctggttgccagcaccggctacgttgttgagccttaccggaaatatcctactttgctggaggtgctgttgaactttctgaagacagagcagaaccagggcactcggcgtgaagcgatcagggtgcttggcttacttggagccctggatccctataagcataaggtcaacattgggatgatcgatcagtcgcgagacgcgagcgctgtcagcctgtctgagtcaaagagctcacaggacagctctgattatagtacgtctgaaatgttagttaacatgggtaacttaccccttgacgagttttatccagccgtgagtatggtcgccctaatgcgcatctttcgtgaccagagcctgtcgcaccatcataccatggtggtgcaggcaatcacctttattttcaaaagcctcggattgaagtgtgtacaatttctccctcaggtgatgcccaccttcctaaacgttattagagtctgtgatggcgcaatccgagaattcctctttcagcaattggggatgctggttagctttgtcaaatcccacatacggccttacatggatgaaattgtgacactcatgcgtgagttttgggtcatgaacacttccatccaatctactattattctcttgattgaacagattgtggtggctctggggggagagtttaagctatacctgccccagctgattcctcacatgttaagagtattcatgcacgataacagccccggtcgcattgtgtcaattaagttactggccgcaatccagctcttcggagccaatctcgacgactatctgcacttgcttcttccacctattgtgaagctctttgacgcccctgaggcaccacttccaagccgtaaggccgctctggagacagtggatcggttgacagagtccctcgattttacagattacgcttcaagaatcatccatccaattgtgcggacgctggaccagagccccgagctgcgaagtactgcaatggacaccctgagcagcctcgtgttccagctgggtaaaaaatatcagattttcatccccatggtcaacaaggtcctggttaggcacagaatcaatcaccagcgttatgacgtgcttatctgcaggattgtgaaagggtacactctggccgacgaggaggaggatcccctgatttaccagcatcggatgctgcgcagtggccagggggatgcacttgcttccgggcctgtggagactggtccaatgaaaaagctacacgtatccacaattaacctgcagaaggcttggggagccgctagaagggtgagcaaggacgactggcttgaatggcttcggagactctccctggaactgctcaaggacagcagttctcccagtctgcgtagctgctgggcgctcgcccaggcttataatccaatggcacgcgacttgttcaacgctgccttcgttagttgctggtcagagctgaatgaagaccaacaggacgaactgatccgttccattgaattagcattgacttcccaggatatcgccgaagtgacccagaccttgctgaatctggctgagtttatggaacactcagacaaaggacctctgcctctacgagatgataacggcatcgtcttgcttggtgaacgggcagcaaaatgtcgtgcctacgcgaaagctttgcactacaaggagttggagttccaaaaaggccctacaccagctatcttggagtcattgatatcgatcaataacaagcttcagcagcccgaggcagctgccggagtcctggaatacgcaatgaagcattttggggaattagagatccaagcaacctggtatgaaaagctacatgagtgggaagacgcactcgtggcatatgataaaaagatggacaccaacaaggacgatccagaactgatgctgggacgcatgagatgcctcgaagccctgggagagtgggggcagttgcatcagcagtgctgtgagaagtggacattagtgaacgacgagacccaggcaaagatggccagaatggcggcagccgctgcttggggcctgggacagtgggatagtatggaggagtatacctgcatgattccgagagacacacacgacggagcgttctatcgtgccgtgcttgcattgcaccaagacctttttagtttagcacagcaatgcatcgacaaggctcgtgaccttctagacgctgaactgacagccatggccggtgagtcttactctagggcttatggcgctatggtgtcttgccacatgctcagcgaattagaagaggttattcagtataagctggtgcccgagcgtagggagattatacgacagatttggtgggaacgccttcagggctgccagagaattgtggaggattggcagaagatattgatggtacgctcgctagtggtgtcacctcacgaagacatgagaacctggctaaagtatgcatccctgtgtggaaaatcaggacgcttggctatcgcaccgctgaacatgggcacggcaaatagtgcccagccaagatcactccggtcttggcgcacctggatacggattctcgattgtaaagacactgaggatgctgatctcacacctgccacgtatccgaagacatctctcgtgtgcggccaacagcaaaaatgccttcaggacaggccaaagta

SEQ ID NO: 29372 - DNA, 6269 bp, synthetic construct
  misc_feature 1..6269: note = Description of Artificial Sequence: Synthetic coding sequence
  source 1..6269: mol_type = other DNA
atggaggatactcaggcgattgattgggacgtggaggaggaagaggagacggagcagtcttccgagagcttacgctgcaacgtggagcccgttggaaggctacacatcttctccggtgcccacgggcctgagaaagactttccgctgcatctggggaagaatgtcgtaggcaggatgcccgactgttcagttgcactgccatttccttcaatctctaaacagcatgccgagatcgaaatcctggcttgggacaaggctcccatccttcgcgactgtggttctttaaacggtactcagattctgagaccaccaaaggtgctgagtccaggagtgtctcatcggctgcgtgatcaggagctgatactgttcgctgaccttctttgtcagtatcatcgattggacgtgtccctcccttttgtgtcaagaggtcctctgactgtagaagagactcccagggtccagggcgagacacagccccagcgtcttttgctggccgaggactcggaagaggaggtggacttcctctctgagaggaggatggtaaagaaatcccgcacaacttcttcttccgtcattgtgccagaaagtgacgaagaaggtcattctccagtcctggggggattagggcctcctttcgcgttcaatctcaatagcgatactgatgtcgaggaagggcagcaaccagccaccgaagaggcatctagtgccgctcggaggggtgcaacagtcgaggcaaaacagagcgaggccgaggtggtaaccgaaattcaactggagaaagatcaacctctcgtcaaagagaaagataacgataccaaggtgaagagaggagctggtaacggcgtcgtgccggctggagtcatcctggaacggtctcagccccctggtgaagactcggacacagatgtggatgatgacagccggcctccaggaagaccagccgaagtacacctcgaaagagcccagccgttcggatttattgacagcgacactgacgccgaggaggaacgcattcccgcaaccccggtggtgatcccaatgaaaaaacgcaagatatttcatggagtcggaacccgtggacctggagccccaggtctggctcacctgcaggaaagtcaggccggatctgatacagatgtcgaagaagggaaagccccacaggccgtgcctttagagaagagccaagctagcatggtgattaattccgacactgacgacgaagaagaagtgagcgccgctttgaccctcgcacatttaaaggagtcacagcccgcaatatggaatcgggatgctgaagaagatatgcctcagcgcgtagtcttgttacagaggtcccagacaacaaccgagcgagacagcgataccgacgtggaagaggaggagttacctgttgagaatcgcgaggcagtgttgaaagatcacaccaaaattcgtgcactcgtgagggcacacagcgaaaaagaccagccccctttcggagactctgatgacagcgtagaggctgataaaagcagccctggaatacacctagaacgctcccaggctagcaccactgtcgatatcaatacccaggtggaaaaggaagtaccaccagggtccgcaatcatccatatcaaaaagcatcaggtgagcgttgaaggtaccaaccagactgatgtgaaggccgtcgggggtcctgccaaactgttggttgtatcattggaggaggcctggccactgcacggagattgcgagactgacgccgaggaaggcacatcactcacagcgtctgtggtagcagacgtgaggaagtcccagttaccagccgagggtgatgctggcgctgaatgggcagcagcagtcctcaaacaggagcgagcacatgaggtgggggcacaggggggacccccagttgcacaagtggaacaggatctgcctatatcacgcgaaaaccttacagacctggtggttgataccgacaccctgggcgagagtacccagcctcagcgcgagggcgctcaggtgcccaccggacgtgagcgggaacagcacgtcgggggtaccaaagattccgaagataactatggtgattctgaagacctggatctgcaggcaacacagtgcttccttgaaaaccaagggctggaggctgtccagtcaatggaagacgagcctacccaggcctttatgctcacaccgcctcaggaattaggcccaagccactgttcattccagactacggggaccctcgacgagccctgggaggtgttggctacccagcccttctgcctgcgcgagagtgaagatagcgaaacgcagccctttgacacccatctggaggcctacggcccatgtttgagcccccctagagccattccgggagaccaacatcccgaatcacctgtgcacacagaacctatgggcatccagggtcggggacgtcaaaccgttgacaaagtgatggggatccccaaagagacggcggagcgggttggcccagagaggggacccctcgagcgtgagaccgagaagctgctgcctgagcggcagaccgatgttacgggggaagaagaactgacaaagggcaagcaggatagagaacagaaacaactgctcgctcgcgacacgcagcggcaggaatccgataagaacggcgagtcagcttcacccgaaagagatcgtgagagtttgaaagtggaaatcgagacgagtgaagagatccaagagaaacaagtacagaaacagaccctgccttccaaggcttttgagagagaggtggagcggccagtggccaaccgagaatgtgatcctgctgagcttgaggagaaggtgcctaaagtgattcttgagcgagacacacagagaggggagccagaagggggttctcaagatcagaagggccaggcctcctcaccaacacccgagccaggtgttggcgctggtgatctgcctggccctaccagtgcccctgttccaagtggatcccagtccgggggacgagggtcccccgtcagtcctcgccgacaccaaaagggcctacttaactgcaaaatgcctcctgcagagaaagcatcccggattcgcgcagccgagaaagtgtctcgaggagatcaagagagccccgacgcctgcctgcctcctaccgtgccagaggccccagcccctccacagaaacctctcaacagccagtcccagaagcacctggctccaccaccgctgctttcccccctgcttccgtctatcaaacccaccgtccgaaagacgagacaggatggatcacaggaagctcccgaggcacccctttctagcgaactagaaccctttcacccgaagcccaagatacgcactcgaaagtcctctcggatgacaccattccccgctacctcagcagctcctgagccacatccctccacttccacagcccaacctgttaccccaaagccaaccagccaggctactcggagccgtactaatcgatctagtgttaagaccccagagccagtcgtccctacggcacccgaactccaaccatcaacgtccacggatcagcccgttacttctgaaccaaccagtcaagtgactaggggccgaaaaagtcggtcgtctgtgaagactcctgagacagtcgttccgactgcgcttgagctccagccatcaactagcactgacaggcccgtgacttcagagcctacatctcaggccactagaggaagaaagaatcgctcatctgtgaagacccctgagcccgtcgtgcctacagccccagagctgcaaccttcgacgtcaacagaccagccagttactagcgagccgacctaccaggccacgcgtggcagaaagaaccgttcatctgtaaaaacccccgaacccgtggtgccaaccgcaccagaactgcggccttcaaccagcacagatcggcctgtaacgcccaagcctacgtccagaactacacgcagtcgcactaacatgtcttctgttaaaacgccagagacagtggtgcccactgcccctgagttacagatctcaaccagcacagaccagcctgttacacctaagccaacttctcgaactacaagatcaagaacaaacatgagttctgtgaagaaccccgaatccacggttcctatcgccccagagcttccgccatcaacctcaaccgagcaaccagtcacgccagaacctacgagtcgcgcaacgagaggacggaagaaccgcagtagcggtaaaactcccgagacgctcgtgcctaccgcacctaagctggagccgagcacttcaaccgaccagcccgttacccccgagccgacatcccaggccacccggggtagaactaacaggagctcagtgaagacccctgagaccgttgtacccactgcacccgaactccagccatctacatccaccgatcaacccgtgaccccggaacccaccagccaggcgacgagaggccgaacggatcgcagtagcgttaaaacgcccgaaaccgtcgtgcccacagcaccggagctccaggcctccgcctcaaccgaccaacctgtgaccagcgaacctacgtctaggaccacacgaggccgtaagaacagatccagcgtgaagacgccagaaactgtggtgcccgctgctccagaattacagcctagcacttccaccgatcaaccagttactcctgagcctacgtcccgtgcaacacgtggcagaacgaacaggtctagtgtcaagacgccagagtccatcgtgcccatcgcccctgagctacaaccctccacaagcaggaatcagctggtcactcctgagcctacatcccgagctactaggtgtagaactaatagatcttccgttaagaccccagaaccggtagtgcccacggcccctgagccacaccctaccactagcactgaccagcctgttacccccaagcttacctctagggcaacccgaaggaaaactaataggagcagcgttaagacccccaagcccgtggagcccgcagcttccgatcttgaaccatttactcccacagatcagagcgtgaccccagaggccattgctcaaggtggacaaagtaagaccctcagatcctccacggtgcgggctatgcccgtgcccacgactcccgagttccagagccctgtaaccactgaccaacccatcagtccagagccaattacacagccgagctgcataaaacggcagcgggcagccggaaatccaggaagtttggccgctcccattgatcacaaaccgtgctccgcaccactggaacccaagagccaggcctccagaaatcagcgctggggggcagtgcgcgctgccgagtcacttacggccattccggagccagccagtcctcagctgctggagacaccaatacatgcctctcagattcagaaggtggagccagctggcaggtcaaggttcacccctgagctccagccgaaagccagccagtctaggaaaaggagcctggcaaccatggattccccccctcaccagaagcagcctcagcggggagaggtatcacagaaaacagtgattattaaagaggaagaggaagacacagccgaaaagccgggaaaagaggaggatgtcgtgaccccaaagcccggtaagcggaagcgcgatcaggctgaggaagagcccaacagaataccgagtagaagcctcaggaggaccaaactgaatcaagagagtactgcccctaaggtcctgtttactggagtagtcgatgccagaggcgagagagccgtgctcgcacttggcggatctctggctggaagtgccgcagaggcctcccacctggtcactgaccgaattcggaggactgtgaagttcctttgcgccctgggacgcggaatacctatcctcagcctggattggcttcaccagtcgcgcaaagccggtttcttcctccctccggacgagtacgtggttaccgatccagagcaggagaaaaatttcggatttagcctgcaggacgccctctctcgggctcgagaaaggcgcctcctcgaaggctatgagatctatgtgactcccggtgtgcagccacctccaccccagatgggagaaatcatatcttgttgcggcggtacatacctgccatcgatgccaagaagttataaaccacagcgggtcgtaatcacatgtccccaagactttccgcactgtagtatccctctcagggtaggcctgccacttctgtcaccagagttccttctgactggcgtgttaaagcaggaagctaagccagaggcctttgtcctttcacctctggaaatgagctcgacgta

SEQ ID NO: 29373 - DNA, 489 bp, synthetic construct
  misc_feature 1..489: note = Description of Artificial Sequence: Synthetic coding sequence
  source 1..489: mol_type = other DNA
atggaggacacccaagccatcgactgggacgtggaagaggaggaagagaccgagcagagttcagaatcactgcgctgcaatgtagaacccgtaggtaggctacatatcttctcgggagcccacgggcctgaaaaggactttcctttacatctgggaaaaaatgtagttgggagaatgcctgactgttccgtggccctccctttcccatctatctccaagcagcacgctgaaattgagatacttgcctgggacaaggctcctattctgcgggattgcggctctctcaacggtacccaaatcctgcgccctcccaaagttctctcccctggcgttagccatagattgcgtgatcaggaactgattcttttcgcagacttgctgtgccaatatcaccggctggatgtgtcactccctttcgtgtcacgcggacctcttaccgtggaggagaccccgcgtgtgcagggagagactcagccccaaaggctgtag

SEQ ID NO: 29374 - DNA, 384 bp, synthetic construct
  misc_feature 1..384: note = Description of Artificial Sequence: Synthetic coding sequence
  source 1..384: mol_type = other DNA
atggaagacactcaggccatcgattgggatgttgaggaagaggaagaaacagaacagtcgtcggagagcttgcggtgtaacgtggaaccagtcggcaggcttcacatcttctctggcgcacatgggcctgagaaagatttcccactccatctcggcaaaaatgtcgtgggtcgaatgccggattgttcagtggcactgccattccctagcataagcaagcagcacgccgaaatagagattctggcctgggacaaggcgccaattctgagggactgtggctcacttaacgggactcaaattttgcgacccccaaaggttctctcacctggggtgtcccacaggctccgcgaccaggagctaattctctttgccgacctcctgtag

SEQ ID NO: 29375 - DNA, 921 bp, synthetic construct
  misc_feature 1..921: note = Description of Artificial Sequence: Synthetic coding sequence
  source 1..921: mol_type = other DNA
tgacatgtcggagggacaaaggattcggaggataattacggggactccgaggatctggacttgcaggccacacagtgctttctggagaatcagggattagaggctgtacagtctatggaagacgagcctacccaggcttttatgttgacaccgcctcaggagctgggcccttcccactgcagtttccagacaacgggcttgctgaattgtaagatgcccccagcagaaaaagccagcagaatacgcgcagccgagaaggtgagtagaggagaccaggaaagccctgatgcgtgccttccaccaactgtaccagaagcccctgcccctcctcagaagccactgaatagccagtcccaaaagcacctcgcaccaccccctctgctttctccgctgcttccatctattaagccaacggttagaaaaacacgccaggacggatcgcaagaggcccctgaggcccctttaagctccgagctggaacccttccacccaaaacccaagatcagaacgcggaaatccagcagaatgacaccattcccggctacgagcgctgccccagaacctcaccctagtacctctaccgcccagcccgtaaccccaaaacccaccagccaggccacgcgaagtcgcacaaacaggtcatccgtcaagaccccggaacctgttgtgcccacagccccagagctgcaaccaagtacttccactgatcaacccgtgacatcagagcctacatcccaagtgaccagggggaggaagtcacggtcgagcgtaaaaaccccagagaccgtggtacctaccgccctggagttacaaccttctaccagcacagacaggcccgtgaccagcgagcccacgtctcaggcaacccgcggtcgcaaaaatcgaagctctgtgaaaacacccgagccggtggtaccctag

SEQ ID NO: 29376 - DNA, 342 bp, synthetic construct
  misc_feature 1..342: note = Description of Artificial Sequence: Synthetic coding sequence
  source 1..342: mol_type = other DNA
atggaggatacccaggccatagattgggacgtcgaagaagaagaggaaacagagcaaagctcagaaagtctgcgctgcaacgtggagccagtcggtaggctgcacatctttagtggagcacatggacccgagaaggatttccctctgcatctcggcaaaaatgtggtggggcgaatgccagattgcagcgtagccttgccctttccaagcattagcaaacaacatgccgaaatagaaattctggcatgggataaagctccaatcctacgtgattgcggatcgttaaatggcacccagatcttaaggccaccaaaagtccttagcccgggagtaagccactag

SEQ ID NO: 29377 - DNA, 5408 bp, synthetic construct
  misc_feature 1..5408: note = Description of Artificial Sequence: Synthetic coding sequence
  source 1..5408: mol_type = other DNA
atggaggacacgcaggcaatcgattgggacgtggaggaagaggaggaaactgaacagagtagcgaatctctccgctgcaatgtagagccggtcgggaggctgcacatctttagcggagcacatgggccagaaaaggatttcccactgcaccttggaaagaatgtggtggggcgtatgcctgactgttcagtcgctctgccgtttccaagcatctctaagcagcatgcagaaattgaaatcctggcctgggacaaggccccaattctgcgggactgtggctctttgaatggaacccagattttgcgccctcccaaggttcttagccctggagtaagccaccggctacgcgatcaggagctgatattatttgcagatctcctgtgccagtatcacaggctagacgtatctctgcccttcgtgtctagaggaccactgaccgtcgaagagacccccagggttcaaggcgaaacccagcctcaacgactgttgttagccgaggatagcgaagaggaggtggacttcttgtcagagaggagaatggtgaaaaagagtagaacaacctcctcgtctgtaatcgtccccgagtctgatgaagaaggacacagtcccgttcttggtggattgggtcccccattcgctttcaatctgaattctgacacggatgtggaggagggacagcagcccgcaactgaggaggcctctagcgccgctaggagaggcgcaaccgttgaagccaagcagtccgaggccgaggtggtcactgaaattcagctcgaaaaggatcagccactggttaaggagaaagataacgacaccaaagttaaacggggtgctggcaacggggtggtgcctgccggagtaatactcgaacgcagccagcccccaggagaggattcagataccgacgtggacgacgacagccgcccacccggaagacccgctgaagtgcatctggaaagggcccaaccttttggattcatagactcagatactgacgccgaggaggagcgcatacctgctacacccgtggttattcctatgaagaaaagaaagatttttcatggagtaggaacaagaggacccggtgcaccgggactggcacatctccaggagtcacaggcaggaagcgacactgacgtcgaagagggtaaggcccctcaggccgtccctcttgaaaagagccaggcttctatggtgataaattccgataccgatgacgaggaagaagtgtctgccgctctgacactggcgcacctgaaagagtctcagccggcaatctggaatcgagatgccgaagaagacatgccacaaagggttgtgcttcttcaacggtctcagactaccactgagcgtgacagcgatacagacgtggaggaagaggagctccctgtggaaaatcgcgaggccgtgctcaaggaccacaccaagattcgtgccttggtacgtgcccacagcgaaaaggatcaacctccttttggcgactcggatgatagcgtggaagccgataagtcctcccccggaattcacctcgaaagaagccaagccagtacaaccgtcgatattaatacccaggttgagaaagaggtccccccaggaagtgccatcattcacatcaaaaagcaccaggtgtctgtggagggcacaaatcagactgacgtgaaggccgtaggaggccctgccaaactcttggtagtgagtctggaggaggcctggcccctgcatggagattgtgagaccgatgctgaagagggcacaagcttgactgctagtgtcgtggccgacgtgcgcaagtctcagctgcctgctgagggagatgccggtgccgaatgggcggctgccgtgttgaagcaggaacgcgctcatgaggttggagcccaggggggtccgcctgtagcccaggtggagcaggacctccccatctctagggagaatctgaccgacctggttgtcgacacagacaccttgggcgagagcacacagccacagagagagggggctcaggtcccaaccggcagagaaagggaacaacatgttggtggcaccaaagactctgaggataactacggggatagcgaggatttggacttgcaggctactcagtgtttcttagaaaatcagggtttggaagcagtccagtcgatggaagatgagccgacccaggccttcatgctgacaccgccacaggagttggggcctagtcattgtagcttccaaaccacggggacattggacgaaccatgggaggtgctcgcaacgcagccattctgcctccgggaaagcgaggactccgagacacagccattcgatactcacctggaggcctacggaccctgcctgtctccaccccgagccatcccgggagatcaacaccccgagtctcccgtgcataccgagccaatgggtatccagggtcggggaaggcaaacagttgataaggttatggggattcccaaagagacagccgagagggtgggacccgagagaggtcctctggagcgcgagacggagaaattattgccagagagacaaactgatgtgaccggcgaggaggagctgaccaaggggaagcaggatagagaacagaagcaacttctcgcccgagatacccaaagacaggagagtgacaagaacggcgagagtgcgtctccggaacgcgacagggaatccttaaaagtggaaatcgagaccagcgaggagatccaggaaaagcaagttcaaaagcaaactcttccaagcaaagcattcgagcgggaagttgagagacctgtggctaatagagagtgtgaccctgccgagctcgaggagaaagtgcccaaagtgatcctggagagagatacacaaaggggcgagcccgaaggagggtctcaagaccaaaagggtcaagcatcttcacctacacccgagcctggagtgggagcaggggatcttccaggtccgaccagcgcccctgtcccctctggatcccagtctggtgggcgaggctcccccgtgtctcctcgacgacaccagaaaggtctgctgaattgcaaaatgccccctgctgaaaaggcctctagaattcgcgctgcagagaaggtctcgaggggcgatcaggagtctcctgacgcatgcctcccccctaccgtccccgaagctcctgcgcctccacaaaaaccactgaactcccaatcccaaaagcaccttgctcccccaccactgctgtcacccttactgccttcaattaaaccaactgttcgtaaaacacgtcaggatggcagccaagaggctcccgaagccccactgtcatccgagcttgaaccttttcaccccaaacctaagataagaacccggaaatctagcagaatgacacccttcccagccacaagtgcagctccaaagctagagccaagcacctccactgaccagcccgtgacacctgagccaactagccaggccacgcgcggacgaacaaacaggagttctgtgaagactcctgaaaccgttgtgcctactgctccagaactgcagcccagtacttccacagatcagccagtcacccctgaacccacctcgcaggcaacacgaggacggaccgacagatcctcagtcaaaaccccagagaccgtggtccccaccgctcctgagctacaagcctccgctagcaccgaccagccggtgacctctgagccgacgagtcgaactactcggggacgtaagaaccgaagctccgtgaagaccccggagaccgtggttcccgcagccccagagctgcagccaagcacaagcaccgaccagccagtgacacccgaaccgaccagtcgggctacaaggggtcggacaaaccgtagttccgtgaagacaccggaatccatcgtccctatagcaccagaattgcagccaagcacatctcggaaccagctcgtgacccccgagcctacctcacgcgcaacgcgatgccgcaccaatcggtcttccgttaagacccccgagcccgtggtgcctaccgcccctgaacctcaccccacaacctccacagatcaacctgtgacacctaagttaacatcccgggctactaggaggaaaaccaaccgctcatcagtgaagaccccgaagccggtggaaccagccgcatcagatttagaaccctttacacccactgatcagtctgtgacacctgaagccatcgcccaaggtggtcagagtaaaaccctacgcagctcgaccgttcgcgcaatgcccgttccaacaaccccagaattccaatccccagtgaccaccgaccagccaatctcacctgagcccatcacacaacccagctgtatcaaaaggcagcgagcagcgggaaaccccggatctcttgcagcacccattgaccacaaaccatgcagtgctcctttggaaccaaaaagtcaggcctccaggaaccagcggtggggggcagttagagccgcagagtcactcaccgctattcccgagcccgcatctccgcaattactggagaccccgattcacgcatctcagattcagaaagtagaacctgccggacggagcaggttcacaccagagctgcagccaaaagcgtcgcaatctaggaagagaagcctggctacaatggattctcccccacaccagaagcaaccccagagaggcgaggtgtcccagaagacggtgatcatcaaggaagaggaggaggacacagccgagaaacccggaaaggaggaagatgttgtgacacccaagccaggcaaaaggaaacgtgaccaggccgaggaagaacctaacagaatcccctccagaagcctccgacggaccaagttaaaccaggaatccaccgcaccaaaagtactgtttacaggcgtcgtggacgctcgcggtgagagggctgtattggcactgggaggaagcctggctgggtctgcagccgaggccagccacctagtcacggaccggatccggaggacagtaaagtttctgtgcgccctcggacgcggtattcctatcttaagcctggactggcttcaccagtctagaaaggccggtttctttctgccgcctgatgagtacgtagtgacagatcccgaacaagagaaaaacttcggcttctcactccaggatgccctttcgcgggcaagagaaagacggttgttggaaggctatgaaatctatgtaacaccaggtgtccaaccccctcccccacagatgggagagataatttcatgctgtggcggtacatatctgccctctatgccgaggtcgtataaaccccagcgagtcgtgataacatgtcctcaggacttcccgcattgctcaatacctctccgtgtgggtttgcctctgctcagtccagaatttctgctgactggtgttctgaagcaggaggctaagcccgaggccttcgtgctatctccgctggaaatgagtagcacata

SEQ ID NO: 29378 - DNA, 666 bp, synthetic construct
  misc_feature 1..666: note = Description of Artificial Sequence: Synthetic coding sequence
  source 1..666: mol_type = other DNA
atggaagatacgcaggccatcgactgggacgtggaggaagaggaagagacggaacagagttcagaaagcttacgttgtaatgtagagcctgtgggaagactacatatctttagcggcgcacacggccctgagaaagattttccacttcatctgggtaagaatgtggtgggcagaatgccagactgctccgtggccctgccattcccctcaatcagtaaacaacatgccgaaatcgaaattttagcttgggacaaagcacccatactgcgtgactgtggctcgttgaatgggactcaaatcctatcaagtagcctgccgccaccccagacatctctgctgccactctctttgcgcttgcgccttctgggagaagaacagattgatccattgtcaagactactcaaacagctgagcccacagccgctctcttaccggttaccaccaccccaaacatctctctcacctctaagccctcacctgggtccgctgggggaggaaaaaataggaccgctgtccaggccattgaagcagttatgtccgcagcctctgagcagctctctgcccccaccacagacgaacctaagcccactctcccctcatcttggcccactgggagccggacagatcggcccactaagccggccattgaaccagctgagcctgtag

SEQ ID NO: 29379 - DNA, 738 bp, synthetic construct
  misc_feature 1..738: note = Description of Artificial Sequence: Synthetic coding sequence
  source 1..738: mol_type = other DNA
atggaagacacacaagccattgattgggacgtggaggaagaggaagagacagagcaaagttccgagtctctgagatgtaatgtggaaccagtggggagacttcacatcttctctggagctcatggaccagaaaaggactttcccttgcacctggggaaaaacgtcgtcggacgtatgcctgactgcagtgtggccctcccatttccctccatatccaaacaacatgctgagattgagattctggcatgggacaaagctcccattctgagggactgtggttccttgaacggaactcaaatattacggccacccaaggtgctctcaccaggcgtgtcacaccgcttgcgcgaccaggagctcatacttttcgctgaccttctgtgtcagtatcatcggctggacgtgagcttacccttcgtgtcgcggggacccttgactgtggaagaaacgccacgcgtgcagggagaaacccaaccccagcgccttttgctggcagaagactcagaggaggaagttgactttttgagcgaaaggagaatggttaaaaagtcccgaaccaccagcagtagcgttatcgtccctgagagtgacgaagaagggcactcccccgtcctaggaggactgggtccaccttttgctttcaatctgaactcggacactgatgtagaagagggacagcagccagctactgaagaggcctcttccgcagcacgccgaggcgcaacggttgaggcttag

SEQ ID NO: 29380 - DNA, 735 bp, synthetic construct
  misc_feature 1..735: note = Description of Artificial Sequence: Synthetic coding sequence
  source 1..735: mol_type = other DNA
atggaagacacacaggccattgactgggacgtggaggaagaagaggagacagagcagagcagcgagtcccttagatgcaacgttgagccggtcggacggctccacatcttctccggggctcacggccctgaaaaggatttcccactccacctcggcaagaatgtggtaggacgtatgcccgattgcagtgtggctctcccatttccatccatctcaaaacagcacgcagagatcgaaatcctggcttgggacaaggctcccattcttagagactgcgggtcactgaacggaacacagatcctgagaccacccaaagtgctgtctcccggagttagccatagactgcgagaccaggagctgatcttgttcgccgacctcctgtgtcagtatcacagattggatgtgagcctgcccttcgtgagccgaggacccctgactgtcgaggaaaccccaagagtgcaaggcgaaacccagccgcagaggctgttactggcagaagatagtgaagaagaagtggacttcctgagcgaacgaagaatggttaaaaaatccaggaccaccagcagcagtgtgatagttcccgaatccgacgaggaaggtcactcaccagtgctcggcggactcggaccaccgtttgctttcaacttaaatagtgataccgatgttgaagagggtcagcaaccccatcggggtgggctgctgtcttgccagaaaaggtgccattgccggggatag

SEQ ID NO: 29381 - DNA, 5477 bp, synthetic construct
  misc_feature 1..5477: note = Description of Artificial Sequence: Synthetic coding sequence
  source 1..5477: mol_type = other DNA
atggaggatactcaagcgatcgactgggacgttgaagaggaagaggagactgaacaatcctcagaatccctgcgctgtaacgtagagcccgtcggtcgtttgcacattttttcaggggctcatggacccgaaaaggactttcctctgcatctggggaaaaatgtagtggggagaatgcccgattgctccgtcgctctgccttttccatctatttcaaaacagcacgctgagatcgaaatcttagcctgggacaaagctccaatcctgcgggattgcggatctctcaacgggactcagatcctccgaccccctaaagtgctcagtccgggagtgagtcaccgactgagagaccaggaactgatcctgtttgccgacttgttgtgtcaatatcaccgattggatgttagcctgcccttcgtaagtcggggtccacttacagtcgaggaaacccctagagtccagggcgagacccagcctcagaggctgctgctggcggaggactccgaggaggaggtggattttctgtccgaacgccgtatggtcaaaaaatcgcgcactaccagtagttctgtcattgtacccgaatcagatgaggagggccattcccccgtccttgggggattgggcccaccattcgcattcaatctgaactctgatactgatgttgaagaaggacagcaaccagccaccgaagaagcctcctccgccgcacggaggggggcaactgtggaggcaaaacagtcagaagcggaagtggtgaccgagatacagctggaaaaagaccagcccctggtcaaggagaaagacaacgacacgaaagtgaaacggggtgcaggaaatggagtggtcccagccggtgtgattctggagagatcacagcctcccggtgaggactccgataccgacgtagatgatgattccagaccgccagggcgacccgctgaagtccacctggagcgcgcacagcctttcggtttcatagacagtgacaccgatgccgaggaagagcggatcccggcaaccccggtggttatcccaatgaaaaaacgcaaaatcttccatggcgtaggcacgagaggcccaggcgctcctggattggcccatctgcaggaaagtcaggccggatccgacaccgacgttgaagaaggtaaggcccctcaggctgtgcctctggagaaatcccaggctagcatggtcattaattcagacaccgatgacgaggaagaggtttctgcagccctgactctcgctcacctcaaggagagccagcccgcaatctggaacagggacgccgaggaagatatgccacagagagtggtcctcctccagcgttctcaaacaaccactgagagagacagcgatacagacgtggaggaagaagaactgcccgtcgagaacagggaagccgtacttaaagaccataccaaaattcgcgcactcgtgcgggcacatagtgaaaaggatcagcctccattcggagacagtgacgactctgtggaggcagacaagtcgagcccaggaatacacctcgaacgaagccaggcatctactaccgtcgacatcaatacacaggtggaaaaggaagttcctcctggctcagccatcattcacatcaaaaagcaccaggtgagcgtggagggcactaatcagacagacgttaaggccgtggggggaccagccaaattgttggtggtctctctcgaggaagcatggccccttcatggtgattgcgagactgacgccgaggaaggtaccagcttaactgcatctgtggtggccgacgttagaaaaagccaactgcccgctgagggtgatgccggtgcagagtgggccgctgctgtgctgaaacaagaacgagcccatgaggtaggagcacagggtgggccacctgttgcccaggtggagcaggatctccctatcagccgcgagaacctcaccgatctggtggtggacacagacacgctgggcgaaagcactcagccccagcgtgagggagcccaggtgccaaccggtcgggagagagagcagcacgtcggagggaccaaggatagtgaagataactacggcgatagcgaggacctggatctgcaggccactcagtgcttcctcgagaaccaaggactggaggctgtgcagtccatggaggatgaacctacacaagcctttatgctgaccccccctcaggaactgggacctagtcattgttcctttcaaaccaccggtttactgaattgcaaaatgccccctgcggagaaagcttcaagaatccgggcagccgagaaagtctctaggggcgatcaggaaagtcccgatgcttgcttgcctcccactgtgccagaggcacctgcccctccacagaagcctctgaactcacagagccaaaagcacctggcaccgcctcccctcctttcccctctgctaccctcgatcaagcccacagttcgcaagacgcggcaagatggctcgcaagaggcgccagaggccccactctccagcgagctggagccattccacccaaagccaaagattcggacccgcaagtccagtcgtatgaccccttttcccgctacgtctgccgctccagagcctcacccgagtacatctaccgcccagccggtgacgccaaaacccacatcccaggcaacccggtctcgcacaaaccgatctagcgttaaaaccccggagcctgtggttcccaccgctcccgagcttcagccaagtacgtcgacagaccagccggttacaagtgaaccgacctcccaggtgactagagggaggaagtcgcggagctctgtcaagaccccggaaacagtggttcctactgccctggagttacaacccagcacctctactgatcggccagtcacatcagaacccaccagccaggctacaagaggacgaaaaaataggtcatcggttaagaccccagaacccgttgtacccacggctcccgagctacaaccaagcacaagtactgaccagcccgtcactagcgaacctacttatcaggccacaagggggaggaaaaacagaagtagcgtgaaaactccagagcctgtggttccgaccgcacctgaattaagaccctcaacaagcactgaccgtcccgtgactccgaagccaaccagtcgaacaacacgatcacgcacgaatatgtccagcgtgaagacccctgaaacggtggtgccaactgctcccgaactgcaaatttcaactagtaccgaccagccagtcacccccaagcccacttctaggaccactcgctcacggactaacatgagctcagtgaagaaccctgaatctacagttccgattgctccagagctgcccccttccacttccaccgaacagccggtaactccagaacccacatcacgggcaacaagagggagaaagaacagatctagcgggaagacaccggaaacgttagtcccaactgccccaaagcttgagccatcaacctctaccgaccagcccgttaccccagaacccacatcccaggccacacggggacggaccaatagatcttcagtgaaaactccagagacagtggtgccgacagccccagagctacagccttccacctctaccgatcagcctgttacacctgaacccacttcccaggctaccagaggccgaaccgaccgatcttctgttaaaaccccagaaactgttgtgccaactgcgccagagctgcaggccagcgcttccactgaccagcctgttacttctgagcctacatcgcgcacaactagaggaagaaagaaccgcagcagcgtgaaaacccctgaaacggttgtgcctgctgcacctgaactgcaacctagcacatctaccgaccagccggtcactcccgagcccacctctagggctactcgagggcgtaccaataggtcctctgtgaaaaccccagagagcatagtgccaatagcaccggaactgcagccaagcacaagcagaaatcaactggttacaccagagccaactagtcgcgctacacggtgtagaactaatcgcagcagtgtgaagacaccagaacctgttgtgccaacagcaccagaaccgcatcctacaacatcaactgatcaacctgtgaccccaaagctcacgagccgggcaactagaagaaagaccaacagaagttctgtgaaaacccccaaacccgtggaacccgctgcatctgacctggagccttttactcccaccgaccagtcagtcactccagaggctatcgctcagggtgggcagagcaaaacacttcgatcctctacagtgagagcgatgcccgtcccaactacacccgaattccagtcccctgtcactaccgatcagcctatatcgcccgagcctataacgcagccatcctgcatcaaaaggcagagggcagcagggaatcccggaagcctggcagcacccatcgaccacaagccatgcagtgctccacttgaaccaaaatctcaggcctccagaaaccagagatggggcgctgtccgggctgccgagtctctaactgcaatcccagagccagcatccccccagctgttagagacccctattcacgcctcccaaatacaaaaggtcgaacccgcaggtcgttccaggttcacaccagagctgcagcctaaagcctcacaatcaaggaaacgaagcctcgccactatggattcacctccacaccagaaacaaccacagagaggcgaggtgtcccagaaaactgtgatcatcaaggaagaagaagaggatactgctgagaagcctggcaaagaggaggatgtggtgacacctaaacctgggaaaagaaagcgggatcaggctgaagaagagccgaatcggatcccgtccagatcacttcggagaacgaaactaaaccaggaatccactgcccctaaggtgcttttcactggcgttgttgacgccagaggtgagagggcggtgttggccttaggtggctcattggctggctccgcggcagaagcttctcatcttgtaacagaccgaatacggagaacagtgaagtttctttgtgcactgggcagaggcatacccatcctctcactcgactggctgcaccaaagccggaaagccggtttctttctgcctccggatgagtatgtggttactgatccagaacaagaaaaaaacttcggcttcagcctgcaggacgccctgtctcgagcaagggaaaggaggctgctagaggggtacgaaatctacgtgacaccaggcgtacagcccccacccccacagatgggcgagatcattagctgctgtgggggtacgtacctaccaagtatgcctcgttcttataaaccccagagggtggttataacttgcccacaagacttccctcactgtagtataccgcttcgagtggggctgcccctgttgtccccagagtttcttttgactggtgtgctgaagcaggaagccaaacccgaagcattcgtgttgagccctctggaaatgagttcaacata

SEQ ID NO: 29382 - DNA, 4968 bp, synthetic construct
  misc_feature 1..4968: note = Description of Artificial Sequence: Synthetic coding sequence
  source 1..4968: mol_type = other DNA
atgtatcatcgtttggacgtgtctctgccttttgtttcaaggggtcccttaaccgtagaggaaactcccagggtccagggcgagacgcaaccacaaaggctgctcctcgctgaagactctgaggaggaagtggacttcctctccgaaaggcgaatggttaaaaagagccgcacaactagttcaagcgtgatcgtccctgaatccgatgaggagggtcacagccctgtgctgggcggattaggccctcctttcgctttcaatcttaactccgacaccgacgtggaagaaggccagcagccagccaccgaagaggcgtccagtgctgccagaagaggtgccaccgttgaagccaagcagagcgaggccgaggtggttacagaaatacaactggaaaaagaccaacctcttgtcaaagaaaaagacaatgatacaaaggtgaagcggggtgctggcaatggcgtggtccccgcaggagtcattcttgaaagaagtcagccacctggcgaggattctgatacagatgtagacgatgactcacgccctcccggtcgaccagctgaagtccaccttgagcgcgctcagcccttcggattcattgatagcgacaccgacgcggaggaagagaggataccagcgacacccgtggtgattcccatgaagaagagaaagatctttcacggcgtgggcacccgaggacccggagctcccggtctggcacacctgcaagagtcgcaagctggatcagacacagacgttgaagagggcaaggcacctcaggcagtgccccttgagaaaagtcaagctagcatggtcattaattcggatactgacgacgaggaggaggtcagcgccgcactcaccctggcccatctgaaggagagccagccagctatctggaacagagatgctgaagaggacatgccacagcgggtggttttgctgcagcgcagccaaacaaccactgaacgggactctgatacagatgttgaggaggaggagctgccagtagagaacagggaagctgtgcttaaagaccacactaaaattcgcgctctggtgagagcccattctgaaaaagaccagcctccttttggggatagcgatgacagtgtcgaagcagacaaaagctcacccggtatacacctcgagagaagccaggcatcaacaacagtagatatcaacactcaggtggagaaggaggttccaccagggtcagccattattcacattaagaagcatcaggtcagcgttgaaggcaccaaccaaacagacgtgaaggccgtcgggggaccagcaaagctgctcgtggtttccctggaggaggcttggccgcttcatggcgactgtgagactgatgccgaggaggggacaagtctgaccgcgtccgttgttgcagatgttagaaaatcccaactgcctgccgagggggatgctggtgccgaatgggccgcagcggtgctcaagcaagagcgagcccatgaggtgggcgctcaggggggacccccagttgcccaagtggagcaggatctgcccatcagccgcgaaaacctgactgacctagtggttgacactgacactcttggggagagtacgcagccacagcgtgaaggcgcacaggtacccactggccgtgagcgcgaacaacatgtaggcggaaccaaggatagcgaagataactatggcgactcggaagacctggacttacaggccacacaatgctttcttgagaatcagggcctggaggttcaaagcatggaagacgaacctacgcaggctttcatgctcacacctcctcaggagctcggcccatcacactgcagcttccagaccaccgggttgctgaattgtaagatgcctcctgctgagaaggcctcacgaatcagggccgctgagaaagtctcccgaggagaccaggaatcccctgatgcctgtctgcctcccaccgttcccgaggcacctgccccacctcagaagcccctgaatagccagtcccagaaacaccttgcaccaccccctttattatctcccttgttgcccagcatcaagcctaccgtgagaaagacaagacaagatggctcacaggaagcccctgaggcacccctgtctagcgagctcgaaccttttcatcctaagcccaaaattcgtactcggaagtcctcgagaatgactcccttccctgcaacatccgcagcacctgagcctcacccatctacgtccacagcacagcccgtcacgcctaaacctaccagccaggctacacgcagccggaccaatcgttcatccgttaaaacccctgaacctgtggttccaactgcaccagagcttcaaccctctacctcaaccgaccagcccgtaacctcagagcctaccagtcaggtgacacgcggaagaaaaagcaggtcctcagttaaaacccccgagacggtcgtccccaccgccctagaactgcagcccagtaccagcaccgatcgccctgtaacctcggagccaacttcgcaggccacgaggggcagaaaaaacaggagctctgtaaagactccagaacccgtggtgccaaccgcacccgaacttcagcccagtacctccactgatcagccagtgacctccgagcctacatatcaggctacacggggaaggaagaacagatcctctgtaaaaacaccggaaccagtggtgccaaccgccccagagctccgtcccagcacatcaacagatcgccctgtgaccccgaagcccactagtcgaaccaccaggagtagaacgaacatgagctcagtcaagaatcctgaaagtacagtgcccatcgcaccagagttacccccttccactagtactgagcaacccgtcacaccagagcctacctcccgggctactagaggaaggaaaaaccgtagtagcggcaaaacccccgagactctcgttcccaccgcaccgaagcttgaacccagtacttccaccgaccagccggtgacccctgagccgacctcccaggctacacggggtcggactaaccggagtagcgtgaagacaccagagactgtagtgcccactgccccagaactgcagccttccacatctaccgatcaacccgtaactccagagccgacatctcaggccacacggggtcgcacagatagatcttctgttaagacccccgaaacagtggttccaacagccccagagctgcaggcttccgcctcaacagaccagcccgtcacgtccgaacctacgagcagaacaaccagaggacgtaagaaccgctcctctgtgaagacacctgagacagtggttcctgcagccccagagcttcagcccagcacctctactgaccagcccgtcacccccgaacccacgtcacgggcaacgcgtggcagaaccaatcggtctagcgtgaaaactcccgagagtatcgtacctatcgccccagagctccagcccagcacatcaaggaaccaattggtgacccctgaacccacatcccgggcaacaaggtgccgtactaaccgcagttccgtcaaaacgcccgaacctgttgtgccaacagctcctgaaccgcatccgacaacctctaccgatcaaccagttacacccaaattgacatccagagctactaggcgaaaaaccaatcgctcctcagtcaaaacgcctaagccggtggaacctgcagcatccgatttggagcctttcactcctaccgaccagtctgtcactccagaggcaatcgcacaggggggacaaagcaagacactcaggagtagtacggttcgcgcaatgcctgtgcccaccacacctgagttccaaagtcccgtgactaccgaccaaccaatatctccagagcccatcactcaacccagttgtattaaaaggcagagagcagcaggcaaccccggatcactcgctgcccctatcgatcataaaccatgcagtgctccactggaacccaaatcacaggcttctagaaaccaaaggtggggggcagtcagggccgcagagtcactgactgccattcccgaaccagctagtccccagctgctcgagacgccaattcacgccagccaaatacagaaggtagagcctgctggtcggtcccgatttacacctgaattgcagcccaaggcctcacagtccaggaaacgctcgctagctactatggatagccctccccatcagaagcagccccaacgcggtgaagtatctcagaagaccgttatcataaaagaggaggaggaggacactgccgagaagccgggaaaggaagaggatgtcgtgacccccaagcccggtaaaaggaaaagggatcaagccgaggaggagcccaaccgaattcctagccggagcctcagacggacaaagttgaatcaggaatctaccgcaccgaaggtcttattcacgggtgttgttgatgcccgaggggagcgcgcagtgctggcgctggggggttctttagccggatcagcagcagaagcgagtcacttagtgactgatcgcattaggaggaccgttaagttcctgtgcgcgctggggagggggatccccatcctcagcttggactggctgcaccagtcaagaaaggcaggttttttccttcctcctgatgaatacgttgtcaccgaccctgagcaggaaaagaatttcggcttctcactgcaggatgccctttctcgcgcaagggagaggaggctcctggaagggtacgagatttacgttacacccggagtgcagcctcccccacctcagatgggggagatcatcagttgttgcgggggtacgtaccttccttcaatgccccgttcctacaagccacaaagggtcgtgattacatgcccgcaggactttccccactgctccattccacttcgcgtcggtcttcctttactatcccccgagttcctcttgacaggcgttctgaaacaggaagcaaagcccgaggccttcgtgctctctccacttgaaatgtcatccacctag

SEQ ID NO: 29383 - DNA, 1941 bp, synthetic construct
  misc_feature 1..1941: note = Description of Artificial Sequence: Synthetic coding sequence
  source 1..1941: mol_type = other DNA
atgggtctaccccgtctggtgtgtgctttccttctggcggcttgttgttgctgccctagggtggctggcgttccaggtgaggcagaacagccagcacccgagctggtggaggtggaagtgggtagcacagctctgctgaagtgtggcttaagccagtctcaggggaatctgagtcacgtggattggttcagtgtccacaaagagaagaggacactgatctttagagtgaggcagggccaggggcagtcagagcctggcgagtacgaacaacgtttgtccctccaggataggggagcaacattagctctgactcaagtgactccacaggatgaaagaatcttcctgtgtcaaggaaagcggcctaggagtcaggagtacagaattcagctccgggtatataaggcccctgaagagccaaacattcaagttaacccactcgggatccctgtgaatagcaaggagccggaagaagtggctacatgcgtaggccgaaatggataccctatccctcaggtgatttggtacaaaaacggacgtcctcttaaggaggaaaaaaaccgtgtgcatatccagtcctcgcagacagtcgagtcatccggcctatacaccctgcagtctatccttaaggcccagctggttaaggaggataaagatgcacagttttattgcgaacttaactaccgactcccatctggcaaccacatgaaagaatccagagaagtaacagtccctgtcttttacccaaccgaaaaagtctggctggaagtggaaccagtgggtatgctgaaagaaggtgacagagtggagattcgttgtctggctgatggtaaccctccacctcacttctccataagtaagcagaacccaagcacacgggaagcagaggaagagaccaccaatgacaatggggtgcttgtcctcgagcccgctaggaaagaacatagcgggagatacgagtgccagggcttagatctggacaccatgatctctttgttatcagaaccccaggagctgctggtgaattatgtctccgacgtgcgggtgagtcccgctgcgcctgagcggcaggagggatcttccctcacactcacctgcgaggcagagagctcccaggacttggagttccagtggcttcgagaagagacagggcaggtgttggagcgcggtcccgtcctgcaactgcatgaccttaagcgcgaagctgggggtggatacaggtgcgtggctagcgtaccatctatcccaggcctgaaccgtacccaattggtcaatgtggcaatctttgggcctccttggatggcctttaaagaaagaaaggtgtgggtcaaggagaacatggtgcttaatttgagttgcgaggcatctggccatccccgacctaccataagctggaacgtgaatggaactgcatcagagcaagatcaggacccccaaagagtgttaagcaccctgaacgtgctagtaacccctgaacttctcgagaccggagtcgagtgcactgcctcaaacgatttgggcaaaaacacttcaattctatttctagaactcgttaatctgaccacactcacccctgatagcaataccaccaccggactgtctacgtcaaccgcctcaccacacactcgagctaattccacctccacagaaaggaagctgccagaaccggagagccggggagtggttatagttgcagtcattgtctgcatactggttctggctgtcctcggcgcagttttgtactttctgtataagaaaggaaaacttccctgccgcaggtctggcaaacaggaaatcaccctgccgccttcccgcaagtctgagctcgtcgtcgaggttaaatccgacaagctcccagaggagatgggtctgctgcaagggagttctggagacaagcgcgcaccaggagaccagggtgagaagtacattgatctcaggcactag

SEQ ID NO: 29384 - DNA, 1584 bp, synthetic construct
  misc_feature 1..1584: note = Description of Artificial Sequence: Synthetic coding sequence
  source 1..1584: mol_type = other DNA
atggtgtacattgtccggcagtttctcctctacaacgttagcggtagtgtttacctggatcaactcatcgtgttactgacagccaagttctcgattctccgcattgccggaagcagggtgcatcactccccatttagtggccatttggatggctgcagtttcctcagccttcagcacagcctgcacacgtctcttgatatgtcacggcacgaaaatgtgttcctgggactgacactctcctcaaagagcgcgggactgaagggtttccagttggcattcgtgccaggactactgcagggaaccggcggatatttagacggaccccttccaactccagttgacaaccctagggtgggcctggaggtgggcttgaggcttagcctcccaccactcccaccctgtcctggagtgcatatccagtctagtcagaccgtcgagtcttcggggctgtacacactgcagtcaatcctaaaagcacagctcgtgaaggaagacaaggacgcacaattctattgcgagctgaactatcgactgccctcgggaaaccacatgaaagagagtagggaggttacggttccagtcttctatcccaccgagaaggtgtggctggaagttgagcctgtcggcatgctcaaggaaggcgacagggttgagattaggtgtctagccgacggcaacccccctccccattttagcatatctaagcagaacccatcaacgcgggaggctgaggaggagacaacaaatgacaacggcgtactagttctcgaacccgctagaaaagagcacagtggcaggtacgagtgtcagggcttggatctagatactatgatctcacttctaagcgagccgcaagaactgctggtaaactacgtctcagacgtccgggtcagccctgctgctcccgagaggcaggagggtagctccttaacactgacctgtgaagccgagagttcccaggacttggagttccagtggctgcgcgaagagacaggccaggtgttagaaagggggccagtgttgcaactgcatgatctgaagcgggaagccggagggggttaccgctgcgtggctagcgtgcccagcatcccaggcctgaaccggacacaactcgtgaacgtcgccatcttcggccctccatggatggcattcaaggaaagaaaggtgtgggtgaaagaaaatatggtactgaatctcagctgcgaggctagtggccacccacggcctacgattagttggaacgttaatggaacggcctctgaacaagatcaggatccccaacgagtgctgtccaccctcaacgtgttggttacaccagagctcctcgagacgggtgtcgagtgtacggcatccaatgatctcgggaagaatacttccatactgttcttggagttagtgaacttgaccacactaacgccagactccaatacgaccaccggcttatctacctccacggcatcgccacacacaagagctaattcaaccagcactggaaaacccggacttgccagggagcaggggtgtgccagggccagctttctcccctgtccttccccagagtctcctgttcagaaaggtgagtag

SEQ ID NO: 29385 - DNA, 141 bp, synthetic construct
  misc_feature 1..141: note = Description of Artificial Sequence: Synthetic coding sequence
  source 1..141: mol_type = other DNA
ggtgtggtgatcgtcgcagtcattgtttgcattctggttctcgccgttttaggggctgttctgtatttcctctacaaaaagggcaagttgccatgtaggcgttccgggaaacaagaaatggaacgcaacacctctatttag

SEQ ID NO: 29386 - DNA, 2253 bp, synthetic construct
  misc_feature 1..2253: note = Description of Artificial Sequence: Synthetic coding sequence
  source 1..2253: mol_type = other DNA
atgggtaaaagtgagtctcagatggacataacggacattaatacccctaaacctaaaaagaagcagcgctggacaccactcgaaataagcctcagtgtgctggtgctgctgctgaccatcattgccgtcactatgattgcattatacgccacatacgatgatggaatctgcaaaagttccgactgcatcaaaagcgcagcacggctcattcagaatatggacgccacgaccgaaccctgtaccgatttttttaagtacgcatgtgggggttggctcaagagaaatgtgatccctgaaaccagctcaaggtatggcaattttgatattctccgtgatgaacttgaggttgtgctgaaggatgtcctgcaggaacctaaaaccgaagacattgtggctgtacagaaggctaaggcgttataccggagctgcatcaatgaaagcgccatagacagcagaggcggtgaaccactgctgaagctgctccctgatatctacggttggcccgtggctacagaaaattgggagcagaaatatggtgcatcatggaccgcggagaaagcgattgcccaactcaacagcaaatacgggaagaaagttctcattaaccttttcgttggaacggatgacaaaaactcggtgaatcacgtaattcacatcgatcagccgagactgggtttaccgagccgggattactacgagtgcacgggcatttataaagaagcttgcaccgcttatgtcgacttcatgattagtgtcgcaaggctgattagacaggaggagcgcctgccgatcgacgaaaaccagctggcactagagatgaacaaagtaatggaacttgaaaaggaaattgctaatgccaccgcaaagccagaagataggaacgatcctatgctgctgtataataaaatgacattggctcaaatccagaacaatttcagtttggagattaatggaaaacctttttcatggctcaatttcaccaatgagatcatgtcaaccgtaaatatttctattaccaacgaggaagacgtcgtggtgtatgctcctgaatatttaactaagctgaagccaattcttacaaaatatagcgcgcgtgatttacagaatctaatgtcttggcgcttcattatggatctcgtgtcctcgctgagtcgcacgtacaaggagtctaggaacgcgtttaggaaagccctctatggcaccacatccgagaccgcaacctggaggaggtgcgccaactacgtcaacggcaacatggagaatgcggtgggcagactgtatgtcgaagctgccttcgccggagagtcgaagcatgtcgtcgaagatctgattgcccagatccgggaggtcttcattcagaccctcgatgatctgacatggatggatgcagagactaagaaaagggccgaggagaaagccctggctatcaaagaaaggataggctacccagacgatatagtctctaacgataacaagcttaataatgagtatctggagctaaattataaggaagatgagtactttgaaaacattattcagaatctaaagttttcccagagcaagcaactaaaaaaactgagggagaaagtggataaagacgagtggatttcgggagcagcagttgtgaacgccttctattcctccgggcgaaaccagattgtgtttccagccggaatattgcaacctccatttttcagcgcacagcagtcaaattctttgaactatggaggcatcgggatggtcatcggacacgaaatcacccacggcttcgacgataatggacgcaatttcaataaagatggagacctggtggactggtggactcagcagtctgcgagcaattttaaggaacagtctcagtgtatggtctaccaatatggaaatttctcatgggatctggcgggtggtcagcacttgaatgggattaacacactgggagaaaatatagccgacaacgggggactaggacaggcttaccgcgcttatcagaattatatcaaaaagaacggggaggagaagctcctacccggattggacctcaaccataagcagttattcttcctgaacttcgcccaggtctggtgcgggacctatcgaccagagtatgccgtgaattctatcaagactgatgtccactctcccggaaatttcagaatcattggcaccctccaaaattctgccgagttcagcgaagcatttcactgtcggaagaacagttatatgaatcctgagaaaaaatgtcgcgtctggtag

SEQ ID NO: 29387 - DNA, 2253 bp, synthetic construct
  misc_feature 1..2253: note = Description of Artificial Sequence: Synthetic coding sequence
  source 1..2253: mol_type = other DNA
atgggtaaaagtgaatcccagatggacatcacggacattaacactccgaaacccaagaaaaagcagcgctggacacccttggaaatttcccttagcgtgctggtcttactattaacaattattgcggtgaccatgattgcattgtatgccacctacgatgacgggatctgcaagagctccgactgtataaagagcgccgcacgactgattcaaaacatggatgcaactactgaaccctgcacagatttcttcaaatacgcctgcggagggtggctgaaaagaaatgtcatccccgagacctcaagccggtatgggaactttgacatcttgcgagatgaattggaagtagtccttaaggacgtgctgcaggaaccaaagaccgaggatatcgttgcagtgcagaaggcaaaagcactgtacagaagctgtattaacgaatctgcaattgactccagaggtggggagccgctgctcaaacttttgccagacatctacggttggcctgtggctactgaaaactgggaacagaagtatggagcatcctggactgcggaaaaagccatcgcgcagcttaatagcaaatacggaaaaaaggtcttaataaatctttttgtgggaaccgacgataagaacagcgtgaatcacgtgatccacatagatcagccaagattgggcctgccgtcacgagactattatgaatgtacgggaatctacaaagaggcgtgcacagcatatgttgactttatgatcagcgtggccagactgattaggcaggaagaacggcttcccattgatgagaaccagcttgccttggagatgaataaagtcatggagcttgaaaaggagattgcaaacgctaccgcgaaaccagaagaccgcaacgatcctatgctcctctataataaaatgacgctagctcaaattcagaacaatttctccttggagatcaacggcaagccattcagctggttgaactttactaacgagattatgtctacagtgaatatttccataacaaacgaggaggacgtggtggtttacgcccctgaatatctcaccaaactaaagcctattctaacaaagtactctgcccgagatttgcagaacctgatgtcctggcgatttattatggatttggtaagcagtctgtctcgcacctacaaagagagtaggaacgcgtttcgtaaggcgctgtacggcacaacatctgagactgcaacatggcggcgatgcgctaactatgttaatggcaacatggagaacgctgtcggtagactgtacgtggaggccgcatttgcaggcgagtctaagcacgtcgtggaagacctgattgctcagattcgggaggttttcatccagaccttagatgacctaacttggatggatgccgaaaccaagaagcgggcagaagaaaaagccctcgccattaaagaacgaatcggctacccggatgacatcgtgtccaatgataataagcttaacaatgaatacctggagctgaactacaaggaagacgagtattttgagaacatcattcagaacctcaagttcagtcagagcaagcagttgaaaaaacttcgggaaaaggttgataaagatgaatggattagcggcgctgcggtcgttaacgcattctatagctccggtcgaaatcaaattgtgtttcccgcaggtatcttacagcctccctttttcagcgctcagcagtccaattcactaaattatggcggaattggaatggtgatcggacacgagattactcatggatttgatgacaatggacggaacttcaacaaagatggtgacctggtagactggtggacccagcaaagtgcaagtaatttcaaggaacagtcccagtgcatggtgtatcagtacggtaacttttcatgggatctggcaggcggtcagcatttaaatggcatcaataccttaggggagaacattgcagacaatggcggtctcgggcaggcgtacagggcctatcagaactatatcaagaagaatggcgaagaaaagctgttgccgggactcgatcttaatcataagcagttgttcttcttaaattttgctcaggtttggtgcggaacatacaggccagaatatgcagtgaactccatcaagactgacgtccactccccaggcaattttagaataattggaacgctgcaaaactcagcagaattctctgaggcatttcactgtagaaaaaattcgtacatgaatccggaaaaaaaatgccgagtatggtag

SEQ ID NO: 29388 - DNA, 2253 bp, synthetic construct
  misc_feature 1..2253: note = Description of Artificial Sequence: Synthetic coding sequence
  source 1..2253: mol_type = other DNA
atgggaaagagtgagtctcagatggatataacagatataaatactcctaagccaaaaaaaaaacagcgttggacgccacttgaaatttccctgtcagttctggtactcctgctgacgattattgctgtaacaatgatagccttgtacgccacctatgacgacgggatctgcaaatctagcgactgtatcaaatccgccgctagactgatccagaacatggatgccacgacagaaccctgtacagacttcttcaaatatgcctgtggtgggtggctcaaacgtaacgttattcccgagactagtagtagatacgggaatttcgatatcctcagagacgagctggaggtcgtcctcaaggatgtgttacaggagcccaaaactgaggatatagtcgccgtccagaaggccaaggccctgtaccgcagctgtatcaacgagtctgcgatagacagcagaggcggagaaccactgctcaagctgctccccgatatatatggatggcccgtggctaccgagaactgggaacaaaagtatggcgctagctggacagccgagaaggccatcgcgcagttaaattctaagtacgggaagaaggtgctgatcaatcttttcgtcggaacagatgacaagaatagcgtgaaccacgtcatccacatagatcagcccagactgggtctgccatcacgtgattactatgagtgcactggtatttacaaagaggcatgtacagcatatgtggatttcatgattagtgtggcacgactcatcaggcaggaggagagactgcccatagatgagaaccagctggcactggaaatgaataaggttatggagcttgagaaagagattgccaacgcgacggccaagccagaagataggaacgaccctatgttgctctacaacaagatgacactagcacaaatccagaacaactttagcctagaaattaatggaaagccttttagttggctcaactttacaaacgagatcatgtccaccgttaatatctctattacaaacgaggaggatgttgtggtgtatgctccagagtaccttacaaaactcaaacctatcctcaccaagtactccgcacgagatctgcagaatctgatgtcgtggaggttcatcatggacttagtgtctagtctgtccaggacatataaagagtcccgcaatgctttccgaaaagccctgtacggtaccacttcagagacagcgacttggaggagatgtgccaattacgtaaacggcaatatggagaatgccgttggacgactctatgtggaggctgcctttgccggagagagcaagcatgtggtggaagacctgatcgcccagattcgcgaagtgttcattcagacattggatgacctgacctggatggatgccgagacaaagaaacgagccgaggagaaggcactggctattaaggaaagaatcgggtatcccgatgacatcgttagtaacgataataaactgaacaatgaatacttggaactcaactataaggaggacgaatattttgagaatattatccagaatctgaagtttagtcagtctaaacagctgaagaaactacgagagaaggtggataaggacgaatggatctccggggctgccgtagtcaacgctttctactcttccggcagaaaccagattgtgtttcctgctggaattcttcagcccccattcttttctgcgcagcagagcaactccctgaattatggcggtattggaatggttatcggccatgaaattactcacggcttcgatgataacggccgaaactttaataaagatggtgacctggttgactggtggacccaacaaagtgcttcaaactttaaggaacaatcacagtgtatggtgtaccagtatgggaactttagctgggacctcgccggtgggcagcacttgaatggtatcaacactctgggggaaaacattgcggacaacgggggtctggggcaagcttatcgggcttatcagaattacataaaaaagaatggagaggagaaacttctgcccggtcttgatctcaaccacaaacaactcttcttcttgaactttgctcaggtgtggtgcgggacatacaggcctgaatatgcagtgaattccatcaaaacggacgtccatagccctggaaactttaggataataggcacactgcagaactcagcagagttcagtgaagcctttcattgccgaaaaaacagttatatgaacccggagaaaaaatgtagggtatggtag

SEQ ID NO: 29389 - DNA, 486 bp, synthetic construct
  misc_feature 1..486: note = Description of Artificial Sequence: Synthetic coding sequence
  source 1..486: mol_type = other DNA
atgggcaagtctgaatcgcaaatggacattaccgatattaatactcccaaacctaagaaaaagcagcggtggacaccactcgaaatctctttaagcgttcttgtacttttgcttacaattattgccgtgactatgatcgctctgtatgcaacgtacgacgatgggatctgtaagtcctctgactgtatcaaatctgccgcacgcctaatccagaacatggacgcaaccacagagccctgtactgacttctttaaatatgcgtgtggaggctggctgaaaaggaatgtaatccctgaaacctcatcaaggtacggaaacttcgacattctcagggacgaacttgaggtggtactgaaggacgtgctgcaagaaccaaaaaccgaggatatcgtggcggtgcagaaagctaaagcgttatatcgctcatgtatcaacgaatctgctatagactccagaggaggagaaccactgctgaaactgctgtag

SEQ ID NO: 29390 - DNA, 282 bp, synthetic construct
  misc_feature 1..282: note = Description of Artificial Sequence: Synthetic coding sequence
  source 1..282: mol_type = other DNA
atggggaagagcgagtcgcaaatggatattaccgatataaacacgcctaaaccaaaaaaaaaacagaggtggacccccctagaaatcagtctgtccgtgttggtcctgttgttaacaattatcgccgtgaccatgatcgcgctctatgccacctacgacgacggcatctgtaagtctagcgattgtatcaagagtgcagcacggttaattcagaacatggatgccacaacagagccttgtacggacttctttaaatatgcatgtgggggatggctaaagtag

SEQ ID NO: 29391 - DNA, 702 bp, synthetic construct
  misc_feature 1..702: note = Description of Artificial Sequence: Synthetic coding sequence
  source 1..702: mol_type = other DNA
atgggcaagtctgagtctcaaatggatattacggacataaacacaccaaagcctaagaagaaacagcggtggacacccctagagatttctttgagtgtcttagtgctcctccttaccattatcgctgttaccatgattgctctttacgctacgtacgatgacggaatttgcaagagcagtgattgtataaagtccgccgctagattgatccaaaacatggacgctactacggagccatgcaccgactttttcaaatatgcctgtgggggttggctgaagcgtaacgtcattcctgaaactagctccagatacgggaacttcgacatccttcgggatgaactggaggtagtactcaaagacgtgctccaagagcctaagacagaggatatcgtggccgtccagaaggcaaaagctctgtaccggtcctgcattaatgaaagcgcgatcgactctaggggcggagagcctctgctgaagttactgccggacatctatgggtggccagtggctacagaaaattgggaacagaaatatggcgcatcttggaccgccgaaaaagctattgcccagctcaactcgaagtacggaaaaaaggttctgattaaccttttcgtaggtacggacgacaagaactcagtcaatcacgtcatacatatagatcagcccagactgggtctaccttcacgtgactactatgagtag

SEQ ID NO: 29392 - DNA, 360 bp, synthetic construct
  misc_feature 1..360: note = Description of Artificial Sequence: Synthetic coding sequence
  source 1..360: mol_type = other DNA
atgggaaaaagtgagagtcagatggacatcaccgacataaacacacccaaacccaagaaaaaacagcggtggacaccgctcgaaatttccctgagcgtgctggttctccttcttacaatcatcgctgtgaccatgattgccctgtatgctacctatgacgatgggatctgcaagtcaagtgattgtatcaaatcagccgcacgcctgattcagaacatggatgccaccaccgagccctgtaccgatttctttaaatatgcatgtggcggttggttgaaacgtaacgtcataccagagacaagctcccgatacggaaactttgatattctccgcgacgagcttgaagttgtcctgaaatag

SEQ ID NO: 29393 - DNA, 2253 bp, synthetic construct
  misc_feature 1..2253: note = Description of Artificial Sequence: Synthetic coding sequence
  source 1..2253: mol_type = other DNA
atgggaaaaagcgagagtcagatggacataacagatattaatacaccgaaacctaaaaagaagcaacgctggactcctctggagatctccctcagtgttctggtgctcctgctgaccattatcgctgtgaccatgattgctttgtacgccacttacgacgacggcatctgtaaaagctccgactgcataaagagcgcagcacggttgattcagaatatggacgctaccaccgagccttgtaccgacttctttaagtacgcgtgtgggggttggctgaaacggaacgttatccctgagaccagtagtcggtacggcaacttcgatattcttcgagacgagctggaggtggtcctcaaggacgtactgcaggagcctaaaaccgaggacatcgtcgccgtgcagaaagctaaggccctgtatcgatcatgcattaacgagtccgctatagatagccgtgggggtgagcctctgctgaaactgctgccagacatttatgggtggccggtcgccaccgagaactgggaacagaagtacggcgctagctggacggctgaaaaagccattgcgcaacttaacagtaaatacgggaaaaaggttctgatcaacctatttgtgggaacagatgacaagaatagtgtaaatcatgtgattcacatcgatcagcctcgattgggactgccgagtagggattattatgagtgtacaggcatctataaagaggcatgtactgcatacgtggattttatgattagcgtggcccgtctgatccgccaagaggagcggctgcccatcgacgaaaatcagctggctctcgaaatgaacaaggtgatggagctggagaaagagatcgcgaacgctactgctaagcccgaggatcgcaatgacccaatgctgctgtacaacaagatgaccctagcacaaatccagaataatttttctctggagattaatggcaagcccttctcctggctcaactttactaatgaaattatgtctactgttaatatctcgattacgaatgaagaggacgttgtggtatatgcgccagagtacctgaccaagctgaaaccgatcttgaccaaatactcagctcgtgaccttcagaacctcatgagctggagattcatcatggacctcgtaagcagtctgtcccgcacctacaaggagagtcggaacgctttcaggaaggccctgtacggcactacatccgaaaccgcaacatggcgcaggtgtgccaactatgttaacggcaacatggagaatgctgtcgggcgactgtatgtggaggcggctttcgccggtgaaagcaaacatgtggtggaagatctgattgcccaaatccgtgaagtattcattcagactctggatgacctgacatggatggacgctgagacaaagaagcgtgccgaagagaaagcattggcaattaaggaacgcatcggctaccccgatgatattgtgagcaatgataacaaactaaacaacgagtacctggaacttaattataaagaggatgaatactttgaaaatatcatccagaacctcaagttttcacagtccaaacagctcaagaagcttcgggaaaaagtcgacaaggatgaatggatttccggtgccgctgtggttaacgcgttctacagctcagggcgaaatcagattgtctttccagcaggtatactgcaacccccattcttttctgcacaacagtcaaactccctgaattacggtggaatcggtatggttattggacacgaaatcacccacggcttcgacgacaacgggaggaactttaataaagacggagacctggtcgactggtggacccagcagtctgcaagcaacttcaaagagcaatcccagtgcatggtttatcagtacgggaatttttcctgggatctcgccggagggcagcacttgaatggaattaatacgctcggcgagaatattgctgacaacggaggccttggacaggcctaccgcgcataccaaaattacatcaaaaagaatggcgaagagaaactgctgcctggattggaccttaaccacaaacagctgttcttcctaaattttgcacaggtctggtgcggtacataccggccagagtatgccgtgaactctatcaagacagacgtgcattctcctggtaacttcaggattataggtaccctgcagaacagtgcagaattctccgaggctttccattgcagaaaaaacagttacatgaaccccgagaaaaagtgcagggtttggtag

SEQ ID NO: 29394 - DNA, 2253 bp, synthetic construct
  misc_feature 1..2253: note = Description of Artificial Sequence: Synthetic coding sequence
  source 1..2253: mol_type = other DNA
atgggaaaatccgaatcccagatggacatcacagatataaatacccccaagcctaaaaagaaacagcggtggactccactcgaaatcagtctgtccgtcctcgtcctgctcctgaccatcatagctgtcaccatgatcgccctctacgccacctatgatgatggcatatgtaagtcgagcgattgtattaagtcagccgctagactcattcagaatatggacgcgacaaccgaaccttgcacagacttctttaagtatgcttgtggcggatggctgaagcgcaatgtgatccctgagacaagctccagatatggaaactttgatattctgcgagatgagctggaggtggttctgaaagatgtcctgcaggagcctaaaactgaggacattgtagcggtgcaaaaggccaaggcattataccgcagttgcatcaacgagtctgccatcgactccaggggcggagaaccattgctgaaactactgcccgacatctacggctggcccgtcgcgaccgagaactgggagcagaaatatggcgcatcatggactgctgaaaaggctatagcacagctcaactcaaagtacgggaagaaggtactaatcaaccttttcgtggggactgacgacaaaaatagcgtgaaccacgtgattcacatcgaccagccccgacttggactcccatctcgggattactatgagtgtaccggcatctacaaggaggcttgcacagcgtatgttgattttatgatcagcgttgctaggctgataaggcaggaggagagattacctatcgatgaaaaccaacttgccctcgaaatgaataaagttatggaactggaaaaagaaatcgccaatgctacggcgaagcctgaagatcgcaacgatccaatgctgctctataacaagatgaccttagcccaaatacagaacaacttttcactggaaatcaacggtaagccgttctcatggcttaacttcacaaacgagattatgtctaccgttaacatctctatcacgaacgaagaagacgtggtggtatacgcaccagaatatctgaccaagctgaagcctatcctgacaaagtatagcgcgagggatttacagaacttgatgagctggcgttttattatggatctggtgagcagcctttccaggacttacaaggaatctcgaaacgcttttagaaaagctctctacggcacgacgagcgaaacagccacttggcggagatgtgccaactacgttaacgggaatatggaaaacgcggtgggtcgattgtatgtagaggcagcttttgccggtgagtccaagcacgtagttgaggatctgatcgcacagatacgggaggtatttattcagactctggatgacctgacctggatggatgctgagacgaaaaaaagggctgaagaaaaggctcttgccatcaaggaacgtattggatatccagacgatattgtctctaatgataataagctcaataacgaatacttggaactgaattacaaggaggacgagtacttcgagaacatcatacagaatctgaagttctcgcaatctaaacagctaaaaaaattgagagagaaagtcgataaggacgagtggatttctggcgcagccgtcgtgaatgccttctattcgagcggacggaaccagattgtgttcccagccggaatcctccagccgccattcttttctgctcagcagtccaactcactgaactacggaggaatcggcatggtaattggccacgagatcacccatggctttgatgacaatggacgtaactttaataaggacggcgacttagtcgactggtggactcaacagtcagcaagcaactttaaggagcagtcacagtgcatggtgtatcaatacggcaatttttcctgggatcttgctggcggacagcacctgaacggcatcaacacattaggcgaaaacatcgcagataacggtggtctcggacaggcatatcgcgcatatcaaaactacatcaaaaagaatggtgaggagaaattgctgccaggattggatttaaatcataaacagctgtttttcctgaattttgcccaagtatggtgtggcacataccgccctgagtatgctgtcaattctatcaagacggatgttcacagccctggaaacttcaggattatcggcactctgcagaattccgcagaattcagtgaagcatttcactgccggaagaattcctacatgaacccggaaaagaagtgcagagtttggtag

SEQ ID NO: 29395 - DNA, 48 bp, synthetic construct
  misc_feature 1..48: note = Description of Artificial Sequence: Synthetic coding sequence
  source 1..48: mol_type = other DNA
atggggaagtcagagagccagatggatatcaccgatattaatacttag

SEQ ID NO: 29396 - DNA, 894 bp, synthetic construct
  misc_feature 1..894: note = Description of Artificial Sequence: Synthetic coding sequence
  source 1..894: mol_type = other DNA
atgactacccctcgaaattccgtgaacggaactttcccagccgaacctatgaaaggcccaattgccatgcagtccggccctaaacctctcttccggcgtatgtcaagcctcgtcggacccacccagtctttcttcatgcgcgagagcaaaacgctgggagcagtgcaaatcatgaacggcttattccatattgccctagggggactcctcatgatcccagccggaatttatgctcctatctgcgtgacagtatggtaccccctgtggggcggaatcatgtatatcattagcggctcgcttcttgcagcaacagagaagaattctcgtaaatgtttagttaagggaaaaatgatcatgaatagcctgtctctttttgccgctattagcggtatgatcctgagcataatggacatattgaatatcaaaattagccactttctgaagatggaaagtttgaacttcattagggctcacacgccttatattaatatttataactgcgagcccgctaaccctagcgagaagaattcaccttcaactcagtattgctattcaattcagtcgctgtttctggggatcctatcagtgatgttgatttttgcctttttccaggaattagtgatagctggcatagttgagaatgagtggaagagaacctgtagtaggccaaaatcaaacattgtcctgctgtctgcagaggaaaaaaaggaacagaccattgagattaaagaagaagtcgtgggtctgaccgagacatcttcacagccgaagaacgaagaggacatagagatcattccaatccaggaagaggaggaagaggagacagagaccaactttcccgaaccacctcaggaccaggagtcaagccccatagaaaatgattcatctccttag

SEQ ID NO: 29397 - DNA, 894 bp, synthetic construct
  misc_feature 1..894: note = Description of Artificial Sequence: Synthetic coding sequence
  source 1..894: mol_type = other DNA
atgacaaccccgcgtaacagcgtcaacggaacgttccctgctgagccgatgaagggcccaatcgcaatgcaatcgggcccaaaacctcttttccgtcggatgtccagtctggtggggccaacacagtctttcttcatgcgagaatccaagaccctgggtgcagtgcagattatgaacggactcttccatatcgcccttggtgggttactcatgataccagccggtatctatgcacccatctgcgtcaccgtttggtatcctctgtggggcggtataatgtacattatttctggctctctcctggctgcgacggagaagaattctcgcaaatgccttgtgaagggcaaaatgattatgaacagcttgtccctgttcgcagctataagcggcatgattctctccattatggacatcttgaacataaagataagtcacttccttaagatggaatccctaaactttattcgggcacatactccttatattaacatctacaactgcgaacccgcaaaccctagtgagaagaatagcccttccacgcagtattgctactctattcagagtctcttcctgggcattctcagcgtgatgcttatctttgcattcttccaagagctggtgatcgctggcatagtggagaatgaatggaagcggacctgctccaggcccaagtctaacatcgtactcctttctgcagaggaaaaaaaggagcagaccatcgagatcaaagaagaggtggtcggactgaccgagacgtcttcacagccgaagaacgaggaggacatagaaataatcccaatacaggaggaggaggaagaggagacagaaactaacttcccagaaccgccacaggaccaggagagctcacctatcgagaacgactccagtccatag

SEQ ID NO: 29398 - DNA, 24 bp, synthetic construct
  misc_feature 1..24: note = Description of Artificial Sequence: Synthetic coding sequence
  source 1..24: mol_type = other DNA
atgacgacccctagaaatagctag

SEQ ID NO: 29399 - DNA, 855 bp, synthetic construct
  misc_feature 1..855: note = Description of Artificial Sequence: Synthetic coding sequence
  source 1..855: mol_type = other DNA
atgactactccaagaaattcagtcaacggaacatttcctgccgagccaatgaaaggacccattgccatgcagagcggacccaaaccactctttaggcggatgtcgagcctcgtcggcccaacgcagagcttttttatgcgcgaatctaagacacttggggctgtgcagatcatgaacggcctgttccatattgccctggggggtctactcatgatccccgctgggatctatgccccaatctgcgtgaccgtgtggtaccctttatggggaggtatcatgtacatcatctctggctcgctcctggctgctactgaaaaaaacagccggaagtgcctggtcaaggggaagatgattatgaacagtttgtcattatttgctgcaatcagcggcatgattcttagcataatggacattctgaacattaagatcagccactttctcaaaatggaatccctgaacttcatcagagcacataccccctacatcaatatctacaactgtgagccagctaaccctagtgaaaaaaattctccctctacccaatactgttacagcatccaaagcctgttcttagaattggtcatcgctggcatcgttgaaaacgagtggaagagaacttgttcgaggcccaagagtaacatcgtactcttgtccgctgaggagaaaaaagaacagaccatagaaatcaaggaagaagttgtgggcctgaccgaaaccagctcccagcctaagaacgaggaggatatcgagatcatcccaatccaagaggaggaggaggaggaaactgaaacaaatttcccagagcccccacaagaccaagaaagtagcccaatcgaaaacgattccagtccgtag

SEQ ID NO: 29400 - DNA, 21 bp, synthetic construct
  misc_feature 1..21: note = Description of Artificial Sequence: Synthetic coding sequence
  source 1..21: mol_type = other DNA
atgacaactcctcggaattag

SEQ ID NO: 29401 - DNA, 894 bp, synthetic construct
  misc_feature 1..894: note = Description of Artificial Sequence: Synthetic coding sequence
  source 1..894: mol_type = other DNA
atgactacacctcgaaatagcgtgaatgggacctttcccgctgagcccatgaagggacctattgccatgcagagcgggcctaaaccattgttccggaggatgagcagtttggtaggccctactcagagcttcttcatgagagaatctaaaactctcggagccgtacagatcatgaacggcctcttccatatagccttgggcggtcttctaatgattcccgctggaatctacgcccctatctgcgtaacggtctggtatccgttgtggggcggaataatgtatatcatttctggatcattgctggctgccactgagaagaattcacgtaaatgcctagtgaaggggaaaatgattatgaattctctctccctgtttgctgcaatttccggcatgattctctccattatggatatcctcaatataaagatctctcacttcctcaaaatggaaagcctgaactttattagggcgcatacaccatatataaacatatacaactgcgaacctgcgaatccgagtgaaaagaacagccctagcactcagtactgctattctatccagtccttgttcctggggattcttagtgtgatgctgatctttgccttttttcaagagctcgtcatcgctgggatagtagagaacgaatggaagaggacttgttccaggccaaaatcaaatattgtgctcctgtctgccgaggagaaaaaggaacaaaccatcgaaatcaaggaagaggtggttgggttgaccgaaacctcatcccaaccgaagaatgaggaggacatcgagattattcctatccaggaagaagaagaggaagagacagaaaccaacttccccgagccccctcaagaccaggagagctccccgatcgaaaatgattcatctccttag

SEQ ID NO: 29402 - DNA, 930 bp, synthetic construct
  misc_feature 1..930: note = Description of Artificial Sequence: Synthetic coding sequence
  source 1..930: mol_type = other DNA
atggatgaccaagggtgtccaagatgcaagaccactaaatatcgaaacccctccctcaagctgatggtcaatgtgtgtggacataccctatgtgagtcgtgtgtcgacctgttatttgttcgaggtgccggaaactgccctgagtgtggcaccccattgcgtaaaagcaactttcgggttcagctgttcgaggatcctaccgtggacaaagaggtggagattagaaagaaagtgttgaaaatctacaataaaagggaggaggatttcccaagccttagggaatacaatgattttctagaggaggtcgaggagatcgtgtttaacctgactaataacgtcgaccttgataatacaaaaaaaaaaatggaaatctatcagaaggagaacaaggacgtcattcagaaaaataaactgaaattgactagagagcaggaagagctggaagaggcgctggaggttgaaagacaggaaaacgaacaaaggagacttttcatccagaaagaggaacagttacagcaaatcttgaaaaggaagaacaagcaggccttccttgacgaactggagagctcagacctccctgtggctcttcttttggctcagcacaaagacaggtccacccaactggaaatgcagctcgagaagccaaagccggtgaagccagtgactttctccaccgggataaagatgggccagcacattagcttggcccctatacataagctcgaagaggctttatatgagtatcagcctctgcagattgaaacctacggaccgcatgtgccagagttggagatgctagggaggttaggctacttgaatcatgtcagggctgcgagtccccaggacctagcagggggatacacttcatcgctcgcgtgtcaccgagcccttcaggatgccttttcgggacttttttggcagcccagttag

SEQ ID NO: 29403 - DNA, 804 bp, synthetic construct
  misc_feature 1..804: note = Description of Artificial Sequence: Synthetic coding sequence
  source 1..804: mol_type = other DNA
atggatgaccagggctgccctagatgtaagacaacaaaatacagaaaccctagtctcaaactcatggtgaacgtctgtggacataccctttgcgaatcttgcgtagacctcctgttcgtgaggggagcgggtaactgcccagagtgcggaacaccattgcgtaaatcgaattttcgtgtgcagctgttcgaggatcctactgtagacaaggaagtagaaattcggaaaaaagtcctgaagatatataataaaagggaggaggactttcccagccttagggaatataacgacttcctcgaggaggtcgaggagattgttttcaaccttaccaataatgtagatctcgataacaccaagaagaaaatggagatctaccaaaaagaaaataaagatgtgattcagaaaaacaaactgaagctcacaagagaacaggaagagttggaagaggctttggaagtggaacgccaggaaaacgaacaaaggagactgtttattcaaaaggaagagcagctgcaacagatacttaagcgtaagaacaaacaagccttcttggacgaacttggccagcatataagtcttgctccaatccacaaactggaggaggccctttacgagtatcagccgctgcaaatcgaaacgtatgggccacacgtgcctgaattggaaatgctcgggaggcttggctaccttaaccacgtccgggctgctagccctcaggacttggcaggcggatacacttcttctctggcttgccaccgggctctgcaagacgccttttcaggcctgttctggcaaccttcatag

SEQ ID NO: 29404 - DNA, 510 bp, synthetic construct
  misc_feature 1..510: note = Description of Artificial Sequence: Synthetic coding sequence
  source 1..510: mol_type = other DNA
acaagagagcaggaggagctggaggaagcactggaggtcgagcgccaagagaatgagcagcggaggctcttcattcagaaagaagaacagctacaacaaatcctgaagaggaagaataagcaggcattcctcgatgagctcgaatcgtctgatttgcccgtggccctgttgcttgcgcagcacaaggatagatccactcagcttgagatgcagctggaaaaacccaagccagtgaaacctgtgactttcagtactggcattaagatgggccagcacatatccctggcccctatacacaaacttgaggaggccctgtatgagtatcagcccctgcagatcgagacatatggccctcatgtccccgagctggaaatgcttgggaggcttggctacctaaatcacgtgcgagcagcttctccccaggatcttgctgggggatatacctcatccctggcatgtcacagggccctccaggacgccttcagcggcctcttctggcaaccctcgtag

SEQ ID NO: 29405 - DNA, 3963 bp, synthetic construct
  misc_feature 1..3963: note = Description of Artificial Sequence: Synthetic coding sequence
  source 1..3963: mol_type = other DNA
atgttcgggctggaccagttcgaacctcaagtgaactctagaaacgctggtcaaggtgagaggaacttcaacgagacaggcttgagtatgaatacccattttaaagcacccgctttccatacaggcggacccccaggccctgttgatccagccatgagcgccctcggggaaccccctattcttggtatgaacatggagccatacggctttcacgcaaggggccactctgagctgcatgcagggggtctccaggcgcagcccgtgcatggctttttcggagggcagcagccacatcacggacatccagggtcccaccaccctcatcagcaccacccacattttggcggaaacttcggaggacctgacccaggcgcttcatgcctccacggaggaaggcttctggggtacgggggagcggcaggcggtctgggctcgcagcctccctttgctgaaggctatgaacacatggcagaaagccagggacccgaatcatttgggcctcagaggccaggaaatctgcctgacttccattctagtggcgcttcatctcacgcagtgcccgcaccatgcctcccactcgaccagagtcctaaccgcgcagccagttttcatgggctgcccagctcttcagggagcgactcccactcgctggaacctcggcgagtgaccaaccagggtgcagtcgacagcttagagtacaactatcccggtgaagcgccatctggacactttgatatgttcagcccctccgactcggaaggtcagcttccgcattatgctgctggacggcaagtgccgggaggagcctttcccggagcaagcgccatgccacgagccgctggaatggttggcttgtctaaaatgcatgcacagccacctcagcagcagcctcaacaacagcagcaaccccagcagcagcagcaacagcatggggttttcttcgaaagattctctggagcgagaaaaatgcccgtggggttggagccatccgtagggtctcgacatcctctgatgcagcctccccagcaagcccctccccctccccagcaacagcctccgcagcaaccaccccaacaacagccacctccccctccaggtcttctcgtaaggcagaacagttgtccccctgccctgcccaggccccagcagggggaagctggcaccccctcgggtggtcttcaggatggcggaccaatgctgccttcacagcacgcacagtttgagtacccaatacacagactggagaacaggagtatgcatccctactctgaacctgttttttctatgcagcaccccccaccacagcaggccccaaaccagaggttgcagcactttgacgcccctccctatatgaacgtcgcgaaaaggccacggttcgactttcccggatcagccggagtagaccgttgtgcctcatggaatggcagcatgcacaacggggcactggacaatcacctttcaccctcagcgtatccaggactcccaggcgagttcaccccccctgttccagacagttttccttccggtcccccactgcagcaccctgccccagatcaccagagcctccaacagcagcagcagcaacaacagcagcagcaacagcagcagcagcagcaacagcaacagcaacagcagcagcagcagcagcagcgccagaatgcggcacttatgattaaacagatggcaagtcggaatcagcagcagcgtctacgccagccaaatctggcacagttgggccatccaggtgacgtcggacagggcggactggtgcacgggggacctgtgggtggtttggcccagccaaatttcgaacgggagggaggctccactggggctggcagattgggtaccttcgaacagcaggcaccacacctggcccaggagtctgcctggttctctggcccacacccaccccctggggatttactgcccagacgaatgggaggtagcggtctgcctgcggactgtgggcctcacgatcccagtttggcaccgcctccaccaccaggcggttccggcgtactcttccggggacctctgcaggaaccgatgcgaatgcctggggaaggccacgtccctgctcttcccagccccggtctgcagtttggagggagcttgggcggactggggcagctgcagtctcccggagccggagttggactaccttctgccgcatctgagagaaggccacctcccccagatttcgctacgtccgccctgggagggcagcccggattccctttcggagccgctggtaggcagagcaccccgcactctggtcccggagtgaactcccctccttcggcaggcggaggtgggggtagttcaggtgggggtggtggaggaggcgcttatccgcctcagccagacttccagccttcacagcgaacttccgcttccaagttgggggctttatccctgggcagcttcaataagccgtcttccaaggacaaccttttcggccagtcctgtctcgcagccctttctaccgcttgccaaaacatgattgcctctctgggagctccaaatctgaatgtcacattcaacaaaaagaatcctccagaggggaagagaaagctgagccaaaacgaaactgatggcgcagctgttgccggtaatccagggtcagactacttcccaggcggaacagctcctggggctccaggacctgggggaccgtccggtacctcgagcagtggctccaaggctagcggcccaccaaatccgccagctcaaggcgatggaacctctctgtcccctaattatacgctggagtcgacaagtggaaatgacgggaaacccgtcagtggaggtggagggagaggacgaggtagacggaaaagggacagtggtcacgtgtcgcctggtactttctttgataagtactcagccgctcccgattcagggggagcccctggcgtttcaccgggacagcagcaggccagcggtgctgccgtggggggatcgagtgccggtgagaccagaggcgcacctactccacacgaaaaggccctcacttccccgtcctggggaaaaggggctgagttactcttgggcgaccagcctgatttgataggctccctggatggaggtgctaaatcagatagttcaagcccaaatgtgggcgagttcgcctcagacgaagtgagtacctcatatgctaacgaggacgaggtgagcagttcttcagacaatccccaggcgctcgtaaaggccagcagatcgccccttgtgacaggatccccaaagctgcctcctagaggtgtaggggcaggagagcatggccctaaagccccacctcccgctctcggtttgggaatcatgagcaatagcacgagcacaccagattcctatggagggggtggcggacctggtcaccctgggactccaggtctggagcaagtcagaaccccgaccagttcctctggggcaccgccacccgacgaaatacacccactggaaattctccaggcacaaattcagcttcagcgacaacagttttccatttcggaagatcagcctctgggacttaaaggtggaaaaaagggcgaatgcgcagtcggcgcatcaggcgctcagaacggcgattccgagctgggttcgtgctgctctgaggcagtgaaaagcgcaatgtctacaatcgacttggatagcctaatggcagaacacagtgcagcctggtacatgccagccgataaggctcttgtggactccgctgacgatgacaaaaccctcgcgccatgggaaaaagctaaaccgcaaaaccctaattctaaagaggcccacgatttgcccgctaataaggctagcgctagccagccagggtcccacctgcagtgcctgagcgtgcactgtactgacgatgttggcgacgcaaaggctcgcgctagcgtgcccacatggcgctcgctgcattccgatataagtaatagatttgggacgtttgtagcagccctgacatag

SEQ ID NO: 29406 - DNA, 4227 bp, synthetic construct
  misc_feature 1..4227: note = Description of Artificial Sequence: Synthetic coding sequence
  source 1..4227: mol_type = other DNA
atgaaggccccagccgttctggctcctggcatcctcgtactgcttttcaccctggttcagcgcagcaacggtgagtgtaaggaggccctggcaaagtcagagatgaacgtgaacatgaaatatcagctcccaaatttcaccgcggaaaccccaatccagaacgtgatcctccacgagcatcatatatttctcggcgcaactaattacatttacgtcctcaacgaggaagatctgcagaaggtcgccgagtacaagactggacccgtgctggaacatccagattgctttccgtgccaggattgtagctccaaggctaatttatcaggaggagtatggaaggataatatcaatatggccctcgtcgtcgacacctactacgatgaccagttaatttcttgcggctccgtcaaccggggaacatgtcagcgccatgtgtttcctcataatcacaccgctgatatccagagcgaggtccattgcattttcagcccgcagatcgaggaaccctcccagtgtcctgactgcgttgtttctgcgctgggagcaaaggtcttgagtagcgtgaaggataggttcatcaattttttcgttggtaacaccataaattccagttactttccagatcaccctttacacagcatctctgttcggaggcttaaggagaccaaggatggattcatgttcctgaccgaccagtcctatatcgacgttctccccgaattcagagacagttaccctatcaagtacgtgcacgccttcgagtcaaacaacttcatttatttcttaacagtgcagcgagaaaccttggatgcacagacctttcatactcgcattatacgtttttgctcaatcaatagcgggctccacagttacatggagatgcctttggaatgtattttaaccgagaaacgtaagaagcggtccacaaagaaggaggtcttcaatatcctacaggcagcgtacgttagtaaacctggagcccaactggcgagacagattggcgcatcgctcaacgatgatattctgtttggcgtatttgctcagtctaaacccgacagcgccgagcctatggacaggagtgcaatgtgcgccttccctattaaatacgtgaatgactttttcaacaaaatcgtgaacaagaacaacgtgaggtgtctgcagcatttctatggccctaaccacgagcactgtttcaaccgcactttactgagaaatagttccggctgtgaggcccgaagagacgaatacagaaccgaattcactactgccctgcagcgggtggacctattcatgggacaattcagcgaggtgctgctcacttccatcagtacctttattaagggagacctcaccattgctaacttgggcaccagcgagggacgattcatgcaagttgtcgtgtctcggtctggaccaagcacacctcacgtgaactttcttctggattcccatccggtcagtcctgaggtgattgtggagcataccctgaaccagaacggatatacattggttatcacaggaaagaagattaccaagatccccctcaacggcctgggctgccgccattttcaatcatgtagccagtgtcttagcgctcctcctttcgttcagtgtggctggtgccacgacaaatgcgtgaggagtgaagaatgtctcagcggcacctggactcaacagatttgtctccctgcaatctacaaagtgtttccaaattccgccccactggagggagggacaaggctaactatctgtggttgggacttcggctttaggcgaaataacaagtttgatctgaaaaaaaccagagtcctgctaggcaacgaatcatgtaccctcacacttagtgaaagcacaatgaataccctgaagtgcactgttggacctgccatgaataaacacttcaacatgtctattatcatttcaaatggccacggaacaacgcagtactcgacattcagttatgtggacccagtcataacctctatctcacccaagtacggacccatggctggcggtaccctgctgacattgactggcaactatctcaatagcggtaactctaggcacattagcataggtgggaaaacctgtacgctgaagtctgtctcaaatagcatactggagtgctacaccccagcacaaaccatttcgacggagtttgccgtgaaattaaagattgacctcgcaaatagagaaacatcaatcttctcttacagggaggacccgatcgtctacgaaattcaccctaccaaaagctttatctccacatggtggaaagagcctttaaatatcgtttcattcttgttttgtttcgcatcaggaggaagcacgattactggagtgggtaagaacctgaattccgtaagtgtgccccgaatggttataaacgtgcacgaggccggacgcaacttcactgtagcgtgtcagcacagaagtaacagtgaaattatttgctgtacaacaccctccttacagcagctgaatcttcagcttccccttaagaccaaagcattttttatgttggacggaatcctatcaaaatactttgatctcatttacgtgcacaatccggtcttcaagccttttgaaaagcctgtgatgatcagcatgggcaatgagaacgtcctcgagattaagggaaacgacatcgaccctgaggcagtgaagggagaagttcttaaggtcggcaacaaaagctgtgagaacatccacctccacagtgaggccgttctctgcactgtgccaaatgatctgctgaaacttaattcggaattaaacatcgaatggaaacaggctatctcttccaccgtcttggggaaagtcatagtgcagcctgaccagaacttcactggcctgatcgccggtgttgtatcaatctctaccgccctcttactgctgctgggtttcttcctgtggctgaagaagcggaaacagatcaaagatctggggtccgaattggttcgatacgacgctagggtgcacacccctcatcttgatcgactcgtaagcgctagaagcgtctctcccacgacagagatggtgtccaatgaaagcgtggattacagggccacctttccagaagatcagtttcctaactcatctcaaaacggcagctgtcgtcaagtgcagtacccattgaccgatatgagtcctatcctcacaagtggcgatagcgacatcagctcacccctgctccagaacactgtgcatattgacctgtcggcactcaatcccgagttggtccaggccgtgcagcacgtggtgataggcccaagtagcctcatcgtgcatttcaacgaggttatcggaaggggccactttggctgcgtataccacggcactttgctcgacaacgatggtaagaagatccactgtgctgtaaagagtctaaaccgaatcaccgacatcggcgaggtgtctcagtttttgactgagggaatcatcatgaaagacttttctcaccctaacgtgcttagcctgctgggaatttgtctccgtagtgaagggagtccactggtagtcctgccctacatgaagcacggagacctgagaaatttcatccgcaatgaaacacacaaccccacggtcaaggatcttattggttttggcttacaagtggcaaaaggcatgaagtacttagcctctaagaaattcgtgcatcgagacctggccgctagaaactgcatgcttgatgagaagtttacagtgaaggttgccgatttcggtttggcacgagacatgtacgacaaggagtactacagtgtgcacaacaaaacgggcgctaagctacctgtgaagtggatggcgcttgagagtctacagacacagaaattcactacaaagagtgacgtgtggtccttcggagtgctgctttgggagcttatgaccagaggtgcacctccttatccggatgtgaacacttttgatattacggtgtacttattgcagggcagaaggctgcttcagccagaatactgcccagacccactgtacgaagtcatgctgaagtgttggcaccctaaagctgaaatgagaccaagcttcagcgagttggtgagcaggatcagcgcaatcttcagtacattcatcggcgaacactacgttcatgtgaatgctacatacgtaaacgtcaagtgcgtggcgccttatccttcgctactatccagcgaagataatgctgatgatgaggtggatacccgaccagctagtttttgggagacgagttag

SEQ ID NO: 29407 - DNA, 4173 bp, synthetic construct
  misc_feature 1..4173: note = Description of Artificial Sequence: Synthetic coding sequence
  source 1..4173: mol_type = other DNA
atgaaggcccctgctgtgcttgcacctggaatactcgtcttactgtttacactcgttcagcgcagcaatggtgaatgtaaggaggcactggctaagtcagagatgaacgtaaacatgaagtaccagttaccaaacttcacggctgaaacccctattcagaacgtgattctacatgaacaccatatctttctaggtgctacgaactacatttatgtcctgaatgaagaggacctacaaaaggttgctgagtacaagaccggcccagtgctggaacaccctgattgtttcccgtgtcaggattgctcaagtaaggccaacttatccggcggtgtttggaaagataacataaacatggcattagtggttgatacctactacgacgatcagctgatatcatgcgggagtgtgaatcgcggtacctgccaacggcatgtgttcccacacaatcatacagcggacatccaatcagaagttcactgcatcttcagcccacagattgaagagccctcccagtgtccagactgcgtggtgtcagcactgggcgcaaaggtgctttcgtccgtcaaggaccgattcatcaatttcttcgttggtaatacaatcaatagcagctactttcctgaccatccccttcactctataagcgttcgcaggttgaaggaaactaaagatgggttcatgttcctgaccgaccagtcatatatcgacgtactgcccgagttccgagacagttaccctataaagtacgtacacgccttcgagagtaacaactttatctactttctgactgtacagagggaaacccttgacgctcaaaccttccataccagaattattcgattttgttctatcaacagcggcttgcacagctatatggaaatgccactggaatgtatcctcacggagaaacgtaaaaagagatcaaccaagaaagaagtattcaatattcttcaagccgcatacgtttctaagccaggtgctcaattagcaagacagatcggggctagtctgaacgatgacatcctatttggggtgttcgcacagtcgaaacccgattccgctgaaccgatggatcggtccgctatgtgtgccttcccaatcaagtatgttaacgacttctttaataagatcgttaacaaaaacaatgtgaggtgtctccagcacttctacgggcctaaccacgagcattgtttcaacaggactctgcttcgcaattccagcggctgcgaggcgcgacgggatgagtacaggaccgaattcaccaccgctctacagagggtggacttgttcatgggacagttttctgaggttctccttacctctatctctacttttatcaaaggcgatctgacaattgcgaatctgggaaccagtgaaggtaggtttatgcaggtggtggttagtcgatcagggccatctaccccacacgttaattttctcttggattctcatcctgtctcacccgaggtgattgtggagcacaccttgaatcagaatgggtatacgcttgtgatcaccggcaagaaaattacaaaaatccctttaaacgggctgggatgtaggcatttccagtcttgttcccagtgtctgtccgctccgccattcgtgcagtgtgggtggtgtcacgacaagtgtgtgagatctgaggagtgtctgtcaggcacctggacacagcagatctgcctcccagcgatctataaggttttccccaattctgctccattggaaggaggcacccgactcactatttgcggatgggactttggcttccgcagaaataacaaatttgatttaaaaaagacccgggttctcctggggaatgagtcctgcactctgactctgtctgagagcacaatgaacactctgaaatgcactgttggcccagctatgaataagcactttaatatgagcatcatcattagcaacggacacggaactactcaatattctactttctcctatgtggatcctgtgatcacatccatctccccaaaatacggtcccatggccggtggtaccctactgacactgaccggaaactacttgaatagcggaaacagccgacatatctccattggtgggaagacatgcactctgaagtcggtgtcaaacagtattttggagtgctacactcctgcacagacgatcagtactgaattcgctgttaagctgaaaatagatctggccaatagagagacctctattttctcatacagagaagaccccattgtttatgagattcaccctactaaatcattcatctccgggggtagcactatcacgggagttggcaagaacctcaactctgtcagtgtgccacgtatggtgatcaatgtgcacgaggctggtagaaacttcaccgtggcgtgccagcatcgctccaattctgaaattatttgctgtacaacacctagtctccagcagctcaacctgcagctaccactaaaaaccaaggcatttttcatgttagacggaatcctcagcaaatattttgacctgatctacgtgcacaaccccgtgtttaagccgttcgagaagccagttatgatttccatgggaaacgagaacgtgctggagattaaaggcaacgacatcgacccggaggctgtgaaaggggaagtgctgaaagttggaaataaaagctgcgagaacattcatttacacagcgaagccgtgctttgcaccgtgcccaatgatctccttaagctgaacagtgagctgaacatcgagtggaagcaggcgattagtagcactgttttggggaaggtcatcgtgcaacccgaccagaacttcaccggcttgattgctggcgtcgtatcgatctctacagccctgctgctgctgctcggattctttctgtggctcaaaaagcggaaacagattaaggatttaggctcggagttggtacggtatgatgcacgggtgcataccccccatcttgaccgactggtcagcgcacgtagcgtgagccccaccactgagatggtgtctaatgaaagtgttgattatagagcaacctttcccgaagaccagtttcctaattcaagccagaatggctcctgtcggcaggttcagtaccccctcacggacatgtctcctatccttacttccggggatagcgacataagctccccgttgctgcagaacactgttcacattgatctgagtgcccttaacccagagctagtacaggcagttcagcacgtagttatcggcccaagctctctcattgtccattttaacgaggtaattgggagaggtcatttcggttgtgtctatcatggcaccttactggataatgacggaaagaagatacactgcgccgtaaaatcactgaacagaattaccgacatcggggaagtatctcagtttttgacggaggggattatcatgaaagactttagtcatccaaatgttttgagcttacttggaatatgcttgaggagtgaaggttcccctctggttgtcctcccatacatgaagcatggcgatctcaggaattttattcgaaatgaaacccataaccctacagtgaaggacttgataggcttcggtctgcaagttgccaagggaatgaaatatttagcaagcaaaaagttcgtgcacagggatcttgccgctcgtaactgtatgctggatgaaaagttcaccgtgaaagtggcggactttggcctggccagggacatgtatgacaaagagtactactccgttcacaacaaaacaggggctaaactgccagtcaagtggatggctctggaatcactccaaacccagaagtttacaactaaaagtgacgtttggtcttttggcgttctgctgtgggagttgatgacccgcggagccccaccatatccagatgtgaatactttcgacatcacagtctacctgctacaggggaggagactgctgcaacccgagtattgccccgatccactctacgaggtgatgcttaagtgttggcaccccaaggcagaaatgaggccatctttttctgaattagtctcccgcatatccgctattttctcaacattcattggggagcactatgtacacgtcaatgccacctatgtcaatgtgaaatgcgttgctccgtaccccagtttattgagctccgaggacaatgctgacgacgaggtggacacccggcctgccagcttctgggaaacaagctag

SEQ ID NO: 29408 - DNA, 2295 bp, synthetic construct
  misc_feature 1..2295: note = Description of Artificial Sequence: Synthetic coding sequence
  source 1..2295: mol_type = other DNA
atgaaggccccagccgtcctggcccctggaatactggtcctgctctttacactcgttcagcggagcaacggagaatgtaaggaggcactcgccaaatctgagatgaacgtaaacatgaaataccaactacctaatttcactgcagagactccaattcaaaacgtgatactgcacgagcatcacattttcttgggcgctactaactacatttatgtgcttaatgaagaagacctgcagaaggtggccgagtacaagacgggccctgttctggagcacccagactgctttccctgccaggattgtagcagtaaggctaacctttcaggcggtgtgtggaaggacaacataaatatggctttggttgtggacacttattacgatgaccaactgataagttgcggtagtgtgaatcggggtacatgtcaaagacacgtcttccctcacaaccacaccgcggacatccagtccgaagtgcattgcattttctcccctcagattgaggaacccagccaatgcccagactgcgtggtctccgccttgggtgccaaagtgctctcgtctgtcaaggatcggtttataaatttcttcgtgggcaacacaatcaactctagctattttccagaccaccccctccactctatctccgtgcggcgactcaaggagactaaggacggattcatgttcctcactgatcagtcctatatcgatgtcctacctgaattccgagattcatatcctatcaaatatgtgcatgcatttgaaagtaataattttatctactttttgacagtccagcgcgagactttggacgcccagacgtttcatactagaattattagattctgctctattaactccggactgcatagctacatggagatgccattggagtgcatcctgacagagaagagaaaaaaacggtctaccaaaaaagaggtgttcaatatcctgcaagcggcatacgtatccaaaccgggtgcacagcttgcaagacagatcggagcatcccttaatgacgatatcctgttcggcgtctttgcccagtcaaaacccgacagtgccgaaccgatggatagaagtgccatgtgcgctttccccatcaagtacgtgaacgattttttcaacaaaatcgttaacaagaacaacgttcggtgtctgcaacatttctacggccctaaccacgaacattgtttcaataggacactcctgcggaattcaagcggctgtgaggcccgacgggacgagtacaggaccgagttcaccaccgcactgcagcgggtggacctgtttatggggcaattcagtgaagtgctcctcaccagcatttctacttttatcaagggagacctgaccattgctaatctcgggaccagtgagggccgattcatgcaggtcgttgtcagtcggagcggcccatccacgccccatgtgaactttctgttagactcgcaccctgtgagtccagaagtgatcgtggagcataccttgaatcagaatggttataccttagtgatcacagggaagaaaatcacgaaaataccgctgaatgggcttggctgccgacacttccagagctgtagccagtgtcttagcgcgccacccttcgtgcagtgtggatggtgtcatgacaagtgcgtgagatcagaggaatgtcttagtgggacatggacacagcaaatttgtttaccagccatctataaggtgtttcccaattctgcccctttggaagggggaacgcgcctgacaatctgcggctgggattttggttttagacggaacaacaaatttgatttaaagaagacaagggtactgctaggaaacgaatcctgcacgttaactttgtcggaatccaccatgaacacactgaagtgcacagtcggccctgctatgaataagcacttcaacatgtccataattatcagcaatggtcatggaacaacccagtactcgacattttcttacgtagacccggttatcaccagtatatctccaaaatacggcccaatggctggcggaacactcctgaccttgactggtaattatctaaactcaggaaatagtaggcacatctccatcggaggtaagacctgcaccctgaagtccgtgtcaaatagtatccttgaatgttacaccccagctcagaccatctccactgaatttgccgtgaagctaaagattgacctggccaaccgcgagacctcaatcttcagctacagggaagacccaattgtgtacgagattcaccctacaaagtccttcatccgccacgtgaatatcgcgctcattcagcggtag

SEQ ID NO: 29409 - DNA, 783 bp, synthetic construct
  misc_feature 1..783: note = Description of Artificial Sequence: Synthetic coding sequence
  source 1..783: mol_type = other DNA
atgaaggacttctctcatcctaatgtgctctcccttctggggatctgcctccgttcagaggggagccccctggttgtgctgccgtacatgaaacacggcgacctgcgcaactttattcgcaatgagacccacaaccccactgtgaaggatttaattggattcggactccaggtggcaaaaggcatgaagtatctggcaagtaaaaaatttgtgcaccgcgacctagcagctagaaactgcatgctcgatgagaagtttactgtcaaagtcgcagactttggcttagcacgggatatgtacgacaaggagtattatagtgttcataacaaaaccggcgcaaaacttcccgttaaatggatggccctggaatctcttcagactcagaaattcactactaaaagtgacgtttggagctttggtgtgcttctgtgggagctgatgacacgcggtgcccctccctatccggatgtgaacacctttgacatcaccgtgtatctgctccagggcagaagactcctccagccagaatactgccccgacccactctacgaagtgatgctgaagtgctggcaccctaaagccgagatgcgccctagtttcagtgaattggtctcccgcatatcggccatcttctccactttcattggcgagcattacgttcacgtaaatgctacctacgtgaacgtcaagtgcgtagccccatatccttccctcctctcatctgaagacaacgctgacgacgaggtggataccaggccagctagcttctgggagacatcatag

SEQ ID NO: 29410 - DNA, 1749 bp, synthetic construct
  misc_feature 1..1749: note = Description of Artificial Sequence: Synthetic coding sequence
  source 1..1749: mol_type = other DNA
atggccgctcgcagctggcaggacgaactcgcacagcaggccgaagagggctccgctcgcttgcgggaaatgctatcagtagggttggggttcttgagaactgaacttggactggatctggggctcgaacctaagcggtatcccggatgggttattctcgtgggtacaggcgctctcggcctcctgctgcttttcttgctcggctacggctgggcagcagcatgtgcaggcgcacgcaaaaagcggaggagcccacccagaaaaagagaggaggccgctgccgtgcctgccgctgcgcctgatgatctcgccctgcttaaaaaccttaggagcgaggaacagaaaaagaagaaccgtaaaaaactgtcagagaaacctaaacccaacggcagaactgttgaagttgctgaaggagaagccgtccgcactccacaaagcgtaactgccaaacaacctcctgagattgataaaaaaaatgaaaagtctaagaagaataagaagaaatcaaagagtgacgctaaagccgttcaaaactcatcaaggcacgacggaaaggaggtggatgagggagcctgggagacaaagattagccatcgggagaaacggcaacaacgtaagcgcgataaggtgttaactgattccgggtccctggactcaacaatccctggtatcgagaatactatcactgtcacaaccgagcagctaacaactgcctcattccctgtgggttctaagaaaaataaaggagatagccacttgaatgtgcaggtgtcaaacttcaagagcggcaagggagattctactcttcaggtctccagtggactcaatgaaaacctcactgtgaacggtggcggatggaacgagaaaagcgtcaagctgtcttcccaaatatcagccggagaggagaaatggaactccgtctctccagcaagtgccggaaagcgcaaaactgagcccagtgcttggagccaggatactggcgacgcaaataccaacggaaaagattggggccgaagctggtcagaccgatcaattttttccggcatcggtagtaccgcagagcccgtcagccagtcaactacttccgattaccaatgggatgtgtcacggaatcaaccttatatcgacgatgagtggtcggggctgaatggcctctccagcgccgatcctaattccgattggaatgctcctgcagaggaatggggtaattgggttgacgaggagagggcctctctcctgaagagccaggaaccaatcccagatgaccagaaggtctctgatgacgataaagaaaagggcgaaggtgccctgccaaccggcaagtcaaagaagaagaagaaaaaaaaaaagaaacagggggaagataacagcacagctcaggatactgaggaattagagaaggaaatccgggaagatctgcccgtaaacacctcaaagacaaggccaaaacaggaaaaagctttcagtctaaagaccatttccacctctgacccagccgaggtgctggttaagaactcacagccaataaagacactgccacccgctacctctactgagccatctgttattttgagcaaaagtgatagcgataagtcctcttctcaggttccccctatcctgcaagaaaccgacaagtccaagagtaacaccaagcagaactctgtgcccccatctcagactaagtccgaaaccagctgggagtctccgaagcagattaagaaaaagaaaaaagcgaggcgcgaaacatag

SEQ ID NO: 29411 - DNA, 2148 bp, synthetic construct
  misc_feature 1..2148: note = Description of Artificial Sequence: Synthetic coding sequence
  source 1..2148: mol_type = other DNA
atggcggctaacatgtatagagtgggagattatgtctatttcgaaaactcttcatctaacccttatttgattcgacgcatagaagagttgaataaaaccgcgaacggcaatgtcgaagcaaaagttgtgtgtttctatcggagacgggacatctcatcgacattgattgccctggctgataagcatgcgactttgagcgtgtgctataaagcaggcccaggcgcagataatggcgaggagggagaaatcgaggaggagatggagaatcccgagatggttgacttgccggaaaagctgaagcatcagctgcggcatcgagaactgtttctgtcccgacagctcgagtcactcccggcaactcacattcggggaaagtgtagtgtgaccctactgaatgaaacggaaagtctcaaaagctatctggagagagaagatttcttcttctattctctcgtctacgatccccagcagaagaccttgctggccgacaaaggggaaattcgggtgggaaaccgctatcaagcagacattactgatctcctcaaagagggcgaagaggatggtcgagaccagtcacgcctggaaacgcaggtatgggaagcccataacccgctcaccgataagcaaatcgatcagtttcttgtggtggccagatctgtggggacgtttgccagggccctcgactgctccagcagcgtgaggcaacccagccttcacatgagtgctgctgctgctagtagagatataactttatttcatgcaatggatacgctgcataagaatatttacgatatttccaaggctatatcagctctggtgcctcagggagggccagttctttgcagagatgagatggaagagtggtccgcctccgaagctaacctctttgaggaggccctggaaaagtacggcaaggacttcaccgacatacagcaagattttctgccctggaaaagccttacatctataatcgaatattactatatgtggaagaccactgacaggtatgtgcagcagaagcgattgaaggccgctgaggctgagtctaaactgaaacaggtgtacatccctaattacaacaagcccaacccaaatcagatcagtgttaacaatgtgaaagccggtgtggtgaacggaacgggcgctcctggacaatcgcccggagcaggaagagcatgcgaatcatgttacaccacccagagctatcagtggtatagctggggacctccaaacatgcagtgcaggttgtgcgcatcctgctggacttactggaagaagtacggcggattgaaaatgcctacccgactggacggcgaacggcctggtcctaacagatccaacatgagcccccacggactccccgctcggagctcgggttctccgaaattcgccatgaagacaaggcaggccttctacctacacactacgaagctgacgaggatagctcggagactgtgtcgtgagattctgagaccctggcatgccgcacgtcacccgtatctcccaattaactccgctgcaattaaggctgagtgtaccgcacgcctgccagaagctagccagagtccactggtgctcaagcaggccgtgcggaaacccctggaggccgtgctccgctatctggaaacacacccacgccctcccaaacccgatccagtgaagagcgtttcatctgtgctgtcgtccctgacccccgctaaggtggccccagtcataaataatggatcacccactattctcggtaaacggagttatgaacagcataacggggtggatggcaacatgaagaagcgcctcctgatgccgagcagagggcttgccaaccatggccaagctcgccacatgggaccaagtcggaatcttctgctgaatggtaagagttacccaacaaaagtcagattaattcgtggcggatcccttcccccagtgaagcggaggagaatgaattggatagacgcaccagatgatgtcttttatatggccacagaggaaactagaaagatcagaaaactgctttcctcttcagagaccaaacgtgctgctcgcaggccctacaaacctatcgcgctgaggcaatcacaggctttaccccctagacccccaccccctgctcccgttaacgatgagccaatcgttatagaggattag

SEQ ID NO: 29412 - DNA, 1887 bp, synthetic construct
  misc_feature 1..1887: note = Description of Artificial Sequence: Synthetic coding sequence
  source 1..1887: mol_type = other DNA
atggttgatctcccagagaaactaaaacatcagctgcgacaccgagagctatttctgtccagacagctggagagtctccccgctactcacatacgtggcaaatgctccgtcacactcctgaatgagaccgagtctctgaagagttacttggagcgagaggatttcttcttttattcactggtctacgatccacaacagaagaccttgctggccgataaaggcgagattcgcgtgggaaaccgctatcaggccgacattaccgacctgctcaaggagggggaggaggatggcagagaccagtcaagacttgagactcaggtgtgggaggcccacaaccctcttacagacaagcagattgatcagtttcttgttgtggccaggtccgtcggaaccttcgccagagcactcgactgtagtagctctgtgcgtcagcctagcctgcacatgagcgccgcagctgccagcagagacatcactttattccacgcgatggatacgctccataaaaatatttatgatatcagcaaggccatctcagccctcgttccacaggggggacccgtgttgtgccgtgacgaaatggaggagtggtccgcctcagaagccaatctgttcgaagaagctctggagaagtacggcaaagactttacggatattcaacaggatttcctgccatggaaaagcctgaccagtatcatagaatattattatatgtggaaaacaacggaccgatatgttcagcagaagcggctgaaagctgctgaggctgagtctaaactgaagcaggtgtacattccgaattataacaaaccaaatcctaaccaaatctcagtgaacaacgtgaaagctggggtggtcaacgggacgggggcacccggacaatcccctggcgctggcagggcctgcgagagctgttacaccacccagtcatatcagtggtattcatggggtccaccaaacatgcagtgtaggctatgtgccagttgctggacctactggaagaagtacggtgggctcaaaatgccgacgagattggacggcgaacgccctggtccaaaccggtccaacatgtcaccccacgggcttcccgctcgaagcagcggcagccctaagtttgctatgaagactagacaggcattctaccttcacactacgaagctcacccgcatcgctcgaaggctgtgccgggaaatattgcgaccttggcacgccgctagacacccgtatctgcccatcaatagcgctgcaataaaggccgagtgtaccgcacggctgcctgaagcatcccagagccctctggtcttgaaacaggcagtgcgcaaaccccttgaagctgttctacgctaccttgagacccacccacgtcccccaaagccagaccctgtgaagagtgtttcttctgttctatcctccctcacacctgccaaagtggcacctgttatcaataatggatcgccaacaattctaggcaaaagatcatatgaacagcataacggggtggatggcaatatgaagaaaagactgctgatgccctcccggggaacgagctccgggctcgccaaccacggtcaggccagacacatggggcctagcaggaatctcctgctgaatggcaagagctatcccacaaaggtgcgacttatccggggaggctcattaccccctgttaagcgaagacggatgaattggatagatgctcccgacgacgtcttttacatggccactgaggagactcgcaaaattaggaaattgcttagctccagtgaaaccaagcgcgctgccagaagaccgtataagcctatagctctgcgtcagtctcaagctctgccccctagacctccccctcccgctcctgtgaatgacgagcccattgtgatcgaagattag

SEQ ID NO: 29413 - DNA, 768 bp, synthetic construct
  misc_feature 1..768: note = Description of Artificial Sequence: Synthetic coding sequence
  source 1..768: mol_type = other DNA
atgaaaactagacaagcattctaccttcacaccactaagctgacacggatcgccagacgattatgccgcgagatactgaggccctggcatgcagctcgccatccatacctgcctattaactccgccgctataaaggccgagtgcactgccaggcttccagaggcttctcagtcccctttggtattgaaacaggcagtgagaaagcccctcgaggcagtacttcgatatctggaaactcacccacgtccgcctaagccagatccggttaaatctgtgtcttcggtgctttcatcactaacaccggcaaaagtggcaccagtgattaacaatggatcacccactatattgggaaagcgatcttacgaacaacataatggggtggatggcaatatgaagaaacggctgctgatgccttcccgcggaacgtacctgggattggctaatcacggtcaggccagacacatggggccatcccggaacttgttactgaatggaaaatcctatcctacaaaggttcgcttaattcggggtgggagtttgccccctgtgaagcggcgaagaatgaactggatcgatgcccctgacgatgttttctatatggccacagaggagacaaggaagatccggaagctcttgagcagtagcgagacaaaacgcgcagccaggagaccttataaaccaatcgccttgaggcagagccaggcgctgcccccaagaccccctcctccggcacccgtgaacgatgagcctattgttattgaagactag

SEQ ID NO: 29414 - DNA, 1293 bp, synthetic construct
  misc_feature 1..1293: note = Description of Artificial Sequence: Synthetic coding sequence
  source 1..1293: mol_type = other DNA
atggctgcaaatatgtatcgagttggcgactacgtctatttcgagaatagctcctctaacccatacctgattaggcggattgaggagctaaataagaccgctaatggcaatgttgaagcaaaggtggtctgcttctataggcgcagagatatctccagtacactgatcgctctggctgacaagcacgctacgctgtcagtctgctacaaagccggaccaggggcagacaatggggaggaaggagaaatagaagaagaaatggaaaatcccgagatggtcgatctgcccgagaaactcaagcaccagctgaggcaccgcgagctgtttcttagcaggcagcttgagtcacttcccgcaacccacattaggggcaaatgctccgtcacactgctgaacgagaccgaaagtcttaagtcctatctggaacgcgaggacttcttcttttactctttggtgtacgatcctcagcagaagaccctacttgcagacaaaggcgagatccgcgtgggaaataggtaccaggccgacattactgacttgttgaaggaaggcgaagaggatggcagagatcaatccaggctagaaacgcaggtgtgggaagcgcacaatcctctaactgataagcaaattgaccaattcttagtggtcgctcgaagcgtcggaacattcgccagagctttggattgcagctcctcagttagacagccgagcctgcacatgtcagcggctgccgcttctcgagatattaccctcttccacgccatggacactcttcacaagaacatctacgatatcagcaaggcgatatccgctctggttcctcagggtggacctgtgttatgtcgcgatgaaatggaggaatggtccgcttcagaagctaatttgtttgaggaagccctggagaagtatggcaaagactttacggatatccagcaggactttttgccatggaagtctctgaccagcatcattgaatattactacatgtggaaaaccactgacagatacgtgcagcagaaacgattaaaagctgccgaggctgaatccaaactgaagcaggtgtacattcccaactacaacaagcccaaccctaaccagatcagcgtgaataatgtgaaggccggagtggtgaacggcactggtgcccctggccagtcccccggagctggaagggcctgtgaaagttgttatatgtcttcccttagaatactcctggacatcctggaggaaatttggtggctggaaaacgcgaatccggtgagatggcgggaggctaggacaaagccacagtag

SEQ ID NO: 29415 - DNA, 1422 bp, synthetic construct
  misc_feature 1..1422: note = Description of Artificial Sequence: Synthetic coding sequence
  source 1..1422: mol_type = other DNA
atgcttcggcctgtgatagaggaagaaatttcgatgctcggggagatcactcatcttcaaacaatctcggaggaccttaaatctttaacaatggacccacacaaacttccatccagctctgagcaggttattctggatttgaaagggtcggactatagctggagctatcagacacctccaagttcgcccagcacaacaatgtcccgaaagtccagtgtttgcagctccctgaattctgtcaatagcagcgactcaagatcttcaggatcccactctcattcacccagttcccattatagataccggagtagtaacttagcacagcaggcaccggtcagactctcaagcgtttcctcccatgactctggcttcattagccaggacgcatttcagtccaaatctccatcccctatgccacccgaggcccctaatcagaggcgaaaggagaagagggagccagatccaaacgggggtggcccaacaacggcctccggaccacctgccgcagctgaggaggcccaacgcccacgttctatgacagtgtccgccgcaacgcgtcctggcgaagagatggaggcatgcgaggaactggcgctggctctctcaagagggctgcagttggacactcagcggagttcacgggattccctccagtgtagctcgggatacagtacccagaccacaacaccttgttgtagcgaggacacaatccctagtcaggtgagcgattatgactacttctccgtatctggcgaccaagaagcggaccaacaagagttcgataaaagctctacaattccgcgtaattccgatatctcacagtcctaccggcgtatgttccaagctaaacgcccagcgtcaactgccggactgcccacaactctgggtccagccatggtgacaccgggagtcgcaaccatcaggcgtactccatcgacaaagccatctgtgagacgcggaacaataggggcaggcccaatcccaatcaagacgcccgtaattccggtgaagacaccgacggtgcctgatctgcccggagtcctgccagcacctccagacggcccagaggagcggggtgagcatagcccagaaagcccatccgtcggtgagggtccccagggagttacctctatgccttcttccatgtggagcgggcaggcatcagtgaacccaccacttcctggacctaagccatctatccctgaggaacacaggcaggccatccctgaatctgaggcagaggaccaggaacgtgaacccccaagcgccaccgttagtcctggccagatccccgagtccgatcctgctgatctttctccaagagacactccacaaggcgaagacatgctcaatgccattagacgaggggtcaaactcaagaaaaccacaactaacgatcgcagtgcacctcgattctcttag

SEQ ID NO: 29416 - DNA, 2193 bp, synthetic construct
  misc_feature 1..2193: note = Description of Artificial Sequence: Synthetic coding sequence
  source 1..2193: mol_type = other DNA
atggaggcagttatcgagaaggagtgttccgctctcggcggtctgttccagacaatcattagcgatatgaagggttcttatccagtgtgggaggactttattaacaaggccggaaagctgcagtcccagcttcgcaccacagtggtcgccgcagcagcattcctggatgcttttcagaaagtcgctgacatggccactaatacacgaggaggaactcgcgagatcggaagtgcactgacacgcatgtgtatgcgccatcgctcgattgaagccaaattacgccagttcagtagcgccttgattgactgcctaattaacccattgcaagaacagatggaggagtggaagaaagtggctaaccagttagacaaggatcatgccaaggaatataagaaagccagacaggaaatcaaaaaaaagtcttccgacactctgaagctccagaagaaagctaagaagggtagaggcgatatacagcctcagctggatagcgctctccaagacgtgaatgacaagtatctcctgcttgaggaaactgagaaacaggcagttcgcaaggcactcatcgaggagcggggaagattctgtacattcatctctatgctgagacctgttatcgaggaagagatatctatgctgggtgagataacacacctccagaccatttccgaggatctgaagagtcttacaatggacccacataagctgccatcctcaagtgagcaggttattcttgatcttaaagggtccgattacagttggtcataccagactccaccatcttctccatctaccacaatgagcagaaaatccagtgtctgttctagcctcaatagtgtgaacagtagtgactctcgctcttctggcagtcattcacattcaccgagcagccactaccgataccgcagctccaacctagcacagcaggcacccgttagactatcctcggtttcttcacacgacagcggctttatctctcaggacgcatttcagagcaagagcccttccccgatgcctccggaggccccaaaccagaatagcagcagcagtgctagttctgaggcttctgaaacctgtcagtcagtgtccgaatgcagttctcccacatccgtcagttctgggtctactatgggggcttgggtgtctacagagaaagactgggcgaagccagggccatacgaccaaccgctcgtgaataccttacaaaggcgcaaagaaaaacgggagccggaccctaatggtggtggaccaaccactgccagtggcccaccggctgccgcagaagaagctcagcggcctaggagcatgaccgttagcgcggcaactcgacctggtgaggagatggaggcttgtgaagaattagccttagccctgtctagaggtttgcaactcgacacccagaggtcttcacgtgactccctccagtgttcgtcagggtactctacacagaccaccaccccttgctgttcggaagacaccattccatctcaggtatcggattatgattattttagtgtgagcggtgatcaggaggcagaccagcaggagttcgataagagttcaacaatcccaaggaacagcgatatttcccagtcttatagaaggatgtttcaggcgaaaagaccggcaagcacagctggcctgccgaccactttaggacccgctatggttaccccaggcgtggccactatcaggcgcacaccaagtacgaagccatccgtccggagggggaccatcggagccggaccgatccctattaaaacaccagttattcccgttaagacgcccacagtgcccgatctcccaggagtgctccccgcacccccagatgggccagaggaacggggtgaacatagtcctgagagccctagtgttggcgagggccctcagggtgtgaccagtatgccaagctcaatgtggtccgggcaggcaagtgtaaatccccctcttccgggtccaaagccaagcatcccagaggaacataggcaggcaattccagaaagcgaggccgaagaccaggaacgggagcctccaagcgctacagtaagccccggacaaatcccagagtctgatcccgcagacctgtccccccgagatactccacagggggaggacatgctaaacgccataaggaggggcgtcaagttgaagaaaactacaaccaatgaccgctcagctccacgattctcatag

SEQ ID NO: 29417 - DNA, 1590 bp, synthetic construct
  misc_feature 1..1590: note = Description of Artificial Sequence: Synthetic coding sequence
  source 1..1590: mol_type = other DNA
atgtcaagaaaatctagcgtgtgctcatccctcaatagtgtgaatagcagtgacagccgatcaagtggcagccactcccactcgccctcgtcccattaccggtatcgcagcagtaacctcgcccagcaggctccggtacggctgtcttccgtgtcctcgcacgactccggctttatcagtcaggacgccttccagtctaagtcaccttctccaatgcctcctgaggccccaaaccaaaactcttcctcatctgcttcttctgaggcgtcagagacctgccaaagtgttagcgagtgttcaagccctaccagcgtctccagcggatctaccatgggagcttgggtgtccacagagaagttgtccaacggcttttcccattattcactgagcagcgagtctcatgtcggcccaactggggctggcctgtttccacactgtctgccagcatcgaggctgttgccacgggttacctcagtgcatcttccggactacgcacactattataccattggtcctggcatgttcccttcttctcagatcccaagctggaaagattgggcaaaacctggtccatacgaccagccgctagtgaataccctccagagaaggaaggaaaagagggaacctgacccaaatggcggaggaccaaccaccgccagcggtccccctgcagcagccgaggaggcccagcgacctagatcgatgacagtgagcgcagccacgagaccgggagaggaaatggaagcttgcgaggagctcgcactggccttgtcccgcggactgcagctggatacacagagaagctcccgcgactctctgcagtgctcctcaggctactctacacagaccaccactccttgttgttccgaggataccataccgtcccaggtttctgactacgactatttctcagtatcgggtgaccaggaggctgatcaacaggagtttgataaatcttctacaatcccacgcaattccgatatttctcagtcctaccggagaatgttccaagctaagaggccggcttctaccgctggactgcccacaaccctgggacctgcaatggtgacgcctggggtagccactatacgcagaacaccgagtacgaagcccagcgtgcggagaggaactattggagcaggaccaattccaatcaaaactcctgttattccagtcaaaacgccaacagtaccggacctccccggtgtgctcccagccccacccgacggccctgaagagagaggggagcacagcccagagagcccatcagtcggtgaggggcctcagggcgtgaccagcatgcctagcagcatgtggagcggacaggctagtgtcaatccacctctgcccggaccaaagccgtccattcccgaggagcatagacaggccattcccgagtctgaggccgaagaccaggagcgtgagcctccctccgcaaccgtcagcccaggtcagatccccgaaagcgaccccgcagacttaagccccagagatacaccccagggcgaagacatgttaaacgcgattcggcgaggagttaaactcaagaaaaccaccaccaacgaccgatcggcgcctcgttttagttag

SEQ ID NO: 29418 - DNA, 2268 bp, synthetic construct
  misc_feature 1..2268: note = Description of Artificial Sequence: Synthetic coding sequence
  source 1..2268: mol_type = other DNA
atggaggcggtaatcgagaaggaatgtagtgcacttgggggtctgttccagaccatcatttccgacatgaagggtagttaccccgtctgggaagacttcatcaacaaggccggaaaattgcagtcgcagctccggacaaccgttgtcgctgccgcagcatttttggatgcctttcagaaagtggctgacatggcaaccaataccaggggcggtactcgcgagatcggaagtgctctgacgaggatgtgtatgcgacacaggagcattgaagcaaaactgaggcaattcagcagcgccctcatcgattgcctcatcaatccgcttcaggagcagatggaggagtggaagaaagtcgccaatcagctggacaaggatcatgctaaggagtacaaaaaagctcgacaggagatcaagaagaaaagtagcgatactctgaaattacagaaaaaagctaagaaggggcgaggcgatatccagccccagctcgacagtgctctgcaggatgtgaatgacaagtatctgctgctcgaggagacagaaaagcaagcggtgagaaaggctctgatcgaggaaagaggcagattctgcaccttcatctccatgctgcggcctgtcattgaggaagagatttccatgctgggggagatcacccatttacagaccatcagcgaggacctcaagtctcttactatggacccgcacaagctgccttcttcttccgaacaggtaattttagacctcaagggatcagactactcctggagttaccagacacctccctcttccccaagtacaacaatgtctaggaagtcctcggtttgttcttccctgaattccgttaattcttccgattcccggtcctcaggctcacattctcacagccctagcagccattatcgttacagatcatccaacttggcacagcaggccccagtccgcctcagttctgtctcttcccacgatagcggattcatttcccaagatgcgttccagtccaagtcccccagtcccatgcccccagaagcacccaatcagttatctaacgggtttagccattattccctttcttcagaatcgcatgttggccctactggcgctggcctgtttccccactgcctgccagcaagcaggttactgcctagagtgaccagcgtacatctgcctgattatgcccattactacaccatcggcccaggcatgttcccaagttcgcagattccctcttggaaggattgggcgaaacccggaccctatgatcagccactcgtgaataccctgcagcggcgtaaagaaaaaagggagcccgaccctaatggaggcggtcccactactgcctctggcccaccagccgcagccgaagaagctcagcgtccgcgtagcatgaccgtctctgccgcaaccagaccgggtgaggagatggaagcttgtgaggaattagccctagcgttgtcgcggggtctgcagttagatactcagagaagttcccgagactctctgcaatgcagctccggatattcgacccagacgacaactccctgctgctcagaggacacaatcccatctcaggtgtcagactacgattacttcagtgtgagcggcgaccaggaggccgatcagcaggagtttgataagagcagtactatcccgaggaattcggatatttcccagtcttacaggagaatgttccaagcaaagcgaccggcatctaccgccggacttccaaccactctggggcctgctatggtgaccccaggagtcgctacaatcaggcggactccatcgaccaaacccagtgtcaggagaggcacaatcggcgctggaccaattcccatcaagactcccgtcattcccgtgaaaacgcccacagtccctgacctccccggtgtgctgcctgctcctcctgatgggcctgaagaacgcggagagcacagtccggaatcaccatccgtgggcgagggacctcagggggtgacctccatgcccagcagcatgtggagcggacaagcctctgttaatcccccattaccaggacctaagccttccattcccgaggaacaccgccaggcaattcccgaatcagaagctgaggatcaggaacgcgagcctcccagtgctacagtgtcacccggtcagatcccagaatccgaccccgctgacctgagtcccagggatactcctcagggcgaggacatgctcaacgccattcgacggggtgtgaaactgaaaaagactaccacaaatgatcgatccgcgcctcgattctcctag

SEQ ID NO: 29419 - DNA, 1437 bp, synthetic construct
  misc_feature 1..1437: note = Description of Artificial Sequence: Synthetic coding sequence
  source 1..1437: mol_type = other DNA
atggccggtgtggaggaagtggctgccagcggttcacacctaaatggggatcttgaccccgatgatagggaagagggagctgccagtacggctgaggaggccgcaaagaagaaacggagaaaaaagaagaagtctaagggcccaagtgccgctggcgagcaggaacctgacaaggaatccggcgctagtgtggatgaagtcgcccgtcagttggaaagatccgccctggaagataaggagcgggatgaagacgacgaggacggagatggagacggggacggggcaaccggaaagaaaaagaagaagaaaaagaaaaagcgcggtccaaaagtgcaaaccgacccaccctcggttcccatttgcgatttataccccaatggcgtgttccctaagggacaagaatgcgagtacccgccaacacaggatggacgaaccgccgcatggcgaactacctccgaggagaaaaaagccctggaccaggcttctgaagagatctggaacgatttccgggaggcggcagaagcgcatcggcaggtgcggaagtacgttatgtcctggatcaaaccaggaatgaccatgatagagatttgtgaaaaactggaagactgctcccgcaagttgatcaaagaaaatggattgaacgctgggctggcattccctaccggatgctcactgaacaactgtgcagcccattacactccaaatgccggagacactaccgttctccagtacgacgacatatgcaaaatcgacttcggcactcacatctccgggaggattatagactgcgccttcaccgtgacctttaatcctaagtatgatactttactgaaggcagtaaaggacgccaccaacaccgggataaaatgcgccggtatcgacgttagactctgcgatgtgggtgaggctattcaggaagttatggaatcctacgaggttgagattgacggcaaaacataccaagttaaaccgataaggaacctgaacggtcactccattggccagtatagaatccacgccggaaagaccgtgccaattgtaaaaggcggagaagcaacccgcatggaggaaggcgaagtgtacgcaatcgaaacattcgggtctactgggaaaggagtggtccacgacgatatggagtgcagccattacatgaaaaatttcgacgtcggccatgttcccatccgattgccgcgaactaaacacttgctgaatgtgatcaacgaaaattttggaactctggcattctgcagacgctggttggaccggctaggggaaagtaaatatctgatggcgctgaaaaacctgtgtgatttgggcattgtcgacccatatccccctctttgcgatataaaaggctcctatacggctcagttcgaacacaccatcctactgcggccaacatgtaaagaagtggtgtcccgaggtgacgattattag

SEQ ID NO: 29420 - DNA, 1743 bp, synthetic construct
  misc_feature 1..1743: note = Description of Artificial Sequence: Synthetic coding sequence
  source 1..1743: mol_type = other DNA
atgggaaccacagggttagagagtctcagcttaggagacagaggcgcagcgcctacggttacgagcagtgagcgcctggttcccgacccacctaacgacctgcggaaagaggacgtggcaatggagctcgaaagagtgggcgaggatgaagagcagatgatgataaaaagatcaagcgagtgtaatccactgttgcaggagcccatcgcatctgcgcagtttggagccacagccggaactgagtgccgcaagtctgtgccctgtgggtgggagcgggtggttaagcagcggctgttcgggaagacagctggcagatttgatgtgtacttcatctcgcctcagggtttaaaattcaggtccaagagtagtctggctaactatctgcacaagaacggggagacaagtttgaaacctgaagatttcgatttcacagttttaagcaagagaggaataaagagtagatacaaggactgctccatggccgctctaacaagccatttgcaaaatcaaagtaataatagcaactggaatttgcgcactcgctcaaagtgcaaaaaggatgttttcatgcccccatctagttcgtccgagctgcaagagagccgcggtctctcaaacttcacctctacccacctacttctcaaggaagatgaaggagtagacgacgtgaactttagaaaagttaggaagcccaaaggtaaagtaaccatcctgaagggaattccgataaaaaaaacgaagaaagggtgccgaaaaagctgctcaggcttcgtgcaatcagactccaagcgggaatccgtgtgcaataaggcagatgccgagtctgaacctgtcgcacagaagagtcagctcgaccggaccgtttgtatctccgatgcaggcgcttgtggggaaaccctgagtgtgacctctgaggagaattccctggtgaagaagaaggagcggagcctgagcagtggatcaaatttttgctctgaacagaagaccagcgggattattaacaagttctgcagtgccaaggattccgaacataatgagaagtatgaagatacctttctggagtctgaagagatcggcacaaaggtcgaggtggtggagaggaaggaacatctgcatactgatatcttaaaacgcggatccgaaatggataataactgctccccgacccgtaaggactttacaggagaaaagatcttccaggaggataccattccacgaacccagattgaacgtcggaagacaagtctttacttctcaagcaaatataacaaggaagctctgtctccgcctaggaggaaagcgttcaagaagtggactcctcccagatctccttttaacctggtgcaggagacgttattccatgacccctggaagctgttgattgcgactatctttctgaaccgcaccagcggaaaaatggctataccagtcttgtggaagtttctggaaaagtacccaagtgcagaagtggctcgcaccgccgattggagggatgtttctgagttgctcaaacccttgggcctgtacgaccttcgggctaaaactattgtcaagttcagcgatgagtacctgactaaacaatggaagtatccaatcgagctgcacggcatcggcaagtatggcaacgactcttataggattttctgcgttaatgagtggaaacaggtccatcctgaggaccacaagcttaacaagtatcacgactggttgtgggagaatcatgagaaactgagcctcagctag

SEQ ID NO: 29421 - DNA, 789 bp, synthetic construct
  misc_feature 1..789: note = Description of Artificial Sequence: Synthetic coding sequence
  source 1..789: mol_type = other DNA
atggggactactgggctagagagtctttcgctcggcgaccgcggtgcggcacctacagtgacaagtagcgaaagattggtgcccgaccctccaaacgacctccggaaggaggacgtcgctatggaactggaaagagtcggcgaggacgaggagcagatgatgatcaagagaagctccgaatgcaatccacttctgcaggaacctatcgcatccgcacagttcggggctaccgctggtacggagtgccaggacaccatcccaagaacccagatcgaacggaggaagaccagcctgtattttagctccaagtataacaaggaggctctctcacctccacgacgcaaagctttcaagaagtggaccccacctcgctctccattcaatctcgtgcaggagactctctttcacgacccatggaaacttctgattgcaacgatttttttgaacaggacaagcggcaaaatggccatcccggtcctatggaaattcctggagaaataccctagtgccgaagtcgccaggacagctgattggcgggatgtctctgagctgctgaagcccctggggctgtatgacctgcgtgccaagactatcgtgaaatttagcgacgagtatctcaccaagcagtggaagtacccgattgaactgcatggaattggtaagtatgggaacgattcatatcgaattttttgtgtcaatgaatggaaacaggtgcaccccgaggaccacaaactgaacaagtaccacgattggctgtgggaaaaccacgaaaagctatccctttcttag

SEQ ID NO: 29422 - DNA, 1725 bp, synthetic construct
  misc_feature 1..1725: note = Description of Artificial Sequence: Synthetic coding sequence
  source 1..1725: mol_type = other DNA
atgggtaccaccggcctggaaagtctttccttgggcgatcgtggggctgcccctaccgtaactagtagcgaacggctcgttccagatcccccaaacgacttacgaaaggaggatgttgctatggagctggaaagggtcggcgaggacgaggagcaaatgatgattaaacggtctagcgaatgcaaccccctcctccaagagcccattgccagcgcccagtttggagctaccgcgggaactgagtgtagaaagtcagtgccatgcgggtgggaaagagtcgttaagcaaagactgtttggcaaaaccgccggaaggttcgatgtttatttcatctccccacagggtctcaagtttcgtagcaaatcttctctggccaattacctccacaaaaacggggaaacaagcctgaaacccgaggactttgatttcaccgttctgtcaaaaagaggcatcaagtctcgttacaaagattgcagtatggccgcactgacctcccatttgcaaaaccagtctaacaacagcaattggaacctcaggacccgaagtaaatgcaagaaagatgtgtttatgccaccgtctagctcttcagagctgcaggagagtcgcggactgtcaaatttcacttcaacacaccttttgctgaaagaggacgagggcgtggacgatgtcaacttccgcaaggtaagaaagcccaaggggaaagttacaattctgaagggtatccccattaaaaagactaagaaggggtgcagaaagtcctgcagtgggtttgtgcagtcagactctaagcgggaaagcgtctgtaataaagctgacgctgagtctgagccagtcgcccaaaaaagtcagcttgatcgcactgtgtgcatcagcgacgcaggcgcatgcggagaaacgctttcagtgacaagcgaagaaaactcgctagtcaaaaagaaggagagatctctgtcctccggatctaatttttgctccgagcagaagacttccggcattattaataaattctgtagtgcgaaagattctgagcataacgaaaaatacgaggataccttccttgagtccgaagagatcgggactaaagtggaggtggtggagaggaaggaacatttgcacaccgatatactgaaacgaggatcagaaatggataataactgtagccccaccagaaaggactttacagaagacacgatcccccgtacacagattgaacgcagaaagacatctctgtacttttcctctaaatataacaaggaggcactctcaccacctagacgcaaggcctttaagaaatggactccccctcgatctcccttcaatttggtccaagagaccttgtttcacgacccctggaaactgctgattgccacaatctttcttaatcgcacatcagggaagatggccatccctgtgctctggaagttcctggagaagtacccgagcgcggaggtggccagaactgctgattggagggacgtgagcgaactgctcaagcccctcggattgtacgacttgcgcgcaaagactattgtgaaattctccgacgaatacctaaccaagcagtggaagtacccaatcgaactccatggcattggaaagtatggcaatgatagctatcggatcttctgcgtgaatgagtggaagcaagtacatcccgaagatcataagctgaacaaatatcatgactggctatgggagaatcacgaaaaactgtctctgtcctag

SEQ ID NO: 29423 - DNA, 93 bp, synthetic construct
  misc_feature 1..93: note = Description of Artificial Sequence: Synthetic coding sequence
  source 1..93: mol_type = other DNA
atggtgaatgaggctaggggcaatagtagcctgaacccttgccttgagggaagtgcttctagcgggagcgagtctagtaaggactctagctag

SEQ ID NO: 29424 - DNA, 2094 bp, synthetic construct
  misc_feature 1..2094: note = Description of Artificial Sequence: Synthetic coding sequence
  source 1..2094: mol_type = other DNA
atggaccatcgcaaggcacgcgtgctacctgccggacactattgtccttcgctcggcatttgggcgagtcaagtgggatccgtccggagtagcgtgcctccttctatcagcagaaatcctgccatggtgaacgaggcccgtggaaattcgtctctgaacccatgtctggaaggtagcgcgtcatcaggtagcgaatcaagcaaggactcaagccgctgctctacccctgggttggaccccgagcgccacgaacggttgcgggagaagatgcgccgacgcttggagtcaggcgacaaatggttttctcttgagtttttcccaccccgaacggccgaaggtgccgttaacctcattagtcgctttgatcgtatggccgcaggcggacctctctatatcgatgtcacttggcatcctgccggagaccctggatcagacaaagaaacttcttcgatgatgatagcaagcaccgccgttaactattgcgggctggagactatattacacatgacgtgctgccgacagagacttgaggagataacaggccacctacacaaggccaaacaactgggcttaaagaatatcatggccttaagaggtgatcctatcggagatcaatgggaggaagaagaaggcggatttaattatgcagtcgacctggtgaagcatatccgttctgaattcggtgactattttgacatttgtgtggccggataccccaagggtcatcctgaggcgggatcttttgaggcagacctgaagcacctaaaggaaaaggtttctgctggcgcagactttatcatcactcagctgttctttgaagcagatacttttttcagattcgtcaaggcctgcactgatatgggcattacctgtcctattgttccaggtattttcccgattcagggttatcacagcctccgacagctggtaaagttgtctaagctggaggtcccacaggagattaaagacgtcatcgaaccaatcaaagacaatgatgcggctattagaaattacggaatcgagctcgcagtgtcactctgtcaggagctgctcgctagcggcctcgtgcccggattgcatttctacacacttaaccgcgaaatggccaccacggaggttctgaaaaggttggggatgtggaccgaagacccaaggcggcctctgccctgggcactgtcagcccaccccaagcgcagggaagaggacgtaaggcctattttttgggcttccaggccgaaaagttatatatatcggactcaggagtgggatgaatttccaaatggtcggtgggggaatagcagcagccccgcttttggcgaactgaaggattactatctcttctacttgaaaagtaaatcacctaaggaagaactgcttaagatgtggggagaggagcttactagcgaagagagcgtgtttgaagtgtttgtactgtacttgagcggggaacccaataggaacggtcacaaggtgacatgcctgccctggaacgacgagccgctggcagctgaaacgagccttctgaaggaagagctgctgcgggtgaacagacaggggatcctgactatcaacagccaacctaacatcaatggcaaacctagctctgaccccatagtcgggtggggccctagcggaggttatgtattccagaaggcgtacctggagttcttcacctcacgggagaccgccgaggctcttctgcaggtgctcaaaaaatatgaactgagagttaattaccatctcgtgaatgtgaagggcgagaatattacgaatgcgcctgaactgcagcctaatgcagtgacatgggggatatttccaggcagagaaatcatacaacccaccgtggtggaccctgtgagcttcatgttctggaaagacgaagcattcgccctctggattgagagatggggtaagctgtacgaagaggaatcaccctctagaactattatccagtacatccatgataactactttctggttaacctcgtcgacaatgatttcccactggacaattgtctgtggcaagtagtcgaggataccctagaacttctgaaccgccctactcagaacgctagagaaaccgaggctccttag

SEQ ID NO: 29425 - DNA, 2094 bp, synthetic construct
  misc_feature 1..2094: note = Description of Artificial Sequence: Synthetic coding sequence
  source 1..2094: mol_type = other DNA
atggatcaccggaaagcaagagttcttcccgctgggcattattgtccgtccttgggtatctgggcatctcaggtcggctctgtgaggagctctgtgccgccttctatctcccgaaaccccgctatggtgaacgaagcacgaggcaattcatcgctaaacccctgtctggagggttccgcctcttccggctctgaaagctctaaagatagctctagatgtagtacaccgggtctggacccggagcgtcacgaacgtctgcgggagaagatgagaagaagactggagtcgggcgataagtggtttagcctagagtttttcccaccacgcaccgccgaaggcgctgttaacctgatctcccggtttgaccgaatggccgctggaggcccattgtacatcgatgttacctggcaccctgcgggtgacccagggtccgacaaggaaacctcaagcatgatgatcgcgtctaccgctgtaaactactgtggattggaaacaattctgcacatgacctgttgtcgccagcgactggaagaaatcacagggcatctgcacaaagcaaaacagctgggactgaaaaatataatggctctgagaggagaccctattggagaccaatgggaggaggaagagggaggttttaattacgctgtggacctggtgaaacacatcagatctgagtttggtgattacttcgacatctgtgtagcgggatacccaaagggtcaccccgaagccggatctttcgaagcagacctcaaacacctgaaagagaaggttagcgccggagccgatttcatcattacccagctgttctttgaagcggacactttttttcgctttgtcaaggcctgcaccgacatggggattacctgtcctattgtgcccggaatattccccatccagggataccattcactacggcagttggtgaagctgtccaagcttgaggtcccgcaggagataaaagatgtcattgagccaattaaggataacgatgcagccattaggaattacggcatcgagctagcggtatctctgtgtcaggagttactcgcaagtggactcgttccaggactgcatttctacaccctaaaccgcgagatggccaccactgaggtgctgaagcgcttgggaatgtggacagaagacccacggcgaccactgccttgggccctgtctgcgcatccaaaacgcagagaagaggacgtcagaccaatcttttgggcctccagacctaaatcctacatttaccggacccaggaatgggacgaatttcccaacgggcgatggggcaactccagctcaccagcctttggtgagctcaaggattattacctgttctaccttaaaagtaagagcccaaaggaggagttgctcaagatgtggggcgaggaactgacttccgaggagtcagtgtttgaggtgttcgttttgtatctctccggtgagcctaacagaaacggacataaagtcacttgtttaccttggaacgacgaacctctggctgcggaaacttctcttctcaaggaagagctgttacgagtcaatagacagggaattctgacaataaatagccagcctaacatcaatgggaaaccttcctccgatccgatagtcggttgggggccatctggcggttatgtgtttcaaaaggcttacctggaatttttcacttcacgtgagacggcagaggcgctgctgcaggtgctgaagaagtatgaactgcgcgtcaactaccacctcgtaaatgtaaagggggaaaacataacaaatgcaccagaattgcagcccaacgcagtgacctggggaattttcccgggtcgggagatcattcagcccacagtcgtagaccctgtttcattcatgttctggaaggatgaagcgtttgccctgtggatcgaacgatggggcaagctgtatgaggaggaatccccaagcaggacaatcattcagtatatccacgataattactttctggtcaacctggtcgacaacgactttcctttagataactgtctgtggcaagtggtcgaggacacattagaactgctgaatcggccaacacaaaatgctcgcgaaactgaggccccatag

SEQ ID NO: 29426 - DNA, 1971 bp, synthetic construct
  misc_feature 1..1971: note = Description of Artificial Sequence: Synthetic coding sequence
  source 1..1971: mol_type = other DNA
atggtgaacgaggctaggggcaactcctcacttaacccttgcctcgaggggtcagcctcaagcgggtccgaaagcagcaaagatagttcacggtgtagcacaccaggcctagatcccgagcggcacgagcgactcagagaaaagatgcggagaagactggagagcggtgacaagtggttctctttggaattcttcccacccaggactgccgaaggagctgtgaacttaatttcgagattcgaccggatggcagcgggagggccactctacattgacgtgacctggcatcccgcaggtgacccgggatctgacaaggagacctcttcaatgatgatcgcctccacggctgtgaattattgtggccttgaaactattctccatatgacctgctgcagacagcgcctagaagagataacgggtcatcttcataaagccaaacagttgggactgaagaacattatggctcttaggggtgaccctatcggcgaccagtgggaagaagaggaggggggttttaactatgctgtggacctggtgaagcacatcaggtcagaattcggcgactactttgacatttgtgtggcaggctacccgaagggccaccctgaagccggaagcttcgaagccgaccttaaacatttgaaggaaaaggtctctgcaggggcagatttcataataacacaactgttttttgaagctgatacgttcttcaggttcgtaaaggcttgcaccgatatgggaattacgtgtcccattgtgccagggatctttccgattcaggggtatcactcattaaggcaactggtcaagctctccaagctggaagtgccacaagagataaaagacgtgattgagccgatcaaggacaatgacgctgctattaggaactacggcatcgagctggcagtgagtctgtgccaggaactcttggccagcggacttgttcccggactccacttttatacccttaacagagagatggccaccacagaggtcctcaagaggctgggtatgtggactgaagatccacgcaggcctttgccttgggcgctctcagctcatccgaaaagacgcgaggaagatgtgcgtccaatattttgggcgtcccgcccaaagagctatatttataggacacaagagtgggacgaatttcctaacgggaggtgggggaatagctcatcgccagcttttggagaactgaaagactattaccttttctatcttaagtccaaaagccccaaagaggaactgctgaagatgtggggtgaggagttaacatctgaagaatccgtctttgaggtctttgtgctgtacttatcgggcgagccaaatcgaaacggtcataaggtgacttgcctaccctggaatgatgaaccccttgctgccgaaacctccttgcttaaagaggaacttctcagagtcaaccggcagggtattctgacgattaattcccagcctaatatcaacggaaagccaagcagcgatcccatcgtgggctggggcccttcaggcggttatgtattccagaaagcatatcttgagttcttcacaagcagagagaccgcagaagctcttctgcaggtcctgaagaaatatgaattgcgcgtgaattaccatctcgtgaacgttaaaggagaaaatattaccaacgcgcctgaattgcagccaaacgcagtgacttggggcatctttcctggcagggagattatccagcccacggtggtggatccagtttcattcatgttttggaaggatgaggctttcgctttgtggattgagagatggggcaaactgtacgaggaagaatcccctagccgcacgataatccagtacattcacgataattacttcttagtgaacctggtggacaacgacttccccctggacaattgcctctggcaggttgtagaggataccctggaacttctcaaccgtcctactcagaacgctcgagaaaccgaggcaccctag

SEQ ID NO: 29427 - DNA, 1971 bp, synthetic construct
  misc_feature 1..1971: note = Description of Artificial Sequence: Synthetic coding sequence
  source 1..1971: mol_type = other DNA
atggtaaacgaggctagaggcaatagttccctgaatccatgcctcgaaggttccgcctctagcggttctgagagctctaaggactcttcacggtgttctaccccagggctggatccggaacgccatgagcggcttcgggagaagatgagaaggcgcctcgagagtggagacaaatggttcagcttggaattcttcccaccaagaaccgccgagggggctgtgaatctcataagccgcttcgatcgaatggcagccggaggacccctgtacattgatgtgacatggcacccggcaggtgatcctggatccgataaagaaactagcagcatgatgatcgcttccaccgcggtcaattattgtggattagagaccattctgcacatgacttgttgccgacagagactggaggagatcacagggcacctccacaaggccaagcagctgggtctcaaaaatataatggctctccgtggtgatcccattggcgatcagtgggaggaggaggagggaggcttcaattacgccgtagacttggttaagcatattcgatctgagttcggggattactttgacatctgcgtggcaggttaccctaaaggccaccccgaggcgggatcttttgaagcagacctgaagcatttgaaagagaaggtctccgcaggggcagattttatcatcactcagctgttcttcgaggctgacaccttctttagattcgtgaaggcctgtactgacatgggcatcacttgcccgatagtgcccggaatctttcccattcaaggctaccatagtctgcggcagcttgtgaagctaagtaaactagaggtcccacaggagataaaggatgtcatcgagcctatcaaggataacgacgccgcaattagaaactacggcatcgagctcgccgtgtctctgtgtcaggaactgttggcaagtggactcgttcccggtctgcatttctacactctgaaccgggaaatggcaacgaccgaagttctcaagagactcggtatgtggactgaagatccccgtcgcccactgccctgggcactctccgcccatcccaagaggagagaggaagacgtccgaccaatcttctgggcaagtcgccctaaaagctacatttatagaacccaagagtgggatgagtttccgaatggacgctggggcaactcttcttcccccgcattcggagagttaaaggattattacctcttttatttgaagagcaagtcccccaaagaggagctgttaaaaatgtggggagaggaacttaccagtgaggagtctgtcttcgaggtgtttgtgctctacctgtctggtgagccaaaccgtaatggccacaaagtcacctgcctcccttggaatgacgaacctctcgccgcagaaacctcactactaaaggaggaactgctgcgcgtgaaccgacaagggattctgacaattaatagccagcccaacataaacggcaaaccatcctccgaccctatagttgggtggggcccaagtggaggttatgtgtttcagaaagcctatctcgagtttttcaccagccgggagaccgccgaagctctgttgcaggtccttaagaagtatgagctcagggtaaattatcacctggtaaacgtgaagggagagaatatcaccaacgccccagagttacagcctaacgctgttacttgggggattttccccggtcgcgagattattcagcccacagttgtcgatcctgtctcattcatgttctggaaggacgaagcattcgcgctctggattgagcgctggggcaagctgtacgaggaagaaagcccctccaggaccattatccagtatattcatgacaactatttccttgttaatctggtggacaacgacttcccgctcgataattgcctgtggcaggtggtggaagacacactggaactcctaaaccgcccaactcagaatgctagagagacagaggcaccctag

SEQ ID NO: 29428 - DNA, 93 bp, synthetic construct
  misc_feature 1..93: note = Description of Artificial Sequence: Synthetic coding sequence
  source 1..93: mol_type = other DNA
atggttaacgaagccagagggaacagttccctgaatccgtgtcttgagggtagcgcttcctccggcagtgagtcttctaaagattcttcctag

SEQ ID NO: 29429 - DNA, 432 bp, synthetic construct
  misc_feature 1..432: note = Description of Artificial Sequence: Synthetic coding sequence
  source 1..432: mol_type = other DNA
atggtcaacgaagcacgcggaaactcctctctgaacccctgcttggaaggctctgcctcatccgggtctgagtcgtctaaggactcaagcaggtgttccacccctggcctggaccctgaacgtcatgagagactgcgggagaagatgcggcgtcggctggaaagtggagataagtggttttctctagagttctttccgccaaggaccgcagagggtgctgtcaacctgatctccaggttcgaccgcatggccgcagggggacctctatacattgacgtaacgtggcatccggctggagatccaggcagcgacaaagagacctcctcaatgatgattgcatccactgccgtgaactactgtggcctggagaccattctccatatgacatgctgccggcaaaggctggaagagatcactggccacctccactag

SEQ ID NO: 29430 - DNA, 162 bp, synthetic construct
  misc_feature 1..162: note = Description of Artificial Sequence: Synthetic coding sequence
  source 1..162: mol_type = other DNA
atgtgccggggatgtggctgtctgccacccgatgctccctgtcccactctgtgttcgcggaatccagctatggtgaacgaagcccgaggtaatagcagcctcaacccctgccttgagggtagcgcctcctccgggtcagagtcatccaaagacagctcctag

SEQ ID NO: 29431 - DNA, 93 bp, synthetic construct
  misc_feature 1..93: note = Description of Artificial Sequence: Synthetic coding sequence
  source 1..93: mol_type = other DNA
atggtgaacgaagctcgaggcaacagttccctgaatccgtgcctcgagggatcagccagcagtgggagcgagtcaagcaaggatagcagttag

SEQ ID NO: 29432 - DNA, 2508 bp, synthetic construct
  misc_feature 1..2508: note = Description of Artificial Sequence: Synthetic coding sequence
  source 1..2508: mol_type = other DNA
atggcagcacccatccttaaagatgttgtggcttacgtggaagtttggtcctccaacggtaccgagaactactccaaaaccttcacaacccagttagtggacatgggggcaaaggtgtcaaagacctttaacaaacaggtgacacacgttatctttaaagatgggtatcagagcacctgggataaagcccagaaacgcggagtcaagctggttagtgtgctctgggtggaaaaatgtcggaccgctggggctcacatcgacgaaagcctgtttcctgccgctaatatgaatgagcacctttcctcactgattaaaaagaagcggaagtgtatgcagcctaaggatttcaacttcaaaactcccgagaacgacaaacggtttcaaaagaagttcgaaaagatggcgaaagaactacagcgccagaagacaaatttagatgacgatgtgccaatcttgctgtttgaaagtaacggctccctgatatatacgccgactatagagattaattcccgacatcatagtgctatggaaaaacgactacaggagatgaaagagaagagagagaacttatctccgacatcctcccagatgattcagcagtcgcacgataacccttctaattcattgtgcgaggccccattgaacattagtagggacaccctgtgttcagacgaatatttcgccggagggctccactcttcctttgacgacctctgcggcaattccggctgcggtaatcaggagagaaaactggaggggagcatcaacgacatcaaatctgacgtgtgcatctccagtttggtgttgaaagccaataacatccatagcagccctagctttacccatcttgacaagtcctctccccagaagttcctcagtaacttatccaaggaggagatcaacctacagcggaatatcgcaggcaaagtggtgacgccggatcagaaacaagctgccggaatgagtcaagagaccttcgaggagaagtatcggctgagtcctacattatccagcactaagggccacctgctcatccactcaagacccaggtcaagctctgtcaaaagaaaacgggtatctcacggctcccattcaccaccgaaagaaaagtgtaaacgtaaaaggtcgacccgaaggtctattatgccaagactgcagctctgcaggagtgaggacaggttacaacacgtagctggaccagcactggaagcactgtcatgcggggaaagctcatatgacgattatttcagtcccgataacttaaaagaacgctattcggaaaatctgccccctgaaagccagcttccctcttcccctgctcagctgtcgtgtcgcagtcttagtaaaaaggaacgaacaagcatatttgaaatgtcggatttttcatgtgtgggcaagaagaccaggaccgtagacataaccaacttcaccgcaaaaactatatcatctcctagaaagactggcaatggcgagggtcgcgcaacgagctcttgcgttacatcagcaccagaggaagcacttcgctgctgtcgccaggcaggaaaggaggacgcctgccccgaaggcaatggctttagctacactatcgaggatccggctctccccaaaggccatgatgacgatcttactccactggagggcagcctcgaggagatgaaggaagctgtaggcttaaaaagtacccagaacaagggaaccacaagcaagatttcaaacagctccgagggggaagcacagagtgagcatgaaccttgttttatagtagactgcaacatggaaactagcactgaggagaaggagaacctaccaggtggttacagcggttcggtcaaaaaccgtcccacaagacacgacgtactcgatgactcctgtgatgggttcaaggatctcattaaacctcatgaggagctaaagaagtctggcagaggtaagaaacccacaagaacacttgtgatgacgtcaatgccctcggagaaacagaatgtggtgatccaggttgtggataagttaaaaggattctccatagccccagatgtttgtgaaaccactacgcacgtactttcaggaaagccattacggactctaaatgtgcttctcggaatagctagaggatgttgggtgcttagttacgactgggtcttatggagcctggaactggggcattggatttctgaagagcccttcgagctttctcaccatttcccagctgccccactctgccgaagtgaatgccatctgtccgctggaccttacagaggaactctgttcgctgatcagcctgcaatgtttgtctctccagcgtcaagtccacctgtcgccaagttgtgcgagctggtccacttatgcggcggtcgagtgtctcaggttccaagacaggcgtcaattgtcataggaccctattccggcaagaagaaagctactgttaagtacctctctgaaaaatgggtgttggattctattacccagcacaaagtatgcgctccagagaactatcttctgagccaatag

SEQ ID NO: 29433 - DNA, 1833 bp, synthetic construct
  misc_feature 1..1833: note = Description of Artificial Sequence: Synthetic coding sequence
  source 1..1833: mol_type = other DNA
atggctgccccaattttgaaggatgtcgtggcctatgttgaggtttggagttcaaacggaactgagaactactctaaaaccttcactacacaactcgtcgatatgggcgctaaagtgtcgaaaacttttaataagcaggttacacacgttatctttaaagatggttatcaatcgacgtgggacaaggcacaaaagagaggcgtaaaactggtgtccgtgctgtgggtggagaaatgtcgaaccgccggagcgcacatcgatgaaagtctgttccctgccgcaaatatgaacgaacatctttcctcccttatcaaaaagaaaagaaaatgcatgcagcccaaagatttcaattttaaaacgcccgagaacgacaaaaggttccaaaaaaaatttgagaaaatggctaaagagctgcagaggcagaagaccaacctcgacgatgatgtgccaatcctcctttttgagtcaaatggctccctcatttacacgcccaccatcgagatcaactcaaggcaccattccgccatggagaagcggttgcaggagatgaaagaaaaaagggaaaatctgagcccaacgtcttcccaaatgatccagcaatcccacgataacccgtcaaattccctgtgtgaggctccactgaacatcagccgcgacacgctttgtagtgacgaatactttgcaggaggactgcactccagttttgatgatctatgcggaaactccggatgtggaaaccaggaaagaaaacttgaaggatccatcaacgatatcaagtctgacgtgtgtatttcatccctcgtattgaaggcaaacaacatccatagctccccttccttcacccacctggacaaaagctccccacaaaagttcctgtcaaacctcagtaaggaagaaataaacctgcagagaaatatcgcaggtaaagtcgtgacccccgaccagaagcaggccgctggaatgtcccaggagaccttcgaagaaaaatacagactctctccaacattgagttctaccaagggccacttgttgatccattcaagaccgagaagttcaagtgtgaagcggaaacgcgtctcgcacgggtctcatagtccaccgaaagaaaaatgcaaacgcaagagatctaccaggcgcagtatcatgccccgattacaactgtgtcgatctgaggaccgcctacagcatgttgccggacctgccctggaagcattgtcctgtggggaatcttcttatgatgattacttcagcccagacaatctaaaagagcggtatagcgaaaacctgcctcctgaatctcagcttccgagcagccctgcccagctgtcctgtcgttccttgagcaaaaaggaacggacgtctatctttgaaatgtccgatttttcctgcgtgggaaagaaaacgagaactgtggatattactaattttaccgctaagaccatttctagcccacggaaaactgggaacggggaggggcgagccacttcgagctgcgtgacttccgctccagaagaggcactccggtgctgcagacaggctggcaaggaagatgcttgccccgaaggcaatggcttctcatacaccattgaggaccctgctctgcccaaagggcacgacgacgatctcaccccacttgagggaagcttagaggagatgaaggaggctgtgggtctgaagagcacccagaataaggggaccacatcaaaaatctctaactctagcgagggcgaagcccagtctgaacatgagccttgctttatagtcgattgtaacatggagaccagtaccgaagaaaaagagaacctgcccggaggatactctggctcaatgtag

SEQ ID NO: 29434 - DNA, 1689 bp, synthetic construct
  misc_feature 1..1689: note = Description of Artificial Sequence: Synthetic coding sequence
  source 1..1689: mol_type = other DNA
atggccgctccgatcctaaaggacgtggtcgcttatgtggaggtatggagctccaatggaaccgagaactatagcaagacctttactacgcagctcgtggacatgggagccaaagtaagcaagactttcaataaacaggtgacgcatgtcatcttcaaggatggctaccagagcacttgggacaaagcccaaaagagaggggtgaagctggtcagtgtgttatgggtggagaaatgcaggaccgccggtgctcacatcgatgaatccttgtttccggcagccaatatgaacgaacacctttcttcattaatcaagaaaaagcgcaagtgcatgcagcctaaggattttaatttcaagacccccgaaaacgataaacggtttcaaaaaaaattcgagaagatggccaaggagctccagcggcagaaaacaaatctagccagccagatgatccagcagtcacatgataaccccagtaatagcttgtgcgaggctccccttaacatttctcgcgacactctgtgtagcgatgaatacttcgccggtggtcttcacagtagctttgacgacttgtgtggaaactcaggttgcggcaatcaggagaggaaactggaggggtccatcaacgatatcaagtctgacgtttgtatttccagtctggtgctgaaagcaaataatatccatagcagcccaagtttcactcaccttgacaaatccagtccgcagaagttcttatccaacctgtcaaaagaagaaatcaacctccagaggaacatcgcagggaaggtggtcacacccgatcaaaagcaagccgctggcatgtcccaagaaactttcgaggagaaataccgactatccccaaccctatcatcaactaagggacacctgctgattcactccaggcctcgctcctcttccgttaagcgaaagcgggtgtcacacggatcccactcccccccaaaagaaaaatgtaagagaaaaagatccacccgtaggtcaatcatgccacgactgcagctgtgcaggtcggaagatcgactccagcatgtggccggaccagcgctcgaggccctgagctgtggggaaagcagctatgacgactatttctcccccgacaatttgaaggagcgatattccgaaaatctgcccccagaaagccaactcccatcctcccctgctcagctgtcttgtagatctcttagcaaaaaagaaaggacaagcatcttcgagatgtcagacttctcatgtgtgggcaaaaagacaaggacggtggacataaccaattttactgccaaaaccatctcttccccacgcaagactggcaacggggagggtcgtgctacatcttcgtgtgtaacatccgccccagaggaggctctacgctgttgccggcaagccggtaaggaggacgcctgccccgaggggaacggattttcgtacacaatagaggaccccgcactgccaaagggccacgacgatgatctgacaccactggagggatcgctggaagagatgaaggaggctgtgggtctgaagtccacacaaaacaaaggtactacttccaagatcagtaacagctcagaaggggaggcccagtctgaacatgagccttgctttattgttgactgcaacatggaaacctcaacagaagagaaagaaaatctgccgggtggctatagtggatctatgtag

SEQ ID NO: 29435 - DNA, 234 bp, synthetic construct
  misc_feature 1..234: note = Description of Artificial Sequence: Synthetic coding sequence
  source 1..234: mol_type = other DNA
atgaacgtactgcttggtagtgtcgtgattttcgccactttcgtgacactgtgcaatgcctcatgttactttattcccaacgaaggggtccctggcgattccactagaatgtttttgcacctgtgggtcatgaccaagactaccgccaaggagtcctcccgcagacgcacggccagcatttcctggtggagaaggaggacacaaaagagacctgtgctgtccgtcaacggatag

SEQ ID NO: 29436 - DNA, 345 bp, synthetic construct
  misc_feature 1..345: note = Description of Artificial Sequence: Synthetic coding sequence
  source 1..345: mol_type = other DNA
atgaatgtacttctgggttccgtggttattttcgccacgtttgtaaccctttgcaatgcaagctgctatttcatccctaacgagggagtcccgggagactcaacccgcaaatgtatggatctgaaaggaaacaaacaccctattaattccgaatggcagactgacaactgcgagacgtgtacatgttacgaaacagagatctcttgctgtacactggtgagtaccccagtggggtacgacaaagataattgtcagcgtatttttaagaaagaggattgtaagtacatcgtggtggaaaagaaggatcctaagaaaacctgctcagtgtcagaatggataatttag

SEQ ID NO: 29437 - DNA, 3813 bp, synthetic construct
  misc_feature 1..3813: note = Description of Artificial Sequence: Synthetic coding sequence
  source 1..3813: mol_type = other DNA
atgaccgatgacaattcggatgacaagatcgaagacgagctccaaacattcttcacatccgacaaggacggtaacacacacgcttacaacccgaagagtccacctacgcagaactcctccgctagtagcgtaaactggaattcagccaatcccgacgacatggtggtcgattacgagacggatccagccgtagtcacaggcgagaatatctctctttcgctgcagggcgttgaggtgttcggccacgaaaaatcttccagcgattttatttctaaacaggtcctggatatgcataaagactctatatgccagtgccctgcactcgttggcacggagaagcccaaatatcttcaacactcctgtcattcccttgaagcagtagaggggcagtctgtcgagccctcactccccttcgtgtggaagcccaatgacaacctgaactgcgcaggatattgtgatgccctcgaactgaaccaaactttcgacatgacagtggacaaggtcaactgtaccttcataagtcaccatgctattggaaagagtcagagctttcacactgccggtagtttgcccccaacaggcagacgtagcggcagtactagctctctgtcctacagcacgtggacgagctcacacagcgacaagactcacgccagggagacaacttacgatagggaaagcttcgagaatcctcaggtcaccccaagcgaggcccaggacatgacatatacagcctttagtgatgtggtgatgcagagcgaggtgttcgtatctgacatcggcaatcagtgcgcatgctcaagcggtaaggtgacctccgaatatacagatggtagtcagcagaggttggtgggggaaaaggaaacccaggcactgacccctgtaagcgatggcatggaggtgccaaacgatagtgcgctccaagagtttttctgccttagtcatgacgagagcaactccgagcctcactcccagagttcgtatcggcacaaagagatgggccagaacctccgggagactgtgagctattgcctgatcgacgatgagtgccctcttatggttccagcattcgacaagtcggaagctcaggtattgaatccagagcacaaagtgaccgaaactgaggacacacagatggtatccaaaggcaaggatttggggactcagaaccataccagcgagctgatcctttcttcaccccctggacagaaagttggctcatcatttggcctgacttgggacgccaacgatatggtaatctccacagataagactatgtgcatgtccacccccgtgctagagcctactaaagtgacattcagtgtgagtcctatcgaggccacggaaaaatgtaagaaggtcgaaaagggtaacagagggcttaagaatattcctgatagcaaagaggctcctgtcaacttgtgtaagccctctctggggaaaagtacaatcaaaacaaatacgcctatcgggtgcaaagtccgaaagactgagatcatcagctatcctagacctaactttaagaatgtcaaagctaaggttatgtcacgggcagtgctacagcctaaagacgcggcattaagtaaggttactcctaggccacagcagacttcagcatcttctccatcctctgtgaacagtagacaacagaccgtattgtcccgcacccccaggagtgatctgaatgctgacaagaaggccgagatcctcatcaataagacgcacaaacagcagtttaataagttgatcacgagccaagctgtgcacgtgacgactcactccaaaaacgctagccatcgggtgccgcgaaccactagcgctgtgaaatctaaccaggaggatgtggacaaagcttcctcatcaaacagtgcctgcgagactgggtccgtgagcgccctgttccagaagatcaagggcattctgcccgtcaaaatggaaagtgccgagtgcctggagatgacttatgtccccaacattgacagaatcagtcctgaaaagaaaggcgagaaagagaatggcacctcaatggaaaaacaggaactgaaacaggagatcatgaacgaaacttttgagtacgggagtctcttccttggttccgcttctaagaccaccacaacgagtgggcgtaacattagtaagcccgattcgtgtggactcaggcagatcgcagcaccaaaagcgaaagtcggacccccagtctcatgtctgagaaggaattctgacaaccgcaatccttcagccgatcgggctgtgtctccccagcgcattagacgcgtttctagctccggcaaacctacttctctcaagacggcccagagttcatgggtgaatctgcccaggccgctcccaaagagcaaagcaagcctgaagtcccccgcacttcgcaggacaggttcaacaccaagcattgcttccacacactccgagctgtccacatactctaacaattctggcaatgctgcggtgattaagtacgaagaaaaaccgcctaagcccgcattccagaacggcagctcaggcagtttctatctaaaacctctagtcagcagagcgcatgtgcacctgatgaagactccacctaaggggccaagccgaaaaaatttattcaccgccctcaacgcagtggaaaagtctaggcaaaagaacccacggtcactgtgcatccagccacaaaccgctcccgacgcgctcccccctgaaaaaaccctggaactgacccagtataagaccaagtgcgagaaccagtcgggcttcatcctgcagcttaagcagctgctcgcatgcggaaacactaaattcgaggctctgactgtagtgattcagcaccttctgagtgagagggaagaggcactgaagcaacacaagacattgtcccaggaactggtgaatctgaggggggagctggtgactgcttccactacgtgcgagaaacttgagaaagcccgtaatgaactgcagactgtctacgaggcctttgttcagcaacatcaagccgagaaaactgaacgtgagaatcgcctgaaggagttctacacacgagaatatgagaagctcagggatacttacattgaggaggccgaaaaatacaaaatgcagcttcaggagcagtttgacaacctgaacgctgctcatgaaacctccaaactcgagattgaagctagtcacagcgagaaactggaacttctcaagaaggcgtacgaggcatctctctcagagatcaagaagggtcacgagatcgagaagaaaagtttggaagatctattatcagagaagcaggagtccctcgaaaaacaaattaacgatctgaaatcggaaaatgatgccttgaatgagaagctcaaaagtgaagaacagaagcggagggccagagagaaggctaacctgaagaacccgcagatcatgtatctggaacaggaactcgagagccttaaggcagttctggagataaagaacgagaaattgcatcagcaagatattaagctgatgaaaatggaaaaactagtcgataacaatactgccctcgtggataaactcaagcgattccaacaggagaacgaggagctcaaagccaggatggataagcatatggctatttctaggcagctctcaacagagcaggcggtccttcaggagtcattggaaaaggagagcaaggtcaacaagagactgtctatggagaacgaggaactcctttggaagctgcacaacggggatctctgcagccccaagaggtctcctaccagcagcgcgataccactgcaatctcctcggaattccggctcattccctagcccgtcgataagcccacgctag

SEQ ID NO: 29438 - DNA, 1311 bp, synthetic construct
  misc_feature 1..1311: note = Description of Artificial Sequence: Synthetic coding sequence
  source 1..1311: mol_type = other DNA
atgctgctgagccccaaattttcgcttagcaccatccacattcgtctgacggctaaaggcctgctgaggaaccttagactaccatctgggtttagaagaagcacagtggtgttccacacggtagagaagagtaggcagaaaaacccgaggtcactctgcatccaacctcaaacggctccggacgcacttccccctgaaaagacactagagctcactcagtataagaccaaatgcgaaaatcagtctggtttcatcctccagttaaagcaattactcgcctgcggcaatactaagtttgaagccttgacggtcgtgatacaacatctgctgtccgaaagagaagaagcactgaagcagcacaaaactctgagtcaggaattagtgaacttgaggggggagcttgttacagcctccacaacgtgtgagaaattggaaaaggctcgtaacgagctgcagacagtgtacgaggcgttcgtgcaacaacaccaggccgagaagactgagagagagaatcgcttgaaggagttttatactcgagaatatgagaaacttcgtgatacctacatcgaggaggctgaaaaatataaaatgcagttacaggaacagtttgataacctgaacgccgctcatgaaacatcgaagctcgagatcgaagcatcacattcagaaaaactggagctgctcaaaaaagcctacgaagccagtctcagcgagattaaaaaaggccacgagatagagaagaagtcattagaggacctcctctcagaaaaacaagagagccttgaaaaacagatcaatgatctcaaatccgaaaacgacgctctgaacgaaaagcttaaaagcgaggagcagaagcggcgagcccgagagaaggccaacctgaaaaatccgcagataatgtatctggaacaggagctggagtcactgaaggccgttcttgaaatcaagaatgagaagctgcatcagcaagatattaagctaatgaagatggaaaagctggtggataacaatacggctctcgtggacaagctgaagcgctttcaacaagaaaatgaggaactgaaggccagaatggacaagcacatggctatttccaggcagttaagtaccgaacaggccgtgcttcaggagagcttggaaaaagagtcaaaggtgaataagcgcctctccatggaaaacgaggagcttctctggaagctgcacaacggggacctgtgctcccccaaaaggtcgcccacctcatccgcgattccccttcagtcccccaggaactccggctctttcccctccccttcaatttctccaagatag

SEQ ID NO: 29439 - DNA, 1554 bp, synthetic construct
  misc_feature 1..1554: note = Description of Artificial Sequence: Synthetic coding sequence
  source 1..1554: mol_type = other DNA
atgacggttccgggtgggtttaggtcttgtaccgagaccgatattagttccaagatcttcattaattctactcttacaccacccgcagggtccgaaaggcactatgatgcaaccctgctgaccttgctggtggtcggatcctattctctctgcatcattccgctgctcgctacatttacaggaaagaagaccggcaacgccgctgtcattaaatatgaagaaaaaccgccaaaacctgcctttcaaaacggctcttcaggtagtttttatctaaaacccttagtgtcccgggctcacgtgcacttgatgaaaacgccacctaagggacccagccgaaagaatttgttcaccgccctgaacgccgttgaaaagagcagacaaaagaacccgagatctctgtgcatccagccacaaaccgcgccagacgccctgcctcccgagaagacactggagctcactcagtataaaactaagtgtgaaaaccaaagcggattcatactgcagctgaaacagcttctggcatgcggaaacaccaagttcgaggccctcaccgtggtaatacagcacctcctttcagaacgggaggaggcgctgaagcaacataaaactctgagtcaggagctggtgaatctgcgtggggagctggtgaccgccagcaccacttgcgaaaaactggaaaaggcgaggaatgaactccaaaccgtatatgaagctttcgtgcagcagcatcaggctgagaaaacagagagagaaaatcgactcaaagagttctacactcgggagtatgaaaaactccgagatacctatattgaagaggcagaaaagtacaagatgcaacttcaggagcagtttgataacctcaacgcagcacacgaaacatctaagcttgaaatcgaggcgagccattcggaaaaactcgagctgctaaagaaagcatatgaggccagtctctcagaaataaagaagggccacgagatcgagaagaagtctctcgaggaccttctaagcgaaaaacaggagtccctagagaagcaaatcaacgatctgaaaagcgaaaatgacgctctgaacgagaagctaaaatctgaagagcagaagcggagggccagggagaaggccaacctcaaaaaccctcagattatgtaccttgagcaggagctggaaagcctgaaagctgttctggagatcaagaatgagaaacttcatcagcaggacataaagcttatgaagatggagaaactcgtggacaacaatactgcgctggttgacaaacttaagcgctttcaacaagaaaatgaggagctaaaggcacgcatggataaacatatggctatctcccgccaactcagtaccgaacaggctgtactccaggagtctctggaaaaagagagtaaagtgaacaaacgcctgtccatggagaatgaggaactgctgtggaagctccacaatggcgacctctgctcccccaagcgcagcccaaccagctctgcaatcccactgcagtctcccagaaattcggggagcttccccagccccagcatctcccccagatag

SEQ ID NO: 29440 - DNA, 2313 bp, synthetic construct
  misc_feature 1..2313: note = Description of Artificial Sequence: Synthetic coding sequence
  source 1..2313: mol_type = other DNA
atgaccgacgataattcggatgataaaattgaggatgaactgcagacattcttcaccagtgataaggacggcaacacacacgcttataatcccaagtccccccctacacaaaatagctccgccagtagcgtcaactggaacagtgccaatccagatgacatggttgtggattacgaaaccgacccagctgtggtcactggggagaacatcagtttgtccctccagggagtggaagtatttggccacgagaagtcaagtagcgattttatcagtaaacaggttctcgacatgcacaaagactcaatctgtcagtgcccagcgctcgtgggcacagagaaacctaagtacttacaacattcctgccacagcctagaggctgttgaggggcagtcagtcgaaccttctttacccttcgtgtggaaacctaacgacaatttgaattgcgctggatattgtgacgccctggagctcaatcagacatttgacatgacagtggataaagtgaactgcaccttcatctcacaccacgctatagggaagagccaaagctttcacacagcaggcagcctcccacctacaggtagacggtccggctccactagcagcctgtcatattcaacctggacctcctctcatagcgacaagactcacgcccgagagaccacttatgatagagaaagcttcgagaatccccaggtgacaccgtcagaagcacaagacatgacttacacagcctttagcgacgtggtcatgcaaagtgaggttttcgtgagtgacattggaaatcagtgtgcctgctcctcgggaaaagtgacttctgagtataccgacgggtctcaacagaggttggtaggagaaaaagaaactcaggctctgaccccagtgagtgatgggatggaggttccaaatgacagcgccctgcaagagtttttctgtctgtcccatgatgagtctaattcggagcctcatagccagagctcctacagacacaaggaaatgggtcagaatttgagggaaaccgtgagttactgtctaatcgatgatgaatgccccctgatggtgcctgctttcgataagtctgaggcacaggttcttaatccggagcataaggtcacagaaaccgaagacactcagatggtcagtaagggcaaggacttgggaactcagaatcacacaagtgaactaatcttgtcatccccgccagggcagaaggtgggctcctccttcggcctgacctgggacgcgaatgatatggtaattagtaccgataaaaccatgtgcatgtcgacacctgttctggagccgactaaggtgaccttctctgtcagccctatcgaagccacagagaagtgtaagaaggtcgagaaaggaaacagaggactcaaaaacattcccgactcgaaggaagctccagtgaacctgtgcaagccttcattgggcaagtctaccatcaaaacaaacaccccaatcggctgtaaagtgaggaaaaccgaaatcatttcttaccctcggcctaacttcaaaaatgtgaaggcaaaagtaatgagtcgcgctgtgctacagccaaaagacgcagcattaagcaaggtgacccccaggccgcaacagacaagcgcctcctccccatcctctgtgaattctcgccagcagaccgtgttgagtaggacaccaaggtccgatcttaacgcagataagaaagcagagatcctgattaacaaaacgcataaacagcaattcaacaaactaatcacctctcaggccgttcacgtgacaacccactctaagaatgcatcacaccgcgtgccccgtacaacttccgcagttaagtctaaccaggaggacgtggacaaggcttcgtcctctaacagtgcctgcgaaacaggaagtgtgtcggcgttgtttcagaaaataaaaggaattctgcctgtgaagatggagagcgccgagtgcctggagatgacgtatgtaccgaacattgatcggatttcgccggagaaaaagggggagaaagaaaacggcacttccatggaaaagcaagagctcaaacaggaaatcatgaatgaaacctttgagtatggtagcctgttcctagggagtgcttccaagactaccaccacttctgggaggaacatttccaagcctgacagctgtggactgaggcagatagcggcaccaaaagccaaggttggcccacccgtgtcctgcctccgcagaaactcagataaccggaatccctccgcggatcgggcagtcagtccacagcggattagacgcgtgtctagcagtgtcctccctaaggcagccttctcgtag

SEQ ID NO: 29441 - DNA, 3651 bp, synthetic construct
  misc_feature 1..3651: note = Description of Artificial Sequence: Synthetic coding sequence
  source 1..3651: mol_type = other DNA
atgaccgatgataattcagacgacaagatagaggacgagctacagaccttctttacgtccgacaaggatggaaatactcatgcttataacccaaagagtcccccaacccaaaacagttccgcttcgtcagtgaactggaatagtgccaatcccgatgacatggtggtcgactacgaaactgaccccgcagttgtgacaggggagaatatttcactgtccctacagggggtcgaggtgtttggccacgaaaagtcgagttcagattttatctcaaagcaggtattggatatgcacaaagattctatttgtcagtgtcccgcactagtcggtactgaaaaacctaagtacctccagcactcatgccatagccttgaggcagtggaaggccagtccgtcgagccctcactgccattcgtgtggaagccaaacgataacctcaactgtgcgggttactgcgacgcactggagttgaatcagacttttgacatgactgtcgacaaagtgaactgcacatttatttcccatcatgccatcgggaagagccaatccttccacactgcaggatccctgcccccaaccggtaggaggagcggaagcacctcatcccttagctactctacctggacttcttctcactcggacaagacccacgcccgagaaacaacgtatgatcgagaatcctttgaaaacccacaggtcaccccttctgaggcccaggatatgacgtacaccgctttctccgatgtggtgatgcagtcggaggtgttcgtgtcagacatcggaaatcagtgtgcttgtagctccgggaaggtgacttcagagtatactgatgggagccagcagcgcttggtgggtgaaaaagaaacccaggctctgactcccgtttctgacggcatggaagtgcctaacgattcagccctgcaagagtttttttgtctcagccacgacgaatcaaactctgagccccactcgcagtcaagttacaggcacaaagaaatggggcagaatctgagagagactgtatcatattgtctcatcgatgatgagtgccccctgatggtccccgcattcgacaaaagtgaagcccaagtgctgaatccagaacacaaggtgacagaaacggaagatactcagatggtttctaagggtaaagatcttggtactcagaaccacacttcagagctgatcttgtcttctcctcccggtcagaaggtaggatcctcattcgggttgacatgggacgcaaatgacatggtcatatccacggacaaaacaatgtgtatgtccacacccgtattagaaccaacgaaagtgacatttagcgtgtctcctattgaagccaccgagaaatgcaagaaagtcgagaagggcaacagaggcttaaagaatatacccgattccaaagaggcgcctgttaacctctgcaaaccatcacttgggaaatccacaataaaaacaaacacaccgatcgggtgcaaggtgcgaaaaacagaaatcattagctatccaaggccaaattttaagaatgttaaagcgaaagtgatgtcacgggctgttctgcagccaaaagatgcggctctgagtaaggtgactccacgacctcaacagacaagcgcttcgagccccagcagcgtgaattccaggcagcagactgttctctcccgcacccctcggtccgacctgaacgcagataagaaggcagagatactaattaataagacacacaaacagcagtttaacaagctgatcacatcacaggcggtccacgtgacaacacatagtaaaaatgcatcacaccgggtgcctcggaccacctcagcagtcaagtctaatcaagaggacgtagataaagcatctagcagcaactctgcatgcgagaccgggagcgtatccgcactgtttcagaaaattaagggaattctgcctgtcaaaatggaatctgctgaatgcctggagatgacgtatgttccaaatatcgataggatttcacctgagaaaaaaggggagaaggagaacggcacatcaatggaaaagcaggagttaaaacaagagatcatgaacgagaccttcgagtatggcagcctgttcttgggatccgcctccaaaactactactacgtccgggagaaacatctctaaacccgactcatgcggcctgcgccagatcgctgccccaaaggctaaggttggccctcctgtgagctgcctcaggaggaacagcgataacaggaatccatctgccgacagggctgtgagccctcagcgcattcgtcgggtgagctcttcagccggaaacgcagccgtcataaagtacgaagagaagcccccaaagcctgcgtttcagaatggctcctcaggaagcttttatctgaaacccctcgtctcccgcgcacacgttcatttgatgaaaactcctcctaagggtcccagtcgaaagaacctcttcacagcgttaaatgcggtggagaagagccgccagaagaacccacgctcactctgcatccagccccagaccgcaccagatgctttgccccctgaaaaaacccttgaactcacacagtataaaacaaagtgcgaaaaccagtccggcttcatacttcagctcaaacagctcctcgcttgtggtaacactaaatttgaagctctaaccgtcgtcattcagcatcttctatccgagagagaggaagctctgaaacaacacaagaccctttctcaggagttggttaatctgaggggggaactagtgacagcaagcaccacttgcgaaaagctcgaaaaggccaggaatgagttgcaaaccgtgtatgaggcattcgtgcagcagcatcaagctgagaagaccgagcgcgagaaccggcttaaggaattctatactcgggaatatgagaaattaagagatacatacatagaggaggcagagaagtacaaaatgcagctccaggagcagtttgacaacctcaacgcagcccatgagacttccaaactggaaattgaagcatctcattctgaaaaactcgaactcctgaagaaagcctacgaggcatcgttgagcgaaattaaaaaaggacacgaaatcgagaaaaagtctcttgaggacctgctctcagaaaagcaggaatcgctagagaagcagattaatgatctgaaatctgagaatgacgcgctcaatgagaaactcaagtccgaagaacagaagaggcgggctagggagaaagccaacctgaagaacccgcagatcatgtatctcgagcaggagctggagtccctcaaggcagtcctggagataaaaaacgaaaaattacaccagcaagacatcaagttgatgaagatggaaaagcttgttgacaataatacagcgttggtcgataagctaaaacgttttcagcaggagaatgaagaacttaaagcccgaatggacaaacacatggcaatcagtaggcagctatctacagaacaggcagtgctgcaggaatctctggagaaagaaagtaaggttaataagagactgtctatggaaaacgaagaactgttgtggaaactgcacaacggggatttgtgttcgccaaagcgcagccccacctctagcgctatcccactgcagtcccccagaaactccggttcctttccttccccaagtatctctccgcgatag

SEQ ID NO: 29442 - DNA, 1029 bp, synthetic construct
  misc_feature 1..1029: note = Description of Artificial Sequence: Synthetic coding sequence
  source 1..1029: mol_type = other DNA
atgggatgtcctagctctaagctctgcctctatagcccttgtgctgccacgcgccgagaggaggcgctgaagcaacacaagaccctgagccaggagctcgttaatctccggggtgaattagtgaccgcctctacgacatgtgagaaactcgagaaagccagaaatgaactgcagaccgtctacgaggcatttgtgcaacagcaccaggccgagaagaccgagcgcgagaacaggctgaaagagttttatacaagggagtatgagaaactccgagatacgtatatagaagaggctgagaaatacaaaatgcagctacaggagcagttcgacaatcttaacgccgcacacgaaacgagtaaattagagattgaagcttcacacagcgagaaactggagctgctgaaaaaagcttatgaggcatccctctccgagatcaaaaaaggacacgaaattgagaagaagagcttagaagaccttcttagtgagaaacaagagagcttggaaaagcagataaacgacctgaaaagcgaaaacgatgccctgaacgaaaagctgaagtcagaggagcagaaaagacgggcacgggagaaagcgaatctgaagaatccccagattatgtacctggaacaggagcttgagtccctaaaagcagtcctcgaaattaaaaacgaaaaactgcaccagcaggatataaaattgatgaaaatggagaagctcgtcgataataacacagcgttggtggacaaacttaaaagattccagcaggagaatgaggagttgaaggctcgaatggacaagcacatggctattagtcggcagctgtccaccgagcaagccgtcttgcaagagagtctggagaaggaatcaaaagtcaacaagcgtctctctatggaaaacgaggaattgttatggaagctgcataatggggacctgtgctctcccaaaaggtcccccaccagctccgcaattcctctccagagtcccagaaactcggggtctttcccatcaccaagcatctccccccgatag

SEQ ID NO: 29443 - DNA, 3651 bp, synthetic construct
  misc_feature 1..3651: note = Description of Artificial Sequence: Synthetic coding sequence
  source 1..3651: mol_type = other DNA
atgaccgatgacaattccgatgacaagattgaagatgaactccagacgttcttcactagcgataaggacgggaatactcatgcctataatcctaaatcgccccctacccaaaactcaagtgcttcttctgttaattggaactccgctaacccagatgatatggtcgtggattatgagacagacccagcagtcgtcaccggagagaatatctccctttcactgcagggcgttgaagttttcggacatgaaaaatcaagttcagacttcattagtaaacaggtcctagacatgcacaaagactctatctgtcagtgcccagcattagtaggtactgaaaagcctaaatacctgcaacacagttgtcacagccttgaggccgtggaaggccagagcgttgaacctagcctgcctttcgtgtggaagccaaatgataatttgaattgtgctgggtactgcgacgctttggaacttaaccagaccttcgacatgacagtcgacaaagtcaattgcacttttattagccaccatgccataggcaaatcccagtcctttcacacagctggcagcctcccacccaccgggagaaggtcaggctcaacctccagtctaagctatagtacatggacctcaagtcacagcgataagactcacgcaagagagaccacttacgatagagagtcgtttgagaaccctcaggtgactcccagcgaagcccaagatatgacctatactgcattcagcgacgtcgttatgcagagtgaggtttttgttagtgacataggcaatcaatgcgcctgctcttccggaaaggtgacatccgagtataccgatggcagccagcaacggctagttggtgaaaaggagacacaagccctgacccctgtgtcagacggaatggaggtccctaacgattccgccctgcaagagttcttctgtctcagtcacgacgaatcaaatagcgaacctcacagccagagcagctaccggcataaggagatggggcagaaccttagagagactgtatcttactgtctgatcgacgacgagtgccctctgatggtgcccgcttttgacaaatctgaggctcaggtgcttaacccggagcataaggttaccgagacggaggacacccaaatggtttctaaaggcaaagatcttggaacccaaaaccatacctctgagctgattctgtctagtccgccaggccagaaggtcggatcatctttcggcctgacctgggatgcaaatgatatggtgatttccaccgacaagacgatgtgtatgtctacacctgttctggaacccaccaaagtgacattctcggtctcaccaattgaggctactgagaagtgtaagaaggtagaaaaaggtaatcggggactgaaaaacatccctgatagtaaggaagctcccgtcaacttgtgtaagccgagtttggggaaaagcaccatcaaaacaaatacaccaattgggtgcaaggtccggaagaccgagatcattagctatccacgtcctaatttcaagaacgtgaaagctaaggtcatgtcccgcgcagtgctgcagccaaaggacgcggcattgagtaaagtgactccccgtccacagcaaacttcagcatcttcacctagttctgtaaactccagacagcagaccgttttgtcccgtaccccacgaagtgacctgaacgcagacaagaaggctgagattctcatcaataagacccacaagcagcaattcaacaagctgatcacgtcacaggccgtgcatgtaaccacccactctaagaacgcatctcaccgggtgccccgaacaaccagcgctgtgaagtcaaatcaggaagacgtcgacaaggcatcgtcgtctaactcggcctgtgagaccggctccgtgtcggccctgttccagaaaatcaaaggtatactccccgtgaaaatggagtccgcggagtgtctggaaatgacatatgtgcctaatatcgatcgcatttccccggagaagaaaggggagaaagaaaatgggaccagcatggagaagcaggagttaaaacaggaaattatgaatgagaccttcgagtatggatcactctttctcggatctgccagcaagaccactacaacaagcgggaggaacatcagtaagcctgattcctgtgggttgcggcagatagcagcccctaaggcgaaggtcggaccgccagtgtcctgtttacgcaggaattcagacaaccggaacccttctgctgacagagctgtgagtcctcagcgtatccggagagtgtcctcatctgctggaaacgctgccgttataaaatatgaggagaagccgcctaaaccagcctttcagaatggaagcagtggaagtttctacctgaagcctctcgtgtcccgagctcacgtgcacttaatgaaaacaccgccaaaaggcccttctaggaagaacctgttcaccgcacttaacgctgtggagaagagcaggcagaagaacccccgatctctttgtatacaacctcagacagctcctgatgcactgcccccagagaagaccttggaactcacacagtataagacaaagtgcgagaaccagagtggcttcatcctgcaactgaaacagctgctggcatgcggtaacactaagttcgaagctttgaccgtcgtgatccagcacctgttgagcgaaagggaagaagcattgaaacagcacaagacactgtctcaggaactggtgaacctcaggggcgagctggttaccgcttccactacctgcgagaaactggaaaaggcacgcaatgagctccagactgtatatgaggcctttgttcaacagcaccaagcagagaaaacagagcgtgagaatcgcctgaaggaattttatacaagagagtatgaaaaactcagagatacgtatatcgaagaagcagagaagtacaaaatgcaacttcaggaacagtttgataatctcaacgctgcccatgagacatccaaactggagatcgaggccagccactccgagaagctggagcttttgaaaaaggcctacgaagcgtcactttctgagataaaaaagggccatgagatcgagaaaaagagtttggaagacctgctgagtgagaagcaggagtctttggagaagcagatcaatgacctcaagtccgaaaatgacgctctgaacgagaagcttaagagtgaggagcagaagcggcgagctcgcgagaaagctaacctgaagaacccccagatcatgtatctagagcaggagctggagagtctgaaagccgttttggagataaaaaacgagaagctgcaccagcaagatattaagctcatgaagatggagaagcttgtcgataataatactgcacttgttgacaaacttaagcggttccagcaggaaaacgaagagctcaaggccagaatggataagcacatggcaatcagccgccagctgtctaccgaacaagctgtactccaggaatcattagagaaggaatctaaggtcaacaaacgactctctatggaaaacgaggagttgttgtggaaactgcacaacggggatctgtgtagccctaaacgctcaccaacctcctccgcgatccctctgcagagtcctagaaactccgggagcttcccaagcccttccattagtccacgatag

SEQ ID NO: 29444 - DNA, 1248 bp, synthetic construct
  misc_feature 1..1248: note = Description of Artificial Sequence: Synthetic coding sequence
  source 1..1248: mol_type = other DNA
atgaagacccccccaaaagggccttcccggaaaaatctgttcactgccttgaacgccgtggaaaaatccaggcaaaaaaaccctagatcactatgtatccagcctcaaactgctcccgatgcgcttcctcccgagaaaactctagagctcacccaatataaaaccaagtgcgagaatcagtctggctttatcctgcagctcaaacagctgctcgcatgtggtaacactaaattcgaagccctcaccgtagttatacagcatctgctgtcagagagggaggaggcactcaaacagcataagacgttaagccaagaactggtcaaccttcgcggagaactagtgactgcctcaactacctgcgagaaactagagaaggcccgaaatgaactgcagacagtgtatgaggcctttgttcagcaacaccaggctgagaaaaccgaacgcgagaaccgcctgaaagagttctacaccagggagtacgagaaactgcgcgacacgtacatagaggaagcagagaaatataagatgcagctgcaggaacaatttgacaatttgaacgccgctcatgagacctccaagttggagatcgaggcctcgcatagtgagaagctggagctcttgaaaaaagcctatgaagcgtccctcagcgaaatcaaaaagggccacgagatcgaaaagaaatccctggaagatctcctgagcgagaaacaggagagtctggagaaacagattaacgacttgaagagtgagaatgatgcactgaatgaaaagctcaagtccgaagagcagaaacgtagggctagagaaaaagcgaatctgaagaacccccagataatgtacctcgaacaagaactggagtctctgaaggcggtactggagataaagaacgagaagcttcaccagcaagacataaagctcatgaaaatggagaagctggtggataataatactgctctggtggataagctcaagcgcttccaacaagagaatgaggagctgaaagcacgtatggacaagcacatggcaatttcccggcagctaagcactgagcaagctgtgctgcaggaatccctggagaaggaaagtaaggtaaataagcgtctatcgatggaaaacgaagagctgctctggaaactgcataatggggatctgtgtagtcctaagcgctcgcccacttcctccgcaattcccttacagagccccaggaattcgggatcattcccgtcgccaagtatttccccccgatag

SEQ ID NO: 29445 - DNA, 7406 bp, synthetic construct
  misc_feature 1..7406: note = Description of Artificial Sequence: Synthetic coding sequence
  source 1..7406: mol_type = other DNA
atggctacagtcgtcgttgaggccacggagcccgaaccttctgggtctatagccaatcctgccgcttcgacctctccttcactttcacaccgcttcctggattctaaattctacttgctcgtggtggttggcgaaatcgttactgaagagcatctcagacgagccattggtaatattgagctagggattcgatcctgggacaccaatctaatcgagtgtaacctggatcaagagctgaaactgttcgtttccaggcatagtgctcgtttcagccctgaggtgcccggacaaaagattctccaccataggagcgacgttttagagaccgtagtcctaataaatccgtctgatgaagctgtttccaccgaagtccgcctcatgattacagacgctgcccgtcataagctgttggtattgacaggccagtgttttgagaacaccggtgagctcattcttcagtctggatcttttagtttccaaaattttatcgaaatcttcactgatcaggagatcggagaattgctctctaccacacacccggcaaacaaggcatcactaacactgttttgccctgaagagggagattggaaaaattccaatctagacagacacaatttgcaggattttatcaatatcaagctcaactcggccagtattctccctgaaatggagggattgtcagagttcactgaatacctgagcgaatccgtagaagtgccatctccgtttgacatcctcgaacctccaacatccggcggtttcctcaaacttagcaagccttgttgttacattttccccggaggtcgtggagattctgctctgttcgctgtcaacgggttcaatatgctgattaacggcggttcagagaggaagagctgtttttggaaactaatccggcacctggatcgagtcgactccatcctgctcacacacatcggagacgacaatctgcccggaataaattccatgctgcagagaaaaattgctgagttggaagaggaacagtctcagggttctactacaaattcagactggatgaagaatctcatctcccctgaccttggcgtggtattcctgaatgttcccgagaaccttaagaaccccgaacctaatatcaaaatgaaacggagtatagaagaagcttgcttcactctgcaatatttgaataagttaagcatgaagccagagcctttatttcggagcgttggaaatacaattgatccagtgatcctgttccagaagatgggagttgggaagctggaaatgtacgttctgaatccagtgaaaagcagcaaagagatgcaatatttcatgcaacagtggactggaacgaataaagacaaggcagagtttatcctgccaaatggtcaggaggtagatttacccatatcatacctcacgagtgtgtccagcctaattgtgtggcaccccgctaaccccgctgagaaaattatccgcgtcctttttcccggtaactctacacagtacaacatcttggagggccttgaaaaactgaagcacctggacttcttgaaacagcccttagccacccagaaagacctgacaggccaggtcccaacccccgtggtgaagcaaactaagctgaagcagagggccgattctagggagtcactgaaaccagccgcaaaaccactgccctccaagtcagtccgaaaggaatccaaggaagaaactcccgaggtgacaaaggtcaaccatgtggagaagccgccaaaggttgaatctaaggaaaaagtgatggtaaaaaaagataagcctattaaaacagaaaccaaaccctccgttaccgaaaaagaagtgccatctaaggaagagccatctcccgtgaaggctgaagtggcagagaaacaggctaccgacgtgaaacccaaagccgctaaagagaagaccgttaagaaggaaacaaaggtaaaaccggaggacaagaaggaggagaaggagaagccaaagaaagaagtcgccaagaaggaggacaaaacaccgattaagaaagaggagaaacctaagaaggaggaagtgaaaaaggaagttaaaaaggaaattaagaaagaggagaagaaagagccaaagaaagaagtcaagaaagaaaccccaccgaaggaggtcaagaaggaagtgaagaaggaggagaaaaaggaagtgaaaaaagaggaaaaggagccaaaaaaagagatcaagaaacttcctaaagacgcaaagaaaagctccactcccctgagcgaggcaaagaagccggcagccttgaaacccaaggttccgaaaaaggaggaatctgtaaagaaggacagtgtggcagccggtaagccgaaagagaagggaaagatcaaggtgattaaaaaggaagggaaagccgcagaagctgtagccgctgcagtgggcaccggggcaacaaccgctgctgtcatggcggctgcaggtatcgccgcaatcgggcctgccaaagaactagaagctgaacgctcactgatgagctcgcccgaagatcttaccaaggactttgaggaattgaaagcagaggaggtcgacgtgaccaaagatataaaaccacagctagagctcatcgaggacgaggagaaactcaaagaaacagagccagtcgaggcttatgtgatacagaaggaacgcgaagtcactaagggaccggcagaaagcccagatgagggcattactacgactgaaggcgagggtgagtgcgagcagacaccagaagaattagagcccgtggagaaacaaggtgtcgatgacatcgagaaatttgaggatgagggggcaggcttcgaggagtcatccgaaacaggcgattatgaggaaaaagcagaaacagaagaggctgaggagccagaggaagatggagaagagcacgtctgcgtgtcagcttcgaagcatagtcctactgaggatgaggaatccgcaaaggccgaggccgatgcctacattcgcgagaagcgggagtccgttgccagtggagacgaccgggctgaggaggacatggatgaggccattgagaaaggcgaggcagagcaaagcgaggaggaggcagacgaagaggacaaggcggaggatgccagggaggaagaatacgagccagagaagatggaagccgaggattacgtgatggccgttgtagacaaagcggcagaagcgggtggagctgaagaacagtatggcttccttactacgcccaccaagcagctgggggctcagagtcccggacgcgagccggcaagctcgatccatgacgagaccctccctggaggaagtgaaagcgaggctaccgccagtgacgaagagaatagggaagaccagcctgaggaattcactgctacatccgggtacacgcagagcactatcgaaatttcctcagagcctacccctatggatgaaatgtccaccccaagagatgtgatgtcggacgaaactaacaatgaagaaacggagtccccctctcaggaattcgtgaatattacgaagtacgagtccagcctgtattctcaggaatacagcaaacctgctgatgtgactccgttgaacggcttcagcgaggggagtaaaaccgacgccacagatggtaaggactacaatgcttcagcctcaaccattagccccccttctagtatggaagaagacaagttctccagaagcgcgctgagagatgcatactgctcggaggtcaaggcctcaaccacactagatataaaagacagtattagcgctgtttcatctgagaaggtcagcccttcaaaatcgccatccctgagcccctccccaccttcccctttggagaaaacaccactcggtgagaggtccgttaacttctcactcacacccaatgagattaaagtgtctgccgaagccgaggtggcccctgtgtcacctgaggtgactcaggaggtggtcgaggagcactgcgcctcgcctgaggataagacactggaggttgtgtcacccagccagtctgtcaccgggagcgcaggtcatacaccatattatcagtctccgaccgacgagaagtctagccacctgcctaccgaagtcatcgagaagcctcccgctgtgccggtgagtttcgagttctctgacgcaaaggatgagaacgagcgggcttccgtcagtccaatggacgagcctgtccctgactccgaatcccccatcgaaaaagttctgtccccattgagatctccacctctcattggcagcgagtccgcctatgagtcttttctgagcgccgacgataaggcctctgggcgtggcgctgaatcaccttttgaagagaagagcggcaaacaaggatctcctgaccaggtaagtcccgttagcgagatgacctctacaagcttataccaagataagcaggaagggaagagtaccgacttcgccccaatcaaggaggacttcggacaggagaagaaaacggatgatgtggaagccatgtcttctcagcctgcactggccctcgacgagagaaagcttggggatgtctcccccacacagattgatgtgagtcagtttggctcattcaaggaagataccaagatgtccatcagcgaaggcaccgtgtcagataagtccgccaccccagtggacgagggtgtagctgaggacacctattcacatatggaaggagtcgcttctgtaagcacggcctccgttgcaacctcctccttccccgagcctaccacggatgatgtgtccccgtctttacatgccgaggtgggctctccccacagcacagaagtcgacgactcactctccgtcagtgtggtgcagactccaactacctttcaggagaccgagatgtcgccaagcaaagaggaatgtcccaggccgatgtcgatttcacctcctgacttctctccaaagaccgccaaaagccggacgccagtgcaggatcaccgtagcgaacaaagcagcatgtctatcgagttcggccaggagtctccggaacagtcgctcgcaatggatttcagtcggcaatcacccgatcaccctacagttggcgcaggagttctacatatcactgaaaacgggccaacagaggtggactactctccttccgacatgcaggattcctcactgagtcacaagattccaccaatggaggaaccttcatatacacaggataacgatctgtccgagctcatctccgtatcccaagttgaggcaagtcccagcacctcatcagctcacacgcctagtcagatagcaagtcctctgcaggaggacactctgagcgacgtcgcccctccgagagacatgagcctgtacgcctcacttacctcggaaaaagttcagtcattggagggagagaagctgagtcccaagagtgacatttcccccctcacacccagagaaagctctccactctactccccaacctttagtgactccaccagcgccgttaaggagaagaccgccacatgccatagctcttccagtcctcccatcgatgccgcttccgctgaaccttatggtttccgagcctccgtactgtttgacaccatgcaacaccacctggccctaaacagggatctgtcaactccgggtttggagaaggattctggagggaagactcctggagacttctcctatgcttatcaaaagcccgaggagactactaggagtcctgatgaggaggactacgactatgagtcgtatgagaaaaccacacggacaagcgatgtcgggggatactactatgagaagatcgagagaactactaaaagcccttcagatagtgggtattcgtacgaaacaattgggaaaacgactaagacacccgaggacggggactactcctatgaaataattgagaaaactactcggactcccgaagaagggggatattcctatgacatctctgagaagacaacaagccctccagaggtttctggctactcatacgagaagaccgagcgtagtagacggctcctcgacgatatctccaacggctacgatgattcagaggacggcggtcataccctgggggaccctagctacagctatgagaccactgaaaagatcacctctttcccagaaagcgaggggtactcatacgaaacctccacaaaaaccacccggactccagacaccagtacctactgctatgagactgccgagaagataactcgtacgccccaagcaagcacctactcgtatgaaactagcgatctgtgctacacagccgaaaagaagtcgccatcagaggcgagacaggacgtggatctgtgcctggtatctagctgcgaatacaaacacccaaaaaccgaactttctcccagttttatcaatcccaatccattagagtggtttgcctccgaggaacccaccgaagagtctgagaagcctttgactcagtctggaggagctcctcctcctccgggaggaaagcaacagggacggcagtgtgatgagacacccccaacgtctgtctcagagagcgctcctagccagacagatagcgatgtgcctcctgagaccgaggagtgcccctctattacagccgatgcgaatattgattcagaggatgaaagcgaaactataccaaccgacaagacagtcacttacaagcatatggacccccctccggcacccgttcaggatcgatcgccctctcctcggcatccggatgtttcaatggtggatccggaggccctggctatcgagcagaatctggggaaagcgctcaaaaaggatttgaaagagaagaccaaaacaaagaagccaggcaccaagacgaagtctagctccccagtgaaaaagtcagacgggaaatctaagccattggcggcttctccgaagcctgccggattgaaggagtctagcgataaggtctctcgcgtagccagcccaaagaagaaggaaagcgtggagaaggccgctaagcctacaaccactcctgaagttaaggccgctcgcggtgaggaaaaggataaagagaccaaaaatgcagcgaatgcatctgcatctaagagcgccaagactgcgacagcgggaccaggtactaccaagaccacaaagagctcagccgtccccccaggacttccagtgtaccttgatttgtgctacatccctaaccactcaaattccaagaacgtcgatgttgagttttttaagcgcgtgaggtcctcatactacgttgtctctggaaacgaccccgcagcggaggagcctagtcgggctgttctggacgccctgctggagggaaaggctcagtggggttccaacatgcaggtgacactgatacccacccatgatagtgaggttatgcgtgaatggtatcaggaaacccatgagaaacaacaggatcttaacatcatggtgttagcctcaagttccaccgtcgtcatgcaggatgagtctttccctgcgtgtaaaatagagctgta

SEQ ID NO: 29446 - DNA, 432 bp, synthetic construct
  misc_feature 1..432: note = Description of Artificial Sequence: Synthetic coding sequence
  source 1..432: mol_type = other DNA
atgcaacacagagggttcttactgttgaccctgctggctctattggctcttacgagtgcagtcgcgaagaaaaaggataaagttaagaaggggggtccaggctccgaatgtgccgagtgggcctggggcccttgcacaccttcctcgaaagattgtggcgtgggttttcgagagggaacatgtggcgctcagacacagaggatccgctgtcgggtgccgtgcaactggaagaaggagttcggtgcagattgtaagtacaagtttgagaactggggcgcttgcgacggcggaacaggaaccaaggtgcgccagggaacgctgaaaaaggctagatataacgcccagtgtcaggaaacaatacgggtcacaaaaccctgtaccccgaagacaaaagccaaagctaaagccaagaaaggtaaggggaaggattag

SEQ ID NO: 29447 - DNA, 432 bp, synthetic construct
  misc_feature 1..432: note = Description of Artificial Sequence: Synthetic coding sequence
  source 1..432: mol_type = other DNA
atgcaacaccggggatttctgctcctaaccctgctggctctgctggccctcacctcggccgtagccaagaaaaaggacaaggtgaaaaagggtggccctggctctgagtgcgcagaatgggcctgggggccttgcacgccctcgagcaaagattgcggggtcggatttcgagagggcacctgcggcgctcagacccagaggatccgatgccgcgtgccatgtaactggaaaaaagagttcggagccgattgcaaatacaaatttgagaactggggtgcgtgtgatgggggaaccggtactaaggttcgccagggcacactgaaaaaagctaggtacaacgcacagtgccaggaaacaatccgagttactaagccctgtactcccaaaacaaaggccaaggccaaggctaagaagggaaagggcaaagactag

SEQ ID NO: 29448 - DNA, 432 bp, synthetic construct
  misc_feature 1..432: note = Description of Artificial Sequence: Synthetic coding sequence
  source 1..432: mol_type = other DNA
atgcagcatcggggttttcttctgctgaccttactggctctgctcgcactgacctctgccgttgcaaaaaagaaagataaggttaagaagggcggaccagggtctgagtgcgccgagtgggcttggggaccatgtacgcccagcagcaaagattgcggggtcggattccgtgagggaacctgcggagcccaaacgcagaggataaggtgtcgtgtcccttgcaactggaaaaaagaattcggagccgattgcaagtataaattcgagaactggggtgcctgcgacggagggaccggaacaaaagtccggcaaggcactttaaaaaaggcacgatataatgcccaatgccaagaaacaatccgcgttaccaagccgtgtaccccgaagaccaaagctaaggctaaggccaaaaaaggcaaaggaaaggattag

SEQ ID NO: 29449 - DNA, 459 bp, synthetic construct
  misc_feature 1..459: note = Description of Artificial Sequence: Synthetic coding sequence
  source 1..459: mol_type = other DNA
atgcagcataggggattcctcctgctcacccttttagctctcctggcactcacttcagccgtggctaaaaagaaagaggagggagcactccagtgctcggttccaggtgatcatccccgacatcaggctttgcatccacaggaccagtctaagggacagagtcaagaacgggagggaaagggacttgatgcaaagccaggttgtcagggagcgcctggcgtaacttggggactggcacacgccctgccgctgccaggccctcgctgtgatccgccagtaccctcagtgtgttccctcgccttgatcaaccatgcactgccttgccccagccattctccagcacctccactctcagcacagtccggagaaggccagggcattctcggctccctcagtcttccccagagcaatgtcagcccccgagcgcgtttctgcagcagcccccaatttcactactag

SEQ ID NO: 29450 - DNA, 432 bp, synthetic construct
  misc_feature 1..432: note = Description of Artificial Sequence: Synthetic coding sequence
  source 1..432: mol_type = other DNA
atgcagcatagaggcttcttgttgcttaccttattagccctgctcgcccttactagtgcggtggccaaaaaaaaggataaggtcaagaagggcggtccagggagcgagtgtgccgagtgggcctgggggccatgcacaccaagtagtaaggactgcggcgtgggattcagagaagggacctgcggcgctcagacgcagcgaatccggtgtcgggtgccgtgtaattggaagaaggagttcggggctgattgtaagtacaaattcgagaactggggagcctgtgatgggggtactggaactaaggtcaggcaggggaccctaaaaaaggcacggtacaatgcccagtgccaggagaccatcagggtgaccaagccatgcaccccaaaaaccaaggctaaggccaaggctaagaagggtaaagggaaagactag

SEQ ID NO: 29451 - DNA, 432 bp, synthetic construct
  misc_feature 1..432: note = Description of Artificial Sequence: Synthetic coding sequence
  source 1..432: mol_type = other DNA
atgcagcacagggggtttcttctgctgacattgttggccctgctggccctaacctccgccgtggcaaagaaaaaggacaaggtcaaaaagggtggcccagggagtgagtgcgctgaatgggcatggggaccctgtacgcccagctcaaaggactgcggagtgggattccgggagggcacatgtggtgctcagactcagcgaatcaggtgtcgcgttccctgtaattggaagaaggagtttggcgctgattgtaagtataagtttgagaactggggcgcatgcgacggcggaaccgggaccaaggtgcggcaaggaacattgaagaaggcacgctataacgcccagtgccaggagaccattagggtgactaaaccctgcacccctaaaacgaaggctaaggcaaaagcaaagaagggtaagggaaaggattag

SEQ ID NO: 29452 - DNA, 432 bp, synthetic construct
  misc_feature 1..432: note = Description of Artificial Sequence: Synthetic coding sequence
  source 1..432: mol_type = other DNA
atgcagcaccggggattcctgctgctaacactgctggctctcttggcgctgactagcgctgttgctaagaagaaggacaaggtgaagaaaggtggccctggaagtgagtgtgccgagtgggcatggggcccatgcacacctagctccaaggattgtggggtcgggttcagggagggcacatgtggtgctcaaacccagagaattcggtgccgcgttccatgcaactggaagaaagagttcggcgcagactgtaagtacaagtttgagaactggggagcctgtgatggtggcacaggcaccaaggttagacagggcacgctgaaaaaagctagatataatgcccagtgccaggagaccatccgggtcactaagccatgcaccccaaagactaaagctaaagccaaggcaaaaaaggggaaaggcaaggattag

SEQ ID NO: 29453 - DNA, 150 bp, synthetic construct
  misc_feature 1..150: note = Description of Artificial Sequence: Synthetic coding sequence
  source 1..150: mol_type = other DNA
atgcagcatcgcggtttcctgctgctcacacttctggcgctattggccctgacttctgctgtagctaaaaagaaggataaggttaagaaggggggacctggtagtgaatgcgccgagtgggcatgggggccatgtaccccctcctcgtag

SEQ ID NO: 29454 - DNA, 396 bp, synthetic construct
  misc_feature 1..396: note = Description of Artificial Sequence: Synthetic coding sequence
  source 1..396: mol_type = other DNA
atgcagcatcgcggtttcctgctgttgactctgttggccctgctcgccctgacatctgctgtcgctaaaaagaaagacaaagtgaaaaagggaggtcccggatcagagtgtgcagaatgggcttggggcccatgcactcctagctccaaggactgcggagtgggcttccgtgaggggacatgcggcgcacagacccagaggatccgctgtcgggtcccgtgtaattggaagaaggaattcggagctgactgtaaatacaagttcgaaaactggggagcatgcgatggcggaaccggaactaaggtgaggcaaggcacattgaagaaggcacgctataacgcacagtgccaggagacaatccgggtgacaaagccttgcacgcctaagaccaagtag

SEQ ID NO: 29455 - DNA, 264 bp, synthetic construct
  misc_feature 1..264: note = Description of Artificial Sequence: Synthetic coding sequence
  source 1..264: mol_type = other DNA
atgcaacatcgcggattcctcttgctcactctgctcgctttacttgccctgacctcagccgtggctaaaaaaaaggccgactgtaaatacaagttcgaaaactggggtgcctgcgatggcggtacaggaacaaaagttcgtcagggcaccctgaagaaagctaggtataatgcgcagtgtcaagaaacgataagagttacgaaaccatgtacacccaaaacgaaagcaaaggccaaggcaaagaagggcaaaggaaaggactag

SEQ ID NO: 29456 - DNA, 2715 bp, synthetic construct
  misc_feature 1..2715: note = Description of Artificial Sequence: Synthetic coding sequence
  source 1..2715: mol_type = other DNA
atggccgagtcatctgagtcctttaccatggcatcttcccccgctcagaggcgcagaggcaatgaccccctgaccagctctccagggagatctagcagacggaccgatgctctcacaagctcaccaggccgagacctgccacctttcgaagacgagagtgagggtttgctaggcacggagggacccctggaagaggaagaagacggggaggaacttattggagatggtatggagcgcgattaccgagctattccggagctggacgcatacgaggctgagggactggcactggacgacgaggacgtggaggagctgacagcctctcagcgggaggcagccgaaagagctatgagacagcgggatcgagaagccggaaggggcttgggacgtatgcggagaggtctgctttatgacagcgatgaagaggatgaggaacggccagctcgaaagcgcaggcaggtagaacgggcaacagaggatggcgaggaagacgaggaaatgattgaatctatagagaatctggaggatctgaaggggcattccgtgagggagtgggtgtcaatggctggccctcgcctagaaattcaccatcgtttcaagaactttctgcggacacacgtggactcacatggccataacgtgtttaaggagcgtatatccgatatgtgcaaagaaaacagggagagcctcgtggtcaattacgaggatttggcggcacgggaacatgtcctggcatactttctccctgaagcgcctgcagagttactccagattttcgatgaggctgccttggaagtggtccttgctatgtacccgaaatatgatagaatcacaaatcatatacatgtgagaatttctcacctgcctctcgtagaggagctgagatctctgcgccagcttcacctgaaccagctcatcaggacgtcaggagttgtaacatcctgcacaggagtgcttccccaactgtcaatggtcaaatacaactgcaataagtgcaacttcgttctaggtccattttgtcagagtcagaatcaggaggtcaaaccgggatcttgtccagagtgccagtccgcaggccctttcgaggtgaatatggaggaaaccatataccagaactaccagcgcatcaggatccaagagtcccctgggaaggtggctgccggaagacttccccgatccaaggacgccatcttactcgccgaccttgtggattcttgtaaaccaggcgacgagatcgaactgaccgggatctatcataacaattatgatggtagcctgaatacggcgaacggttttcccgtctttgcaaccgtcatactcgccaatcatgtcgcaaagaaggataataaggtcgcggtcggcgagttgaccgacgaggacgtcaaaatgataacgtctctgtctaaagatcaacagatcggcgagaaaattttcgcttcaatagcacccagcatctacgggcacgaagatattaaacgaggcctggcgctggccctgtttggtggagagccaaagaacccaggaggtaagcacaaggttaggggagacattaacgttctcctctgcggtgacccaggaacagctaagtcacagttcctaaagtatatcgaaaaagtgtcctcccgtgctatattcaccaccgggcaaggcgcttccgccgtgggcttaaccgcctatgtgcaaagacatcctgtgagccgcgaatggacattagaggcaggcgctctggtcctcgctgatcggggtgtgtgcctgatcgacgagtttgacaaaatgaatgaccaggaccgcacaagtatccacgaagcgatggagcagcaaagcatctcaatctcaaaggctggcatcgtcacaagcctgcaagccagatgcacagtcatcgcagccgctaaccccattgggggacgttatgatccgtccttgactttctcagaaaacgtggacttgacagaacctatcataagccggtttgacatactgtgtgtggtcagagacaccgtggacccagtacaggacgaaatgctggcaagattcgtggtgggatctcatgtgcgccatcatccctcaaataaagaggaagagggcctggcaaacggctccgccgctgaacccgcaatgccgaatacatacggcgtggaacctcttccccaggaggttctgaagaagtacattatatacgccaaagagagagtacatccgaagctcaaccaaatggaccaggacaaggtggccaagatgtacagcgatctccggaaagagtcaatggcaacaggctcaattccgatcactgtcaggcacattgaatcgatgatcagaatggctgaggcacacgccagaatacacttacgggactacgtaatagaagatgacgttaatatggcaatacgagtgatgctcgagtctttcatcgacacacagaagttttccgtcatgcgctccatgcgcaagacgtttgctcgatacctgagcttcagacgcgacaataacgaattacttctgtttatactgaagcagctggtagcagaacaggtgacgtaccagagaaatcgctttggcgctcaacaggacacgatcgaggtgcccgaaaaggatctggttgacaaggcacgacagatcaacatccataatctgtctgcattttacgattccgagctttttcggatgaacaaatttagtcatgacctgaagaggaagatgatcttgcagcagttttag

SEQ ID NO: 29457 - DNA, 2427 bp, synthetic construct
  misc_feature 1..2427: note = Description of Artificial Sequence: Synthetic coding sequence
  source 1..2427: mol_type = other DNA
atggcagagagctctgagagcttcacaatggcttcatcccccgctcagcgcaggcgcggaaacgacccgctcactagttcacctgggtggggtttagggcgaatgaggagaggcttactctacgattccgatgaggaggatgaggaacggcctgcacgtaagaggcgtcaggtggagagagccactgaggatggagaagaggatgaggagatgatcgagtccatcgaaaacctggaggacttgaagggccactcggtccgcgagtgggtttccatggctggcccacgcctggaaatacatcaccgtttcaagaattttctccgaactcacgtcgacagccacggccacaatgtcttcaaagagcgaatcagcgacatgtgtaaagagaatcgtgaatcactcgtggtgaattatgaggacttggcagcacgggagcatgtgctcgcctactttctgccagaagcacctgcggaactgctccaaatctttgacgaggccgctcttgaggtcgtgttggccatgtaccccaaatacgatcgtatcaccaaccatatccatgtgcgcattagccatctgccccttgtcgaggagttgaggtccctgcgccagctgcatttgaaccagcttatcaggaccagtggcgtggtcacaagctgcactggagtattacctcagctgtctatggtgaaatataactgtaacaagtgcaactttgttctgggaccattttgccaaagtcaaaaccaagaagtgaagccgggttcttgcccagaatgccaatctgccggtccattcgaggtcaatatggaggagaccatctatcaaaattaccagcggattcgtatccaagagagtcccggtaaggtggccgctgggaggctcccgagatccaaggacgccatactgctcgcagaccttgttgactcgtgcaaaccaggggacgagattgagttaaccggaatttaccataacaactacgacgggtctctcaataccgccaatggcttccctgtattcgctacagttatccttgcgaaccatgtggccaagaaagacaataaagtggctgtcggggaattaaccgatgaggatgttaaaatgatcacctccttaagcaaggaccaacagatcggagagaagatatttgcatctattgcaccctcgatctacggccacgaggatattaaaaggggactggccttggcactgttcgggggagaacccaagaatccaggcggaaagcacaaggtgcgcggtgacatcaacgtgcttttgtgcggagaccccggtacggccaaatcacagtttttaaagtatattgagaaggttagcagtcgcgcaatcttcactacaggccagggcgcatctgctgtaggattgacggcctatgtccagcggcatccagtgtctagagaatggacattggaagccggagctctcgtcctggctgaccgaggcgtatgccttatcgacgagtttgataagatgaacgatcaggaccgaacttctatacacgaggccatggagcagcagtctattagcatttcaaaagcaggcattgttacctccctgcaagccagatgtactgtgattgcagccgctaatcccatcggaggcaggtacgatccctctctgactttcagcgaaaatgtggatttaacggaacctattatttcccggtttgacattttatgcgtcgtgagagataccgtcgatccagtgcaggatgaaatgctggctcggtttgtggtggggtctcatgtccgacaccatccctccaataaggaggaagaaggattggcgaatggatctgcagctgaacccgcaatgccaaatacctatggagtcgagccactgccacaagaagtcttaaaaaagtacataatctacgccaaggaaagggttcatcctaagctgaaccagatggaccaggataaggtcgccaagatgtactcggacctgcgcaaagagtccatggccactggtagcatcccaatcactgtccggcacatcgagagcatgattaggatggccgaagcacacgcacgaatccacctgcgggactatgtcatcgaggacgacgtcaatatggctatacgtgttatgctggaatcatttattgacacccagaagttcagtgtcatgcgctccatgcgaaagaccttcgccagatacctgtcctttcgcagagataacaacgagctgttgctgttcatcttaaaacaattggtggccgaacaggttacctaccagagaaaccgcttcggggctcagcaggacactatcgaggtcccagaaaaggatttggttgataaggcacgacaaatcaatattcataatctttctgcattttacgatagtgaattgttccgcatgaataagttcagtcacgacctgaaacgcaaaatgatccttcaacagttctag

SEQ ID NO: 29458 - DNA, 2865 bp, synthetic construct
  misc_feature 1..2865: note = Description of Artificial Sequence: Synthetic coding sequence
  source 1..2865: mol_type = other DNA
atggccgagtcttccgagtcctttacaatggcctcaagcccagcgcaaagacggagggggaacgaccctctaaccagctcacccggaagatccagtagacggaccgatgcactaacttcctcccccggaagggacctgccaccatttgaagatgagagtgagggcctgctcggaactgaaggaccactggaagaggaggaggatggagaggaactgatcggggacgggatggaaagagactatcgcgcaatcccagagctcgatgcctacgaggcggagggcctggccctggatgatgaggacgttgaagaactgacagcaagtcagcgtgaagctgggaggggcctattatatgattctgacgaagaggacgaggagcgcccagccagaaaacggaggcaagtagagagagccaccgaggatggcgaagaggacgaggagatgattgagagcatagagaacctcgaagacctgaaggggcacagtgtgcgggagtgggtgtccatggcgggacctaggctggaaatccatcacaggtttaagaactttcttaggacccatgtggacagccacgggcataatgtgtttaaggaacggatatccgatatgtgtaaggaaaaccgggagagccttgtggtgaactatgaggacttggcagctcgcgaacacgtcttggcgtattttctgccagaggcacctgccgagctcctgcagatttttgacgaggccgcactcgaagtggtcctcgccatgtatccaaaatacgaccgcatcacgaaccacatccatgtacgaatctctcatctgcccttggtagaggagctgcggtccctgagacagctccacctgaatcagctgattcgcacaagtggagtggtgacttcttgcaccggggtcctccctcaattgtctatggtcaagtacaactgtaacaagtgtaactttgtgctaggcccattttgccagagtcagaatcaggaggtgaagccaggctcatgcccagaatgtcagtcagccggtccattcgaagtcaacatggaggagactatataccagaattatcagcggattcggatacaggagagcccgggaaaggtggcagcaggtcggttgccccgatcaaaggacgccattctgctggctgacctggtggatagttgcaagcctggggacgagattgaactcaccgggatataccataataattatgatggcagtctcaacaccgccaatggctttcccgtgttcgctactgttattttggccaatcacgtggcaaaaaaagacaataaagtggcggtaggagaactgaccgacgaagatgtcaaaatgattacctctcttagcaaagatcaacagataggggagaaggagtcatccagaaatgctagtttagccgaagccggtattggcgcaatcccaagccagctgcttgcgattgagccgagcctaaggaggtctggcgttcctattggtgaggtcggcgtgagtcagagacaggaagcacggtctttcagctccgctaatactcattggttccttgaggaccttctggggccaagctgccgcgatacaatgatctttgcctcaattgccccttcgatttacgggcacgaagatattaagagaggcctggcgcttgctctctttggaggcgagcctaaaaaccccggagggaaacacaaggttcggggtgacatcaacgtattattgtgtggtgaccccggaactgccaagtcccaatttctgaaatacatagaaaaggtgtcatcgcgggctatttttaccacgggacaaggcgcttctgcggtcgggttaacggcctacgtgcagagacaccccgtgagtcgggaatggacactggaagccggtgccctcgtacttgccgatagaggcgtatgcctcatcgacgagttcgataagatgaacgatcaggaccgcacttccattcacgaggctatggaacagcagtccatttctatctccaaggccggtatcgtcacatcattgcaggccagatgcacagtcatcgctgctgccaatcctataggtggtcggtacgatccctcactgaccttcagtgaaaacgtcgatctcaccgagccaattataagtagatttgatatcttatgtgtagtccgcgatacagtggaccctgtccaggatgaaatgctagccaggtttgtggtcggcagccatgtccggcaccacccttctaacaaagaagaagaagggctagctaatggctccgctgctgaaccggctatgccaaacacgtacggggtagagccgttaccacaggaagttcttaaaaaatatatcatttacgccaaggaaagggtgcacccaaaacttaatcaaatggaccaggacaaagtggccaagatgtactcggacctgaggaaagagtccatggccacaggctcaatccctattactgtacgccacatcgagagtatgatccgcatggccgaggcgcacgccaggatccatctgcgcgattacgtgatagaggatgacgtgaatatggcgattagggtcatgctggaatcgttcatcgacacccagaagttcagcgtgatgcggagcatgcgcaaaacgtttgctcgatatctgagcttccgaagagataataacgagctgctattgtttattctcaagcagctagttgcagagcaggtcacttaccagaggaacagattcggcgctcaacaggacacgatagaggtccctgagaaagacctggtggacaaggccagacagatcaatatccacaatctttctgccttttacgactcggaactctttagaatgaacaagtttagtcacgatctcaaacgaaagatgatcctgcagcagttctag

SEQ ID NO: 29459 - DNA, 753 bp, synthetic construct
  misc_feature 1..753: note = Description of Artificial Sequence: Synthetic coding sequence
  source 1..753: mol_type = other DNA
atggcactgcgcgcaggcctggttctggggttccacacacttatgacactcctctcacctcaagaggccggtgctactaaggctgatcatatgggctcgtacggcccagctttctaccaaagttacggcgcatcagggcagttcactcacgaattcgatgaggagcagctcttcagcgtagatctgaaaaaaagcgaggccgtgtggcgtctgcctgagttcggggacttcgcacgttttgatccacagggcggtcttgcgggaattgcagcaataaaagcacacctcgacatactggtagaaaggtctaacaggagccgcgcaatcaatgttcccccaagagtgactgtgctcccaaaatcacgcgttgagctcggacagcccaacattttgatctgcattgtcgataacattttcccacctgtgattaacattacatggctgcgcaatgggcaaacagtcactgaaggcgtcgcacagacatccttctacagtcagccagatcacctcttccgcaagttccattatctgccattcgttccctctgcagaggatgtatacgactgccaggtggaacactgggggctggatgcacctctactgagacattgggaactgcaggtgcccataccacctccggacgctatggagaccctggtgtgcgccctgggactggctattggtctagtcggttttttggttggaacagtcctgatcataatgggaacttatgtgtcatctgtgcccaggtag

SEQ ID NO: 29460 - DNA, 993 bp, synthetic construct
  misc_feature 1..993: note = Description of Artificial Sequence: Synthetic coding sequence
  source 1..993: mol_type = other DNA
atgcatcggtaccgagcacctggagagcaggacggagatgccatgcctctcgggagcgccgtcgacattctggccacagacgatccaaatttctcccaagaggatcagcaggatacgcaaatttacgaaaagcatgacaacctgctccacggcaccaagaagaaaaaagaaaagatggtcagtgccgcttttatgaagaagtacatacatgtcgccaagatcatcaagccggtattaacccaggagtcagcgacttatatagcagaagaatactcccgcttacggtcacaagatagcatgagctcagatactgctcgcacatccccagtgactgcgaggactctcgaaaccctcattagactggccacggctcacgccaaagcgaggatgtccaaaactgtggacttacaggatgctgaggaggctgtagagctggtgcagtatgcatatttcaaaaaagtcctggaaaaggaaaaaaaacgtaaaaaaagatcagaggacgagagcgaaacggaagacgaagaagaaaagtcccaggaagaccaggagcagaagcgcaagcggcgaaagacccgccagcctgacgcaaaggatggcgactcttacgatccgtacgatttttcagatactgaggaggaaatgccgcaggtgcacactccgaaaaccgccgactctcaggagacaaaagagagccaaaaggttgaattgtcagagtctagagacgggataagcccatgttgcccaggctggagctggacacccggtctgaaacagtctttttatctgtcactgccgaaggggtgggattatcgccataagcccctttgtttatttgatttgatcctgttcaacgactgcagggtctccatggttgaaggcattcagggcggacctctgggctgtgtccctggatcctcctgcgcggtaaatcgtcacgagagtccccatcggatccatcaaccaggccaaagaagagcattactgttttcatag

SEQ ID NO: 29461 - DNA, 2289 bp, synthetic construct
  misc_feature 1..2289: note = Description of Artificial Sequence: Synthetic coding sequence
  source 1..2289: mol_type = other DNA
atgtggtcgtgcggacggctcagggagatcacttggacctcatggactacacgcttgctcaacaatgcgtttgaggaactcgtcgcttttcagcgggctttgaaggatttcgtagcctcaattgatgctacatatgctaagcagtatgaagaattctacgtcggcctcgaagggtccttcggctccaagcacgtgtcaccgcgaactctcacttcttgtttcctgtcatgcgttgtgtgcgttgagggtattgttacgaagtgctcattggtgcgcccaaaggtggtaagatcagtccactactgcccagctactaagaagaccattgagcgtaggtactcagacctgaccacgcttgtagccttcccatcctcatccgtgtatcctactaaggacgaagagaacaaccccttggaaacagagtacgggctcagcgtttacaaggatcaccagacaattacaatccaggaaatgcccgaaaaggctccagctggacaactgcccaggagcgtggatgtaatcctggacgatgaccttgtggacaaggctaaaccaggcgaccgtgttcaggttgtgggaacttataggtgtctgccagggaagaagggaggctacacaagtggaacgttccgcaccgtcctgatcgcctgtaacgttaaacaaatgagtaaggatgcacagcccagcttctcggcagaggacattgcaaaaataaaaaagtttagcaaaacaaggtcaaaggacatctttgaccagctggcaaaatcgctcgccccatcaatacatgggcacgattatgtgaaaaaagccatcttgtgtctgttgttgggaggagtagagcgggacctggagaatggaagccatattcgaggggacatcaatatcttgctgattggggatccttccgtggccaaatcacaactcctccgatatgtgctgtgtaccgcacctcgggctatacccaccacgggaagagggtccagtggcgtaggactgactgcagctgtgaccaccgatcaggagacgggcgagcgacgcctcgaagcaggtgcgatggtgctcgcggatagaggagtagtctgcattgatgaatttgacaaaatgagcgatatggaccgcacagcaatccatgaggtgatggagcaggggcgagtgaccatcgccaaggccggtatccacgcacgcctgaacgctcgctgctcagttctggccgcagccaatcccgtctatggacgatatgaccagtataagacccccatggaaaacatcggtctgcaggacagcttgctatcgcgatttgacctcctgtttattatgctcgatcagatggacccagagcaggaccgggaaatttctgatcacgtgctgcggatgcaccgctaccgggcacctggcgaacaggacggtgacgccatgcctcttgggagtgctgtggacatcctcgcaactgacgaccccaacttctctcaggaggatcaacaggatactcagatttacgagaagcacgacaaccttcttcacgggaccaagaagaaaaaggagaagatggtgtcagcagcttttatgaagaagtatatccacgtggctaaaattattaaacccgtgctgactcaggaaagcgccacgtatattgctgaagaatattcgagactacgttctcaggactctatgagctccgacacagctcgcactagtcccgtaaccgcacgaacactggagacactgattcgccttgctaccgcgcatgcaaaggccaggatgagcaaaactgtcgatctccaggatgcagaagaggcagtggaactcgtgcagtacgcttactttaagaaggtgctggagaaggagaagaagaggaagaagagaagcgaggatgaatcagagaccgaagatgaggaggagaagagtcaagaggatcaggaacagaagcgcaagaggaggaaaactcgacagcctgacgctaaggacggcgactcatacgatccgtacgatttcagcgataccgaggaggagatgccccaggtgcacacacccaaaaccgctgactcgcaggagaccaaagagagccagaaggtggaattgtcagaaagtaggctgaaggcgttcaaagtggccctactggatgtgtttcgcgaagcccatgcgcaatccattgggatgaacagactcacagaatctataaaccgcgacagcgaagagccattctccagtgtggagattcaggccgcactctctaaaatgcaagacgataaccaggtgatggtgtctgaaggcatcatcttcctgatttag

SEQ ID NO: 29462 - DNA, 987 bp, synthetic construct
  misc_feature 1..987: note = Description of Artificial Sequence: Synthetic coding sequence
  source 1..987: mol_type = other DNA
agatatcgggctcctggggaacaggacggcgatgcaatgcctctgggttctgctgtggatatactggcaacagatgatccaaacttttctcaggaagaccagcaggatactcagatttacgaaaaacatgacaatttgctgcacgggacaaaaaagaaaaaggagaaaatggtttctgccgctttcatgaagaaatacattcacgtcgccaagattatcaagcccgtacttacccaggaaagcgctacatacatcgcagaggaatacagccgcctgcggtctcaagactccatgtcctccgacactgctagaacatctccagtgactgctcgcacgctggaaaccctgattcgactcgctacagcccatgccaaagccaggatgtccaagactgtcgacctgcaggatgccgaagaagccgtcgaactggtgcagtatgcgtattttaagaaagtgctggagaaggagaaaaaaaggaagaagagatcagaggacgaatcggagacagaagatgaagaggagaaatctcaagaagaccaagaacagaagcggaagcgacgcaagaccaggcagccagacgctaaagacggcgactcttatgacccctacgacttctccgacacggaagaagagatgcctcaggtgcacacacccaaaactgcagacagccaggagactaaagagtcgcaaaaggttgaactgtcggaatccagagatggaatctccccttgttgccccggttggagttggacacctgggttgaaacagtctttctatctgagcctgcctaaaggatgggattataggcacaaacccctgtgcctgttcgatctgattcttttcaacgattgtagggtgagcatggtggaaggtattcagggaggccctttaggttgcgtgcccggtagtagttgcgccgttaatcgacacgagagccctcaccgcatccatcagccagggcagcggagggctctattatttagttag

SEQ ID NO: 29463 - DNA, 2562 bp, synthetic construct
  misc_feature 1..2562: note = Description of Artificial Sequence: Synthetic coding sequence
  source 1..2562: mol_type = other DNA
atgctgcccagatcacctcctttgcctcgcggaaatctctggtggcgcgaagaatttgggtcattcagagcaggcgttgagtcaagctgggagcctcctagagacttcggtgggggatcttcactcgcagctggcatggcagggacagtggtacttgatgacgttgagctccgggaagcccaaagagactacctggacttcctggatgacgaggaggaccaagggatttatcagtccaaagtgcgggagctaataagcgacaatcagtaccgcctcatcgtgaacgtcaatgacctgcgacgtaaaaacgagaagcgggctaaccggctgctgaacaacgccttcgaagagctagtcgcctttcagcgggcactgaaggacttcgtggcctccatcgacgccacatacgccaagcagtacgaagagttttatgtcggactggaaggttctttcggatccaaacacgttagtccgcgtactctcacgtcatgtttcttgagctgcgtagtgtgcgtcgaaggcattgtcaccaagtgctccctcgtgaggcccaaagtcgtgcgctccgtacattattgtcccgctaccaagaaaaccatcgaacgtcgctatagcgatttgacaacactggttgcattcccctcgagctccgtttatcccaccaaggacgaggagaataatcctctcgagacggaatacgggttgagcgtttacaaagaccatcagacaataactattcaggagatgcctgaaaaagccccagccggacagttgccacgatccgtcgacgtaatattggatgacgacctggtcgataaggccaaacccggtgatcgcgtgcaggtggtaggtacataccgatgcctccccggtaagaagggaggatacacatctggtacattccgcactgtccttatcgcctgtaacgtgaagcagatgtctaaagatgcccagcccagcttctcagccgaggatatcgccaagatcaaaaagttcagtaaaacgaggagcaaagacattttcgaccaacttgcaaaatcactggcccctagcatccacgggcatgactacgtcaaaaaagctatcttgtgtttactgctgggcggagtcgaaagagacctggaaaacgggtcccacattcgcggagatatcaacattctgttgatcggcgacccttctgtggccaagagccaattgctgaggtatgtgctttgtacagctcctcgggcaatacccaccacagggaggggaagctctggcgtgggtcttacggccgctgtaacaaccgaccaggagactggtgaaaggcgcttggaggccggtgcaatggtgcttgcagaccggggtgttgtgtgtattgatgaatttgacaaaatgagtgacatggacaggaccgcgatacatgaagtaatggaacaaggcagagtgaccattgccaaagctggtatccatgcaaggcttaatgcgcgatgttcagttctcgcggctgccaacccagtgtatggacggtacgatcagtataagaccccgatggaaaacattgggctccaagactccctcctgtcacgattcgatctgctttttattatgctcgaccagatggatcccgaacaggacagagaaatctctgatcacgtacttcgaatgcatcggtaccgcgcacccggtgagcaggatggtgatgctatgccgcttggatccgccgtggatattctcgccacagatgatccgaatttctctcaggaggatcagcaggatactcagatctatgagaagcacgacaatttactccatgggacaaagaagaaaaaggagaagatggtgtctgctgcatttatgaagaaatatattcatgttgcaaaaattatcaagcctgtacttacacaggagagtgccacctacattgctgaggagtatagtaggttgcggtctcaagactcgatgtcctcggataccgcgagaacttcgccagtcaccgccaggacattagagacgcttatacgactggctactgctcacgcgaaggctagaatgagcaaaaccgtggacctccaggatgcagaggaggcagtcgaactggtgcaatatgcctactttaaaaaggtgcttgagaaagaaaaaaaaagaaaaaagagatccgaggacgagtcggagaccgaagacgaggaagagaagagccaggaggatcaggagcagaagaggaagaggagaaagacccggcaaccagacgctaaagatggagactcctacgacccttacgacttttccgacactgaagaggagatgccacaagtgcacaccccgaaaacagccgacagccaggagacgaaagaaagccagaaagttgagctctctgaaagcagactgaaggccttcaaagtggctctgttggatgtcttcagagaggcgcatgcgcaaagtatcggcatgaatcggctcacagaaagcattaacagagatagcgaagaacccttcagttctgtggaaatccaggcagctctgtccaagatgcaagatgataaccaggtaatggtgtccgaaggaattatttttctgatctag

SEQ ID NO: 29464 - DNA, 2592 bp, synthetic construct
  misc_feature 1..2592: note = Description of Artificial Sequence: Synthetic coding sequence
  source 1..2592: mol_type = other DNA
atgagtagccctgccagcacccccagcaggcgcggatcacgcagggggcgagccacacccgcacagaccccacgctccgaggacgcccgatcttccccatctcaacggagacggggagaggactctacttctaccggagagctgcagcctatgcccactagccctggcgtggatctgcagagccccgctgctcaagatgtcttgttctcttcccctccacagatgcattcctctgcaattcccttggattttgatgttagcagtccgctcacctacggcaccccctcctcaagggttgaaggtacccccaggagtggcgtcagagggacgccagtgcgccagaggccagacctaggtagtgcacagaagggcctgcaggtggatctccagagcgatggtgccgcagccgaagacatcgttgcaagcgagcagagcctggggcaaaaactcgtgatatggggaaccgatgtaaatgtggctgcgtgcaaggagaattttcagcgatttctgcaacgcttcattgatccactggccaaggaggaggagaacgttgggattgacattaccgagcctctgtatatgcagcggcttggggagataaacgtaatcggtgagcccttcttgaacgtcaattgcgaacacatcaagtcctttgacaagaacctctataggcagctaatatcatacccccaagaggtgataccaacctttgatatggctgtgaatgagatctttttcgacaggtatcccgacagcattctagaacaccagatacaggtgagaccatttaacgctttgaaaaccaagaacatgaggaaccttaacccagaagacatcgatcagctgatcactatttctggaatggtgatcagaaccagtcagctcatcccggagatgcaggaggccttttttcaatgtcaggtctgcgcacacaccaccagggtggaaatggatcggggtagaattgcagaacccagcgtgtgtggcagatgccacaccacacactccatggcactgatacataatcgatctctgttctccgacaagcagatgattaaactgcaagagtcccccgaagatatgcctgcaggtcagacccctcatactgtcatactttttgctcataatgatttggtagacaaggttcagccgggagatcgtgttaatgtgaccggtatttaccgggcagtgcccatccgcgtcaaccctagggtctccaacgtcaaatccgtttacaaaacccacattgacgtgatccattaccggaaaacggatgccaagcggcttcacggactggatgaggaggccgaacagaagttattctctgagaagagggtggagctgctcaaggaactctcccggaaaccggatatctatgagcggctagcatctgcgttggctccatccatctacgagcacgaagatattaagaaaggcattctgctccaattgttcggaggtactagaaaagacttcagtcacactgggcgagggaagtttcgggcagagatcaacatactcctttgcggcgatcccggtacgagcaaatcccaactgctgcagtacgtatacaatctggtgcccagaggtcaatacaccagcgggaaaggctcctccgctgtgggcctgaccgcctacgtcatgaaagaccctgagacgcgtcagcttgtgctccagacaggtgccctggtgttgtcagacaatggaatttgttgcatagatgagtttgacaaaatgaacgaatctacgcgctcagtattgcacgaagtgatggagcagcaaaccctcagcatcgccaaagctgggatcatttgccagctgaacgccagaactagcgtactcgccgcagccaatcccatcgaaagccagtggaatcctaaaaaaaccacaatagagaacatacagctgccacataccctcctgtcccgattcgacttaattttcctgctgctcgatcctcaagatgaagcttacgacagacggctggcccaccatttggttgccctgtactaccagtctgaagagcaagcagaggaagaacttctcgatatggccgtactaaaagactacatagcctacgctcatagtacaataatgcccaggctctcggaggaagcaagtcaggccctcatcgaggcctatgtcgatatgagaaaaatcggcagttccaggggaatggtcagtgcgtatccgagacagctggaaagccttatcaggctggccgaagcacacgctaaggttaggctctcaaacaaggtagaagcaatagatgtagaagaggcaaaacggctccaccgtgaagccctaaagcagagcgccacagaccctaggactgggatagtggatatctccattctgactaccggcatgagcgctacaagtagaaaacgcaaggaggaactcgctgaggcgctgaaaaagctcatcctgagtaagggcaaaaccccagcgttgaagtaccagcaactcttcgaggacatacgcggtcagtctgacatagcgataactaaggacatgtttgaggaagccttacgggctctcgcagacgatgacttcctgactgtcacgggcaaaacagtgagactcctgtag

SEQ ID NO: 29465 - DNA, 2472 bp, synthetic construct
  misc_feature 1..2472: note = Description of Artificial Sequence: Synthetic coding sequence
  source 1..2472: mol_type = other DNA
atgccaggacacttgcctttacgtgatgttgaggctaggatacctccacctaggggctcttgttctcgctgtcagcccaggttggaatggacatgtagggccctgctgcgtaggacgtgctgcttcccagcgctgcccaagtgcatattacaacttagcctgctcacgttgatgctagagggcacccccaggtctggcgtcaggggcaccccagtgagacagcgacccgacctagggtccgctcagaaggggttgcaggtggatttgcagagtgatggggcagccgcagaagatattgtggcatcagagcagagcctgggtcagaaacttgtgatctggggtaccgacgtcaacgtggctgcgtgtaaggaaaacttccaaagattcctacaacgctttatcgatccacttgctaaagaagaagaaaacgttgggattgatattactgaacccctgtatatgcagcggctcggggaaatcaacgtgatcggagagccctttctcaacgtaaattgcgaacacattaagtctttcgacaaaaacctgtacagacagctcatctcttaccctcaggaagtcattcctacattcgatatggcagtgaatgagattttttttgacagataccccgactccatcctggaacaccaaatccaggtacggccttttaatgctctgaagacaaaaaacatgagaaacttgaatccagaggacatcgatcagctgattacgatttcagggatggtaatacgaaccagccagctcattccggaaatgcaggaggctttctttcagtgtcaagtgtgcgcgcacacaacacgcgttgaaatggacagaggacgtatcgccgagcctagcgtgtgcgggagatgtcataccacccattccatggccctaattcataatcggagcctgttttcagacaaacagatgattaagttgcaggagagccccgaggacatgcctgcaggccaaacaccgcatacagtaattctttttgcccacaatgatctcgtcgataaagttcagcccggagacagagttaatgtaacaggcatctaccgtgccgtcccaattagggttaacccacgcgtcagcaacgtgaagtcagtgtacaagacgcatatcgacgtgatccattacagaaagacagatgccaaaaggcttcatggcctcgatgaagaggccgaacagaaattattcagtgaaaaacgcgtggagctcctgaaagagttgtccagaaaacccgatatctacgagcgactggcatccgccctcgcaccatccatctatgagcatgaagatattaagaagggcatcctgttgcagcttttcgggggtacgcgaaaagacttttcccatacaggaaggggcaaatttcgtgctgagataaatattctgctctgcggggatccaggaacaagcaagtcacaacttctgcagtatgtctataaccttgtacccaggggccaatacacttctggcaaaggctcttcagccgtgggcctgactgcatatgtcatgaaggatccagaaacccggcagctggtgctgcagactggcgctctggtgttatccgacaacggcatttgctgcattgacgagtttgacaagatgaatgagagcacccgtagtgttttgcatgaagtgatggagcagcagactctcagtatcgccaaagccggtataatatgccagctgaatgcgcgaaccagcgtactcgccgcagctaacccaatcgagtcccaatggaaccctaagaagaccactattgagaatatccagctgccacacacccttctgtcccgtttcgatcttatcttcctcctcttggatccccaggatgaggcctacgatagacggctcgcccaccatctggtggccctctattaccaatcggaagaacaggccgaggaggagctgctcgacatggctgtcctcaaagattacatagcttatgcccactccacaatcatgcctaggctttctgaggaggcttcacaggccctgattgaagcatacgttgacatgaggaagatcggttctagcagaggcatggtgagcgcctatccgagacagctcgagagcctcatcaggctcgcggaagctcatgccaaagtcagactgtcgaataaggtcgaggcaatcgatgttgaggaagccaagaggctacaccgcgaagcgcttaagcaaagcgcaactgaccctaggactggcatcgtcgacatatcaatcctgaccactgggatgagcgcaacatctcgaaaaaggaaagaggaacttgccgaagcattgaaaaagctcatcctctcgaaaggaaagactcccgcactcaagtatcagcagttgttcgaggacattagagggcagtcagacatcgccataaccaaagatatgttcgaggaggccctgcgggctctcgcagatgacgattttcttaccgtgaccgggaagaccgtgcggctgctgtag

SEQ ID NO: 29466 - DNA, 2592 bp, synthetic construct
  misc_feature 1..2592: note = Description of Artificial Sequence: Synthetic coding sequence
  source 1..2592: mol_type = other DNA
atgagttcaccagcttcaacgcctagtaggcgaggctcccgacggggaagagctacacctgctcaaacacctcggagtgaggacgccaggagctctccatcccagaggagaaggggagaagactccacttctaccggagaactgcagccaatgccaacaagtccgggagtggaccttcagagtccagccgctcaggacgtcttattttcttcaccgccacagatgcatagttctgcaattccattggactttgatgtgagttcacccctgacatatggcacgcccagttctcgcgtcgagggcacgccaagaagcggagttcgcggaacaccggtgaggcagagacccgatctcggttcagctcagaaaggactgcaggtcgacttgcagagcgatggcgcagctgctgaggatatcgtcgcgtctgaacaatcacttggtcagaaattagttatctggggcacagatgtgaacgtcgccgcttgtaaagaaaatttccaaaggttcctgcagaggttcatcgaccctctggctaaggaagaagagaacgtcggaattgacatcactgagcctttgtacatgcaacgccttggggagatcaacgttatcggggagccattcctgaatgttaattgtgagcacattaagtcttttgacaagaacctctatcgccagcttatatcttacccgcaggaggtcattcccaccttcgatatggccgtcaatgagattttcttcgacagatacccggattctattttggaacatcaaattcaggtgcggcctttcaatgcgctaaagacaaagaacatgcgcaatttgaatccggaagatatagaccagttaataacaattagcgggatggtgataagaaccagccagctgatacctgaaatgcaggaggccttctttcagtgccaagtgtgcgctcacaccacccgcgtggagatggacaggggcagaatcgccgaaccatctgtgtgcggcaggtgtcacaccacacacagtatggcccttatccacaacaggtcactcttctcagataagcaaatgataaaactccaggaatcacccgaggatatgccagcgggacagactccccatacggtaattctttttgcgcacaatgacctagtggacaaggtccaacctggcgatagagttaatgtgaccgggatatatcgagcagtcccgatccgggtaaatcctcgggtttctaacgtgaagagcgtgtataaaacacatatagacgtgatccattacaggaagacagatgcaaaaagactacatggactggatgaggaagcagaacaaaagttattcagtgaaaaaagagttgagctgctcaaggaactgtccaggaagcccgatatttacgagcgtctcgcgagtgccctggcccctagcatatacgaacatgaagatatcaagaagggcatcctacttcagttgttcggtggcacacgtaaggacttctcccacactggccgaggcaaatttagggcagagattaacatactgctctgcggggacccaggcacatccaagtctcagctgctgcaatacgtatataaccttgtaccccgaggccagtacactagtggcaaggggagcagcgcagttgggcttaccgcatatgtgatgaaggatcccgagacaaggcagctcgttcttcaaactggcgcactggtgttgtccgacaatggcatttgctgcattgatgaatttgacaagatgaatgagtcaactcgctcagtgcttcatgaggtcatggagcagcagaccctcagcatcgcaaaggcgggaatcatctgtcaacttaacgctcgtacatcagttctggcagcagcgaaccccattgagtcccagtggaatcctaaaaaaacaaccattgaaaatatccagctgccacacacactccttagtaggttcgacttaatcttcctactgctggatcctcaagacgaggcctatgaccgacgccttgcccaccatctcgtggccctgtattaccagtcggaggagcaagccgaagaggagctgctcgacatggccgtcttaaaagattacatagcatatgcccatagtactatcatgccacgcctctcggaagaggcgtcccaggcattgatcgaggcctatgtggatatgcggaagatcggctcttctcggggaatggtgagcgcttacccgaggcagctggagtctttgatccgcctggccgaagcacatgccaaggttcgtctgagtaataaggtagaagctatcgatgtcgaggaggccaaacgcctgcatagggaagccctgaaacagagtgcaaccgacccaagaacaggaatcgtggacatctcgattctcactaccggtatgtctgccacctcaagaaagaggaaagaggagttggctgaagcgttgaagaagctgatcttatctaagggcaagactccagctctgaagtaccagcagctgttcgaagacattcggggacagtccgacatcgccatcacaaaggatatgttcgaggaagctttgagggctctagcagacgacgactttctaacagtgacagggaagacggtgcgcttgttgtag

SEQ ID NO: 29467 - DNA, 855 bp, synthetic construct
  misc_feature 1..855: note = Description of Artificial Sequence: Synthetic coding sequence
  source 1..855: mol_type = other DNA
atggctcccagactctgctctatttcagtcaccgcaaggcgacttttaggaggacctggcccaagggcgggagatgtggccagcgctgccgctgctaggttctacagcaaggacaacgagggatcctggtttcggtccctgttcgtgcacaaggtagatccgcgtaaggacgctcacagcaccttgttatcaaagaaagagacttcaaatctctataagattcagttccataacgtgaaacctgagtacctggatgcctacaatagcctgactgaggccgtgcttcccaaactacatttggacgaggattatccttgtagtctggtggggaactggaatacttggtatggcgagcaggatcaagcggttcacctttggaggttctcagggggatatcccgcattaatggactgcatgaacaagctcaaaaataataaggagtaccttgagttccggagggagcgctcacagatgctgctgtcaagacggaaccagttgctactggagttttcattctggaatgagcctcagcctcgcatgggcccaaatatatatgaactacggacatataaattaaagcccggtacaatgatcgagtggggtaacaattgggccagagctattaaataccgacaggagaaccaggaggcagtgggtggcttcttcagccagatcggggagttgtacgtggtccaccacctgtgggcttataaggatctccagtctcgggaggagactcgtaatgctgcatggagaaaaaggggatgggatgaaaatgtgtattacaccgtccccctggtcaggcacatggaaagtagaatcatgattcccttaaagattagcccccttcaatag

SEQ ID NO: 29468 - DNA, 2076 bp, synthetic construct
  misc_feature 1..2076: note = Description of Artificial Sequence: Synthetic coding sequence
  source 1..2076: mol_type = other DNA
atgtccggctttgatgatcctggtatcttttattccgattcttttgggggagacgcacaagccgacgagggccaggcaagaaagtctcaactgcagcggcgatttaaagaatttttacgccagtatcgcgtgggaactgaccggacaggtttcacattcaaataccgggacgaactgaaaagacattacaatcttggcgaatattggatcgaagtcgagatggaagatcttgcttctttcgatgaggacctggcagactacctctataagcagccagccgaacatttacagcttagtgacatgatgtctcacctggtgaagattcctggcatcatcattgccgctagcgctgtgagggcgaaagcaacaaggatctccattcaatgccggtcttgtcgcaatacgctgaccaatatagctatgcgtcctggtcttgagggttatgcattgcccaggaaatgcaatactgatcaggccggtcgcccaaagtgccccctggacccctattttattatgccagacaagtgcaagtgcgtcgacttccagaccctgaaactacaggaacttcctgacgctgtgccacacggcgaaatgccgaggcatatgcagctttattgtgatcgttacttgtgcgataaagtggtgcccggaaacagagtcacgatcatgggaatctactctattaaaaagttcggcttgactacaagcaggggcagagatcgagtgggagttggcatccgaagcagctacatccgggtgttggggattcaggtggatacggatggctctggaagatcctttgcgggagcagtgtcgccgcaggaagaggaagagtttaggcggctggccgcactccctaacgtgtatgaggtgatttcaaaatcaatcgcacctagtattttcggcggtaccgacatgaaaaaggctattgcatgcttgctcttcggtgggagcagaaagcgactacccgacgggctgacacggagaggggacattaacctgctgatgcttggcgaccccggtactgctaaaagtcagctcctgaagtttgtagaaaagtgctcccccataggggtttatacaagcgggaagggcagttcggctgctgggctgactgcatccgttatgagagaccccagctccagaaacttcatcatggaaggaggtgctatggtcctcgctgatgggggagtggtctgcatcgatgagttcgataagatgcgtgaggacgatcgcgtagctattcacgaggcaatggaacagcagacgatctctattgccaaggctggaattacaacaactctgaattcaaggtgttcagttctcgcggctgccaactcagtgttcggacgatgggatgaaaccaaaggagaggataacatcgacttcatgcctaccatactgtctcgttttgacatgatctttatcgtgaaagatgaacacaatgaggaaagagatgtgatgttggctaagcatgtcatcacgctgcatgtgtccgccctgacacaaacccaggccgtcgagggcgaaattgatcttgcaaaattgaagaaattcatcgcgtactgtcgcgtgaaatgtggacccagactgtctgcagaagctgccgaaaagctcaagaaccggtatatcatcatgaggagcggtgctagacagcatgagagagattctgaccggaggtcttcaattcctatcaccgtgcgtcagctggaggctattgtgagaatcgccgaagcactatctaaaatgaaacttcagccctttgccaccgaagccgacgttgaggaagccttaagactcttccaagtcagtactctggatgccgctctttcagggaccctgtcgggagttgaaggctttacatcgcaagaagatcaggaaatgctatccagaattgaaaaacagttaaagcgacgttttgcaataggctctcaggtaagcgaacactcgatcatcaaggatttcactaagcagaagtaccccgaacatgctattcataaagtgttgcagctgatgctacggaggggcgaaatacagcatcgcatgcagaggaaagtgttatacagactgaaatag

SEQ ID NO: 29469 - DNA, 696 bp, synthetic construct
  misc_feature 1..696: note = Description of Artificial Sequence: Synthetic coding sequence
  source 1..696: mol_type = other DNA
atgagcgggttcgacgatccaggtatattttacagcgacagcttcgggggtgacgctcaggctgacgaggggcaggccagaaaatcacaactgcagcggagattcaaggagttcctgcggcagtatcgtgtgggcactgataggacaggttttaccttcaagtacagtcttgcccctagcctgattgaacacctgttaccagcccgttattgtagcggatgctgggctgccgctctgaaactcgatctggctccggcaagcagagacgagctcaagagacactacaatctgggtgagtattggatcgaggtggagatggaggatctggcatctttcgacgaggatttggccgactacctgtataagcagccagctgagcacttgcagttgttggaggaggctgccaaagaggtcgccgacgaagtgactaggccaaggccctctggcgaggaggtgttgcaggatatccaggtgatgcttaagagtgacgcttctccttcgagcatacgctccctgaagtccgacatgatgagtcaccttgtgaagattccagggatcatcatcgctgcgtctgccgttagggcaaaggccacccgaatttcgatccaatgcaggtcatgcagaaatacactgaccaatattgctatgaggccgggtctggaaggctatgccctcccacggaaatgtaatacctag

SEQ ID NO: 29470 - DNA, 1125 bp, synthetic construct
  misc_feature 1..1125: note = Description of Artificial Sequence: Synthetic coding sequence
  source 1..1125: mol_type = other DNA
atgaacagctctgggattactacatggggtagtaccggtttgcgttggaggtggaggactaggccccgtcctagcggagaagaggtgctccaagacatacaggtaatgctcaagagcgacgcctctccctcttcgatcaggtcccttaagagcgatatgatgagccacctggtgaagatcccgggtattattatcgcggctagcgctgtgcgggctaaagccaccagaatcagtattcagtgcaggtcatgtcggaatacactaaccaacattgcaatgcgccctggattggagggatacgctctacccaggaaatgcaacactgaccaggccggaagacccaagtgtcccctcgacccttatttcatcatgcccgataagtgtaagtgcgtggactttcagaccctgaagcttcaggagctgccagacgctgtcccccacggcgagatgccacgccacatgcagctatactgcgacaggtatctgtgcgacaaggttgtccctggtaatagagtgacgattatgggtatttactcgatcaaaaagtttggcctcactacaagccgaggaagggacagagttggagtgggaataagatcatcctatattcgcgtgctcggaattcaggtggatactgatggctccgggaggagctttgctggcgcagtgagccctcaagaagaagaagaattcaggaggttagcggctctgcccaatgtgtacgaagtcattagtaaatctatcgccccttccatctttggtggaacggacatgaaaaaggccatagcttgtctgctgttcggaggttcgagaaagaggctacccgatggtttaactcgtcggggtgatataaacttgctgatgttgggggatccaggcaccgctaagagccaactcctgaaatttgtggagaaatgttctcctattggcgtgtacacgtccgggaagggctcctcggccgctggcctcacagcctcagttatgagagacccatcaagtcgtaatttcataatggagggtggcgcaatggtcctggccgatggaggcgtggtttgtattgatgagtttgataagcacagagaggctgcccaggccccactctgccattggctgcctggggtctag

SEQ ID NO: 29471 - DNA, 1788 bp, synthetic construct
  misc_feature 1..1788: note = Description of Artificial Sequence: Synthetic coding sequence
  source 1..1788: mol_type = other DNA
atgttctattttcgaggctgtggcaggtgggtggccgttagttttaccaagcaacagttcccattggcacgcttaagttcagatagcgctgctcctagaactccacactttgacgtaatcgtgattggcggtggccacgctgggactgaggcagcgactgctgctgctagatgtgggagccgcactctgctgctcacccaccgcgttgacaccattggccaaatgagttgtaaccctagctttgggggaatcgggaagggtcacctgatgcgcgaggtagatgcactggacggcttgtgcagccgcatttgtgaccagtctggggtccactataaggtcctgaacagacgaaaaggccctgctgtgtggggcttgcgtgcccagatagaccgcaaactgtataagcagaacatgcagaaggaaatacttaacactccgctccttacagtgcaggagggggcagtcgaggacttgatccttaccgaacccgaacctgagcataccggtaagtgcagagtcagtggcgtggtacttccagaagaccaattgccctgttaccttacgcatactaaccctcgcgtggacgagattgtcctgaagaacttgcacttaaactctcacgtgaaagagactaccagaggcccaaggtactgtccttctattgagtctaaggtactgcggttcccaaacaggcttcaccaggtctggttggagcccgaaggcatggatagcgacctgatatatccacagggtttaagcatgaccttgcctgctgagttgcaagagaaaatgatcacctgcatcaggggacttgagaaagccaaggtgatccagcccggatatggagttcagtatgattatctagacccgaggcagatcactccatccttggagactcatctggtacagcgcctcttttttgccggacagataaatggcacaaccggatatgaggaagccgcagctcagggcgtcatagccggaattaatgcttccctgagggtatcaaggaagcctcccttcgtcgtgtctcggacagagggctatatcggcgtcctgatcgacgacctgactaccctgggcacttctgaaccgtaccggatgtttacctctagagtcgaatttcggctgtctttgcgaccggacaatgcggactcgcgactgacactgaggggctataaggacgctggctgcgtctcccagcagcggtacgagagggcctgttggatgaagtcttcactggaggaaggcatctccgtgctaaagtccatcgagttcctgtcgagcaagtggaaaaagcttatccctgaggcatcaatatctacgtctcgaagcctccccgtgagagctcttgacgtgcttaagtacgaggaggtggacatggactctctcgccaaggcagttccagaaccgcttaagaagtacactaagtgccgtgaactcgccgaacgcctgaaaattgaagcgacttacgaaagtgtgttattccaccaactacaggaaatcaagggggttcagcaggacgaagctcttcagcttcctaaggacctggactatctgacaatcagagatgtgagcctctcacacgaggtcagggagaagctgcacttctcacgccctcagacaatcggggcagcctcgaggatccctggagtcactccggctgccatcattaatctgctccggtttgtgaaaaccacccagcggaggcaaagcgctatgaatgagtcttcaaagacggatcaatatctttgcgatgccgacagacttcaggagagggaattatag

SEQ ID NO: 29472 - DNA, 2154 bp, synthetic construct
  misc_feature 1..2154: note = Description of Artificial Sequence: Synthetic coding sequence
  source 1..2154: mol_type = other DNA
atgttctatttccgaggttgtggtcggtgggtggctgtctcattcaccaagcaacaattccctctggcacgcctgagtagcgattcagccgctcccaggacgccacacttcgatgttattgtcattgggggaggccatgctgggaccgaggctgccaccgctgccgcacgatgtggatctcggacactgcttttaacacatcgagtggacaccattgggcagatgtcatgtaatccatcgttcggaggtattggcaaggggcatctaatgagagaagtcgatgccttggacggattgtgctctaggatctgtgaccaatctggggtgcattacaaagtgctcaaccgtcgcaaagggccagctgtctggggcttacgagcacagatagatcggaaactgtacaaacagaatatgcagaaagaaatacttaacacaccactgctcaccgtacaggaaggcgctgtcgaggacctgattttaacagaaccagaacccgagcataccggaaaatgtcgagtcagcggggtggttctggtggacggaagcactgtctatgctgaatccgtgatcctcacaacaggcacctttctgcgcggaatgattgtcatcgggctagaaacgcaccccgctgggaggctaggtgaccagccaagtatcggactggcccagacactggagaaattgggttttgtggtgggaaggctaaaaacggggacaccacctagaatcgcaaaggaatcaatcaatttcagcattctgaataagcacatccccgacaacccgtcgatcccattctctttcactaatgaaaccgtctggataaaacctgaagatcagctgccctgttacctgacgcataccaaccccagagtcgacgaaatcgtactcaagaatttgcacctcaattcccacgtgaaggagacaacccgaggacctcggtactgtccctccattgagtccaaagtcctgaggttcccaaacaggctgcaccaggtttggctggaaccagagggaatggacagcgatcttatctacccccagggcctgtctatgaccctaccggcagaactgcaggagaaaatgatcacgtgtattagagggctggagaaggccaaagtcattcagcccgatggtgtgctgttgctgctacccaggatggaatgtaacggcgctatcagtgctcatcacaatttgcccctgcccggatacggcgttcagtacgattacctggacccaagacaaatcaccccctcactagagacgcacctggtccaacgcttgttcttcgctggacaaataaatggtacaactgggtatgaagaggcagccgctcagggtgtgatagctggtatcaatgccagtctgagagttagcaggaagcccccttttgtagtaagcaggactgaggggtacatcggtgtgttgatcgatgacctaactactcttggaaccagcgagccatatcgaatgttcactagtagggtcgaattccggctgagcttgaggccggataatgcggattctagattgacgctgagaggatataaggacgccggttgcgtgagtcagcagcggtatgaacgggcttgttggatgaaaagtagtttagaggaaggcatctccgtgctaaagtctatcgagtttctgagttcgaaatggaagaaactgatcccagaggcttcaatttctacatctagatccctccccgtgagagcattggacgtcctgaagtacgaagaggtggatatggactccttggctaaggctgtacctgaaccgttgaagaaatacaccaagtgcagagagctggcagagcggctgaagattgaggctacctacgagagcgtcttgtttcaccagttacaagagattaagggagttcagcaggacgaagcacttcaactgcctaaagatctggactatctgactatccgggacgtgtcactgtctcacgaagtcagggaaaagcttcacttttcccgccctcagacaattggggcagcctctcgcatccctggggtgacacccgcagccataattaacctactgcgtttcgtgaaaactactcagcgtcgccagtcggccatgaatgaatcatcaaagacagaccagtatctgtgcgatgctgatcgactgcaggaacgcgagctgtag

SEQ ID NO: 29473 - DNA, 1932 bp, synthetic construct
  misc_feature 1..1932: note = Description of Artificial Sequence: Synthetic coding sequence
  source 1..1932: mol_type = other DNA
atgtcttgcaaccccagtttcggaggaattggtaaaggccatctcatgcgagaggtggacgcgttggacggcctatgtagcaggatctgcgaccagagcggcgtgcattacaaggtgcttaaccgccgtaaaggacctgccgtttggggtttacgggctcaaattgatcgcaagctatataaacagaacatgcagaaagagattctgaatacgccccttctcacggtgcaagagggagctgtggaagatcttattctgaccgagcccgaacctgagcatactggtaaatgccgggtttctggggtcgtgttggtcgacggttcaactgtttacgccgagtccgtgattctgacgactggtacatttctgcggggaatgatcgtcattggactggagactcaccccgctgggaggttaggggatcaaccgagtatcggactggcccaaactctggagaagttagggtttgtggtggggcgactgaagacagggacacccccaaggatcgcgaaggaaagtatcaatttttctatacttaataagcacattcccgataaccccagtatccctttctcgtttaccaatgagacggtgtggataaagcctgaggatcagctcccctgctatttgactcacactaacccgagagtggacgaaatcgtgctgaagaaccttcacctgaatagccacgtcaaggaaaccacacggggacccagatattgcccttcgattgagtccaaggtcctgaggtttccgaatagattgcaccaggtctggctggaacctgaagggatggacagcgaccttatctacccccagggactcagtatgacactccctgccgaactccaagagaaaatgatcacctgcatcaggggcctcgagaaggccaaggtgatacagcctgatggtgtgctactgctgctgccacggatggagtgcaacggggcaatttccgcccaccacaacctcccattgccgggttatggcgtccaatatgattatctggacccacgacaaatcaccccctctctggagacgcatctggtccagcgcttgtttttcgctggacaaatcaatggaactactggctacgaagaagctgctgcgcagggcgtcatcgctggtattaatgccagtctgcgagtctctagaaagccccctttcgtagtctccaggacagagggatatatcggagtcctcattgatgacctgacaaccctgggcactagcgaaccttatcgcatgttcacaagccgcgtcgaatttcgcctgtccctcaggccagataacgcggatagtcggcttactctcagggggtataaggacgcgggatgcgtgagccagcagcgctatgagcgggcatgctggatgaagagctccctggaagagggaatctccgtactgaaaagcatcgagtttctcagtagcaaatggaaaaaactgattcccgaggcatcaattagcacttctcgttcactgcccgtacgcgcacttgacgtgctgaagtatgaagaagtggatatggatagccttgcaaaagctgtgccggaacccttaaagaagtacactaaatgtcgggaacttgcggagagactgaagattgaggcaacctatgaaagtgttctctttcaccaactacaagagattaagggagtgcagcaggacgaggctctccaactccctaaggacctggattatctgacgatacgagacgtgtcattgagtcatgaagtccgagagaaactccacttctcacgaccccagaccataggtgccgcttcgcgcatccccggtgtaacaccagcagccattattaacctgttgagattcgtgaagaccactcagaggcggcaatcagccatgaatgagagctcaaagacagaccagtacctctgtgacgctgatagactccaagaacgggaattgtag

SEQ ID NO: 29474 - DNA, 2199 bp, synthetic construct
  misc_feature 1..2199: note = Description of Artificial Sequence: Synthetic coding sequence
  source 1..2199: mol_type = other DNA
atgttctatttccggggatgcgggcgatgggtcgccgtatccttcacaaaacagcagtttccccttgctcgactgtctagcgatagtgctgccccaagaactccccatttcgatgtaatagtgatcggaggaggacacgccggtacggaagcagccacggctgccgctaggtgcggctctaggactcttctactgactcaccgcgttgacacgatcggccaaatgagttgtaacccttctttcggaggaatcgggaaaggtcacttgatgagagaagtggatgctttagacggactctgcagcagaatctgcgaccagtccggcgtgcattataaggtgttgaataggaggaaaggtccagcggtctgggggctgagagcccagatcgaccgaaagctgtataagcagaacatgcagaaagagattttgaacacccctctgctgactgtacaggagggggcagttgaagacttgatcctaactgaacccgaacctgaacatactggcaagtgcagagttagcggagtcgtgctggtagacgggtcaacagtttacgcggagtccgttatccttaccaccggcacttttctgagagggatgatcgtaatcgggcttgaaacccatcctgcaggacggttgggagatcagccgagcattgggcttgcacagactttggaaaagcttggtttcgtggtcgggcgtctcaagacgggtacgccaccccgaattgccaaggagagtattaatttcagcatcctgaataaacatattcctgataatcctagtatccctttcagctttactaacgaaactgtgtggatcaagccagaggaccaactgccttgctatctgacccataccaatccaagggtggatgagatcgttctgaagaatcttcatctcaactctcacgttaaggaaacaacccgcggtcccaggtattgcccatcgatcgaaagtaaggtactaagatttccaaaccgcctccaccaggtgtggctagaaccagagggtatggactccgatctcatctaccctcaaggactgtcaatgactctgcctgccgaactacaagaaaaaatgatcacctgtattcggggtctggagaaggccaaggttatacaacccggatatggcgtgcagtacgactacctcgatcctcggcaaataacccctagtctcgaaacacaccttgtccagagactcttttttgctggccagataaacggcacgaccggttacgaagaggccgcagcgcagactgagtgttgctcagtggctcgccttgagtgttcagatatgatatcgcagttgcaggcgatactgcttcctcaaccaagtcttgtggcagggaccgccggaatgcaccataatactcagggtgtgattgcgggaatcaacgcctcgctcagagtgagccggaaacctcctttcgttgtgtctcgcacggaaggctacataggcgttttaatcgacgaccttaccacgctcggaacttctgaaccctatagaatgttcaccagtagggtggaattcagactgtcattgaggcctgataatgctgactcgcgtctgaccttacgaggatataaagatgctggatgtgtcagtcagcagcgatatgagcgggcatgttggatgaagtcatccctggaggagggcatctctgtcttgaaatcaatagagttcctatcttcaaagtggaaaaaactcattcccgaggcgtccatctccaccagccgctctctgccagtgagagccctcgacgttctgaagtacgaggaagtcgatatggacagcctagcaaaagcggtcccagaaccccttaaaaaatacacgaagtgtagagaattggccgaacgcctgaaaattgaagctacatatgaaagcgtgcttttccatcagctccaggagatcaagggtgtgcaacaggatgaggctctgcagctccctaaagatctagattatttgaccattcgagatgtatcactctcccacgaggtgcgggagaagttgcacttttccaggccccaaacaattggagcagcctcccggattcccggagtgaccccagccgctatcatcaacttgctccgcttcgtcaaaactacccagcgacggcagtcagccatgaacgaatcctcaaagactgaccagtatctttgcgacgcagatcgccttcaagagcgtgagctgtag

SEQ ID NO: 29475 - DNA, 2079 bp, synthetic construct
  misc_feature 1..2079: note = Description of Artificial Sequence: Synthetic coding sequence
  source 1..2079: mol_type = other DNA
atgttttattttaggggatgtggtcggtgggtggcagtatcattcaccaagcagcaatttcctctggcgagactgtcctctgacagtgccgctcccaggacacctcactttgatgtgattgtgatcgggggtggtcacgcaggcaccgaggctgccactgcagccgcaaggtgcgggtctcgaacgctgcttctgacccacagagtcgacaccatagggcagatgagctgtaacccctcttttgggggaatcggcaagggccacctgatgagagaagttgacgctctggatgggctgtgctccaggatttgtgaccagagcggcgtccactacaaagtcctgaatcgcagaaagggcccagctgtatggggattgagggcccagattgaccggaagctgtacaagcagaacatgcagaaagaaattctgaacacacctctgctgacggtgcaggagggtgcagtcgaggacctcattttgacagaacccgagcccgaacacaccggtaaatgtcgagtctccggtgtggtgctcgtcgacgggtcaaccgtatacgccgagtctgtgatactgacaactggcacctttcttcggggaatgatcgttataggtctggaaacgcaccctgcgggacggttgggtgatcaaccatcaataggactagcccagacactggagaagttgggctttgtggtgggccgtctgaagactgggactcctccgaggatcgcaaaagagagcatcaacttttcgatactgaacaagcacatacctgacaacccttctatacccttcagcttcacaaacgagaccgtatggatcaaaccagaggatcagttaccctgttatctcacccatacaaacccccgagtggatgagatcgtactgaaaaacctgcatctcaacagtcacgtcaaggagactactaggggcccaagatattgtccctctatcgagagcaaggtgctgcgcttcccaaaccgtctgcatcaggtgtggctcgagccagagggtatggacagcgaccttatttatccacagggactttcaatgacgctgccggcagagctgcaggaaaagatgattacttgtattcggggtctggaaaaggcaaaggtcatccaacctggatacggcgtgcagtatgactacctggaccccagacaaataacaccgtcactggaaacccacctggttcagcgcttgttctttgccggacaaattaacggaaccactgggtacgaggaggcagccgcacagggggtaattgcgggaatcaacgcctctctgagggtctctcgcaaaccgccattcgtcgtgtcgcgcaccgagggatatatcggtgtccttattgatgatcttactaccctgggcaccagcgagccatacaggatgttcacctccagggtggaattccgtcttagcctgcgaccggataacgccgactcacgacttacactgcgtgggtacaaggatgctgggtgcgtcagccaacagcgttatgaacgtgcatgctggatgaaatcctcccttgaagagggcatcagcgtgctgaagagcattgagtttctcagctccaagtggaagaaactcattcccgaagcatctataagcacctcacgtagcctgcctgttcgcgcattagacgtattaaagtatgaagaagtggatatggattcattggcgaaggccgtacccgaacccctgaagaaatataccaagtgcagagagctcgctgagagactcaagattgaggcaacctacgagtctgtattgttccaccaacttcaggaaattaagggagtgcagcaagacgaggccctgcagctgcccaaggacctcgattacctgacaatccgcgacgtgagcctgtcccacgaggtccgcgaaaagctccatttttcccgaccccagaccattggcgctgcgtcgcggataccgggtgtcactcccgcagctataatcaacctcctccgtttcgtgaaaacgacacagaggcgacaatcagcgatgaatgaatcctcaaagacggaccaatacctgtgtgacgccgatcgcctacaagaaagagagctgtag

SEQ ID NO: 29476 - DNA, 381 bp, synthetic construct
  misc_feature 1..381: note = Description of Artificial Sequence: Synthetic coding sequence
  source 1..381: mol_type = other DNA
atgtcaatcggcgtgcctataaaagtgctgcatgaagcagaggggcacatcgtgacttgtgaaaccaacacaggagaggtgtatagagggaaactgatcgaagcagaagataatatgaattgccagatgtcaaatatcactgttacctatcgcgacggtcgggtggctcagcttgaacaggtgtatatcaggggttccaagatcagattcctaatcctccccgatatgctcaaaaatgccccaatgctgaaaagtatgaagaacaaaaatcagggcagtggtgccggtcgcggaaaggctgctatcctgaaggcccaggtggccgctcggggacgcggtagaggcatgggacgtgggaacatcttccagaaacgtagatag

SEQ ID NO: 29477 - DNA, 1083 bp, synthetic construct
  misc_feature 1..1083: note = Description of Artificial Sequence: Synthetic coding sequence
  source 1..1083: mol_type = other DNA
atggctgcggctgcagcagccggtgccggaccggaaatggtgcgtggtcaggtctttgatgttggtccgaggtacaccaatctctcctatattggcgagggagcttacggcatggtatgttcagcttatgataatgtgaataaggtcagggttgcaatcaaaaagatttctccattcgagcaccagacttattgtcaacgcacattgagggagatcaagatattactgcgtttccgacacgaaaatatcatcggcattaacgacattatcagggcacctacaatagaacaaatgaaagacgtgtatattgtgcaggatttgatggagaccgacctatacaaactcttgaagacacagcacctctctaatgatcacatatgctattttttgtatcaaatcctgcgcggtctgaaatacatacactctgcaaatgttctccaccgtgacctgaagccgtcaaatctgctgttgaacactacttgcgacctgaagatctgtgacttcggcttggcacgcgtggctgaccctgaccatgatcataccggttttctgaccgagtatgtcgccacaaggtggtatcgtgcacccgagatcatgcttaactctaagggctacacaaaaagcatagatatctggtcagtaggctgcatactcgctgagatgctttctaatcgccctatcttccctggcaagcattatctagaccagctgaaccacatcctagggatcctcggatccccaagtcaggaggacctcaattgcatcatcaacctgaaggctaggaattatctcctgagcctccctcacaaaaacaaggtgccctggaacagactgtttccaaacgctgactccaaagcattagatctcctggataaaatgctgacattcaatccacacaaaaggatcgaagtcgagcaggcccttgcacatccttatctcgaacagtattacgacccatcagatgaacccattgcggaagcaccatttaagtttgacatggagctcgacgatctacctaaagagaaactgaaggaactcatcttcgaagaaaccgccagattccagccgggttatcgtagctag

SEQ ID NO: 29478 - DNA, 1047 bp, synthetic construct
  misc_feature 1..1047: note = Description of Artificial Sequence: Synthetic coding sequence
  source 1..1047: mol_type = other DNA
atggtaagagggcaagtgttcgacgtcgggcctagatacaccaacctgagttacataggcgagggagcttatgggatggtctgcagcgcttatgacaacgtcaacaaggtgagggtggcgataaagaagatttctcccttcgaacatcagacttactgtcagaggactctgcgcgaaattaaaatcctgctgaggttcaggcatgagaatatcatcggaattaatgatatcatcagggcaccaaccatcgaacaaatgaaggacgtctacatcgtgcaggacctgatggaaactgatctctataagctcttaaagacacagcatttgtcaaacgatcacatttgttattttttataccagattctgcgcggactgaaatatatccacagcgcaaacgtgctgcatcgtgatctgaaaccttctaatctgctcctgaacactacctgtgatctgaagatttgcgactttggattggcacgggtggccgaccctgaccacgaccacaccgggttccttacagaatatgtagccactcgttggtatcgcgcacctgagatcatgctcaattcaaaaggctatacaaaatctatcgacatctggtccgtcgggtgcatactggcggagatgctgtctaaccggcctatcttccccggaaaacactacctggatcagcttaaccatatcctgggaatccttggatccccttcccaggaggacctaaattgtattatcaatctgaaagccaggaattacctgctctctttaccacataaaaacaaggtaccatggaaccgcctcttccccaatgccgactctaaggctttagacctgctcgataaaatgctgaccttcaaccctcataaacgcattgaggtcgagcaggccttagctcacccctacctggagcagtactacgatccatcagacgaacctatagccgaagctccctttaagttcgacatggagctggacgacctcccgaaggagaagctgaaggagctgatatttgaagagaccgccagatttcagcccggataccgctcctag

SEQ ID NO: 29479 - DNA, 951 bp, synthetic construct
  misc_feature 1..951: note = Description of Artificial Sequence: Synthetic coding sequence
  source 1..951: mol_type = other DNA
atggcggctgcggctgcagccggagccggtcctgaaatggtgaggggacaagtgtttgacgtcgggccacgctacaccaacctatcatacatcggggagggagcctacggcatggtgtgcagtgcatatgataatgtgaataaagttcgcgtggccatcaagaagatttcaccctttgagcaccagacgtactgccaacggacactaagggagattaagatactgttacgctttagacatgaaaacattattggaattaacgacattatcagggctccaactattgagcagatgaaagacgtgtatatcgtacaggacctgatggaaacagatctctataagctattaaagacccagcatctgagcaatgaccacatatgttatttcctctaccagatcctcaggggtctgaagtacattcatagcgcaaatgttctgcaccgggatctgaagccttccaacctgttgctgaacaccacgtgtgacctgaaaatctgcgacttcgggctagcaagagtagctgatccagaccatgaccacaccggcttcctcacagagtatgtcgcaacgcggtggtatcgagcccctgagatcatgcttaattcgaaaggctacacaaagtcgattgacatatggtcggttggctgcattttagcggagatgcttagtaaccgacccatattcccagggaagcactacctcgaccagctcaaccatattcttgccttagacctattggataagatgctgaccttcaacccccacaaacgaattgaagttgagcaggccttggcacacccatacctggaacaatactacgaccctagcgacgagcccattgcagaggccccattcaagttcgacatggagctggacgatctgcctaaagagaagctcaaagagcttatcttcgaagaaactgcacgcttccagcccggatacaggagctag

SEQ ID NO: 29480 - DNA, 1095 bp, synthetic construct
  misc_feature 1..1095: note = Description of Artificial Sequence: Synthetic coding sequence
  source 1..1095: mol_type = other DNA
atgtccggccctagagctggattttatcggcaggaactcaacaagacagtgtgggaagtgccccagcggctgcagggactacggccagtaggatctggtgcatatggatcagtatgctctgcctacgatgccagacttaggcagaaggtggccgtgaaaaaattatcaagaccatttcagagcttgattcacgcaagaagaacttatcgcgagctgcggctcctgaaacatctgaaacacgagaatgtcatcggcttactcgatgtattcactcccgctacatccatcgaggacttcagcgaagtatacctggtgactacacttatgggagccgacctcaataacattgtgaagtgccaggcactgagtgatgaacacgttcaattcctggtttaccaactactgagagggctgaagtatatccacagcgctgggatcatccacagagaccttaaaccctccaacgtcgccgtaaatgaagattgtgaactacgcatcctggactttggcctggcgaggcaagccgacgaagaaatgactggctatgtggcaacccggtggtaccgggcacctgagattatgttgaattggatgcactataatcagaccgttgacatctggtcggttggttgtatcatggccgaattgttgcaggggaaggctctcttcccgggaagtgactacatcgaccagcttaaacgcatcatggaagtagtgggcaccccttccccggaagtgctggccaagatttccagtgaacatgcacgcacctacatacagtctctccctcccatgccccagaaagatttgagttcaattttccggggagcaaatccgctggccatcgacctgctgggcagaatgttagtccttgattctgatcagagggtgagcgccgcagaagccttagcacacgcatacttttcccagtatcacgatcccgaggatgaacctgaggctgagccctatgatgaatccgtagaggccaaagagcggactttagaagaatggaaggagctgacctaccaagaggtactgagcttcaaacctccagaaccgccaaagccccctgggtccctggaaatcgaacagtag

SEQ ID NO: 29481 - DNA, 1095 bp, synthetic construct
  misc_feature 1..1095: note = Description of Artificial Sequence: Synthetic coding sequence
  source 1..1095: mol_type = other DNA
atgtccgggccaagagctggattctataggcaggaactgaacaagacagtgtgggaagtcccacagaggctacagggactcaggcccgttggtagcggagcttacggctctgtatgctctgcctatgatgcgaggctcaggcaaaaggttgccgtaaagaagctttcaagacccttccagagcctgattcacgcccgtcgaacctaccgagagctccgccttttgaaacaccttaagcacgaaaacgttatcggattgttagatgtgttcacaccagccacatcaatcgaggatttttcagaggtgtacctggtcactaccctaatgggagccgacctcaacaatatcgtaaaatgtcaggctctgtccgatgagcatgtccagtttctcgtgtaccagctcttgcgcggactcaagtatatacattcagcaggcatcatccacagagatctgaagcctagcaacgtggctgtcaacgaggactgtgagctcagaatactcgattttggcttagccaggcaggctgacgaggaaatgactggctacgtggccacacggtggtaccgtgccccagaaataatgctgaactggatgcactataaccagaccgtggacatttggagcgttggctgcataatggcagagcttctccagggcaaagcactcttcccaggcagcgattatatcgatcagttgaaacgcattatggaagtcgtgggaaccccaagtcccgaagtgttagcgaagatcagcagcgaacacgctcgcacttatatccagtccctgccccctatgcctcagaaggatttgagctctatctttcggggtgcaaatcctctggccattgatctgttggggcgtatgctggtgcttgatagtgaccagcgggtcagcgctgctgaggcactagcacacgcttacttcagccagtaccatgatcctgaggacgagcctgaggctgaaccctacgacgaatccgtcgaagccaaggaacgtaccctggaggaatggaaggagttgacttatcaggaggtgctgtcatttaagccaccagagccacccaaaccaccgggaagtctcgagatagagcagtag

SEQ ID NO: 29482 - DNA, 642 bp, synthetic construct
  misc_feature 1..642: note = Description of Artificial Sequence: Synthetic coding sequence
  source 1..642: mol_type = other DNA
atgggcgcagatctcaacaacatagtcaagtgccaggcactatcagatgagcacgtgcagttcctggtgtatcagctcctgaggggactgaagtacattcactcagctggtattattcaccgcgacctcaaaccatccaatgtcgctgttaatgaagattgcgaacttcgcatccttgattttggtctggcacgccaggcggacgaagagatgaccggctacgttgctacaagatggtaccgcgctccggagattatgctcaattggatgcactataaccagacaggcgcagggggtagaccctggggggatgaaggacagggtccaagattggctctggattggctgtgcatgccgggactccgcggacaggccaggtcccccaggatgtgggatccgcacagtaaagtcgccctgcagaggcccctggaacacgacggatgctggcccccattagcggttcaactgtggactagtccttgtctagggggattaggtatggcagaagaaggagtgtgcccatcctggggcctggacgtaacagttggactgctggaggaggggaggggggtgggcaccctgatggaggtacctagcccctcgcattctggctacctggtgagagggctgcatcatggctag

SEQ ID NO: 29483 - DNA, 1149 bp, synthetic construct
  misc_feature 1..1149: note = Description of Artificial Sequence: Synthetic coding sequence
  source 1..1149: mol_type = other DNA
atggactttggcctggcactgctgctggctggtcttttagggttgcttcttggtcagagcctgcaggtgaagcctttacaggtagagccaccagagccagtagtggcagtggccctgggggctagccgacagctgacttgtcggctggcctgtgcagaccgcggtgcctccgtccagtggaggggattggacacctctttgggcgctgtgcaatcggataccggacgctccgtgctgaccgttcgaaacgcatccctgtctgccgcaggaactagggtgtgtgtcgggtcgtgcgggggaaggacctttcaacacacagtgcagctactggtgtacgcattccccgatcagctgacggtgagccccgcagcgctagtgccaggagatcccgaggtggcctgcacagcacataaggtgactcccgttgatcccaacgccttatcattcagcctcctggttggcggacaggaacttgagggggctcaggctttaggccctgaagtgcaggaggaggaggaggaaccccagggcgacgaggacgtgctgtttcgcgtcacggagagatggcggctgcctccacttggtacacccgtaccgccagctttgtattgccaggcaaccatgcggctgcccggtctcgaactcagccaccgccaggcaattcccgtcctacattctcctaccagccccgagcctcccgataccacaagcccagaatccccagacaccaccagtccagagtccccagacactacctcacaggaaccccctgacaccactagtcccgaaccaccagataagacctcccccgaacctgccccacagcagggaagcactcacacaccacggtcccccggttctacccgcacacggagacctgagatttcgcaggctggaccaacacagggcgaggtcatacccacagggagctctaagccagctggagaccaactgcctgccgcactctggacgtcatctgccgttcttggcttgctgttacttgccctgccaacctatcatttgtggaagagatgtcgccatctcgcggaagacgatacgcatccgccagcttcgttgcggctgctgccgcaggttagcgcttgggcaggcttgaggggaactggacaggtgggaatttccccatcctag

SEQ ID NO: 29484 - DNA, 1074 bp, synthetic construct
  misc_feature 1..1074: note = Description of Artificial Sequence: Synthetic coding sequence
  source 1..1074: mol_type = other DNA
atgtcatccccccctcctgctcggagcgggttctaccggcaggaagtgaccaagacggcatgggaagtccgagctgtctatcgggatctacagcctgtaggcagtggcgcttacggggctgtttgctctgccgtcgacggtcgaaccggggcaaaggtggctataaagaaactctatcggccattccagtcagaattatttgcaaagagggcctacagggagctccgtttgctgaaacacatgagacatgaaaatgttatcgggctgttagatgtatttacccctgacgaaacactagatgattttacggatttctatcttgtcatgcctttcatggggaccgacctcggaaagttgatgaaacatgagaagctgggcgaggatcgtattcagtttctcgtctatcaaatgctgaagggccttagagatctcaagcccggaaacctggcggttaatgaggactgtgagctgaagatactggatttcgggttagctcgtcaagctgactccgagatgaccgggtatgtcgtgacaaggtggtaccgggctcccgaggttattcttaattggatgcgatatacccaaactgtggatatttggtccgtgggatgtattatggccgagatgatcacaggcaaaactctttttaaggggagcgaccatttggatcagttgaaggagattatgaaagttaccgggacccctcctgcagagtttgttcagcggcttcagtcagacgaggccaagaactacatgaaaggtcttccagagttagaaaagaaagattttgcctccatcctcactaacgctagccccttggccgtgaaccttctggagaaaatgctggttttagacgctgaacagagagtaaccgcgggtgaagctttggcacatccctatttcgagagcctccacgacactgaggatgaacctcaggtgcagaaatatgatgacagtttcgatgatgttgaccgcacactcgatgagtggaaaagagttacctataaggaagtgttgtctttcaaacctccaagacagcttggagcacgggttagtaaagagactccgctgtag

SEQ ID NO: 29485 - DNA, 837 bp, synthetic construct
  misc_feature 1..837: note = Description of Artificial Sequence: Synthetic coding sequence
  source 1..837: mol_type = other DNA
atggcacttctccccgtgctttttttggtcacggttctgctgccatccctcccagccgagggcaaggacccggctttcacggcccttctgactacccagctccaagtgcagagagaaattgtgaacaaacataacgagctcagaaaagcagtctcccctcccgctagcaacatgctgaagatggaatggtcaagggaggtcaccaccaacgcccagagatgggccaacaagtgtacactgcagcattctgatcctgaggatagaaaaacttctacccgttgtggtgagaatttgtatatgagctctgaccccaccagctggtctagtgctatacaatcttggtatgatgaaatcctcgattttgtctacggtgtgggacctaagtcaccgaacgcagtggttggccattacactcagctggtctggtactcaacttatcaggtgggttgcgggatcgcctactgtccaaaccaggactccttgaaatactactacgtctgccagtactgccccgcaatgaagacatatcttaacaagcgggaaggcattaacgtgtggaaatgtttccttagactcagacatttccagctgcttcgaggcgagcagcttctcactttctccggaaataatatgaatcgcaaaaataccccttatcagcaaggaacgccttgtgcgggatgccccgatgattgtgataagggtctgtgcacaaattcttgccagtatcaggatctcctgtcgaactgtgactcattgaagaacactgccggatgtgagcatgagctgttaaaggagaaatgtaaagccacatgtctctgtgagaacaagatctactag

SEQ ID NO: 29486 - DNA, 459 bp, synthetic construct
  misc_feature 1..459: note = Description of Artificial Sequence: Synthetic coding sequence
  source 1..459: mol_type = other DNA
atgcagcacgagaatgtgattggtttgctggatgtgttcactccggcttcatcccttagaaatttctacgacttctatctggtgatgcctttcatgcaaacggacctacaaaaaatcatgggcatggaattcagcgaggaaaagattcagtaccttgtgtaccagatgctgaaaggccttaagtacatacatagcgcgggtgtggtccaccgagacctcaaacccggaaatctggcagtgaacgaagattgtgagctgaaaatcctcgatttcgggctggcgaggcacgccgacgctgaaatgactggttatgtggtcactagatggtatagagcccctgaggtgattttaagctggatgcactataaccaaactggacaaatcttacacccagtccccgcaaccgacccacaggaaggcttccattccgcggtccccacaggtcagccccctgggtag

SEQ ID NO: 29487 - DNA, 1068 bp, synthetic construct
  misc_feature 1..1068: note = Description of Artificial Sequence: Synthetic coding sequence
  source 1..1068: mol_type = other DNA
atgagtctcatacgcaagaaagggttttataaacaggacgtaaataagaccgcttgggagcttccgaagacctacgtttccccaactcatgtcggatctggagcatacggatctgtgtgcagtgctatcgataagaggagcggtgagaaggtcgccatcaagaagctgtccaggccatttcagtcagagatatttgcaaagagagcgtatcgtgaattactcttactgaaacatatgcaacacgagaatgtgattggactgctggatgtattcaccccagctagcagcctgcggaacttctatgatttttatctggttatgccctttatgcagaccgacctccagaaaataatgggaatggagttctcagaagagaaaattcagtatcttgtctatcagatgcttaaggggctgaaagacctgaagcctggcaatctcgccgtgaacgaagattgcgagcttaagatcttagactttggactggcaaggcatgccgacgcagaaatgactggatacgtcgtgaccagatggtatagggcccctgaagtcatcctctcctggatgcattacaaccagaccgtggacatatggtccgttgggtgtatcatggccgaaatgctaaccggcaaaacgctcttcaaaggcaaagactacctggatcagctgacacagattctgaaagtcacgggcgttcccggtaccgagtttgtgcagaagctaaacgacaaggccgctaagtcttacattcagtctctccctcaaactccccgaaaagactttactcagttattcccacgggcatcgccacaggcggctgatctactggagaaaatgttagaacttgatgtcgataagaggctgactgccgctcaggccttgacccacccgtttttcgagccttttagggatcctgaagaagaaactgaggcccagcaaccatttgacgatagcctggagcacgagaagttgaccgtggacgagtggaaacagcacatctacaaggaaattgtcaacttcagccccattgccaggaaggatagtagaaggcggtccgggatgaagttgtag

SEQ ID NO: 29488 - DNA, 774 bp, synthetic construct
  misc_feature 1..774: note = Description of Artificial Sequence: Synthetic coding sequence
  source 1..774: mol_type = other DNA
atgtcactgatccggaagaaagggttctataaacaggacgtgaataagaccgcctgggagctacctaagacatacgtgtcaccgacacacgttgggagtggagcctacggctcggtgtgttctgccatcgataaacggagcggcgaaaaggtggccatcaaaaagctgagccgccctttccagtcagagatctttgcgaaacgtgcctatcgggaattgcttctgctgaagcacatgcaacacgaaaatgtaatcggactcctggatgtgttcactcccgcttccagcctgagaaacttttacgacttttacttagtaatgccctttatgcagaccgaccttcagaagataatgggcatggagttttcagaagagaaaattcagtacctagtgtatcagatgctgaagggcttgaagtacatccattcagcgggagtggtgcacagggatctgaagccaggaaatctggcagttaatgaagactgcgagctgaagattctcgatttcggactggcaagacacgcagacgctgagatgactgggtacgtagtgacacgctggtaccgggctcccgaggtgatcctttcatggatgcactataaccagactgggcagatcttgcaccccgtcccagcaactgaccctcaagagggattccactctgcagtgcccacagggcagcccccaggatgtggtcctgcaggggaagacgctggggctcgtcggggtcaagcacctgacggtcgagctggccctcatccctctcttctgtag

SEQ ID NO: 29489 - DNA, 933 bp, synthetic construct
  misc_feature 1..933: note = Description of Artificial Sequence: Synthetic coding sequence
  source 1..933: mol_type = other DNA
atgtccttgatccgcaagaaaggattctataagcaggacgtgaataaaactgcttgggagctccccaagacgtatgttagccctacgcatgtggggtctggtgcctatggctcagtgtgctcagccatcgacaagcggtcaggagagaaggtggccataaagaagctctcccggccattccagagcgagatcttcgctaaacgggcttaccgggagctgctcctcttgaaacacatgcagcatgagaacgtaatcggcttacttgatgtgtttacacctgccagttccctgagaaacttttacgatttttatctggtcatgccctttatgcaaacagatctccaaaagattatgggaatggaatttagcgaggagaagattcagtatctggtctaccagatgcttaagggactgaagtacatccattcagccggtgtagtgcacagggatctgaaacccggaaacctggccgttaacgaagactgtgagttaaagatcctcgacttcggactggccaggcatgccgacgctgagatgacaggttacgtcgttacgagatggtatcgcgcacccgaggtcattctgagttggatgcactataaccagacagttgatatttggagcgtgggttgtattatggctgaaatgttgactggtaagacactgttcaaggggaaagattacttgctcgagaagatgctcgaactcgacgtggacaaaaggctgacagccgctcaagccctaacgcacccattcttcgaacccttccgcgaccccgaagaagagactgaagcccagcaaccattcgatgactcacttgagcacgaaaagctgacagtggacgagtggaagcagcacatatataaggagatcgtcaacttctccccaatagccagaaaagacagccggagaagatccggcatgaaattgtag

SEQ ID NO: 29490 - DNA, 1629 bp, synthetic construct
  misc_feature 1..1629: note = Description of Artificial Sequence: Synthetic coding sequence
  source 1..1629: mol_type = other DNA
atgcccctgagggatgagaccttacgagaggtgtgggcctcagactctgggcacgaggaggagagcctcagtccagaagccccaagacgccctaagcagaggccagctcccgctcagaggctacggaagaaacgtaccgaggccccagagagtccctgtcccactggatctaagcctcgcaagcctggcgcaggcaggacaggacgacctcgcgaggagccttcccccgacccggcacaggctagagcgccacagacagtttacgcacgctttctaagggacccagaagctaagaagagagatcccagggaaaccttcctggtggcccgagccccagatgctgaggacgaggaagaggaggaagaagaagacgaagaagacgaagaggaggaggccgaagaaaagaaggagaagatcctgctacccccaaagaagcctttacgcgagaagtcctccgctgatctgaaggagagaagagccaaagcccagggccctcgtggggatctgggaagcccagaccctcctcctaagccgctgcgtgtcaggaataaggaagcccctgcgggagaagggacaaagatgcggaagacaaagaaaaagggaagcggcgaggccgacaaggatccctccgggtcacctgcatcggcaagaaagtcacccgctgccatgttcctggtcggagaggggagtcccgacaagaaagcacttaagaaaaaaggtacccctaagggggctcgtaaagaagaagaagaggaagaggaggcagcaacggttattaagaagagcaaccagaaaggaaaggccaaggggaagggcaaaaagaaggcgaaggaagagcgggcacccagcccacctgtagaggtggatgagcccagagagtttgtactgaggcctgcccctcagggcagaacagtccgctgtagactgacccgcgacaaaaagggcatggacaggggcatgtatccatcgtattttctccatctagacacagaaaagaaagtgtttctgctggctggcaggaagagaaagagatcaaaaaccgccaattacctcatcagtattgatccgactaacctgtctagaggaggggaaaatttcatcggcaagcttaggtcaaacctgctgggaaatcggtttaccgtgtttgataacgggcaaaaccctcagcgcggatacagcactaatgtggcctctctccgccaggaactggcagcggttatatatgagacaaatgtcttaggattcaggggccctcggaggatgacggtgataattcccggaatgtctgcagagaacgagcgggtccccataagacccagaaacgcctctgacggacttctggtaaggtggcagaacaaaaccctggagagcctcattgagttacacaacaagcccccagtgtggaatgacgacagtgggtcttacacactcaactttcagggtagggttactcaggcatctgtcaagaatttccaaatcgtacacgccgacgacccagactatatcgtgctacagttcggacgcgtagctgaggatgctttcaccctcgactacaggtatccactttgtgcgttacaggcctttgccattgccctgagcagctttgatgggaaactcgcctgcgagtag

SEQ ID NO: 29491 - DNA, 1083 bp, synthetic construct
  misc_feature 1..1083: note = Description of Artificial Sequence: Synthetic coding sequence
  source 1..1083: mol_type = other DNA
atgtctcaggagagaccaacattctacagacaggaactgaataagaccatctgggaagtccccgaacgttaccagaatttaagtcccgtgggctccggcgcatatgggagtgtgtgtgccgctttcgatactaagacaggccttcgcgttgccgtgaaaaagctttccagaccattccaatctatcatacacgctaaacgcacttacagggagctgcgcctcctgaaacatatgaaacacgagaacgttatcgggctgctggacgtcttcaccccggctagaagtctggaggagtttaacgacgtttatcttgttacccacttaatgggggctgatctgaataatattgttaagtgccaaaagcttactgacgaccacgtacaattccttatctatcagatcctgaggggtctgaaatatatacacagcgcagacatcattcaccgggacctgaagccctccaatctggctgtcaatgaagattgtgagctgaaaattcttgatttcggcctggctcggcataccgacgatgaaatgactggctacgtggccacacggtggtacagagctccggagattatgctgaactggatgcactacaaccagactgtcgacatctggtccgttgggtgcattatggctgaactgctgactggacgcactttatttcccggtaccgatcatattgatcagctgaaactgattctgaggctcgtgggtaccccgggtgccgaactgcttaaaaaaatcagttctgagtcagcacgaaactatatccagagcctcactcagatgccaaaaatgaattttgctaatgttttcattggagctaaccccctcgccgtggacttgttagaaaagatgctggttctcgatagtgacaagcgtattacagctgcccaggcattggctcacgcctatttcgcgcaatatcacgacccagacgatgagccagtggccgacccttatgaccaatcatttgaaagccgggaccttctgattgacgagtggaagtctttaacatatgatgaagtcatcagttttgtccctccacctctggatcaagaagagatggagtcgtag

SEQ ID NO: 29492 - DNA, 924 bp, synthetic construct
  misc_feature 1..924: note = Description of Artificial Sequence: Synthetic coding sequence
  source 1..924: mol_type = other DNA
atgagtcaggagcggcctacgttttatcggcaggaactcaacaagactatctgggaggttcctgagcggtatcagaatctctcacccgtcgggagtggggcatacggcagtgtctgtgcagcctttgacacaaaaaccggcttgagagttgcagttaaaaaactcagccggccttttcagagtattatccacgctaaacgcacctacagagagttaaggttgctgaagcacatgaaacacgagaatgtgatcgggcttctcgatgtttttactcctgcaaggtctctggaggagttcaacgatgtgtacctggtgacccacctcatgggggcagacctcaacaacattgttaagtgccaaaagctcacggatgaccatgtgcagttcttgatttatcaaatcttaaggggactgaagtacattcattccgccgatattattcaccgcgacctgaagccaagcaacttggccgttaatgaggattgtgagctcaagatcctggactttggcctcgcaagacataccgacgacgagatgactggctacgtggctactcgttggtacagggctcccgagattatgctgaactggatgcactataaccaaacagtcgacatatggagtgttggctgtatcatggcggaactgctcactggcaggactctctttcctggaacggaccatatcgaccagctgaaactgatacttcggttagtgggcaccccaggtgcagaactcctgaaaaagataagtagtgaatccctgtctacctgttggcggagatgcctgtattggactcagataagggaattacagagaccaaagcctctccatatgcctacccttcttagcactaccatcctcatgatgaatcaatggcccatcttaatgatttcccccttaaaagcgggaacgtcgttgtag

SEQ ID NO: 29493 - DNA, 852 bp, synthetic construct
  misc_feature 1..852: note = Description of Artificial Sequence: Synthetic coding sequence
  source 1..852: mol_type = other DNA
atgaagcacgagaatgtgattggcctcctggatgtgttcacgccagccaggtccttagaggagttcaatgatgtgtatttggttacccacctgatgggagccgacttgaataacattgtgaaatgccagaaactgaccgacgatcatgtgcagttcctgatatatcagatcctgagaggactaaagtacatccattcagccgacatcatccaccgggacctaaagccttcgaacctggcagtgaatgaggattgcgaattgaaaatcttggacttcggtctggcacgccacaccgacgatgagatgaccggatacgtggcgaccaggtggtaccgggcaccagagattatgctaaattggatgcactataaccaaacggtagatatatggagcgtcgggtgcatcatggcagaactcttgacagggaggacgttgttccccggtactgatcacattgatcagctgaagcttatcctccgcctggtaggaacaccaggggcagagctgcttaaaaagatctcatctgagtctgcacgcaattacattcagagtcttacacaaatgcccaagatgaacttcgccaacgttttcatcggggcaaatccactagcagtcgatttactggaaaagatgctcgtcctcgactccgacaagcgcataaccgccgctcaggccctggcacatgcttattttgcacagtaccacgacccggatgatgaaccagtggccgatccttacgaccagtcgttcgaatcaagagatttgttaattgacgagtggaagtcgcttacctacgatgaagtgataagctttgtgccacctcccctggatcaggaagaaatggagagttag

SEQ ID NO: 29494 - DNA, 1140 bp, synthetic construct
  misc_feature 1..1140: note = Description of Artificial Sequence: Synthetic coding sequence
  source 1..1140: mol_type = other DNA
atggccgctgctgccgctcaaggcggaggaggaggcgagcctagacgcactgaaggggtgggacctggggtccctggcgaagtcgagatggtgaaggggcagccatttgacgtcggacccaggtacacacagctccagtacataggggagggggcttatgggatggtatcatcagcatatgaccacgtgcgcaagactcgcgtggctattaagaagattagcccttttgaacaccagacctattgccagaggaccttgcgagagatccagatccttttacgcttccgacatgaaaatgtgatcggcattagggacatcctgcgcgcttctacactggaggctatgagagacgtctatatcgtccaagacctgatggaaacggatttgtataagctgctcaagtcacagcaactcagtaacgatcacatttgctatttcctctatcagatcctgagaggtttaaagtacatccattccgcaaacgtgctgcaccgggatctgaaacccagcaacctccttatcaacacgacctgcgacctgaaaatatgtgatttcggattggccagaattgcggatcctgagcacgatcatacaggatttcttaccgagtacgttgcgaccaggtggtacagggcacctgaaatcatgctgaactccaaagggtacacgaagtccatagacatctggtccgttgggtgcatcctggcagagatgctcagcaatagaccaatttttcccggtaaacattacctagaccagttgaatcatattctgggaattctggggtcaccgtcgcaggaagatctcaactgtattattaacatgaaggctcgcaactacctgcagagtttgcctagcaagaccaaggttgcctgggctaagctttttccgaagtccgatagtaaggcactcgatttattggaccggatgctcacgttcaaccccaacaaaagaatcacagtggaagaggccctcgctcatccctaccttgagcagtactacgatccaactgatgaacctgttgcagaagagcccttcaccttcgccatggagttggatgatcttcccaaggagcgcctaaaggagctgatttttcaggaaactgccaggttccagccaggggttctggaggccccttag

SEQ ID NO: 29495 - DNA, 1008 bp, synthetic construct
  misc_feature 1..1008: note = Description of Artificial Sequence: Synthetic coding sequence
  source 1..1008: mol_type = other DNA
atggccgctgcggctgcacaaggaggcggtggtggagagccacgcaggacagaaggagtcggccctggggttccaggagaagtcgaaatggtcaagggtcagccctttgacgtggggcctcgttacacgcagctccagtacataggtgagggcgcttacggtatggtctcaagtgcatacgatcatgttcggaagactcgcgtagctatcaagaagatatccccgttcgagcatcagacctactgtcagcgcactttgagggagattcagattttactgcggttccgccatgagaatgtcataggtatccgggatatactgcgggcaagcaccttggaagccatgcgcgatgtttatatagtacaggatctgatggagacagatctatacaagttattgaagtcgcaacaattatccaacgaccacatttgttactttttgtaccaaattttgagaggtctgaagtacattcattcagcgaatgtgctgcaccgcgaccttaagccttccaacctgctcatcaacaccacctgtgatttgaaaatctgtgactttggtttggcccgaatcgccgaccccgagcacgaccacacaggttttttgacagaatatgtcgcgacacgatggtatagagcccctgaaattatgctaaacagcaaaggctacaccaaatcaattgatatatggagcgtaggttgcatattggcggagatgctaagtaaccggccaatttttccgggaaagcattacctggatcagctgaatcatattctcgccctagacttactggataggatgctcacctttaatccaaacaagagaataaccgtggaggaggctcttgcccacccatacctggaacaatactacgacccgaccgatgagccagtggccgaggaacccttcacgttcgctatggagctggacgacctgcccaaagagcggttaaaggagctgatcttccaggagaccgccaggttccaacccggtgtgttggaagcaccctag

SEQ ID NO: 29496 - DNA, 936 bp, synthetic construct
  misc_feature 1..936: note = Description of Artificial Sequence: Synthetic coding sequence
  source 1..936: mol_type = other DNA
atggtcaaagggcaaccatttgacgttggcccaagatacacacagttgcagtacattggggaaggcgcttacggcatggtgtcatcagcgtacgaccatgtccgaaaaacacgggttgccatcaaaaaaatctcccctttcgaacaccagacctattgccagcggactctccgtgagattcaaatcttgctgaggttccggcacgaaaatgtgattggcatccgagacattctgagagctagcacgctcgaagccatgagggatgtatacatagtccaggatctgatggagacggacctctacaaactgctgaagagccaacaattgtcaaacgaccatatctgctactttctgtatcagattttgagggggctgaagtatattcatagcgctaacgttctgcaccgtgacctgaagccttctaaccttcttattaatacgacctgcgacttgaaaggctatacgaagagcatcgacatttggtctgtgggctgtatattggcagaaatgctgagtaaccgccctatcttccctggcaaacattatctggatcagctgaatcatattctcggcatcctaggaagcccatcgcaggaagatctgaactgcataataaacatgaaggctcggaactacctgcagtcccttccatcgaaaactaaagtggcctgggccaaactgtttcctaagagtgattctaaagccctggaccttctggatcgcatgctgacgttcaacccgaacaagcgcattacggtggaagaggccttagcgcatccatatctggagcagtactatgacccgactgacgagcccgtggcggaagaacctttcaccttcgccatggagctagatgacctgcctaaggagaggctgaaagaactgatttttcaggagacagcacgctttcagcccggtgtccttgaagcaccgtag

SEQ ID NO: 29497 - DNA, 1008 bp, synthetic construct
  misc_feature 1..1008: note = Description of Artificial Sequence: Synthetic coding sequence
  source 1..1008: mol_type = other DNA
atggccgctgccgcagctcagggtggaggtggcggagagcctcgtaggacagagggagttggacctggcgtcccaggggaggtggagatggtgaaggggcagccattcgatgtcgggccaaggtatacgcagctgcaatatatcggagagggcgcatacggcatggtcagtagcgcctatgatcatgtgagaaagaccagagtcgcaataaagaagataagtccatttgaacaccagacgtactgccagcggactctgagggagatccagatcttgctgcgctttcgccatgaaaatgttattggaatccgagacattcttagggcgtctaccctcgaggctatgagggatgtttacatcgtgcaggatctcatggaaacagacttatacaagttactgaagagtcagcaacttagtaatgatcacatctgttatttcctgtatcagattctacgaggtctcaagtacatccattcagctaacgtactccatagagatttgaagccctctaacctgttgattaatacaacgtgcgacctaaagatatgcgacttcggcctagcacggattgctgatcccgaacacgaccacactggattcttgaccgagtacgttgcaacgcggtggtatagggcccctgagatcatgctgaatagtaaaggatatactaagtcgatcgacatttggagtgttggatgcatcctggctgagatgcttagtaaccgcccaatattccccggaaagcactatctggaccagctcaatcacattctggctttagatctcttagatcggatgttaaccttcaaccccaataaacggatcactgtcgaggaggccctggcccatccatacctggagcagtattatgatccgaccgacgaacctgtggccgaggagccattcactttcgccatggaactagatgatctccctaaagagaggttgaaagaactgattttccaagaaaccgctagatttcagcccggagtgctggaggctccctag

SEQ ID NO: 29498 - DNA, 1074 bp, synthetic construct
  misc_feature 1..1074: note = Description of Artificial Sequence: Synthetic coding sequence
  source 1..1074: mol_type = other DNA
atggctgccgctgctgcccagggcggtggagggggtgagcccagaaggactgagggggtgggacccggtgtaccaggtgaagttgagatggtgaaaggccagccgtttgacgtgggtcctcgctatacccaactacaatacatcggcgagggcgcatacggaatggtttcaagtgcttatgaccatgtgagaaaaactcgtgttgcgattaagaaaatctcccccttcgagcaccagacctactgtcagcggacccttagagaaatccagattctgcttagattccggcacgagaacgtgatcgggatccgagatatcctaagagcatccaccctggaggctatgagggacgtttacattgttcaagatctgatggaaacagacttgtataagctcttgaaaagtcagcagctgagcaatgatcacatttgctacttcttgtaccaaatcttgcgcggacttaagtatatccactccgcaaatgtccttcacagagatctcaagccttccaatctgctgatcaacaccacttgcgatctgaagatttgtgactttggcctagcacggatcgcagaccctgaacatgaccacaccgggtttctgactgaatacgttgccacacgttggtaccgagcccctgagatcatgttgaatagcaaggggtacacaaagagcatagatatttggagcgttggatgcatcctggcagaaatgttgtcaaacagacccatatttcctggtaagcactacttggatcagctgaatcacatcctcggcatattaggaagcccctcccaggaggatctgaactgtatcatcaatatgaaggcacgcaactaccttcagtccctaccctctaaaaccaaagtggcatgggcaaaactgtttcccaaatctgactctaaggcgttggatttgctggaccggatgctcacttttaaccctaacaaaaggattactgttgaggaggctcttgcccacccatatcttgagcagtactacgatcccacagacgaggtgggccagagtcccgcagccgtgggcctaggagccggagagcaggggggaacctag

SEQ ID NO: 29499 - DNA, 798 bp, synthetic construct
  misc_feature 1..798: note = Description of Artificial Sequence: Synthetic coding sequence
  source 1..798: mol_type = other DNA
atgcgggacgtctacatagtgcaggacttgatggagacggacctgtataaactcctgaagagtcaacagctctcaaatgaccatatctgctattttctgtatcagattctgcggggtcttaagtatatacatagcgcaaatgtactccatcgggatctcaaaccatcaaatttgcttatcaataccacttgcgacctgaaaatctgcgatttcggactggcgagaatcgctgaccctgagcacgaccacactggtttcctcacagaatacgttgcaaccagatggtatagagcaccagaaatcatgctgaacagcaaaggttataccaagtctattgacatatggagcgtgggatgtattttagcggagatgctttccaaccgaccaatattccccggaaaacactacctagaccagctaaaccacattttgggcattctggggagcccaagccaggaggatctgaactgcatcattaatatgaaagccaggaattacctacagagtctgccatctaagaccaaggtggcttgggcgaagttgtttcccaaatctgactctaaggcattggatctgttggatagaatgcttactttcaatcctaacaagaggatcacagtcgaggaagcattggcccatccctacttggagcagtactacgaccccaccgatgagcctgtcgctgaagagcccttcacttttgccatggaactggacgacttaccaaaggaaagactgaaagagctgatctttcaggagacagccagatttcagcctggtgtgctggaggccccttag

SEQ ID NO: 29500 - DNA, 1284 bp, synthetic construct
  misc_feature 1..1284: note = Description of Artificial Sequence: Synthetic coding sequence
  source 1..1284: mol_type = other DNA
atgagccggtcaaaacgtgacaataacttttactctgttgaaatcggcgattccacattcacagtactcaagcgataccaaaacttaaagcccattgggtctggtgcacagggcatcgtgtgcgccgcttacgacgcaatccttgagagaaatgtggccattaagaaactttctcgacccttccaaaaccagactcatgccaagagagcctacagggaactggttctgatgaaatgtgtcaatcataagaacatcatcggtctgttgaacgtgttcacaccccaaaagagccttgaagagttccaggatgtatatatcgtaatggagcttatggacgcgaatctgtgtcaggtgatacagatggaactcgatcacgagcgcatgagttatcttctgtatcagatgctgtgcggtatcaaacacctacactctgctggaatcattcatcgggacctgaaacccagtaatatcgttgtaaaatctgactgtacacttaaaatcctggactttggcctcgcacggacggcgggaacttccttcatgatgacgccttacgtggttacaaggtactaccgtgctcccgaggttatcctgggcatgggatacaaggaaaacgtagacctctggagcgtgggctgtataatgggagaaatggtatgtcataaaatcctgttcccaggaagggactacattgaccagtggaacaaggtgatagagcagctaggtacaccatgccctgaattcatgaaaaagctgcagccaacagtgcgcacttacgtggagaaccgcccaaagtacgctgggtactccttcgaaaagctgttcccagatgtgttatttccagctgatagcgaacataacaaactgaaggcgagccaggcgagggacctactctcaaagatgctggttatcgatgccagcaagcgaatttccgtggacgaagcattacagcacccatacatcaacgtatggtacgaccccagcgaggctgaagcgccaccgcctaaaatccccgacaagcagctggatgaaagagagcacacgatcgaggagtggaaggagctgatctacaaagaggtcatggacctcgaggaaaggacgaagaacggcgtcatccgtggccagccgtcacccctgggggctgccgtaatcaatggtagtcagcatccctcatcctccagcagcgtgaacgatgttagcagcatgtctacggatcctaccttagcatcagacactgatagcagtctggaggcagccgctggtcccctgggctgctgccgttag

SEQ ID NO: 29501 - DNA, 657 bp, synthetic construct
  misc_feature 1..657: note = Description of Artificial Sequence: Synthetic coding sequence
  source 1..657: mol_type = other DNA
atgagtcgctccaaacgtgacaacaacttttattccgttgagatcggggactccacttttacggtgctgaaaaggtaccagaacctgaaaccaattggctcaggcgctcagggcatagtctgcgcagcatacgatgctattttagagcgaaatgtggccattaagaagctgtcaaggccctttcagaatcagacccatgcaaaacgtgcctaccgggaactcgtgcttatgaagtgtgtgaatcacaaaaatatcatcggcctgctgaatgtctttaccccacagaaatcactcgaggagtttcaggatgtgtatatcgtgatggagttaatggacgctaatctctgccaggttatccagatggagttagaccatgaaagaatgtcgtacctgttataccagatgttgtgcgggattaagcatctacattccgcgggtataattcatcgggacctcaaacccagtaatatagtggttaagtctgactgcacactgaagatattagattttggactcgcccgaacagccggaactagtttcatgatgacaccatacgtggttacacggtattatagagcgcctgaggtgatactgggcatgggatacaaagagaacgggggaaggatgggcaagggaatcttcactcgtctccaatag

SEQ ID NO: 29502 - DNA, 1284 bp, synthetic construct
  misc_feature 1..1284: note = Description of Artificial Sequence: Synthetic coding sequence
  source 1..1284: mol_type = other DNA
atgtcccgaagcaagagggataacaatttttactccgtggagatcggtgattccacttttacagtgctaaaaagatatcagaatctcaaaccgatcgggagtggtgcccaggggattgtctgcgccgcatatgacgccatcctcgaaagaaatgtcgccattaaaaaactcagcagaccttttcagaaccagacacacgcaaagagggcttacagagagttggttttgatgaaatgcgtgaatcacaagaacatcatcgggctccttaatgtgtttactccccaaaagagccttgaagagtttcaggatgtgtatattgtgatggagctgatggatgctaacctttgtcaggtgattcagatggaactggaccacgagaggatgtcctatctattgtaccagatgctctgcggaattaaacatcttcatagcgccggaatcatacatagagatctgaaaccctcaaatatcgttgtcaaatccgactgcacactcaagatcctagatttcggtcttgccagaacagccggaacatcattcatgatgactccctatgttgtgacccgctactatcgggctcccgaagtgattctgggaatgggctataaggagaatgtggacatctggagcgtcgggtgtatcatgggagagatgatcaaagggggagtcctgttccctggcactgatcatatagatcaatggaataaggtcatcgagcaacttggtaccccatgtcctgagttcatgaaaaagctccagcccaccgtgcgaacctacgtggaaaaccggccaaagtacgccggttattcattcgaaaaactgtttcctgacgtgctgttccccgctgattccgaacacaacaagctgaaagctagtcaagcaagggacctcctgagcaagatgctagttattgacgcatcaaaaaggattagcgtggatgaggcgctacagcatccctacataaatgtttggtacgatccctcagaagccgaggcccctcctcctaaaattcccgataagcaactcgatgagagagagcatacaattgaggagtggaaagagcttatctacaaggaggtgatggatttggaggaaaggactaagaacggtgtgattagggggcagccctctcctctgggtgccgcagttattaacggcagccagcacccgtctagctcctcttcagtgaacgacgtgtcaagtatgtcaaccgatcccacactggcctcagacacagattccagtctcgaggccgcagctggccctctaggctgctgcaggtag

SEQ ID NO: 29503 - DNA, 1155 bp, synthetic construct
  misc_feature 1..1155: note = Description of Artificial Sequence: Synthetic coding sequence
  source 1..1155: mol_type = other DNA
atgtcccggtctaagcgggacaacaacttctatagcgtggagatcggggactctacatttaccgtcctgaaaagataccagaatctaaagcccatcggctcaggcgctcagggcatcgtgtgcgccgcatacgatgctatcttggaaaggaatgtagccattaagaaactgagccgtccattccagaatcagactcacgctaaaagagcatatcgtgagctggtcctgatgaagtgtgttaatcacaaaaacattattgggttgcttaacgtattcacccctcagaaaagtctggaggagttccaggatgtgtatattgtcatggagctaatggacgctaacttgtgtcaggtgatccaaatggagctggaccacgagagaatgtcctacttattgtaccagatgctttgtggaataaagcatctccactctgccggaatcattcaccgcgatctgaaaccgtccaacatcgtagtcaaatccgactgcaccctaaaaatactggacttcggactcgccagaacagccggtacaagtttcatgatgacaccttacgttgtcacccgttattacagggctcctgaggtgattcttggaatggggtacaaagagaacgttgatatttggagcgtcggatgtatcatgggcgagatgatcaagggaggtgtgctgtttcctggaacagatcatattgaccaatggaataaagtgattgaacaactcgggaccccttgcccagagttcatgaaaaaactgcagcccacagtgcggacctacgtggaaaatagaccgaagtatgcaggatacagctttgagaagttattcccagacgttctgttcccagcagattctgagcacaacaagcttaaggcatcccaagcacgggacttgttgtccaaaatgttagtgattgatgccagcaagcgcatcagtgttgatgaggctcttcagcatccgtacatcaatgtttggtacgatccatctgaggcagaggccccacccccaaaaatccctgacaagcagttagatgagcgcgagcataccatcgaggagtggaaggagctcatctacaaggaggtgatggacctggaagagagaacaaagaacggagtcatccgtggccagccgagcccactcgcacaagtccagcagtag

SEQ ID NO: 29504 - DNA, 1155 bp, synthetic construct
  misc_feature 1..1155: note = Description of Artificial Sequence: Synthetic coding sequence
  source 1..1155: mol_type = other DNA
atgagtcggtcgaagcgagacaacaatttctattcagtggaaatcggcgattccacctttacagtcctcaaacgataccagaacttgaagcccattggctcgggcgctcagggcatcgtgtgtgccgcttatgatgcaatcctggagcggaatgtcgcaatcaagaaactgtcgcggccatttcaaaatcagacccacgccaagcgcgcataccgtgagttggtgcttatgaagtgcgtaaaccataaaaatatcatcggcctgctgaatgtgtttacccctcaaaaaagcctagaggagttccaagatgtgtacatcgtcatggaactcatggatgcaaatctgtgccaggtcatccagatggagctcgatcacgaacggatgtcttatttgttgtaccaaatgttatgcggaattaagcacctgcacagcgccggaataatacacagggaccttaagcccagcaatattgtggtgaagagcgactgcacgttaaagatccttgacttcggactcgcgcgaacagcagggacttcttttatgatgactccctacgtggtgacgagatactatcgggctcctgaagtgatcctcggcatgggctataaggagaatgtggacctctggtctgtgggctgcattatgggagagatggtctgtcacaagatactgttcccgggacgggactatatagaccagtggaataaagttattgaacagttgggcacaccctgtcccgagttcatgaaaaaattgcaacccaccgtgcgcacgtacgtcgagaatcgtcccaagtatgcagggtattcctttgagaaattgtttccggatgtgttgttccccgcagacagcgagcacaacaaactgaaagcctcccaagccagggaccttcttagtaaaatgctggtcattgacgcttccaagcgcatttccgtcgacgaagctctgcagcacccctatatcaatgtttggtacgacccaagcgaggccgaggcccctccacccaaaattcctgacaagcaactagacgaacgagaacacacaatcgaagagtggaaggaactgatctacaaagaagtcatggacctagaggagcgcaccaagaacggggtgattcgcggacaaccctcccccctggctcaagtgcagcaatag

SEQ ID NO: 29505 - DNA, 1284 bp, synthetic construct
  misc_feature 1..1284: note = Description of Artificial Sequence: Synthetic coding sequence
  source 1..1284: mol_type = other DNA
atgagtcggagcaaaagggacaacaacttctatagtgtggagatcggcgatagtacatttaccgtgctcaagcggtaccagaatttaaaaccaatagggagtggcgctcaggggatcgtgtgcgccgcttatgacgccatactggagcggaacgtcgcgatcaagaagttgtcccgcccattccaaaaccagacacatgcaaagcgcgcttaccgggagctcgtattaatgaagtgcgtgaatcataagaacattatcggcctactgaacgtcttcaccccccaaaagagcctggaagagttccaggatgtgtatatcgtgatggaacttatggacgctaacctgtgccaagtaatccaaatggagctggaccacgagaggatgagctatctgttgtatcagatgctctgtggcatcaagcaccttcactcagccggaatcatccatagagacctgaaaccctctaacatcgttgtgaaatctgattgcacactgaaaatcttagattttggcttggcacgcactgcagggacctccttcatgatgactccctatgtggttacaagatactaccgcgctccagaagtcatcctcgggatgggttataaggaaaacgtggatctttggtctgtggggtgtatcatgggagaaatggtctgtcataagatcctattccccggtcgggattatatagatcagtggaataaagtaatcgaacagctgggaaccccatgtcccgagtttatgaaaaagcttcaaccaaccgtgcggacatacgttgaaaaccgcccaaagtatgctggttactctttcgagaagctttttccggatgtcctgttccccgctgacagtgagcataacaagctcaaggccagccaggcacgggatctgctgtctaaaatgctggtgattgatgcatcaaaaaggatctcagtggacgaagctctgcagcatccttacattaacgtgtggtatgacccgtcagaggctgaagcgcctcctcctaagattcccgacaaacaacttgatgaacgagaacacacaattgaggaatggaaggaattaatctacaaagaagtgatggatcttgaggaaagaaccaaaaacggggtgatcagaggccagccgtcacctctgggcgcagccgtgatcaacgggtcccagcacccctctagctcaagttcggtcaacgatgtgtctagtatgtcgaccgatcctaccctggcttccgataccgattcatcactggaggccgcagcgggacccttgggatgctgccgatag

SEQ ID NO: 29506 - DNA, 927 bp, synthetic construct
  misc_feature 1..927: note = Description of Artificial Sequence: Synthetic coding sequence
  source 1..927: mol_type = other DNA
atgtcacgtagcaaacgggataacaatttttacagtgttgagattggtgacagtacctttacagtcttaaagagatatcagaatctgaagcccattgggtcaggcgctcaggggattgtgtgcgctgcgtacgacgccatcctggagagaaatgttgcgattaagaagctgtcaaggcccttccagaatcagactcacgctaaacgggcataccgagaattggtgctgatgaagtgcgttaatcacaagaacatcatcgggctcctgaacgtgtttacgccacagaagagtttagaggaatttcaggacgtctacatcgtaatggagctcatggatgccaacctgtgccaggtcatacagatggagctagaccacgaacgaatgtcttacttactttatcaaatgctgtgtggaatcaaacacctgcacagtgccggaatcatacacagggacctgaaacccagcaatattgttgtcaaaagcgactgtaccttaaagatcctggattttgggctggctagaaccgctggcactagtttcatgatgactccctatgtggtcacacgttattatagggcccctgaagtgatcctgggcatgggctacaaagagaatgcagacagcgagcataataaactcaaggcctctcaagctcgagacctgctctccaagatgctggtaatagacgcctctaagcgcatctctgttgacgaggccctacagcatccttacatcaacgtttggtacgacccttctgaggcagaagctccccctcctaagatccccgacaagcaattagacgaaagagagcacaccatcgaggaatggaaggagctgatatacaaagaagtcatggatctggaggaacgcaccaaaaacggagtcatacggggacagcccagcccattggctcaggtccagcaatag

SEQ ID NO: 29507 - DNA, 429 bp, synthetic construct
  misc_feature 1..429: note = Description of Artificial Sequence: Synthetic coding sequence
  source 1..429: mol_type = other DNA
atgagtcggagcaaacgagataataacttctactccgtggaaatcggcgactcaaccttcaccgtactaaaaagatatcaaaacctcaaaccaatcggatctggagcccagggcattgtgtgcgctgcctacgatgccatcctcgagcggaatgttgcaataaaaaaactgagtagaccttttcagaaccagacccacgccaaaagagcgtaccgggaactggttctcatgaagtgtgtcaaccataagaacatcatagggcttctgaatgtattcacaccgcaaaaaagcctcgaggagttccaagacgtgtacatcgtgatggaactgatggatgcgaatctctgtcaggttattcagatggaactagatcacgaaagaatgagctacctattataccagatgctctgtggtatcaaacatttatag

SEQ ID NO: 29508 - DNA, 294 bp, synthetic construct
  misc_feature 1..294: note = Description of Artificial Sequence: Synthetic coding sequence
  source 1..294: mol_type = other DNA
atgattataggcctcctgaacgtatttactccacaaaaatccttagaagagttccaggatgtatacattgtgatggagctcatggacgcaaatctatgtcaggtgattcagatggagctggatcacgagcgaatgagctacctcctgtatcagatgctgtgtggcatcaagcatctgcactctgctggcattatacaccgggatctgaagcccagtaatattgtagttaaaagcgattgtactctgaaaattctcgacttcggtctcgctcgtacagctggcaccagcttttag

SEQ ID NO: 29509 - DNA, 429 bp, synthetic construct
  misc_feature 1..429: note = Description of Artificial Sequence: Synthetic coding sequence
  source 1..429: mol_type = other DNA
atgtctaggagtaagagggacaacaacttttattccgtcgagattggagactcaactttcacggtgctgaagcggtatcagaacctgaaaccgataggcagcggggcacagggcatcgtgtgtgctgcctacgatgcaattctcgagcggaatgtggctataaagaagttaagcaggcctttccaaaaccaaacacacgcaaaaagggcctatcgggagcttgtgctcatgaagtgcgtgaatcacaagaatattatcggcctgctgaacgtctttactccccagaagtctctggaggaattccaggacgtgtatatcgtgatggagttaatggatgccaatctgtgccaggttatacagatggagctggatcatgaaaggatgtcttacctcctgtatcagatgctctgcggcatcaagcacttatag

SEQ ID NO: 29510 - DNA, 1182 bp, synthetic construct
  misc_feature 1..1182: note = Description of Artificial Sequence: Synthetic coding sequence
  source 1..1182: mol_type = other DNA
atgccgaaaaagaagcccaccccaattcagcttaacccagcccctgatggctcagccgtgaatgggactagcagcgctgaaaccaacctggaagccctgcagaagaagctggaggaactggaattggatgaacagcagcgaaaacgtctggaggccttcctgacccagaaacaaaaggttggggaactcaaagacgacgacttcgagaagatttctgaactcggtgccggaaatggcggagtagttttcaaggtttcacacaagccttccggtctggtgatggccaggaagctgatccaccttgagatcaagccggctattaggaaccagatcataagagagctgcaagttctccatgaatgcaatagcccttacatcgtcggtttctacggagctttttactctgacggggagattagtatctgcatggagcacatggacggtggcagcttggaccaggtgctgaagaaggccggacgaataccagagcagatcctggggaaggtctccatagccgtcattaagggcctgacttacttgcgcgaaaagcacaaaatcatgcaccgggacgtcaaaccctcaaacatattggtcaattctagaggggagatcaagctctgtgactttggcgtgtcgggacagcttatagactccatggccaactcttttgtgggaacgaggtcgtacatgtctcctgaaaggcttcagggcacacactatagcgtccagagtgatatctggtcaatgggtctaagcctagtcgaaatggccgtgggccgatatccaattccaccaccagacgctaaggagttggagctgatgttcggttgccaggtggagggtgatgctgccgaaacacctcctcgccctcgcaccccaggcaggcctctttcctcctacggcatggactctcgaccacccatggctatcttcgagctcctggactacatcgtgaatgagcctcctcctaagctgccctctggagtattctccctcgagtttcaggacttcgttaacaaatgtctaatcaagaaccccgcagagcgcgcagatctgaagcagctgatggttcatgccttcattaaaaggagcgatgccgaagaagttgactttgcaggatggctgtgtagcaccattggcctcaatcaaccgtctacgcctacgcacgcggcaggagtctag

SEQ ID NO: 29511 - DNA, 1203 bp, synthetic construct
  misc_feature 1..1203: note = Description of Artificial Sequence: Synthetic coding sequence
  source 1..1203: mol_type = other DNA
atgctggctagaaggaagcccgttctgccagccttaaccataaatcccactatcgccgagggtccttcccccacctcagagggggcttccgaggcgaacctcgtcgatctccagaagaaattagaggagttggaactcgatgaacagcaaaagaaaagactggaggccttccttactcagaaggctaaagtaggagaattgaaggacgacgacttcgaaaggatcagcgaactgggagctggcaacggtggagttgtgacaaaggtccagcataggccctccgggttgatcatggcgagaaagctcattcatctggagatcaagccggctattagaaaccagatcattagggagctgcaggtcctgcatgaatgcaattcaccctatatcgtagggttttatggagccttttattcagatggggagattagcatctgtatggagcacatggacgggggatctctggatcaggttctgaaggaggccaagcgtataccggaagaaatactgggaaaagtgtccattgcggtattgcggggtttagcctatttgcgggaaaagcatcagataatgcatcgggatgtgaagccatccaatatattggtgaattctcggggagaaatcaagttgtgcgacttcggcgtgtcggggcaactgatcgattcaatggccaactctttcgtggggactcggtcatatatggcgcctgaacggctgcagggaacccactattctgtccagtccgacatatggtctatgggattgtctttggttgagctcgctgtcggacggtaccctatacccccacctgatgcaaaagaactggaggccatctttggaagaccagtcgtggacggtgaagaaggcgagccccactctatttcaccacggcctcgtcccccaggcagacctgtaagtggacatggcatggactcacggccagccatggcgatcttcgagctactggattacatcgtgaacgagccaccccctaagctgcccaacggagtgtttacccctgatttccaggaattcgtcaataaatgcctaatcaaaaatccggctgaacgggctgatttaaagatgctcactaaccacacatttatcaagcggtctgaggtggaggaagtagattttgccggatggctctgcaagacactgagactcaatcaaccaggcacccccacccgtacagcagtgtag

SEQ ID NO: 29512 - DNA, 1056 bp, synthetic construct
  misc_feature 1..1056: note = Description of Artificial Sequence: Synthetic coding sequence
  source 1..1056: mol_type = other DNA
atgggagtgcagggcacattgatgtcccgcgaccagaccccacacttactaagcattctggggaagtctaagaggaaaaaagaccttcgtatttcatgtatgagtaagcctcccgcaccaaaccccacaccccctaggaatcttgattcgaggaccttcatcaccatcggcgaccggaatttcgaggtagaagccgacgacctcgtcaccataagtgagcttgggagaggagcctacggagtcgttgaaaaagtgcgacacgcccagtccggtacaattatggcggtcaaaaggatccgcgcaaccgtgaattcacaagagcagaagagactcctgatggacctggatatcaatatgcgcacagtagattgcttctacacggtaaccttctatggggcattattcagggagggagacgtttggatctgtatggagctgatggatacctccttggacaagttttacaggaaggtgcttgataaaaacatgacaattccagaagatatcctgggagaaattgccgtcagcatcgttagggcgctggagcatctacactcaaaactctcagttattcatagagacgtaaaaccctcaaacgttctgattaacaaggaaggccacgtgaagatgtgcgactttggcattagcggctacctggttgactcagtggccaaaactatggatgcaggatgcaaaccctatatggctccagaacggattaaccccgagttgaaccagaagggatacaatgtgaagagcgacgtgtggagtttagggattactatgatagaaatggccattctaagatttccttatgagtcctggggcacgccattccagcaacttaagcaggttgtagaggagcccagcccacagcttccggcagatcggttttccccagagttcgtggacttcactgcacaatgcctccgtaaaaacccggcagaacgtatgtcgtatctggaactaatggagcatcctttctttactctccacaagactaagaaaacagacatcgccgctttcgtaaaagagatactgggcgaggattcatag

SEQ ID NO: 29513 - DNA, 1044 bp, synthetic construct
  misc_feature 1..1044: note = Description of Artificial Sequence: Synthetic coding sequence
  source 1..1044: mol_type = other DNA
atggaaagccccgcttcatcacaaccggctagtatgccacagagcaagggtaagtcaaaaaggaagaaagaccttcgcatctcctgcatgtccaagcctccagctccaaatcccacaccaccccgaaacctggattctaggaccttcattaccatcggcgaccgcaatttcgaggtggaagctgatgatctggttacaatatcggagctgggtcgaggcgcatacggcgtcgttgaaaaggttcggcacgcacagagcggcactattatggccgtgaagaggatcagagctacagttaacagccaagagcaaaaacggctgttgatggacctcgacattaacatgagaaccgtcgattgcttctacaccgttacattttatggcgctctgtttcgcgagggtgacgtttggatatgtatggaacttatggacacctctctcgacaaattctacagaaaggtgctggataagaacatgactattcccgaagacattctgggcgaaatcgctgtgtccattgtacgggctctggagcacctccatagtaaacttagcgtcatccatagagacgtcaaaccatccaatgtgctcatcaacaaggagggccacgtgaaaatgtgtgattttggaatctcaggctacctcgtggactctgttgcaaaaacgatggacgcaggatgtaagccttatatggccccagagagaattaacccagagttgaaccagaagggctacaacgtgaagtcagacgtatggagccttggaattaccatgatcgagatggctattttacggttcccatacgagagctggggcaccccgtttcagcagctcaagcaggtcgtcgaagaaccatccccacagctgcctgccgatcggttcagcccagaattcgtggacttcactgcacagtgcctgcggaagaaccccgctgagcgcatgtcctacctggagctgatggaacacccattcttcacccttcacaagacgaaaaagaccgatattgcagcctttgtcaaagagatccttggcgaagattcttag

SEQ ID NO: 29514 - DNA, 957 bp, synthetic construct
  misc_feature 1..957: note = Description of Artificial Sequence: Synthetic coding sequence
  source 1..957: mol_type = other DNA
atgagcaaacccccagcgcctaatcccacgccccctcgtaacctggactcccggacttttatcaccatcggggatcggaattttgaagtggaggctgatgatctggtcacaatctccgagctgggaagaggggcttacggagtggttgaaaaagtgaggcatgctcagtcaggaacaatcatggccgtcaagcggatacgggcaaccgtgaattcacaagaacagaagaggctcctgatggacttggacataaacatgagaactgtcgattgtttctataccgtgacattttacggggcactattccgggagggcgacgtctggatctgtatggagttgatggacactagcttggacaaattctaccgcaaagtgctggataagaacatgacaatccctgaggatatccttggggagattgcggtttctatcgtgcgggctctggagcatcttcactcgaagctgtccgtcatccacagggacgtgaagcctagtaatgtgcttatcaacaaagagggccacgtgaaaatgtgtgatttcggtatttctggttatctcgttgactccgtggcgaaaactatggacgctggttgcaaaccttacatggccccagagaggattaatcctgaactgaaccaaaaggggtataacgttaagagcgatgtctggagcctgggtattacaatgattgaaatggcgattctacgtttcccctacgagtcctggggcactccattccaacagctcaagcaggtagtcgaagagcctagtcctcagctacctgccgatcggttttcccctgaatttgtagacttcaccgctcagtgcctgagaaaaaacccagcggaacgaatgtcgtacctagaactgatggagcatccctttttcactctacacaaaacaaaaaaaaccgacattgccgcttttgtgaaagaaatcctgggggaagacagctag

SEQ ID NO: 29515 - DNA, 1113 bp, synthetic construct
  misc_feature 1..1113: note = Description of Artificial Sequence: Synthetic coding sequence
  source 1..1113: mol_type = other DNA
atgctttcaaactcccaggggcaatcccctccagtgccttttccagcccctgctcccccaccccagccgccaactcccgctctccctcacccgccagcccaaccccctccccctcctccccagcagttcccccagttccacgtgaagagcgggctacaaatcaaaaaaaacgcgattattgatgattataaagttacctcccaggtactgggactcgggattaacggcaaagtgcttcagatctttaataaaagaactcaggaaaaattcgcattaaagatgctacaggactgcccaaaagctcggagagaggtcgagctgcattggcgtgccagccagtgtccgcacatagtccgaatcgttgacgtttatgagaatctgtatgctggcaggaagtgtctgcttatagtgatggaatgcctcgacggcggtgagctgttttcccgcattcaagacaggggtgatcaggcgtttacagagcgggaggcaagcgaaatcatgaaatctatcggggaagcaatccagtacctgcactcgattaacatagcccatagggatgtgaaacccgagaaccttctctatactagcaaacgcccaaatgctatcctcaagctgacggacttcggattcgccaaggaaactacatcccacaacagcctcactacaccttgctacactccttattatgtagcgcctgaggtgctgggacccgaaaagtacgacaagagctgcgacatgtggtctctgggtgtcatcatgtatattttgctgtgcggatatccccctttctatagcaatcatggcctcgctatatctccaggaatgaagaccagaataagaatgggtcaatacgagtttcctaatccagagtggtcagaggtcagcgaggaggtgaagatgctgattaggaacctcctgaagaccgagccaacccagaggatgaccataactgagttcatgaaccatccctggatcatgcagtctacgaaggtgccccagacacccctacatacaagcagggttctcaaagaggacaaggagaggtgggaggacgtgaagggatgtctgcacgacaaaaacagtgaccaggcaacctggctgactcgactttag

SEQ ID NO: 29516 - DNA, 1203 bp, synthetic construct
  misc_feature 1..1203: note = Description of Artificial Sequence: Synthetic coding sequence
  source 1..1203: mol_type = other DNA
atgctctccaactctcagggacagagtcccccagtgccattccccgctccggcacccccaccccaaccacccactcccgctttgccacatcctcccgctcagccgcctcctccacctccacagcagtttccccagtttcacgtcaaaagcgggctgcagatcaaaaaaaacgctatcattgacgactacaaggtcacttcccaggttctgggcctcggtattaacggcaaagtgctgcagatttttaataagcgaacgcaggaaaaattcgccctcaaaatgcttcaggattgccccaaagccaggagagaggtggaacttcattggagagccagccagtgcccccacattgttcgcatcgtggacgtgtatgaaaacctgtacgctggtcgcaagtgccttctgattgtaatggagtgcctggatggcggagagcttttttcgaggatccaagaccggggagaccaagcatttaccgaacgagaagcatctgaaatcatgaaaagcattggcgaggccattcagtacctccactctatcaatatagcccaccgggatgtgaagccagaaaatctgctatacacctcaaaacgacctaatgccatccttaaactaactgattttggatttgctaaggaaacaacaagtcataactccttgactaccccatgttacaccccttattatgtcgcaccagaggtgctgggaccagaaaagtacgataagtcatgcgatatgtggtccctgggggttatcatgtacatccttctgtgtggctatcctcctttctattcaaatcatggccttgccattagtccgggaatgaagacccgcatccgcatggggcagtatgaattcccaaaccccgagtggtctgaggtgtctgaggaggtgaaaatgctaattagaaacttgcttaaaactgagcctactcagcggatgactatcaccgaatttatgaaccacccgtggatcatgcagagtaccaaagtgccacaaacaccgctgcatacttctagagtgcttaaagaggataaagagcgctgggaggacgttaaggaggagatgacatctgcacttgctacgatgcgtgtcgactatgagcagattaaaatcaagaagatagaagatgccagcaacccactcttgcttaaacgcagaaagaaggctcgcgcactcgaagcggcagccctggctcactag

SEQ ID NO: 29517 - DNA, 1149 bp, synthetic construct
  misc_feature 1..1149: note = Description of Artificial Sequence: Synthetic coding sequence
  source 1..1149: mol_type = other DNA
atggacggtgaaactgcagaggagcaggggggacctgtcccgccacccgttgccccaggtggccctggacttggaggagctcctggcggaaggcgggaacccaagaagtacgctgttactgacgactaccagcttagtaaacaagtgctcggtctcggagttaatggaaaagtcctcgaatgcttccatcggaggactggccagaagtgcgctttaaaactactgtatgatagtcccaaagcacggcaggaggtcgatcaccactggcaggcttccggcggaccacacatcgtctgtatcctggacgtatacgaaaacatgcatcatggtaagcgctgcctattaatcataatggaatgcatggagggtggcgagctgttcagtcgaatccaagagcgaggcgaccaggctttcaccgaacgggaagctgccgaaatcatgcgggatatcggaaccgctatccaattcttacatagccataacatcgctcaccgggacgtgaagcctgagaacctgctgtacacttccaaagagaaggacgcggtgttgaagttgaccgatttcgggttcgcaaaggagaccacccagaacgcattgcaaacgccatgttatacgccctattacgtcgcgccagaagtgttaggtcccgagaaatatgataagtcttgtgacatgtggagtcttggagtgattatgtacattctcctgtgtggttttccaccattctatagtaataccggtcaggctatttctcccggtatgaaacggaggatccggctgggacagtacggctttcctaatcccgagtggtcagaagtgtccgaggacgccaagcagcttatacgcttgctcctgaagacagacccaaccgaaagactgaccatcacccaattcatgaaccacccatggatcaatcagagcatggtcgtcccacagactcccctgcatacagcccgtgtgcttcaagaagataaggatcactgggacgaggtgaaagaagaaatgactagtgccctggcaacgatgcgagtagactacgaccaagtgaagattaaagacctgaagacaagtaacaaccgtctgctgaataaacggcgtaagaagcaggcgggaagctcttctgcctcccagggatgcaataaccaatag

SEQ ID NO: 29518 - DNA, 999 bp, synthetic construct
  misc_feature 1..999: note = Description of Artificial Sequence: Synthetic coding sequence
  source 1..999: mol_type = other DNA
atggacggggaaactgctgaggaacagggcggtccggtcccaccacccgtggcccctggcggtccagggttgggtggagctcctggcggtcggcgagaacccaagaaatatgccgttactgacgactatcaactttccaagcaggtgctggggcttggcgtgaacgggaaggtgcttgaatgttttcaccggaggaccgggcagaagtgtgctctgaagctgctttatgacagtcctaaagccaggcaggaagtggaccaccattggcaggcatcgggcggaccgcacatcgtgtgcattctggatgtgtacgaaaatatgcatcacggcaaacgatgcctcctgatcataatggaatgtatggagggcggtgaattgttcagtaggatccaggagagaggcgaccaggccttcacagaaagagaagcggctgaaattatgcgcgacattggaactgctatccagtttctgcatagtcacaatatcgcacaccgggacgtcaaaccagaaaatctgctctatacctccaaagagaaggacgcggtgctgaagcttactgattttgggtttgccaaggagaccacccagaacgccctgcagacgccatgctacacgccttattacgtcgcgccagaggttctcgggccagagaaatatgacaagagttgtgacatgtggtccctgggcgtcattatgtacattctgctgtgcggcttccctccgttttatagcaatactggacaggctatatcccccggaatgaaaagaaggatccggctgggtcagtatgggttccctaaccctgagtggagcgaggtttccgaggacgcaaaacaattgatccggttacttttgaaaacagaccccaccgagagactcacaatcactcagttcatgaatcatccttggattaatcaaagcatggtggttccgcagacaccacttcataccgcacgtgtgttgcaggaagacaaggatcactgggacgaagtgaagtag

SEQ ID NO: 29519 - DNA, 1149 bp, synthetic construct
  misc_feature 1..1149: note = Description of Artificial Sequence: Synthetic coding sequence
  source 1..1149: mol_type = other DNA
atggacggcgagacggcggaggagcagggaggcccagtcccccctcccgtggctcctgggggaccagggctggggggtgcccctggtgggagacgggaacctaagaaatatgctgtcaccgacgactaccagctcagtaagcaagtcctgggcctgggcgttaacggcaaggtactagagtgttttcaccggagaacagggcagaagtgcgccctcaaacttctctacgattctccaaaggctcgacaggaagttgaccaccactggcaggcgagcggcggaccccatatcgtatgtatcctggatgtctacgaaaatatgcaccacggcaagcgctgtttgttgattataatggagtgcatggagggtggcgagctgttttccaggatccaggaaagaggggaccaagccttcactgagcgggaggccgcagagataatgagggacattgggaccgccattcagtttctgcactcccacaacattgcacatcgcgacgtgaagccggagaatctcctgtatacgtctaaagagaaggatgccgtgcttaaactgacagattttggatttgccaaagaaacaacacagaacgcattgcaaaccccttgctacaccccatattatgtagccccagaagtgttaggacctgagaagtatgacaagagttgtgacatgtggtcactcggtgtaataatgtatatcctcctgtgcggatttcccccattctactcgaatacagggcaggcgattagcccaggtatgaaacgccgaatacgcctgggccagtatgggttcccgaatcccgaatggtcagaagttagtgaggatgcaaagcagctgattaggctgctgctgaagacagatcctactgagcgtttgaccattacacagttcatgaatcacccttggattaaccaatccatggtggtgccacagacccctctgcatacagctcgcgtgctacaggaagacaaagaccattgggatgaagtgaaggaagaaatgacaagcgcgcttgccactatgcgggtggactatgaccaggtgaaaatcaaagatctcaagacctcaaacaacaggttgctaaataaacgacgaaagaagcaggctggatcttccagtgcatcccagggctgcaataaccagtag

SEQ ID NO: 29520 - DNA, 360 bp, synthetic construct
  misc_feature 1..360: note = Description of Artificial Sequence: Synthetic coding sequence
  source 1..360: mol_type = other DNA
atggacggcgaaaccgcggaagagcaaggcggtcccgtgccccctcccgtggcccctgggggacccggtttaggaggagctcctggcggacgaagggaaccaaagaaatacgcagttacagacgactatcagttaagcaagcaggtactgggtctgggggtcaacggcaaggtcttagagtgctttcatagaagaaccggacagaagtgtgcactgaagctgctgtacgactcgccgaaggccagacaggaggtcgatcaccactggcaagcctccgggggtccccacatagtctgtatccttgacgtgtacgagaatatgcaccacggcaagcgttgtcttctcatcattatggagtag

SEQ ID NO: 29521 - DNA, 1422 bp, synthetic construct
  misc_feature 1..1422: note = Description of Artificial Sequence: Synthetic coding sequence
  source 1..1422: mol_type = other DNA
atgagtgaggaaagcgacatggacaaggcaattaaggaaacctcaatccttgaggaatactcaattaattggacccagaaacttggtgccggtatttccggcccagtccgggtctgcgtgaagaagagcacccaggaacgctttgctttgaaaatcctgctcgataggccaaaagccagaaatgaagtccgtctgcacatgatgtgtgcaacccatcctaatatagttcagataattgaggtttttgccaattctgtacagtttccccatgagagttcgccccgagctcgccttttaatcgtcatggaaatgatggagggaggcgagctgttccacaggatcagccagcatcggcatttcacagagaagcaggcatctcaggtgactaagcagatagccctcgctctacgccactgtcaccttttgaatatagcacaccgcgacttgaagccagaaaatctcctcttcaaagacaattccctggacgctccggttaagctttgtgattttggctttgccaaaatcgatcaaggagatctcatgactcctcagtttaccccgtattacgtcgcaccacaggtgctcgaggcccagcgacggcaccagaaggagaagtccggtataatacccaccagtcctactccctatacgtataacaagagctgcgatctctggtcactcggcgtgattatctatgttatgctgtgtggctacccccctttctactcaaaacaccattcccgcacaatccctaaggacatgcggaggaaaattatgaccggctcatttgagtttcctgaggaggaatggtcccagattagcgaaatggcaaaggacgtggtgagaaagctactaaaggttaagcctgaggaaaggctcaccatagaaggggtgctagatcacccgtggctcaacagcacagaggcacttgacaatgtgttaccctcagcacagctcatgatggataaggcggtcgtggctgggattcagcaggctcatgccgaacagcttgcaaatatgagaatccaggacttgaaagtcagccttaaaccattgcactcggttaacaaccccatcctcaggaagcgaaagctcctcgggacgaagcctaaagactccgtgtatattcacgaccatgaaaatggagctgaagacagtaacgtggcactggagaagctacgggacgtcatagcacagtgtattctgccccaggccggaaaaggtgaaaatgaggacgagaaactgaatgaggtcatgcaggaagcttggaaatacaatcgggaatgcaagctgctgcgcgacactctgcaaagcttttcctggaacggacggggtttcacagacaaggtggatcgactgaaacttgcagagatcgttaaacaggtgatcgaggagcaaaccacctctcacgagtcccaatag

SEQ ID NO: 29522 - DNA, 1416 bp, synthetic construct
  misc_feature 1..1416: note = Description of Artificial Sequence: Synthetic coding sequence
  source 1..1416: mol_type = other DNA
atgtctgaagaaagtgacatggacaaagccattaaggaaacttctattctcgaggagtattcaataaactggacacagaaacttggtgcaggaatttctggtcccgtgagggtgtgtgtcaagaaatcaacccaggagagatttgctctaaagatccttctggatagacctaaggcgagaaacgaggttaggttgcacatgatgtgtgctacgcaccctaatattgtacaaattattgaggttttcgccaattctgtgcaatttccacacgaatccagcccacgtgccaggttacttatagtgatggagatgatggaaggaggggaactgttccatcgcatatcccagcataggcacttcactgagaaacaagcttcacaggttaccaaacaaattgccttagccctgcgtcattgtcatctgctgaacatcgcccacagggatcttaaacctgagaatctcctgtttaaggacaacagtcttgatgctccggtaaagctatgcgactttggcttcgctaaaattgaccagggcgatttgatgaccccgcagtttactccctactacgtggcccctcaggtactagaggcccagagaagacatcagaaggaaaaaagcggtataatccccacttcccctactccatacacttataataaatcctgcgacctgtggtccctgggggtgatcatttacgttatgctgtgcggatatccgccattttactccaagcaccacagccgtacaattccaaaggacatgcgacgaaagatcatgaccggatcatttgaatttccagaggaagagtggtcccaaatttctgagatggcaaaggatgtggtgaggaaactcctgaaggtgaagccggaagagcgcctcaccatcgaaggagtcttagaccatccatggctgaactctaccgaggccttggataacgtgttgccttcagcacagttaatgatggataaggccgtggtagcaggtatccagcaggcgcacgctgagcagctagctaacatgcgcatacaggatcttaaggtaagcctgaaacccctccacagcgtaaataacccaattcttaggaaacggaaactcctgggaaccaagcccaaagactcagtgtatattcatgaccatgagaacggtgcagaggacagcaacgtggcgctggagaaactccgggacgtcattgcgcagtgcatcttgccacaggccggagagaatgaggatgagaaactgaacgaggtgatgcaggaggcatggaagtataatcgtgaatgtaaattactacgggacactctgcagagtttcagctggaacggtagaggcttcaccgataaggtagacagattaaaattggcagagatcgtaaagcaggttattgaagaacaaactacatcccacgagtctcagtag

SEQ ID NO: 29523 - DNA, 1416 bp, synthetic construct
  misc_feature 1..1416: note = Description of Artificial Sequence: Synthetic coding sequence
  source 1..1416: mol_type = other DNA
atgtccgaggagtccgatatggataaggcgattaaggaaacctcaatcctggaggaatatagcatcaactggacacagaagctaggcgcagggatcagcggccctgtgcgggtatgtgtgaagaaatccacacaggaacgcttcgccctgaaaattttgctagataggccaaaggctaggaacgaggttagactccatatgatgtgcgccacacatcccaatatcgtacagatcatagaggtatttgccaacagtgttcaatttccccacgagtcaagtcccagggcaagactcctgattgtgatggagatgatggagggtggcgagctgtttcacagaatttctcagcatcgtcatttcactgaaaagcaggcctcccaggtcaccaagcaagccacccttgcacttcgccactgtcaccttctgaacatcgcacatcgggacctgaaaccagaaaaccttttgttcaaggacaacagccttgatgccccagtgaagctgtgtgacttcggctttgccaagatcgatcagggagacctgatgactcctcagttcactccatattacgtggcgcctcaagtgctggaagcccagcgtcggcaccaaaaggagaaaagcggcataatccccacctctccaaccccttatacttataacaagtcatgcgacctctggagtctcggcgtgatcatctatgtcatgctttgtgggtatccccctttctactcaaagcaccactcgaggacgatcccaaaggatatgagacggaagatcatgaccgggtcgttcgaattcccagaagaggagtggtcccagatctccgagatggcaaaggatgtcgtaaggaagcttcttaaagtgaagcctgaagagaggctgaccatcgagggggtactcgaccatccttggctcaatagcacagaggctctggacaacgtgctcccctcagcccagctgatgatggacaaggctgtggttgcgggtattcagcaagcgcatgccgaacagctggctaatatgcggatccaggatcttaaagtgtctctcaaaccattgcactccgtgaataaccctatcctgcgtaaaagaaaactcttaggaaccaagcctaaagacagcgtttacatccatgaccacgagaatggagccgaggacagcaacgtggccctggagaaactgcgcgacgtgatcgcacaatgcatcctgccacaagctggcgaaaacgaggatgaaaaattaaatgaagtgatgcaagaggcttggaagtacaaccgggagtgcaaactgctacgcgatactctgcagtcattctcatggaatgggagaggatttaccgataaggtggacaggctgaagttggcggaaatcgtgaaacaggtaatcgaagagcagaccacatcgcacgagtctcagtag

SEQ ID NO: 29524 - DNA, 1422 bp, synthetic construct
  misc_feature 1..1422: note = Description of Artificial Sequence: Synthetic coding sequence
  source 1..1422: mol_type = other DNA
atgagtgaagagtccgacatggacaaggcaataaaggagacatcaatactggaggaatactccattaattggactcagaagttgggagcgggtattagcgggcctgttcgagtttgtgtgaagaagagcacccaagagcgctttgctctgaagatccttctcgatcggccaaaggccagaaacgaggtgcgactgcatatgatgtgcgcaacccacccaaatatcgtccagatcatcgaggtgttcgcgaattcagtacagttcccccatgagtcctcccctcgggctcggttactgattgtgatggagatgatggaagggggtgaactcttccacaggatatctcaacaccgccatttcactgaaaaacaggccagccaggtgactaagcaggccaccttggctctcaggcattgtcacctgctcaatatagctcatcgtgatctgaaacccgaaaacctgctcttcaaggataactcgttggacgcccctgtgaaactgtgtgattttggatttgccaaaattgaccaaggtgacttgatgactccgcagttcacaccatactacgtcgcaccccaagtcctcgaggcacagaggcgacaccagaaagagaaaagcggtatcatccctaccagccccactccatatacgtacaacaaatcctgcgacctatggtctctcggcgtcataatatatgtgatgctgtgtggataccccccattctactccaagcaccactcccgtaccatccctaaagacatgagaagaaaaatcatgacgggatctttcgagttccctgaggaggagtggtcgcaaatcagcgaaatggcaaaagatgtagtgcgaaaactgctcaaggtgaagccggaagagcggcttacaatcgaaggtgtgttggatcatccatggttaaatagcacggaagccctggataatgtcctgccaagcgcgcaacttatgatggataaagccgtggtagcagggatccagcaagcccatgcagaacagttggctaacatgcgcatccaagatctaaaagtgagcctcaagccactgcactctgtcaacaaccctatcctgcgaaagagaaaacttctgggcaccaaacccaaggattccgtgtacatacacgatcacgagaatggcgcagaggactcaaacgtggctcttgagaagctccgtgacgtgatagcacagtgcatactgccccaagctggaaaaggtgagaacgaggacgaaaaactaaacgaagtgatgcaggaggcatggaagtacaaccgtgagtgtaagctactgcgagacacactgcaaagctttagctggaacggtcggggatttactgataaagtcgatcgcctgaagctggcagagattgtgaagcaggtgattgaagagcaaaccacatcccacgaatcccagtag

SEQ ID NO: 29525 - DNA, 2799 bp, synthetic construct
  misc_feature 1..2799: note = Description of Artificial Sequence: Synthetic coding sequence
  source 1..2799: mol_type = other DNA
atggcagccgcagctgcagtggaagccgcagctcctatgggcgctctttgggggctggtacatgatttcgtagtgggacagcaggaggggcctgccgatcaggtggcagccgacgttaaatctggaaactatacagtgctgcaagtggtggaagccctggggagctcattagagaacccagagccacggacgcgtgccagggccattcagctcctgagtcaggtgcttctgcattgccacacattacttctcgaaaaggaggtcgtgcacctcatcctattttatgagaacagactgaaggatcaccacctcgtgattccctccgtactgcaggggctgaaggccctctccttgtgtgttgctctgccgccaggcctggccgtgtcagttctaaaggccatctttcaggaggtgcacgtgcagtctctaccccaggttgacagacacacagtgtataatataatcacgaattttatgagaacgcgcgaagaggaacttaagtccctcggggcagacttcacctttggctttatccaggtgatggatggggagaaagatcctcgaaatctgctcgtagcgttccgaattgtgcacgacctgattagcagagactatagcctgggacccttcgtggaggagctgttcgaggtcacttcttgctatttcccaattgactttaccccacctcctaatgacccgcatggaatccaacgcgaggacctgattctgagtctcagggcagtgctcgctagcaccccaagattcgcagaattcctgctgccactgctgatagagaaagtcgacagcgaggtgctcagcgcaaagctggattcacttcagacccttaacgcctgctgcgctgtctacggtcagaaggagttgaaggattttctgccttccctttgggcttccatccggcgagagtcatcccagagacgcactatcctagagatgttgcttggcttcctcaagctgcaacaaaagtggagctatgaagataaggatcaacgacccctgaatgggtttaaggatcagctgtgtagtttagtgttcatggcgctcacagacccctccacccagttacaactggtcggtatcaggaccttgacggtgctgggcgctcagcctgacctgctgtcctatgaggacctggaacttgccgtgggacatctctatcggctctctttcctaaaagaagactcacagtcctgtcgcgtggccgcacttgaggctagcggcaccttagccgcactttatcccgtggccttctccagccatttggtccccaaactagcggaggaactcagggtgggggaaagtaacctcaccaacggggacgagcccactcagtgcagtcgccacctgtgctgcctgcaggccttgtccgccgtaagcacccacccttccatcgtgaaggagacccttcctctgctgttgcaacacctgtggcaagtgaatagaggtaacatggtggctcagtcctccgacgttattgctgtctgtcagtccttgagacagatggcagagaagtgccagcaggacccggagtcttgctggtactttcaccagacggccataccctgcttgctggccctggcagtacaggcttcaatgcccgaaaaggagccaagcgtgttgaggaaagttctcttggaggatgaggtgctcgcagccatggtgtccgtgatcgggactgcaaccacccacttgtcccctgagctggccgcacaatcagtgactcatattgtgcccctcttcctggacgggaacgtgagctttcttcccgaaaactccttcccatccagattccaacctttccaggacgggagcagtggacaacgaagactgatcgctctcctgatggctttcgtgtgctccttgccccgaaacgtggaaataccccagctaaaccagctgatgagagagctgctggagctcagctgttgccactcttgcccctttagcagcaccgccgcagcaaagtgcttcgcgggactgctgaataaacatccagccggacagcagttggacgaatttctgcagcttgcagtggacaaagtagaggccggactcggcagtgggccatgcaggagccaggccttcacccttctgttatgggtgaccaaggcactcgtcctgcgctaccatccactatcctcttgtctgaccgctcgtctcatgggtctcctgagtgatccagagctggggccagctgccgctgacggctttagcctcttaatgtcagactgtacagacgtactcacacgggctggccacgctgaagtacgaattatgttcaggcagcgtttttttaccgataatgttcccgcactggtccagggattccacgctgcgcctcaggacgtcaagcccaactatctgaagggcctcagtcacgttctcaatcgattacccaaacctgtactcctgccagaacttccgacgctcctgagtcttcttctggaggccctctcgtgtcccgactgtgtcgtgcagctgtctactctgagctgtcttcagcccctgctcctcgaagctccacaggtgatgagcttacatgttgatactttggtgacgaaatttctaaatctgagctccagccccagcatggctgtgcggatcgccgcacttcagtgtatgcacgcactcacccggctgccgacccccgtcttgctcccgtataaaccccaggtgatccgcgcattagctaagcctctcgatgacaagaaacgtttggtgcgcaaggaagccgtgtccgcccgaggggaatggttcctcctgggcagtcccggatcatag

SEQ ID NO: 29526 - DNA, 1092 bp, synthetic construct
  misc_feature 1..1092: note = Description of Artificial Sequence: Synthetic coding sequence
  source 1..1092: mol_type = other DNA
atgctcctgggattcctcaagcttcagcaaaaatggtcatacgaggacaaagaccagagacctctcaatggattcaaggaccaattgtgtagcctcgtgtttatggcactcacagacccttccactcagctgcagttagtaggaatccgtacactcactgttttgggagcccagccagatctgctctcctacgaagacctggagctcgcagtggggcacttatatcgcttgagcttcctgaaggaagattcacagtcttgtcgggtcgccgctctcgaagcttccggcacactagctgccctctatccagtcgcatttagcagccatttagtccctaaactggctgaggaattgcgggtcggcgagagcaatctgaccaacggcgatgagccgacacagtgttctcgccacctgtgctgcttacaggcactgtcagccgtctccacccacccatcaatcgtcaaggagaccttacctctcctcctgcaacacctctggcaggtgaacagagggaacatggtggctcagagcagcgacgttattgctgtgtgccaatcgctaagacagatggcggaaaagtgtcagcaggaccccgagtcatgctggtatttccaccaaacagccattccctgtcttctggctctggctgtgcaggcaagcatgccagagaaggagccaagcgtgctccggaaggtcttgttggaggacgaagtgctggccgctatggtgtctgtgattgggactgcaacaacgcatctgtcccctgagttggctgcgcagtcagtgacccacatagtgcccctgtttctggacggaaacgtatccttcttgcctgaaaattccttcccgagccgatttcagcccttccaggatggatcctccgggcagcgccgactgatcgcattactgatggcctttgtatgtagcctgcctagaaatgtcgagatccctcagctaaatcagctgatgcgagaacttttggaacttagctgtaccgcagccccttttttgccaccactattgccatctgcactgcaagactccagtacttccacactgcagggatcttcatggatgaactcttatagttag

SEQ ID NO: 29527 - DNA, 1128 bp, synthetic construct
  misc_feature 1..1128: note = Description of Artificial Sequence: Synthetic coding sequence
  source 1..1128: mol_type = other DNA
atgaagttggtatggcctagcgccaagcttcttcaagcagccgctggtgcctctgcgagggcctgtgatagcgtcacatccaacgtgctcccgctgctgctggagcaattccataagcatagccagtcctcacagcgtagaaccatcctggagatgttgttgggcttcctaaaattgcaacagaagtggagttacgaagataaggaccagaggcccctgaatggttttaaggaccagttatgctccttagtatttatggccttgacggatcccagcacacagcttcaactagtgggtatccggacactgaccgtactcggggcacaacccgacctgctctcctatgaggatttggagctggccgtgggccacttgtacagactttctttcctgaaggaagattcccagagttgtcgggtggccgctttggaggctagtggaacccttgccgcactatatccggtggcattcagcagccacctcgttccaaaactggctgaagaactcagggtgggcgaaagcaatctaaccaacggagacgagccaactcagtgctccaggcacctttgttgtcttcaggcattgagcgccgtgagcacccatcctagcattgtgaaggagacacttcctcttttgctccagcacctatggcaggtcaatcgaggcaatatggtggctcagtcttccgatgtgatcgctgtgtgtcaaagtctcaggcagatggccgaaaagtgccagcaggacccagaatcctgctggtactttcaccagacagctatcccgtgtttgcttgccctggccgttcaggcatcaatgccagaaaaggagcccagcgtcttacggaaagtgttgctcgaagatgaggtcctcgcagcaatggtttctgtgatcggtaccgccactacccatttatcaccagagttggcagctcagagcgtaacacatatcgtgccactgttcctcgacggcaatgtttcctttctgcccgagaactcatttccttcgcgctttcagccttttcaagtgactgatgggtcatcaggccagagacgtctgatcgcgctcctgatggcttttgtctgtagcctccctagaaatggatctagctggatgaattcctactcttag

SEQ ID NO: 29528 - DNA, 1128 bp, synthetic construct
  misc_feature 1..1128: note = Description of Artificial Sequence: Synthetic coding sequence
  source 1..1128: mol_type = other DNA
atgaagctggtttggccaagcgctaaattgctgcaggcggcagctggcgcatctgctcgcgcatgcgactcagttaccagcaacgtgctaccactactcctggaacagttccacaagcacagccagagttcccagaggcgaacaattttggaaatgctgttggggttcctcaaactgcaacagaagtggtcttatgaagacaaggatcagagacctctcaacggctttaaggaccagctgtgttcgctcgtttttatggcccttactgacccctccacacagctccagctggtgggcataaggacactgaccgtcctgggcgctcagccagatctgcttagttatgaagatttggaactcgcagtgggacatttataccgcctgtcgttccttaaagaagatagtcagtcttgccgggtagccgctttggaagcatccggaactttggcagcactttacccagtagcctttagttcccacctggtacccaagttggctgaagaactgagggttggagaatcaaatctaactaatggtgacgagcctacccagtgtagccgtcacctctgctgtcttcaagccctttccgctgtgtctacacacccttcaatcgtgaaagagactttacccctgcttctccaacacctttggcaggttaataggggcaatatggtggcccaatcttccgacgtgattgccgtgtgccagagcttgaggcagatggctgaaaaatgtcaacaggatcccgaatcctgttggtacttccaccaaactgcaataccttgcctgctggctctggcggtgcaggcctcaatgcccgagaaagagcccagcgtgttgaggaaagtgttgctcgaagatgaagtgcttgcagctatggtgtcagtgataggcaccgctactacccatcttagccctgagttggcagctcaaagtgttacccatatagtccccttgtttctagatggcaacgtgtcttttctgccagagaattctttcccctccagatttcaaccattccaggtcactgacggttcaagtggccagcggaggctgatcgctttgttaatggctttcgtgtgtagcttaccaagaaatggttcctcgtggatgaacagctacagctag

SEQ ID NO: 29529 - DNA, 2964 bp, synthetic construct
  misc_feature 1..2964: note = Description of Artificial Sequence: Synthetic coding sequence
  source 1..2964: mol_type = other DNA
atggccgctgcagccgcagtggaggctgccgcacctatgggggcactgtggggcctcgtgcatgactttgtggtgggccaacaggagggaccagctgatcaggttgccgcagacgtcaagagtgggaactataccgttctacaggtcgtcgaggcactgggatcaagccttgaaaatcccgagcctcggacgcgggctcgtgccattcagctgctttctcaggttttgctccactgtcatacattgcttctagaaaaggaggtggttcacttaatcctgttttacgagaaccgtttaaaggatcaccacctggtaatcccctccgtgcttcagggcctgaaggcattaagcctgtgtgtcgccctcccacccggtctggcagtgtctgtgctgaaggccatattccaggaagttcatgtgcagagcttgccacaggtagatcgccataccgtttacaatattatcacaaattttatgcgcacccgggaggaaggtcctttcgtggaggaactgttcgaggttacatcctgctacttccccatagactttacgccccctccaaatgacccacatggaattcaaagggaggatctcatactgtccctgagagcagtgttggccagtaccccacgattcgccgagtttcttctccctttgcttattgagaaagttgattctgaggtcctgagcgctaagttagactctctgcagacccttaacgcctgttgcgcagtgtacggtcagaaggaactcaaggatttccttccctcgctttgggcgtccataaggagggaagtgttccagaccgccagtgagagagtggaggctgagggcttggcagctctccactcactgaccgcctgtctcagccgttctgtgctgagagccgacgctgaagatcttctggactcctttctcagcaatatcctgcaggattgccggcaccacctttgcgagcccgacatgaagttggtatggccatcagccaagctcttgcaggctgcagccggagcatctgcacgggcttgcgatagtgtcacaagtaacgtgttaccgctactcctggaacagtttcataaacattctcagtcctctcagcgcagaaccatcctggagatgctgttgggtttcctgaagctccagcagaaatggagctatgaggacaaggaccagaggcctcttaatggctttaaagatcagctgtgcagcctggtatttatggcactgaccgaccccagcacacagctgcagctggtcggcatcaggacactgaccgtgctgggcgctcagcccgacctgttgtcgtatgaggatcttgaattggcagtcggccacctctatagattgtctttcttgaaggaagacagccagtcctgtagggtggctgccttagaagcaagtggtacgttggccgcactgtaccctgtggcattctcttctcatctcgttccgaaattggcagaggaactgagagtgggcgagtcgaacctcactaatggtgacgaacccacacaatgcagtcggcacttgtgttgtcttcaagcgctgtccgctgtatcgacgcaccctagtattgttaaggaaactctgcctctgctgctgcagcacttgtggcaagtcaacaggggcaacatggtggcccaaagctctgacgttatcgctgtttgccagtctctgcgccagatggcagagaaatgccagcaggatcccgagtcttgctggtactttcaccagacagctattccttgcctgctggccctggcagtacaagccagcatgcccgagaaggagccgtcggtcctgcgaaaggtgctgctcgaggatgaggtgctcgcagctatggtttcagtgatagggaccgccacaacccacctctcacctgaattagcggctcaatccgttacgcacatcgttcctctattcctcgatggtaacgtgtcattcctgccagagaattcatttcccagtcggtttcagccttttcaagacggcagcagcgggcagaggcgactcatcgctctgctgatggctttcgtatgttcgctgcccaggaacgtggagatccctcagctcaatcagctcatgcgagagctactcgaactgagctgctgccacagctgcccattctcaagtaccgcagccgctaagtgctttgccggattactcaataaacaccctgccggtcagcagcttgacgaattcctccaactcgccgtcgacaaggtggaggcgggtctcggcagcggcccttgtcgcagtcaagctttcacacttcttttgtgggtgacaaaagccctggtgctgcggtaccatcctctgtcctcatgcttaacggccagattgatgggcctgctctccgatcctgagttgggtccagcggcagctgatggtttctctctactgatgtccgattgtaccgacgtcctcacaagggccggtcatgccgaagttcgaattatgttccgacagagattcttcacagataatgtgccagcgcttgttcaggggttccatgctgcaccacaggatgttaagcccaactatctgaaggggctgtctcatgttttgaatcggttgccaaagcccgttctgctcccagaactccctacccttctgtcactgctgctcgaggctctgagctgtccagattgcgtcgtgcagctgtccacactttcctgtttacagcctctgctcctggaggctcctcaggtgatgtctctacatgtagataccttggtgacaaaatttctgaatctgtctagctctcccagcatggctgtacgaatagccgcacttcaatgtatgcacgcactgacacgattgcccacgcccgtgcttctgccttacaaaccgcaggttattagggccctcgcaaagccccttgacgataagaagagattagtgaggaaagaggccgtgtccgccagaggggagtggttcctgctcgggagccccggaagctag

SEQ ID NO: 29530 - DNA, 3093 bp, synthetic construct
  misc_feature 1..3093: note = Description of Artificial Sequence: Synthetic coding sequence
  source 1..3093: mol_type = other DNA
atggccgcagctgccgctgtcgaagctgccgcacccatgggtgcactctggggattagtgcatgatttcgttgtgggccaacaggaaggcccagccgaccaggtggccgctgatgtgaaatccggcaattacacagtgctgcaggtagtagaggccctcggctcttccctggagaacccagagccaagaacacgcgcaagggctatccagcttttgtcccaggtgctcctgcattgccataccttgttgctcgaaaaggaggtcgtgcaccttattctgttctatgagaacagacttaaagatcatcacttggtaatcccaagcgtgttacagggactgaaggcactctccctctgcgtggctctgccaccgggactggcagtaagcgttctcaaggccatcttccaggaagtccacgtgcagtctcttccgcaagtagacagacacacagtctacaacattatcaccaactttatgagaacaagggaagaggagcttaagtcattgggagccgacttcacattcgggtttatacaggtgatggacggtgaaaaagatccacgcaatctgctagtcgccttccgcatagtacacgatttaatttctcgagattacagcctgggaccgttcgtggaagagctgttcgaggtcactagctgctatttccctattgacttcacaccacctcctaacgatccccatggcattcagagagaggacctaatactgtcactcagagccgtgctggcttctactccgagattcgccgagtttctcctgccgctgcttatcgaaaaagtggattctgaagtcctgagtgccaaacttgacagcctgcagaccctcaacgcatgttgcgccgtctatgggcagaaagaactgaaggattttctccccagcttatgggcctcaattcgcagggaggtttttcagactgcctccgagcgagttgaagccgaaggcttagccgcactacactccttgaccgcatgcctgagccgttccgtgctgagggccgacgcagaggacctgcttgattctttcctctccaatatcctccaggactgccggcaccatctatgcgaacccgacatgaaacttgtgtggccttccgcgaagctgctccaggccgcagcgggagctagtgctcgggcatgcgactccgtcactagcaatgtcttacctttgctccttgagcagttccacaaacacagtcagagttcacagaggcgcacgatcctggagatgttactggggtttttgaaactgcagcagaaatggtcctacgaagataaagaccagaggcctcttaacggattcaaggaccagttgtgtagtctcgtgtttatggctctcaccgatccaagcactcaattacagttggtaggaatccgaaccctcactgtgcttggcgctcagccagatctacttagctacgaggaccttgaacttgcagtcggacacttataccgtttgagtttcctgaaggaagactcgcagagttgccgcgtggctgctctagaggccagcgggactcttgccgctctttatccggtagctttttcttcccatctggtgccaaagctggctgaagagctccgagtgggtgaatccaacctgacgaacggcgacgaacccacccagtgctccaggcacctgtgttgcttgcaggccctcagcgcagtaagtactcatccttcaattgtaaaggagactcttccattgctccttcagcatctgtggcaggtgaaccggggtaacatggttgctcaatcttctgatgtgattgcagtgtgccagagcctcagacagatggccgaaaagtgtcagcaggaccccgaatcctgctggtacttccatcagacagctatcccttgtttactcgccctcgccgtgcaagcctccatgcctgagaaggaaccttctgttttgcggaaagttcttctagaggatgaggtattagccgcaatggtgtctgtgatcgggaccgctaccactcatctcagcccagagctcgccgctcaaagtgtgactcacatcgttccgctgttcttggatgggaacgtgtcctttttacccgagaattctttcccctcccgctttcagccttttcaagatgggtcatctggacaaagaaggctgattgctctgctgatggcatttgtgtgttcgctcccccgtaatgtggaaatcccacagttgaatcaactgatgagagaactgctagagctcagctgctgccacagctgccccttcagttcaactgccgctgccaagtgtttcgcaggcctgttgaacaaacatcctgccggacaacagttagacgaatttttacagttagccgtggataaggtggaggcaggcttgggctccgggccttgccgttctcaggcgtttacactactcttgtgggtgaccaaggccctggtgctgaggtatcatcctttgtccagttgcctcaccgcccgtttaatgggccttctctccgatccggaactggggccagccgcagctgacggcttctctctgctgatgtccgattgtaccgacgtgctcactcgtgcaggccatgctgaagttcgcataatgttcagacagcggttcttcacagataatgtcccggcactggtgcaagggtttcatgcggctccacaggatgtgaaaccaaactatctaaagggactttcacacgtgctaaaccgcctgcccaagcctgttcttctccctgagctcccaacccttctgagtctccttctggaggcactgagttgtcctgattgcgtggttcaactgtcaaccctgtcatgtttgcagccactcctgctggaggcccctcaggtgatgagcctccacgtggacactctggtcaccaagtttctgaacctctcctcttcgccgagcatggcagttcgaatcgcagcgctgcaatgtatgcacgcgctgacgaggctccccacgcccgtgcttctgccgtacaagccacaggtgatacgagcccttgcaaaaccactcgacgataagaaacggctggtacgtaaggaggctgtctccgcacgaggggagtggttccttctagggagcccgggttcttag

SEQ ID NO: 29531 - DNA, 3030 bp, synthetic construct
  misc_feature 1..3030: note = Description of Artificial Sequence: Synthetic coding sequence
  source 1..3030: mol_type = other DNA
atggccgcagctgcagctgtggaggccgcagccccaatgggggcattgtgggggctggtgcacgacttcgtggtgggccagcaggaagggcctgccgatcaggtggctgcgtctagcctggaaaaccccgaaccccgaaccagagcacgggcaatacagctgctgtcacaggtgctactgcactgtcataccctcttgcttgagaaagaagtagtgcacctgattctgttctatgagaaccgacttaaggaccatcatctggtcattccaagtgtgttgcaggggctcaaagccctgtctctgtgtgtggctctccccccaggtctggccgttagcgttctgaaagctatcttccaggaggtccacgtgcaggtggaccggcacacagtgtacaacatcattacaaactttatgcgcactcgggaagaagaactcaaatctctgggagccgatttcacgtttggattcattcaggtaatggacggggagaaggacccaaggaaccttctggttgcctttagaattgtgcacgaccttatttccagggactactccctgggcccattcgtcgaagagctcttcgaagtgacctcctgttatttccccatagattttactcccccacccaacgacccacacggtatacagcgagaggaccttatactcagtttgcgggctgtgctggcatctaccccacgctttgccgaatttctactgccattgctgatcgaaaaagtggatagtgaggttctgagtgctaagctggactctctgcagacacttaacgcttgctgcgcggtctatggacagaaggagctgaaggattttttaccctccttgtgggctagtatcaggagggaagtgtttcaaaccgcctcagaaagggtggaagccgaagggttggcagcccttcactccctgaccgcctgcctttcaagatctgtgctcagagcagacgcagaggacctcctggatagcttcttaagtaatatattgcaggattgccgccaccacctttgcgagcccgacatgaagctagtgtggccctcggccaagttgcttcaggcagcagcaggcgcatccgcacgcgcatgcgatagcgtgacttccaatgtcctcccgcttttgctcgagcaattccacaagcacagccagagtagccagcggaggaccatcctggaaatgctacttggttttctcaaactccagcagaagtggtcatatgaagacaaggatcagcgacctctgaacggatttaaggaccaactgtgttccctcgtcttcatggcactaactgaccccagcacccagctgcagctagtaggaattcgaaccttgaccgttctgggggcacagccagatctgctgtcctacgaggaccttgaactggccgtaggccacctctatcgcctgtctttcctgaaagaagactcccaatcttgcagagttgcagccctcgaggcttccggaactctggccgctttgtaccccgttgccttttcttctcatctggtgcctaaactggccgaagagcttcgcgtgggcgagagtaatctgaccaacggcgatgaacccacccaatgttcccggcatctgtgctgtctgcaggctctttccgcggtctcaacacaccctagcattgttaaggaaacactacctctgctcctgcagcacctgtggcaagtgaatcgtggcaatatggtggctcaaagcagcgacgtgatcgccgtttgccagtccctgcgacaaatggccgaaaaatgtcagcaagacccagagtcttgctggtatttccaccagaccgctatcccctgtttgctagcacttgccgtgcaagcctccatgcccgagaaggaacctagcgtcttaaggaaagtgctgctggaggacgaggtcctcgctgctatggtgtctgtgattggtacagccaccacgcatctctcacctgaacttgctgctcaaagcgtgactcacattgtccccttgttcctggacggtaacgtgagttttttgcctgaaaatagcttccccagtcggtttcaaccatttcaagacgggagctccggacagcgacgacttattgctttgcttatggccttcgtgtgtagtttgccacggaatgttgagattccccagctgaatcagcttatgagagaacttctcgaactttcctgctgccactcatgccccttctcatctactgctgcagccaagtgttttgccggactcctcaacaagcacccagccggacagcagctggatgaatttctgcagttagccgttgataaggtggaagcaggtctcggctccggcccatgcagaagccaggcatttactttgttactctgggtcaccaaggccctggtcctgaggtatcaccccttgtctagctgtctgaccgcacggctgatggggctgctgtccgaccccgaacttggccctgccgcagcagatgggttttccctcttaatgtccgattgcaccgacgtcctgacgagggcaggacacgcagaggtgcggataatgttccgccagagattctttaccgataacgtgcctgctctggtgcagggctttcatgctgcccctcaggacgtcaagcctaattatcttaagggactatcccatgtgctgaatcgcctgccaaagcctgtgctgctgcccgaactgccaacactactgtctctgctcttagaggctctgtcctgccccgattgcgtggttcaattaagtactttaagttgccttcagccgcttttgctggaggctccacaagtgatgtctctccatgtggacacccttgtcacaaaatttctgaacctgagctcctccccctcaatggctgtgaggattgcagcccttcaatgcatgcatgctctcactaggctgcccaccccagtcctcctcccatacaagccgcaggttatccgcgcattggctaagcctctcgatgataaaaagagactggtacggaaagaagcggtgtccgcccgaggcgaatggttcttactcgggagccccggaagctag

SEQ ID NO: 29532 - DNA, 3093 bp, synthetic construct
  misc_feature 1..3093: note = Description of Artificial Sequence: Synthetic coding sequence
  source 1..3093: mol_type = other DNA
atggctgctgcagcagctgtcgaagccgctgctcctatgggcgctctttggggactcgtccacgatttcgtagtgggacaacaagagggacctgcagatcaggtggccgctgacgtgaagagtgggaattacaccgtactgcaggtggtcgaggcactgggctcctcacttgaaaatcctgagccgagaactcgtgccagggccattcaattactcagccaagtgctcctgcattgccatactctgttattagagaaggaggtggtacatctgatcctgttctacgagaaccggctgaaagatcaccatttagtcatcccaagtgtgctgcagggtctgaaagcactgagcctgtgcgtagcccttcctccaggacttgcagtgtctgtgctcaaggctattttccaggaggtgcatgttcagagtcttccccaggtggatcgccacacagtgtataacattattactaacttcatgcggacaagagaagaggaacttaaaagtctgggggcagacttcacttttggtttcattcaggtcatggatggcgagaaagatcccaggaaccttctcgtggcttttcgcattgtgcatgacctgatctctagggactacagtctcggacccttcgtcgaggagctgtttgaagtgaccagctgctacttccctatagatttcacccctccccctaacgatccacacggaattcaacgtgaggatctaatacttagccttagggctgtattggccagcacaccacgcttcgccgaatttctgctaccccttctgatcgagaaggtggacagcgaagtgctttcagccaaactggacagtttgcagacattaaacgcctgctgcgcagtctacggccaaaaagaactgaaggatttcttgccatccttatgggcctccatacgtagagaggtgttccaaacagcaagtgagcgcgtcgaggccgaagggctggccgcattacatagtctgactgcatgtctcagtagatccgttcttagagccgatgctgaggatctgctcgattccttcctgtccaacattctgcaagattgcagacatcacctgtgcgaacctgacatgaagctggtgtggccctccgccaagttgttgcaggcagctgcaggagcttctgccagggcctgtgactccgtgacgtcaaatgtcttgccactcctccttgaacaatttcacaagcattcacagtcctcacagcgcaggacgatcttggagatgctactaggatttctgaagctgcaacaaaaatggtcctacgaggataaggaccagcgaccactgaatggtttcaaggaccagctttgttctctcgtctttatggccctgacagaccccagcacccagctccagctggttggcatccgtactcttaccgtgctgggcgcacaacccgacctgctctcatacgaagatctcgagctagcggttggccatctttaccggctgagcttcctcaaagaggatagtcagagttgccgcgtggctgcactggaagccagtggcacactggccgcactgtatcccgtggccttctcgtcccatctggtgccaaagctggccgaggaactcagggttggagaaagcaacttgaccaacggagacgagccgacccagtgttcacggcatctgtgttgccttcaggccctgagtgcggtttctacccacccctcgattgtcaaggaaactctcccgctgctgctgcagcatctgtggcaggtgaacagaggcaatatggtggcccagtcatctgatgtgatcgccgtgtgccagtcattgcgccagatggctgagaaatgccaacaagacccagagtcatgctggtacttccaccagactgcgattccctgcttgctggccctcgctgtccaggcttcaatgcccgagaaagagccatccgtccttcggaaagtactgttggaagacgaagtcctggcagcaatggtgtccgtaattggcaccgcaacaactcacctttccccagaactggcagcccagagtgttacgcacattgtgccgttgttcctcgatgggaatgtgagttttctaccagaaaacagcttcccgagcagatttcagccatttcaagatgggtcctccggccagcgcaggctgatcgcactgttgatggcttttgtgtgctcgctcccacgaaatgtggaaataccacagctcaaccagctgatgcgggaactcctggaattgtcttgctgtcactcgtgccctttcagttcaaccgctgctgctaagtgtttcgccggtcttctgaacaaacatcccgcaggccagcagctcgatgaatttctacagctcgctgtggacaaagtcgaggcagggctaggctccggtccgtgcaggtcacaagcctttactctcctgttgtgggtaactaaggccctggtcctcagataccaccccctgagttcctgcctcacagcaagacttatgggtctccttagcgatcccgaactgggccctgcagctgcggacggctttagtctcctcatgagcgactgcaccgatgtcctgactagggccggacacgcagaagtaaggattatgtttagacaaaggtttttcacagacaacgtgccggctttggtgcagggtttccacgcagctcctcaggatgttaaaccaaattacctgaagggtttatctcatgtactgaaccgactgccgaagcccgtgctgctacctgagttacctacactgctcagcctgcttctagaggctctgtcatgtccagattgcgtggtgcagctgagtactctcagctgcctgcagccattattgctcgaagctcctcaggtgatgtcccttcacgtcgacaccctggttacgaagttcctgaacttgtccagttcgccatctatggccgtgcgaattgctgctctgcaatgtatgcatgctctgacccggctgccaactccagtgcttttaccctacaagccgcaggtcataagggcgctggcaaaacctctggatgataagaaacgcctggtaaggaaagaggctgtgtccgccagaggggagtggttccttctgggtagtcccggaagttag

SEQ ID NO: 29533 - DNA, 1734 bp, synthetic construct
  misc_feature 1..1734: note = Description of Artificial Sequence: Synthetic coding sequence
  source 1..1734: mol_type = other DNA
atgcccaaaacgatttccgtgagggtaactacgatggatgcggaactcgagttcgctatacagcctaatactaccggaaaacagctcttcgaccaagttgtcaagactattgggctccgggaagtctggttcttcggtctgcagtaccaagatacgaagggcttctcaacctggctcaagctgaataaaaaagtgacagcgcaggatgttagaaaagagtcacccctgctgtttaagttccgagcaaaattttaccctgaggacgtcagtgaagaattgattcaagatatcacacagagactcttttttttgcaggtgaaggagggcatcctgaatgatgacatctattgcccaccagagaccgcggtcctgctggcctcatacgcagtccagagcaaatatggggattttaacaaagaggtgcataagtcaggatatttagctggggacaaactgctaccccaacgtgtgctggagcagcataagctcaacaaagaccagtgggaggagcggatccaggtttggcatgaggagcaccgaggaatgttgagggaggatgcagtcctcgaatatctgaagattgcccaagatcttgaaatgtacggggtgaattacttttcaatcaaaaacaaaaaggggagtgaactttggcttggagtggacgctctgggactgaatatctacgagcagaacgatcgacttacccccaagatcggcttcccatggtcagagatccggaatatttcctttaacgataaaaagtttgttatcaagcctatcgataaaaaggcacctgatttcgtcttctatgccccacggctgagaattaacaaaaggatactggcactgtgtatgggcaaccatgagctgtacatgcgccgtagaaaacctgacaccatcgaagttcagcagatgaaggctcaggcacgcgaggaaaaacaccagaaacaaatggaaagggctatgctggagaacgagaaaaagaagagggagatggccgagaaagaaaaggagaagatagagcgggagaaggaagaactgatggagcgcttgaaacagatagaggagcaaaccaagaaagcccaacaggagttagaagaacaaacacggagagccctcgagctggaacaggagagaaaaagagcccagtctgaggccgagaaattggcaaaggaaagacaggaggctgaggaagccaaggaagcgctgctgcaggcgagcagggatcagaaaaagacccaagaacagctagcactggagatggccgagttgaccgctcgcatttcccagctggagatggcaaggcagaagaaagagagcgaggctgtggagtggcagcagaaagcccagatggttcaggaagacctcgagaaaaccagagccgaattgaagaccgcaatgtccactccccatgtagcagaacccgctgaaaacgaacaggacgaacaggacgagaacggggctgaggctagcgctgacctccgtgcagacgccatggcaaaggaccgctcagaagaagagaggaccacagaagccgaaaagaatgagcgggtgcaaaagcatctaaaagcactgacgtctgaactggccaacgcccgagacgagtcaaagaagacagcaaatgacatgattcacgccgaaaatatgcggctgggccgtgataaatacaaaactctccgccagatccggcaggggaacactaagcagcgtattgatgagttcgaatccatgtag

SEQ ID NO: 29534 - DNA, 717 bp, synthetic construct
  misc_feature 1..717: note = Description of Artificial Sequence: Synthetic coding sequence
  source 1..717: mol_type = other DNA
atgcggtttaagaacaggtttcagagattcatgaatcatagagctccggctaacggtcgatataaacctacctgctacgaacatgcagcgaactgctacacccacgcctttcttatagtgcccgcaatcgttggatccgccctgctgcatagactcagtgatgactgctgggagaaaatcacagcctggatctacggtatgggtttgtgcgcactattcatagtgtctaccgtttttcatattgtgtcctggaaaaaatcccatctgaggacagtggaacattgctttcacatgtgcgatcggatggtaatttactttttcatagccgctagttatgccccatggcttaacctcagggaattaggcccattggcatctcatatgcggtggttcatctggctcatggctgccggtgggaccatttacgttttcctgtaccacgagaaatacaaggtggtcgagctgtttttctacctgacaatgggcttttccccggctctggtggttacatctatgaataacaccgatggacttcaggagcttgcctgcggaggcctgatttattgtctgggagtcgtgttctttaagagcgatggcattatccccttcgcacacgccatatggcacctattcgttgcaactgcggctgccgtccattactacgccatctggaagtatctgtatagatcgcccacagacttcatgcggcatttgtag

SEQ ID NO: 29535 - DNA, 2127 bp, synthetic construct
  misc_feature 1..2127: note = Description of Artificial Sequence: Synthetic coding sequence
  source 1..2127: mol_type = other DNA
atgtctacagccgacgctctggacgacgagaatactttcaagatccttgtagccacagacatccatctgggtttcatggagaaagatgccgttcgagggaacgacactttcgtgaccctggacgaaattctccgactggctcaggagaatgaggtggatttcatcttactcggaggagatctattccatgaaaacaagccctcaagaaagactctacacacatgccttgaattgttaagaaaatactgcatgggagaccggcctgtgcagtttgagatcctgtctgatcagtctgtcaattttggattcagtaaatttccttgggttaactaccaggatgggaatctcaacatctctataccagtgttttcaatccatgggaaccacgacgaccccaccggagcggacgccctgtgtgcattggacattctctcatgcgcaggtttcgtcaatcattttggtcggtccatgtctgtcgagaaaatcgacattagccccgtgctgttgcagaaaggctctaccaagattgcgttgtacggtctgggctcaataccggatgaacggctgtaccggatgtttgtgaataagaaagtcacaatgctgaggccaaaagaagacgagaattcttggttcaacctgtttgtgatccaccagaatcgctctaaacacggatcgactaatttcattccagagcagttcttagatgactttatagaccttgtgatctgggggcacgaacacgaatgtaagatcgcacctaccaaaaatgagcagcagctgttctatataagccagcccggttcgtccgtcgtgacttctttatctcctggggaggcagttaaaaagcatgtgggactcctcagaattaaagggcgaaaaatgaatatgcataagattccactgcacacagtcaggcagttttttatggaggacattgtgctggctaatcaccctgatatattcaatccagacaatcccaaagtgacgcaagccatccagtccttttgtttagaaaaaatagaggaaatgcttgagaatgcagagagggagaggctgggcaacagccaccagcccgagaaacccctggtgcggttgagggttgactatagcggaggattcgaacccttctctgtgctccggttcagtcagaagttcgtggatagggtcgcaaatcctaaagacatcatccatttttttaggcaccgggagcaaaaggaaaaaacaggggaagaaatcaactttgggaaactcattacgaaacctagtgagggaacgaccctgagggtcgaggacctcgtcaaacagtatttccaaaccgcagagaaaaacgtgcagctttcgcttttaacggaacgaggcatgggagaagctgtacaggaattcgttgataaggaagagaaggacgcgattgaagaacttgtcaagtaccagctcgagaaaacccagagattcctgaaggagcgccacatagacgccctggaagataagatcgacgaggaggtgcgtagatttagggagacacggcagaagaacactaacgaggaggatgacgaggtccgggaagccatgactcgcgctcgagctctacgcagtcaatcagaggagagtgcgagcgccttttctgccgatgatctgatgtcaatcgatttagccgaacagatggccaacgatagcgacgactccatcagtgcagccaccaacaagggacgcggacgaggaaggggcagaaggggcggtcggggacaaaacagtgccagtagaggcggttcacagcggggacgagccgacactggtttggaaacaagcactcgaagtagaaacagcaagacggccgtgagcgcctctagaaacatgagtatcatcgatgcttttaaaagcacaagacagcagccctcacggaatgtaactacgaaaaactatagtgaggtgatcgaagttgatgagagcgacgtggaagaggatattttccctaccacctccaagacagatcagaggtggtccagtacttcaagttctaagattatgagtcaaagtcaggttagcaaaggcgttgacttcgaatctagtgaagatgacgatgacgatccttttatgaatacatcaagtttaagaagaaacagacgctag

SEQ ID NO: 29536 - DNA, 2043 bp, synthetic construct
  misc_feature 1..2043: note = Description of Artificial Sequence: Synthetic coding sequence
  source 1..2043: mol_type = other DNA
atgtccaccgctgacgcactggatgacgagaacactttcaaaattctagtagccacagatattcatctcggattcatggagaaggacgcggtccggggaaatgacacgttcgttacacttgacgagatcctaaggcttgcccaggagaatgaggtcgattttatactccttggaggcgatttgttccatgagaacaaaccgagccgaaagactctgcacacttgcttggaattgttgagaaagtactgtatgggggacaggcccgtccaattcgaaattctgtcagaccaaagcgtcaacttcggcttctctaaatttccatgggtgaactatcaggacggtaaccttaatatcagcatccctgtcttttcaatacatggcaatcatgatgaccccaccggagcggacgccttatgcgccctggacatcctgagttgtgccggatttgtcaaccactttggtaggtctatgagcgttgaaaaaatagacatctctcccgtacttctgcagaagggtagtacgaagattgctctttacggattgggtagtatcccagacgaacggctctataggatgtttgtgaataaaaaggtaaccatgttgcggccaaaagaggatgaaaactcctggtttaacttattcgtcattcaccagaacaggtcgaagcatggcagcaccaactttattcctgaacaattcttggacgactttatagatctggtcatatggggtcatgaacacgagtgcaaaatagccccaaccaaaaatgagcagcaactgttctacatatcgcaacctggctcttccgtggtcacttctctctctcccggtgaggccgttaagaagcacgtgggactacttcgtatcaaaggcagaaagatgaacatgcataaaattccgctacatacagtccgacagttctttatggaggatatagtgctcgcaaaccaccccgacatctttaacccagataaccccaaggtgacccaagccatacaaagcttttgtctagagaagatcgaagaaatgttggagaacgccgaacgcgaacgcttggggaatagccaccagccagagaagccactcgtaaggttaagggtggactattccggaggatttgagcccttcagcgttctccgcttttcccaaaagttcgttgaccgcgtagcgaaccctaaagatatcatccactttttccgccaccgagagcagaaggagaaaactggtgaggagattaatttcgggaaactgattacgaagcctagtgaggggacaaccctgcgtgtcgaggatctggtaaaacagtacttccagactgcagaaaaaaatgttcagctgagcctgcttactgagaggggaatgggcgaggctgtgcaggagttcgtggataaagaggaaaaggatgccatcgaggaacttgtgaaataccagctggagaagacacaacgctttctcaaggagcggcacatcgacgctctggaagacaaaatcgatgaggaggtgaggaggttcagagaaaccagacagaaaaacacaaatgaggaagatgacgaagtgcgcgaagccatgactagagccagagctctgagatcccagtctgaagagtctgcatccgcatttagcgccgacgatctgatgagcatcgatctggcggagcagatggcaaacgactccgacgattctatttcagctgcaaccaacaaaggcaggggcaggggccgtggcaggaggggaggaagaggccagaatagcgcgtcacgcggtggctcgcaaagaggaagagcctttaaaagcacgaggcagcaaccttcacggaacgtgaccacaaagaactatagtgaagtaatcgaggtcgacgagagtgatgtcgaagaggatatcttccctaccacctccaaaaccgaccagcgttggagttcaacttctagctctaagattatgagtcagtctcaggtctctaaaggagtggacttcgagtcttccgaggacgacgacgacgatccattcatgaacacttcttctttgcggaggaacagaagatag

SEQ ID NO: 29537 - DNA, 2124 bp, synthetic construct
  misc_feature 1..2124: note = Description of Artificial Sequence: Synthetic coding sequence
  source 1..2124: mol_type = other DNA
atgagcacagcagatgcgttggacgacgaaaacacctttaaaatattggtggcaacagatattcaccttgggttcatggaaaaggacgccgttaggggcaacgatacctttgttactctggacgaaattctgaggctggcccaggaaaatgaagtggactttattctgctgggaggcgacctttttcacgaaaataagccctcgcgtaagaccttgcatacatgtcttgagttgttgaggaaatactgcatgggagatcgcccagtgcaattcgaaattctgtcagaccagtcagtaaactttggattctccaaattcccatgggtaaattatcaggacggtaacctgaatatcagcatccctgtgttcagcattcatggcaatcacgatgacccaaccggggcagacgcactgtgtgccttagacatactttcttgcgcaggcttcgttaatcacttcggacgatcaatgagtgtcgagaagattgatatatccccagtcctgctgcaaaaaggctccactaagatcgccctgtatggcctagggtcgatccctgacgagcgactctatcgaatgtttgtgaacaaaaaagttacaatgcttcgtcctaaagaggacgaaaacagctggtttaatctgtttgtgatacaccagaataggtctaaacatggatccacgaatttcattcccgaacagttcctggatgattttattgatctggtgatttggggccatgagcatgaatgcaagatcgcacccaccaagaatgaacagcagctgttctacattagccagccgggttcatctgtggttacatctctgagtccaggagaagccgttaaaaaacacgttggccttcttcggatcaaaggccgtaaaatgaatatgcataagatccctttacatacagtaaggcagtttttcatggaggacatcgtgctcgcaaatcaccccgacatctttaacccagataatccaaaagttacccaggcaatccagagcttttgtcttgaaaagattgaagagatgctggaaaatgcagaaagagaacgcctcggcaactcgcaccagccggaaaaaccacttgtgaggctgagggtggattactctggaggctttgagcccttttccgtgctgcggttcagtcagaagttcgtggaccgggtggccaaccctaaagacattattcactttttcagacacagggaacagaaagaaaaaaccggggaagagatcaacttcggaaagttgataacaaagcccagcgaaggaacaacactgcgtgtcgaagatctggttaaacagtatttccagacagccgagaagaacgtgcaactgtcccttctcaccgaaagggggatgggggaagccgttcaggagtttgtggataaagaagaaaaggatgccattgaagaactggtcaaataccagctggagaagacccagaggtttctaaaggaacgtcatatagatgctctggaggataaaatagatgaggaagtgcgacgattccgcgaaactcggcagaaaaataccaacgaggaggatgacgaggttcgcgaggcaatgaccagagcaagggcactgagatcacaatctgaagagagtgccagtgctttctctgccgacgatctgatgtctatcgacttagccgagcaaatggcaaatgatagtgatgatagcatcagcgctgcaactaataaagggaggggcaggggacggggtcgcagaggcggtcgcggacagaactctgcgtcccggggtgggagtcagcgtggacgcgatacagggttggaaacctcgaccaggtcccggaactccaagacagctgtgtctgcctctaggaacatgtcgatcatcgatgcgttcaagtccactaggcagcaacctagtcgcaacgtcactacaaagaactatagtgaggtgatagaggtggatgagtccgacgtggaagaggacatttttcctacaacttctaaaaccgatcaaagatggtcatctacatcatcctccaagatcatgtctcagagccaagtttcaaagggcgtggacttcgagtcctcagaggacgatgatgacgaccccttcatgaacacatcatccctgcggagaaatcgacgctag

SEQ ID NO: 29538 - DNA, 2136 bp, synthetic construct
  misc_feature 1..2136: note = Description of Artificial Sequence: Synthetic coding sequence
  source 1..2136: mol_type = other DNA
atgaaccgaaacatctcccaccagaagggggatgacgagaacacattcaagatactggtcgcaactgacatccaccttggatttatggagaaggatgccgtccggggaaacgatacattcgtcaccctggacgaaattctgcgcttggctcaagagaatgaagtagattttattttgctcgggggagatttgttccacgagaacaagccaagtaggaagaccctccacacctgcctcgaactcttgcgcaaatactgcatgggagaccgaccagtgcagtttgaaattctcagtgatcagtccgtcaacttcgggttttctaagtttccttgggtgaactaccaggacggaaatcttaatatcagcataccagtgtttagtattcacggtaatcatgatgaccccactggggctgatgctttatgcgccttggatatactgagctgcgctggcttcgtgaatcactttggcagatcaatgtcagtggaaaaaatagacatctcccccgtactcctccagaagggatcaaccaaaattgctctctatgggctgggatctattcccgacgaaaggctataccggatgttcgtcaataaaaaagtgactatgctgcggccaaaagaagatgagaatagctggttcaatctatttgtgattcatcagaatcggtctaagcacggctctacaaacttcatccccgagcagtttctggacgattttatagatctggtgatctggggacacgaacacgaatgcaaaatagcacccactaagaacgaacagcagctgttttacatctcccagcctggctcatctgttgtcaccagtctaagcccaggcgaagccgtcaagaagcacgttggcctcctgcggattaagggtagaaagatgaacatgcataagattcctctgcataccgtccggcaattcttcatggaggatatagtacttgccaatcaccctgatatttttaacccagataatcccaaagtcacccaagccatccagagcttttgtctggagaagatcgaggagatgctggagaacgcggagagagagcggctgggcaactctcatcagcccgaaaaacccctggtcagattacgagtcgattattccgggggatttgaacctttctcggtactgagattctcccagaaattcgtcgaccgagtggcgaatccaaaagacatcattcattttttccggcatagggaacaaaaggaaaagacaggcgaagagatcaatttcggcaagctcataactaagccttccgaaggaactaccctgagagtggaggatcttgtcaaacaatacttccaaactgcggagaaaaacgtccagcttagcctgcttaccgagcgcggtatgggggaagccgtgcaggagtttgtcgataaggaagagaaggatgccatcgaagagcttgtcaagtatcagctggaaaagacccaacggtttctcaaagagcggcacattgatgccctggaggataagattgatgaggaagtcagaaggttccgggaaactaggcagaaaaataccaacgaagaggacgacgaggtccgcgaagctatgacccgggctagagccctgcggtcccaatctgaggaaagcgctagcgctttctccgctgatgatctgatgtctattgacttggccgaacagatggctaatgattctgacgatagcatcagcgcagcaaccaataagggcagaggcaggggtagggggagacggggtggcagaggtcaaaattctgcctcaaggggcggttcacaaagaggcagggctgacaccggtttggagacatcgacgagatctcgtaactcgaaaaccgctgtcagtgcttcccggaatatgagcattatagatgcattcaagtccacaagacaacagccaagcagaaacgttacgaccaagaactacagcgaagtgattgaggtggacgaaagtgacgtggaagaggacatctttcccaccaccagcaagacggatcagagatggagctccacaagctcatctaaaataatgtcccagtcgcaggtgagtaaaggcgtcgatttcgagtcttctgaagatgatgatgatgaccccttcatgaacactagttccctgcgtcgtaacagaagatag

SEQ ID NO: 29539 - DNA, 384 bp, synthetic construct
  misc_feature 1..384: note = Description of Artificial Sequence: Synthetic coding sequence
  source 1..384: mol_type = other DNA
atgtcaacagccgatgctctagatgacgagaatacattcaagattttggtagccacggacatccacctcggcttcatggagaaagacgccgtgagaggcaacgacactttcgtcactctggatgagattttgcggcttgcacaagagaacgaagttgacttcatcttgcttgggggagaccttttccatgaaaataagccatccagaaagaccctgcacacctgtctggaactcctgagaaagtactgtatgggggataggcccgtgcagttcgaaattttgagcgatcagtccgtcaatttcggattttcgaagttcccctgggtcaattatcaggatggaaatttgaacattagcatccctgtcttcagtatccatggttag

SEQ ID NO: 29540 - DNA, 336 bp, synthetic construct
  misc_feature 1..336: note = Description of Artificial Sequence: Synthetic coding sequence
  source 1..336: mol_type = other DNA
atgtctacagccgacgcactggatgatgagaacaccttcaaaatcctggtggccaccgatattcacctggggtttatggaaaaagatgctgtgagagggaatgatactttcgtgaccttggacgagattcttcggctggcccaagagaacgaagtggactttatactgttagggggtgacttgttccatgaaaacaaaccttcacgcaaaaccttgcacacttgtctggaactgctgcggaagtactgtatgggtgacaggccagtccagttcgaaatcctctctgatcagagcgtgaacttcgggttctccaaattcccatgggtgaactattag

SEQ ID NO: 29541 - DNA, 666 bp, synthetic construct
  misc_feature 1..666: note = Description of Artificial Sequence: Synthetic coding sequence
  source 1..666: mol_type = other DNA
atgagtactgccgatgctttggatgatgaaaacacatttaagattcttgtggcgaccgatattcacctcggttttatggagaaggatgcagtgagagggaacgacaccttcgtcactttggacgaaattttgcgcctagctcaggagaatgaggtggatttcatcttgttgggtggcgatctttttcatgagaataagccttcacgtaagactctgcatacttgccttgaactacttaggaaatactgtatgggcgacagacctgtgcagttcgagattctttccgaccagtcggttaacttcggcttttccaaattcccttgggttaactaccaggacggaaatctgaacattagtatccccgtatttagcattcatggaaatcatgatgaccccacaggtgctgatgcactctgcgcgctcgacatcctgtcctgcgccggatttgttaatcacttcggacggagtatgtccgtggagaagattgatatttcacccgttctactgcagaaaggcagcaccaagatagctttatacggtctcggcagcattcctgatgagcggctgtatcgtatgtttgtcaacaagaaagttactatgctcagacctaaggaagatgaaaactcatggtttaacttgtttgtgattcatcaaaacagggtgtag

SEQ ID NO: 29542 - DNA, 822 bp, synthetic construct
  misc_feature 1..822: note = Description of Artificial Sequence: Synthetic coding sequence
  source 1..822: mol_type = other DNA
atgactcctggtactcagtctccctttttccttttgctcctcctcaccgttcttaccgtggtaaccggctctggccacgcatcctctactcccggaggggaaaaagagacctcagcaacccagaggagtagcgtgccttccagcaccgagaaaaatgccctgtctactggcgtgtcctttttttttctgtccttccacattagcaatctgcagtttaactccagcctggaggacccgtctaccgattactaccaggagctccaacgagatataagtgagatgtttctgcagatatacaaacagggcggtttcctgggcctgtccaacattaaattcaggcccggtagcgtggtggtgcagctcacactggccttccgtgagggtaccatcaacgtgcacgatgtggagacacaattcaaccagtataagacagaggctgcttctcgatacaacttaaccatttccgacgttagcgttagcgacgtcccattcccattctccgctcagagtggcgctggggtgccgggatggggcatcgcccttctggtgctggtgtgcgtcctcgtcgccttagccatagtctacttaatcgccctggcagtgtgccaatgcaggagaaagaattacggccagcttgatattttccccgcaagggatacataccaccccatgtctgagtacccaacttaccacactcatggtaggtacgttccgccaagctcaacagatcgctcaccttacgagaaggtgtctgctggtaacggcggatcctcattaagttacactaatccagcagtggctgccacttctgctaacctctag

SEQ ID NO: 29543 - DNA, 675 bp, synthetic construct
  misc_feature 1..675: note = Description of Artificial Sequence: Synthetic coding sequence
  source 1..675: mol_type = other DNA
atgacccccggtacccagagccctttttttctccttttgctacttaccgttctgaccgccactacagcgcctaaaccagcaactgtggtcactggctctgggcacgctagttcaactcctggtggagaaaaggaaaccagcgcgacgcagaggtcaagcgtcccttcttctaccgagaagaacgcctttaggcccggttccgttgtggtgcagctaacactggctttcagagaggggacaataaacgtccatgacgtggaaactcaatttaatcagtacaagacggaggccgcttcccggtacaacttgactatttccgacgtgtctgttagcgacgtaccgtttcctttcagcgctcagtccggggctggggtccccggttggggaattgctttgctggtccttgtttgcgttctcgtagccctggctatcgtgtacttaatagccctggcggtctgtcagtgcaggaggaaaaattacggccaattagacatcttccctgctcgtgacacttatcaccccatgagtgaatatcctacctaccacactcacggcaggtatgtcccaccatccagcactgaccggtccccttacgaaaaagtcagcgccggtaacgggggatcctccctgtcctatacaaatcccgctgttgccgcaacatctgcgaatctgtag

SEQ ID NO: 29544 - DNA, 501 bp, synthetic construct
  misc_feature 1..501: note = Description of Artificial Sequence: Synthetic coding sequence
  source 1..501: mol_type = other DNA
atgactcctggcactcagtcaccattttttctgctgctcctgttaacggttctcacagctactactgcaccaaaacctgcgactgtggtgaccggatcaggccatgcttccagtactccaggtggagagaaagagacgagcgccacacaacgcagctccgtgccaagcagtactgagaaaaatgcctctggagcaggagtccctggatggggtatagctctgttggtgctggtgtgtgtgttggtcgcgctagccatcgtctacctgattgccttagccgtctgtcagtgccggcgtaagaactatggccagctcgatatcttcccggctcgggacacctatcacccaatgtctgagtatcctacatatcatacccacggcaggtatgtgccacccagcagcactgacagaagcccttatgagaaagtgtccgccggaaacggcggatcctccctgtcctataccaaccccgctgttgccgctaccagcgcaaatctctag

SEQ ID NO: 29545 - DNA, 612 bp, synthetic construct
  misc_feature 1..612: note = Description of Artificial Sequence: Synthetic coding sequence
  source 1..612: mol_type = other DNA
atgactcccggaacccagagcccattcttcctgctgcttttactcacagtgctgactgtggtgacaggatccggccacgccagcagcacgcccggaggagagaaagaaacgtctgcaacacagaggtccagtgtaccatccagtacagaaaagaatgccattcctgcccctactacaacaaagtcatgtcgggagactttcttaaagtgtttctgccgctttatcaacaaaggcgtgttctgggcatctcctatactctccagtgtgagtgatgtcccgtttccttttagcgcccagtctggcgctggcgtccccggatggggtattgctctgctggtgttggtctgcgttctcgttgctctggccatcgtttacctgatcgccctcgcagtttgtcagtgtagacgtaaaaactatggccaactggacatttttcccgcacgagacacttatcatccgatgagcgaatacccaacgtatcacacgcacggccgatatgttcccccttcctcaacggatcggtccccctatgagaaggtgtcagctggcaacggaggatcatccttatcttacacaaaccccgctgtggcggctacctcagccaacctctag

SEQ ID NO: 29546 - DNA, 507 bp, synthetic construct
  misc_feature 1..507: note = Description of Artificial Sequence: Synthetic coding sequence
  source 1..507: mol_type = other DNA
atgacccctggaacacagagcccatttttccttctgctgcttctgaccgttctgacggtggttaccggcagtggacatgcctcctcaacaccaggcggagagaaggaaacgtccgctacacaaagatccagtgtcccctcctccacagaaaagaatgcactgtcaactggggtctctttcttttttctctctttccacatctccaacctgcaattcaactcctcactggaagatccaagcacagattactaccaggagttacagagggatatttcggagatggccgtctgccaatgtaggagaaagaattacggccagctcgatatctttccagccagggacacataccacccaatgagcgaataccccacctatcacacccacggacgatacgttcctcctagcagcactgatcggagcccctacgagaaggtcagtgccggaaacggaggaagcagcctttcgtacacgaatccagctgtcgctgctactagtgcaaatctttag

SEQ ID NO: 29547 - DNA, 768 bp, synthetic construct
  misc_feature 1..768: note = Description of Artificial Sequence: Synthetic coding sequence
  source 1..768: mol_type = other DNA
atgaccccgggtactcagtcaccattctttctccttctcctgctgactgtgctgacagtggtgacgggatcggggcatgcctcttcaacaccgggaggagaaaaagaaacctccgcaacgcagcgtagctccgtcccatcctcaacagagaagaatgcttttaacagttctctggaagacccatctaccgattactaccaggagcttcaaagggatatttcggagatgttcctgcaaatttacaaacagggaggctttctgggtctgagtaatatcaaatttcgtcccggaagtgtagtcgtccagctcactctggcctttcgagagggcaccattaacgtccatgacgtggagacccagttcaaccaatacaaaactgaggccgcatcaaggtataatctcacaatcagtgacgtgtcagtgagcgacgtgccttttccttttagtgctcagagcggcgctggcgttcccggatggggaattgcgctcctagtgttggtgtgtgttctggtggcactggcgattgtgtacctaatcgccctggctgtctgtcagtgccgccgaaaaaactatgggcagctggatatttttccggctcgggatacatatcaccccatgtccgaataccccacctaccatacccatgggcgttacgtgccccctagttcaacagatcgcagtccctacgagaaagtgtctgcaggaaacggtgggagctcactctcttacactaatcctgccgtagccgctacaagcgccaacctatag

SEQ ID NO: 29548 - DNA, 795 bp, synthetic construct
  misc_feature 1..795: note = Description of Artificial Sequence: Synthetic coding sequence
  source 1..795: mol_type = other DNA
atgacccctgggacacaatcccctttttttctgctgctgttgctaaccgtgctgacagccacgaccgcgccaaagccagctacagtggtaactggctcaggacatgcctcaagcactcccggaggagagaaggagacttccgccactcaaaggagcagcgtgccttccagcaccgagaagaacgcctttaactcatcacttgaggatccaagtacagactactatcaagaactgcagcgcgacatttccgagatgtttctgcagatctacaagcagggcggattcttggggctctccaatattaaatttaggccaggaagtgtggtagtgcagctgacactggcctttagggagggcacaatcaatgtgcacgatgttgagacccagtttaaccaatacaagaccgaggccgcatctagatataatctcaccattagtgacgtgtctgtgtccgacgtgccattcccttttagcgcgcagtccggtgccggtgttccgggttggggaatcgcattgctcgtgttagtatgtgtgctcgttgcattggcaatcgtgtatctgatcgcccttgccgtgtgccaatgtcgccgaaagaactatggtcagttggatatctttccagctcgagacacttatcatccaatgtccgagtaccctacctaccatacccacggccgttatgtccctccgtcttctactgacagatccccgtacgaaaaagtgtctgccggtaacggtgggtcttctctgagctacaccaatcccgcagttgccgctacctccgctaatctgtag

SEQ ID NO: 29549 - DNA, 597 bp, synthetic construct
  misc_feature 1..597: note = Description of Artificial Sequence: Synthetic coding sequence
  source 1..597: mol_type = other DNA
atgacccccggaactcagtccccattctttttactcttgctgctcaccgtgctgaccgtggtaactgggagtggccatgcatctagtactcccggtggggaaaaggaaacatcagcaacccagagatcttccgtccctagcagcaccgagaagaacgctctcagtacgggcgtgagctttttctttctcagcttccatataagcaacctgcagttcaattccagcctggaagatccatctactgactattatcaggaactccaacgtgatatcagcgagatgttcttgcagatatacaaacagggcggttttctaggtctttccaatattaagtttaggccaggcagcgtcgtggtacaactgactctcgctttcagggaaggcaccataaacgtgcatgatgtggaaactcagtttaaccagtataagaccgaagccgcttcccgttacaacctcaccatttccgatgtgagtggctgcttgtccgttcccccaaaggaactgcgggctgcaggccatcttagctctccgggatatctcccatcgtacgaacgggtccctcatctgccacatccatgggccttgtgcgccccatag

SEQ ID NO: 29550 - DNA, 1428 bp, synthetic construct
  misc_feature 1..1428: note = Description of Artificial Sequence: Synthetic coding sequence
  source 1..1428: mol_type = other DNA
atgacacccggaacacagtcaccatttttcctgttgcttctgttgacagtcctcaccgtggtgacagggagcggccacgcaagttctacccccggaggagaaaaggaaacctctgcaacacagcgatcatcggtgccgtcaagtaccgagaaaaacgccgtgtccatgacctcaagcgtattatctagccacagccccggaagtggctcgtcgaccacccaaggccaggatgtgaccctggcgcctgctaccgagcccgcatcagggtcagccgctacgtggggacaagacgtcaccagcgtgcccgtcacaaggccagcccttggctctacaacgccgcctgctcatgatgtgacttccgccccagacaataagcccgctcctggcagtactgcgccacctgctcacggcgtcacctccgcaccagacacccggcctgcacccggttctacagctcccccagcccatggagtgacgtcggctcccgacaaccgccctgcccttggctcaaccgccccaccggttcacaacgtcaccagcgccagcggtagcgccagtggtagtgcttccacccttgtccacaacggcacttccgctcgagctacgactacgccagcatctaagagcaccccattctccatcccctctcatcacagcgacaccccaactacactcgcaagccattccacaaagacggacgcctcaagcactcaccacagcacggtgccccctctaacctcctcaaaccattccaccagcccccaactctcaactggtgtgagctttttctttctgtctttccacattagcaacctgcaatttaatagcagcctcgaggatcccagtaccgactattaccaggaattacagcgagacatcagcgagatgtttctgcaaatctacaagcagggaggatttctcggattgagcaatatcaaatttagacctggttccgttgttgtgcaactcactctcgcttttcgggaagggacgattaatgtgcatgacgtggagactcagttcaatcagtacaaaaccgaggccgcatctagatacaacctcaccattagtgatgtcagtgtgtctgacgtaccatttccattttctgctcagagcggagctggggtccccggatggggcattgccttacttgtcctcgtgtgtgttctggtcgctctggccatcgtatatcttatcgccctggctgtctgccaatgcagacggaaaaactacggtcagctggatattttccccgcaagggacacatatcaccctatgtctgaatacccaacctatcacacgcacggacgatatgtgccccctagctcaacagacagatcaccgtacgagaaggtcagcgccggaaatgggggatcatctctgagttacacaaatcccgctgttgccgctacatctgcaaacctgtag

SEQ ID NO: 29551 - DNA, 480 bp, synthetic construct
  misc_feature 1..480: note = Description of Artificial Sequence: Synthetic coding sequence
  source 1..480: mol_type = other DNA
atgacacccggaacacagagccctttttttttactgctgcttctgacagtgcttacagctacaactgctccaaagccagccaccgtcgtaacaggcagtggccacgccagtagcacacctggaggtgagaaagagacctcagctacccagaggtcgtcagttcctagctctacggaaaaaaatgcattcaatagctctttggaggacccttcaacagactactatcaggagctccagcgtgacattagtgagatggcagtgtgccagtgcaggcggaagaactacggtcagcttgacatattccctgcacgggacacttaccacccaatgtcggagtatcccacgtaccacactcacggcagatatgtaccaccctcatctaccgaccgcagtccctacgaaaaggttagcgccggaaatgggggttccagcctgtcatacaccaaccccgctgttgcagccacgtccgcgaatttatag

SEQ ID NO: 29552 - DNA, 693 bp, synthetic construct
  misc_feature 1..693: note = Description of Artificial Sequence: Synthetic coding sequence
  source 1..693: mol_type = other DNA
atgacccctggtacgcaaagcccattttttttgcttctgctgctcacagtgctgactgtagtgacggggtctgggcacgcctcttctacgcccggaggggaaaaggaaacttctgcaactcagcgtagttccgttccatcctctacagagaaaaatgccattcccgctcccacaacgacaaagagttgcagagaaacgttcctaaagtggcccggaagcgtagttgtgcagctaactctcgcgtttcgagagggcaccataaacgtgcacgatgtcgaaacacagttcaatcagtacaaaacagaggcggcttcaagatataacctgaccatctccgacgtgtcagtaagtgacgtgcccttcccttttagcgctcagtccggagcaggggtgccagggtggggcatcgctctgcttgtgctcgtctgcgtgctggttgccttggccattgtttatcttattgcattagccgtttgccagtgtaggcgcaaaaactatgggcagctggacatattccccgctagggacacataccacccgatgtctgagtaccccacctaccatacccatggccgatatgtgcctcccagctccaccgatcgatccccttacgaaaaggtgagcgccggaaatggcggtagtagcctgtcttatacgaaccctgccgtcgctgccacctctgccaacctctag

SEQ ID NO: 29553 - DNA, 1686 bp, synthetic construct
  misc_feature 1..1686: note = Description of Artificial Sequence: Synthetic coding sequence
  source 1..1686: mol_type = other DNA
atgacacctggcacccagagcccctttttcctccttctcctgctcacagtactcaccgtcgtgaccggctctggccacgctagctctactcctggtggtgaaaaagaaacaagcgcaacccaaagaagcagtgtgccatcatctaccgagaagaatgctgttagcatgactagcagtgtactgagtagccatagccccggatctgggagctcaaccacccaggggcaagatgttacgctcgccccagccacagaacccgcaagcggcagcgccgctacttgggggcaagacgtgaccagcgtcccagtgacaagaccagccttgggctctactacaccacctgcgcatgatgtaacgtcagcacccgacacaagacctgcccctggctcgactgcacctcccgctcacggggtaacaagcgccccagacacccgccctgcacctggttccaccgccccacctgcccatggggttacctcagcccctgatactaggcctgcgccaggatcgactgcgccacctgctcacggcgtgactagcgcgcctgatacgagaccagccccagggagcaccgcccctcccgctcatggagttacaagtgcccctgatactagaagagcaccagggtcaacccccgcaccaggatctacagctccaccggctcacggcgtcacgtccgcccctgatacccgaccagctccaggttctaccgctcccccagcccacggagtgacctcggctccagacaatagacccgcactcggctcaacagctccgccagtccacaatgtaacttccgcttcagggagcgccagtggaagtgcgtccacactggtccataacggaacatcagccagagccactacgacgcccgcaagcaaatcaaccccttttagcattccgagccaccactctgatacaccaactaccctggccagccatagcacaaaaaccgatgccagctcaactcatcatagcaccgttcctcccctaacgtcatccaatcattccacctccccccagctctcaactggagtgtcctttttttttctaagttttcacatatcaaatcttcaatttaattctagcctggaagacccctccacggattattaccaagagctccagcgcgatatatcagaaatgttcctccaaatctacaagcagggtggattcctgggcctcagtaacatcaagtttagacctggctctgtcgtcgttcagctaacactggctttccgagagggcacaataaacgtacacgacgtcgaaactcagttcaatcagtacaaaacggaggcggcatctcggtataatttgaccatctctgacgtctccgtatccgacgtcccattcccgtttagtgcccagagcggtgccggtgttcccggttgggggattgccctactcgtgctcgtttgcgtcctggtggcacttgctatagtttacctgatcgctttagccgtctgtcaatgcagaagaaagaattatggtcaattggatatatttcctgcccgagatacataccaccctatgagcgagtaccccacctaccatacacatggcaggtatgtgcctccttcctcaacggaccggagcccttacgaaaaggtgagcgctgggaatgggggatcatccctttcttatacaaatccagctgttgcagcaacttctgcaaacctgtag

SEQ ID NO: 29554 - DNA, 690 bp, synthetic construct
  misc_feature 1..690: note = Description of Artificial Sequence: Synthetic coding sequence
  source 1..690: mol_type = other DNA
atgactcctggtacccagagtcccttctttctgctactgctcctgaccgtccttaccgtggttactggatccggacatgcctcatcaactccgggtggggagaaggaaacatcagccacacagcggtcctctgttcccagttctaccgaaaagaacgctatctataaacagggaggattcctcggattaagcaatatcaagttccgcccaggtagcgtcgtggtccagctgactctcgcttttagagaaggtaccatcaacgtacacgacgtcgaaactcaattcaatcagtacaaaaccgaggcggctagccggtacaatctgacaatctctgatgtgagtgtgagtgacgttccctttccttttagcgcccagtccggcgctggtgtgcccggatggggcattgcgcttctggttttggtgtgcgttttggtcgcactcgcgattgtttatttaattgctttggctgtatgccagtgtcggagaaaaaactatggccaactagatatctttccagctcgagatacctatcaccccatgtccgaatacccgacataccatacccatggacggtacgtcccaccatcctcgaccgataggtcaccttacgagaaagtgagcgccggaaacgggggaagttcattgtcctatacgaacccagccgttgccgctacgtccgctaacctgtag

SEQ ID NO: 29555 - DNA, 780 bp, synthetic construct
  misc_feature 1..780: note = Description of Artificial Sequence: Synthetic coding sequence
  source 1..780: mol_type = other DNA
atgactcccggaacgcagagccccttcttcctgcttctgctgttgacggtcctgaccgcgaccactgcacccaaaccagccacagtggttactggatcaggacatgcttcctccaccccaggtggagaaaaggaaacatctgcaacacagaggagcagtgtcccatcctcgaccgaaaagaatgccttcaactcctcgcttgaggacccaagtaccgattactaccaggagctgcagcgagacatctccgagatgttcttacagatctacaaacagggcggtttcctgggattatcaaacattaaatttagaccaggctccgttgtggtgcaactgacacttgccttcagagaagggactatcaatgtgcatgatgtagagacacagtttaaccagtacaagaccgaggccgcttccagatacaatttgaccattagcgatgtgtctgtgagcgatgtaccgttcccctttagtgcccaatcgggggcaggagtccctggatggggaatcgccctactggttctggtatgtgtgctggtggcccttgctatcgtttatctgatagctctggccgtgtgtcagtgtcgacgcaagaactatggccagctggatatctttcccgcacgcgacacataccaccctatgtccgagtatcctacctaccacactcacgggaggtacgtgcctccaagtagtactgataggagtccttacgagaagcgccaaaacggctggagcacgatgccgagaggagcattaccggaggagagtcaggggtag

SEQ ID NO: 29556 - DNA, 1833 bp, synthetic construct
  misc_feature 1..1833: note = Description of Artificial Sequence: Synthetic coding sequence
  source 1..1833: mol_type = other DNA
atgggtctgaaagctgcgcagaaaacgctcttccccctccggtccattgacgacgtagttaggttattcgccgctgaactggggcgagaggaaccggatctcgtgctgctgtccctcgttctggggttcgttgagcactttctagcagttaacagagtgattccgaccaatgtgcccgagctcacctttcagccatctcccgcaccggaccctccagggggtctgacctatttccctgttgctgatctgtcaataattgccgctctgtatgcccgatttactgcccagatccgcggagcggtcgatctctcgctgtacccaagggaagggggagtgtcttctcgcgagctggtcaaaaaggtgagtgatgtgatctggaattccctgtcaaggagctattttaaagaccgggcacacatacagtctcttttttctttcatcacaggaactaaactcgactcatcaggtgtagctttcgccgtggtcggtgcctgccaggccctgggcttaagagatgtccacctggccttgtccgaggatcacgcttgggtggtctttggtccaaacggggagcagaccgctgaagtaacttggcacggcaagggaaatgaagatcgtagggggcagacagttaatgctggggtagcggagcgatcgtggctgtatctgaagggttcgtatatgcggtgtgaccggaagatggaggtagcatttatggtgtgtgcgatcaacccttccatcgatctgcacacggatagcttggaattgctccaacttcagcagaagttactctggcttctgtacgatttgggccacctggaacggtatcccatggccttggggaacctggctgatctagaggagctcgagcccactccgggtaggcctgacccactcaccctctatcacaagggcattgcctcggcgaaaacatactatcgggacgagcacatttatccatatatgtatcttgctggataccactgtagaaacaggaacgtgcgagaggcactgcaggcctgggccgacactgcaacggtgatccaagactacaactactgtagagaagatgaagaaatatacaaagaattttttgaggtggctaacgacgttatcccaaacttgctaaaggaagcagcctcccttttggaggcaggggaagaacgacccggtgaacagtcacagggcacccaatcccaaggaagtgccctgcaggacccggaatgcttcgctcatcttcttcggttttatgatgggatctgtaagtgggaggaaggctcacccacgccagtcctacatgtcggatgggctacctttctagttcagagtttaggtagatttgagggccaggtgagacagaaggtgcgcatagtgagccgagaggcggaagctgctgaggcagaggagccttggggagaggaagcccgtgagggcagaagacggggacctagacgagagtcaaagcccgaggaacccccaccaccgaaaaaacctgctctcgacaagggacttggaacagggcagggagccgtttcaggccctccacggaagccccctggaaccgtggccggaactgctcgtgggccagagggcggatctacggctcaggtccctgcaccaacagcaagccccccacctgagggaccggtacttactttccagagtgaaaaaatgaagggcatgaaggagctcttagtggctacaaagatcaactcctctgccattaagctgcaactcacagcccagagccaggtccagatgaaaaagcaaaaggtaagcacacccagtgactataccctctcattccttaagcgccaacgcaagggcctatag

SEQ ID NO: 29557 - DNA, 1833 bp, synthetic construct
  misc_feature 1..1833: note = Description of Artificial Sequence: Synthetic coding sequence
  source 1..1833: mol_type = other DNA
atgggtctgaaagcagcacagaaaaccctgttcccccttagatccatcgatgacgtggtgagattatttgccgcagagctgggccgtgaggagccggacttagtcctgctctcgttagtgctgggtttcgttgaacatttcttggcagtcaatcgggtgatacctaccaacgtgcctgagttaactttccagcccagtcccgcacccgacccccctggaggtctgacctactttcccgtggctgacctctccattattgcagccctctatgcacgctttactgcgcaaattagaggcgctgtggacttaagtctctaccccagagagggaggggtcagctccagggagcttgtgaagaaagtatccgatgtaatttggaattccctctctcgttcttacttcaaggatagagctcacatacagtctttattcagtttcattacagggactaagttagacagttctggggtggcctttgcagtggtcggtgcatgtcaggcgctgggcctgcgcgatgtgcacttggccctcagtgaggaccatgcctgggtcgtcttcgggccaaatggtgagcagactgcagaggtgacgtggcatggaaaaggcaacgaagataggcgtgggcaaacagtgaacgctggggtagctgaacggagttggctgtacctgaagggatcatatatgcgctgtgacaggaagatggaagttgctttcatggtatgtgcaataaatccatccatcgatttgcacacggattctctcgaattactgcagctccaacagaagttgctgtggctgctttatgatctgggacacttggaaaggtatcccatggcccttggcaatttggcagacctggaggagctggagcccaccccaggtcggcctgaccccttaactctttatcacaaagggatcgccagtgctaaaacttattatagagatgaacacatctatccatacatgtacttggccggttaccactgtaggaaccgaaatgtgcgcgaggctctgcaggcttgggccgatacggctactgtgatacaggattataattattgcagggaggacgaagaaatttacaaggagttctttgaggtggcaaatgacgtgatcccaaacctgcttaaggaggctgcctcactgcttgaagcgggtgaagaacgcccaggagaacaaagtcagggaacacagtcccaggggagtgcacttcaggaccctgaatgcttcgcacaccttctgagattctacgacggcatctgcaaatgggaggaaggcagtccaacaccagttttgcatgtcggttgggccactttcctcgtgcaatctttgggcaggtttgagggccaggttaggcagaaggttaggatagtctccagggaggcagaggcagcggaagctgaagagccctggggggaggaggcacgggaaggcagacgcaggggccctaggcgtgagtcgaagcctgaggaaccacctccaccgaagaaaccagccctagacaaaggactgggaactggccagggagccgtctccggaccccctcgtaagcctcccggtacagtggccggaacggccagaggcccagagggtggcagcacagcacaggttcctgcacctactgcctccccaccaccagaaggcccagtgttaacattccagtccgaaaagatgaaggggatgaaagaactgctggtagcaaccaagattaattcatccgcaatcaagctccagctgaccgcccagtcccaagtgcagatgaaaaaacaaaaagtatctacacctagtgattacacactgagttttttaaagcgccagcgcaagggtctctag

SEQ ID NO: 29558 - DNA, 1848 bp, synthetic construct
  misc_feature 1..1848: note = Description of Artificial Sequence: Synthetic coding sequence
  source 1..1848: mol_type = other DNA
atgggattgaaggcagcacaaaaaacactgtttcccctgaggtcaatcgacgacgttgtaaggttattcgcggcagaattgggaagggaggaaccagacttagtccttctttctcttgttttgggttttgtagagcactttctggccgtcaaccgtgtgatccccacaaacgtgcctgagctcacctttcagcctagcccagctcctgaccctcctggtggactgacctatttcccagttgctgatctgagcatcattgcagcactctatgccaggttcaccgcgcagatccggggagccgtggatttgagcttataccctcgggaagggggagtatcatctcgggagctggttaaaaaggttagcgacgtcatttggaacagcctgtcgcggagctatttcaaggaccgagctcacattcagtccctgttttcctttatcacgggttggtcccctgtgggcaccaagctggactcatcgggggtggctttcgccgtggtgggcgcatgccaggcattaggcctccgagacgtgcacttggccctgtccgaagaccacgcatgggtggtgttcgggcctaacggagaacagacagccgaggtgacttggcatggcaaggggaatgaggatcgacgcggacagactgtcaacgccggagtggccgagcggtcatggctttatttgaagggttcatacatgcgctgcgataggaagatggaagtggcatttatggtgtgcgccatcaatccgagcatcgatctgcacacagacagtctggaactgctgcaattgcagcagaagctgctgtggctgctgtatgatctcggccacttggaacgctatccgatggctcttgggaatctcgccgatctggaggagctggaaccaacaccagggagacctgatcccctgaccctctatcataaggggattgcatccgcaaaaacttactacagagatgaacacatctacccttatatgtacttggctggctaccattgccgaaaccgcaacgttagggaggccctccaagcctgggccgataccgccacggttatccaggactacaattattgtcgggaagacgaagaaatatacaaggaattttttgaggtagctaatgacgtgattccaaacctcttgaaagaagccgcttccctattagaggcaggagaggaaagacctggagagcaatctcagggaacgcagagccagggaagtgccctccaagatcccgaatgttttgctcatttacttagattctacgacggcatctgtaagtgggaggagggttcacccacacccgtgctccacgtgggctgggccaccttcttggtacagtccctgggccgatttgagggccaggttcgtcagaaggtgcgcatcgtctccagggaggcggaggcggctgaggccgaggaaccatggggcgaggaagccagagaaggtcgacggagagggccaagaagggaaagtaagcccgaagaacctccccctcctaaaaaacccgcactggacaagggacttgggacaggccagggcgcagtatcggggcctcccaggaagcctcctggaactgtggcaggcaccgcaagagggccagaagggggatccaccgcccaggtacctgctcctactgcatcccccccacctgaagggccagtcctcacatttcaaagcgaaaaaatgaagggcatgaaggaacttttagtggcgacaaaaattaattcatcagccatcaagctgcagcttaccgcccagtcccaggtgcagatgaaaaaacagaaagtgagcacaccctctgattatacactgagcttcctaaaacgccaaaggaagggactttag

SEQ ID NO: 29559 - DNA, 1848 bp, synthetic construct
  misc_feature 1..1848: note = Description of Artificial Sequence: Synthetic coding sequence
  source 1..1848: mol_type = other DNA
atggggctgaaagctgcccagaagaccttgttcccacttcgatcgattgacgacgtagtgcgtctgtttgccgctgaactggggagggaggaaccagacctggttcttctctccctggtgcttggtttcgtggaacatttcctcgccgttaatagagtgatacccaccaacgtgcctgagctgacctttcaaccctcaccagccccagatccaccgggaggcctgacctatttccctgtggccgatctgtctatcatagctgcactgtatgcaaggttcacagcccaaatccgaggtgcggtggatctgagtctctacccgagagaaggtggggtctctagtcgcgagctggttaagaaggtatcggacgttatctggaattcactctcgagaagctatttcaaagaccgtgcccacatccaaagcctgtttagcttcatcacaggatggtccccagtcgggacgaaattagactcctcgggggttgcattcgcggtcgtaggcgcatgtcaggccctgggtctgcgtgacgtgcatctagccctgagtgaggatcatgcttgggtggtattcggtccaaatggcgagcaaacagcagaagtgacgtggcatggaaagggtaacgaggacaggagagggcagaccgttaatgccggagtcgcggaacggagctggctctatttaaagggctcctatatgagatgcgatcggaagatggaggtggcctttatggtgtgcgctataaacccgagcattgacctgcatacagactccctcgagttactccagttgcagcaaaaactgctgtggctgctatacgacttaggacacctggaacgttaccccatggccttgggcaatctggcagacctagaggaattggaaccaacccccggtagaccagatccactcactttataccacaaggggattgcatcagcaaagacttattatcgcgatgaacacatctacccatacatgtatctcgccggatatcactgcaggaataggaacgttagagaggccctgcaggcttgggccgacaccgctactgtaatccaggattacaactattgcagggaagacgaagaaatctataaggaattctttgaggtggccaacgatgtaatccccaacttgctgaaggaagctgcttctctactcgaggccggtgaggaacggccaggagaacagtctcagggaacccaatcccagggctcagcactccaagatccggaatgtttcgcccatctcttacgtttttacgatgggatttgcaagtgggaggaggggtctccaacccctgtgctgcacgtcggatgggcaaccttcctggtacagtcactcggacgattcgaggggcaagtgcggcaaaaagtccgcatagtatctcgagaggcggaagcagctgaagccgaggagccgtggggagaggaagccagggaagggagacgaaggggacctcgcagagagtcaaagcccgaggaaccacctcccccaaaaaagccagcattggacaaaggactagggactggacagggcgctgtgtcaggtccaccacgaaaacccccaggcacggtggctggtaccgcgagggggccagagggcggttctacagctcaagtcccagctccaacggcctcccccccacctgagggacccgtgctaacctttcagtcagagaagatgaaaggcatgaaagagttacttgtggccactaagatcaacagctctgctattaagcttcagctgacagcccagtctcaggttcaaatgaagaaacaaaaagtgtcgacacccagcgactacaccctgagcttcctgaagcgacagcgcaaaggtctgtag

SEQ ID NO: 29560 - DNA, 1668 bp, synthetic construct
  misc_feature 1..1668: note = Description of Artificial Sequence: Synthetic coding sequence
  source 1..1668: mol_type = other DNA
atgggcctaaaagccgctcagaaaacccttttccccctgcgtagtattgatgacgtggtgagactgttcgcggctgagctagggagagaagagcccgacctcgttctcctaagtctcgttctgggcttcgtggagcacttcttagctgttaacagagtaatccccaccaacgttcctgagctgacatttcagccaagcccagccccagatccacccggaggactcacctattttcctgtcgcagatctctctataatagccgctctgtatgctcgctttactgctcagatccgcggagccgtggacctgtccctctacccccgtgagggaggcgttagctcaagggagcttgttaagaaagtgagcgacgtgatttggaactccttgagtcgatcctatttcaaggaccgtgcccatattcaaagcctgttctcttttatcaccggcacgaagctcgactcttccggtgtggcctttgcagttgtgggtgcgtgtcaggcccttgggctgcgtgatgtacacctcgcactcagtgaggaccatgcctgggtcgtctttggacccaacggcgaacaaacagcagaggtaacctggcacggcaagggcaatgaggaccggaggggacagacagtgaacgcgggagtcgcagagagatcttggttatatctgaaggggtcatacatgcggtgtgacagaaagatggaagtggccttcatggtgtgcgccatcaacccctccatagacctgcacaccgactccctcgagctgctccagctgcagcagaaactactgtggctgttgtatgatctggggcatcttgaaaggtatcccatggctctgggaaatctggcagatctggaagagctagaacctacgccaggtcggcctgaccccctgacgctgtatcataaagggattgcatcagctaagacatactatcgtgatgaacacatctatccctatatgtacctggcagggtaccattgcagaaaccggaatgtgagggaggccctgcaagcctgggctgacaccgccaccgtgattcaagactacaattactgccgcgaggacgaagagatctacaaggaattctttgaggtggcaaacgacgtgattcctaaccttctcaaagaagcagcgagccttttggaggcaggggaggaacgacccggagaacagagccaggtccgtcaaaaagtccggatcgtatccagggaggcagaagctgccgaggcagaagagccatggggcgaagaagccagggagggccgacgccgtggtccaaggcgggagagcaagccggaggagccacctcctcctaagaagccagcactggacaaaggactcggcacaggacagggagcagtgtctggccctcctcggaagcctcctgggactgtggcaggcactgcaagaggccctgagggaggttcaactgctcaggtgcctgcccctacagcctcaccaccaccagagggaccagtcctgacgtttcaatcggagaaaatgaaaggaatgaaggagctccttgtcgcaactaagatcaatagcagcgctattaaactgcagttaactgcgcagtcacaggttcagatgaagaaacagaaggtttcaacaccgtccgactacacactcagcttcctaaaacggcaacgcaagggcctgtag

SEQ ID NO: 29561 - DNA, 1728 bp, synthetic construct
  misc_feature 1..1728: note = Description of Artificial Sequence: Synthetic coding sequence
  source 1..1728: mol_type = other DNA
atgggactgaaagctgcgcagaagaccctcttccctctgcgctctatcgacgacgtggtgagactttttgccgctgaattaggacgggaagagccagatttggtgcttcttagccttgtcctgggcttcgtggaacacttcttggctgtgaaccgagtgataccaaccaatgtgccggaacttacgtttcagccctcaccagcacctgacccccctgggggactgacttactttccggtggccgacctgagcattatcgcagccttatacgctcgatttactgcccaaattcgtggagccgttgatttatccctctatcccagggagggaggcgtgtcatccagagagctcgttaaaaaggtgtccgatgtcatctggaacagtctgagcaggtcctatttcaaagaccgagcacacatccaaagcctgttctcctttatcacaggaacaaagctggatagttctggtgtcgccttcgccgtggtgggcgcatgtcaggcgctggggttacgggacgtacacctggctctgtccgaagaccacgcatggtcttggctttacctaaagggatcttacatgcggtgtgaccgcaaaatggaagtggcatttatggtgtgcgccataaacccctcgatagaccttcacacagattctctggaattgctacagcttcagcagaagctgctatggctactgtacgaccttggccacctcgaacggtaccccatggccctcggaaacctcgccgacttggaggaacttgagccgactcctggcagacccgaccccctcaccctttatcacaagggtatcgcctccgccaagacttactacagggatgaacacatctacccatacatgtacttagcaggataccattgtaggaaccgaaacgtaagggaggctctgcaggcctgggctgacacagccacagtgatccaagattataattactgccgggaagatgaggagatttataaagaattctttgaagtggccaatgatgtcatcccgaatctcttgaaagaggctgcttccttgctggaagccggagaggaacgccctggtgaacaaagccaggggacccagtcccaaggctcagcgcttcaggaccccgaatgtttcgctcacctgttaaggttctacgatgggatctgcaagtgggaagaagggtcccctacgccggttctacatgtgggttgggctaccttcctagtccagagcctgggtcgttttgagggtcaggtgcgacagaaagtgcgtatcgtttctagggaggcggaagctgctgaagccgaggaaccttggggggaagaggccagggaaggcagacggcgaggccctcgacgggagagtaagccagaggagccaccccctccaaagaagccagcattagacaaagggcttggaaccggacagggcgctgttagtggaccacccagaaagccccctgggaccgttgcagggactgcacggggaccggagggaggttccaccgctcaggttccggcacccacagcttccccccctcccgaggggcctgtcctgacgttccagagcgaaaagatgaaaggaatgaaagagctcctggtggcaacaaagatcaactcaagcgccattaagctgcagttgacagcccagagtcaagtgcagatgaaaaagcagaaggtgagcaccccgtctgattatacgttgagctttctgaaacgccagcgcaaaggtctatag

SEQ ID NO: 29562 - DNA, 1833 bp, synthetic construct
  misc_feature 1..1833: note = Description of Artificial Sequence: Synthetic coding sequence
  source 1..1833: mol_type = other DNA
atgggcctgaaagcagcccaaaagaccctttttcccctccgctcgatagacgacgtggtgcgcctgtttgcagcggagctcggaagagaagaacctgatctggtgcttctttctcttgtcctcggctttgtcgaacattttctggctgttaatagagtcatcccaacgaacgtcccagaactgaccttccagcctagtcccgcaccggacccccctggtggcctgacctattttccagttgcggatctatccattatagctgctctgtatgctagatttactgcccagattagaggtgcagttgatctgagcctatatccgcgagaggggggtgtttccagccgcgaactggttaaaaaagtatcagacgtcatctggaactcactaagtcgaagctattttaaagaccgagcacatatccagtccttattctcatttattactggtacaaaactggactcctctggagtggcctttgcagtagtgggtgcgtgccaggcccttggcctacgcgacgtgcatctagccctttctgaggaccacgcctgggtagtctttggcccaaacggcgaacagaccgccgaagtgacttggcatgggaaggggaacgaagatcgacggggacaaacagtgaacgccggtgtggccgagagatcctggctctacctcaagggctcatacatgagatgtgatcgaaagatggaagtggcctttatggtttgtgcgatcaatccaagtattgatctgcatacagactctcttgagctgttacagcttcagcaaaaactgctgtggctcctgtacgacttgggccacctggagcgctatcctatggctcttgggaacttggcagaccttgaggaattagagccaacccccggtcggccagacccactgacactgtaccataaaggcatcgcctccgctaaaacgtactaccgagatgagcatatctatccttacatgtatcttgccggatatcactgtaggaacaggaatgttagggaagctctacaggcctgggcagacacagctactgtgatccaggactacaactactgcagagaagacgaggaaatctacaaagaattttttgaagttgccaatgacgttattccaaacttattgaaggaggcagcaagtctactcgaggcgggtgaagagcggcctggggagcagagccaaggaacccagtcacagggctctgcactgcaggatcctgaatgtttcgcgcatcttctgcggttttacgatggtatttgcaagtgggaggaggggagtccaactccggtgctacatgtgggatgggccaccttcctggtgcaatccttaggtaggttcgaagggcaggtgcggcagaaagtccggatcgtgagtagagaagcagaggcagccgaagctgaggagccatggggagaggaagcacgcgaaggacggaggcgcggaccacggagagagtcgaaacctgaggagccacctccacccaaaaaaccagcccttgacaaaggcctgggtaccggacaaggggctgtgagcggaccgcctcgcaaaccccctggaactgtggccggaaccgccaggggtcccgaagggggaagtaccgctcaggtacccgcacctaccgcttcgccccctcctgaagggccagtcttaacatttcagtccgaaaagatgaaaggaatgaaagaactgctcgtggccacaaaaattaatagctctgctattaaactgcagctcacagcccagtcacaggtacagatgaaaaaacagaaagtttcaacacccagtgactacactttatccttcctcaagagacagagaaagggattatag

SEQ ID NO: 29563 - DNA, 1848 bp, synthetic construct
  misc_feature 1..1848: note = Description of Artificial Sequence: Synthetic coding sequence
  source 1..1848: mol_type = other DNA
atgggcctgaaagccgctcagaaaaccctgttccccctgagatccattgacgacgtggtacggctcttcgccgcagagctgggtagagaagagccagacctggtccttctgtcactagtcctcggcttcgtggagcatttcctcgctgtcaatcgcgtcattccaacgaacgtgcccgaacttaccttccaacccagccctgctcccgacccaccaggcggacttacctatttccccgtcgccgacctgagtattatcgccgcattatacgctaggtttactgcccagataagaggggcagtcgacctttcactttatcctagggaaggcggtgtatcctctagggagctggtgaagaaggtctccgacgtaatttggaattccttatcgaggtcttactttaaggatagggcacatatccagtccctgttctcgttcattaccggatggtcgcccgttgggaccaagctagactcctccggagtcgccttcgccgtggtgggagcatgtcaggcgctgggactgagagacgtgcacctcgctctgtccgaggaccatgcttgggtggtattcgggcctaatggagagcagactgccgaggttacttggcacggtaaggggaacgaggatagaagaggccaaacagtcaatgcaggtgtcgccgaacggtcgtggttgtatttgaagggctcttacatgcgctgtgacaggaaaatggaggttgcttttatggtgtgcgcaattaatccgagtattgacctacatacagactcactcgaactgctccagttacagcagaaattactgtggttgttatacgatctgggccacctggaacgctaccccatggcgctaggcaatctagcggatttggaggaactggagcccacacccggacgtcccgatcctctcacgctgtaccataaggggatagcgagcgctaagacctactatcgggatgagcacatctacccttacatgtatctggccggttaccattgccgaaaccggaacgtccgcgaggctctccaggcctgggccgacactgccactgtaatccaggattacaactattgcagagaggacgaggagatctacaaggaattcttcgaggtggcaaacgacgtcatccctaatctgcttaaagaagctgccagtctcttagaggctggcgaggagcggcctggtgagcagagtcagggaactcagtcccagggaagcgcccttcaggacccagaatgtttcgcccacttgctgagattttatgacggcatatgtaagtgggaggagggaagccccacccccgtgcttcatgtcggatgggcaaccttcttggttcaaagcctcggtagatttgaaggccaagtgaggcagaaggtacggatcgtctctagagaggcggaggctgccgaagctgaagagccatggggagaggaggccagggaaggcagaagaaggggaccacgcagggagtctaaaccggaggaaccacctccacccaagaagccagcactggataagggcctgggaactggccagggcgctgtatctggccctcccagaaagccaccaggaaccgtggccggtaccgccagaggaccagagggcggaagtacggcgcaggtgccagcaccaaccgcatccccccctccagaaggacctgtgctgacattccaatcagagaagatgaaggggatgaaggaactgctcgtggctacaaaaattaattccagcgcaatcaaactgcagcttaccgcacagagccaagtccagatgaagaaacagaaagtgagtactcctagcgactatacattaagttttctcaagcggcagcgcaaaggactttag

SEQ ID NO: 29564 - DNA, 1848 bp, synthetic construct
  misc_feature 1..1848: note = Description of Artificial Sequence: Synthetic coding sequence
  source 1..1848: mol_type = other DNA
atgggacttaaggccgcacagaagacgctatttccactcagaagcatcgatgatgttgtgcgactattcgctgccgaattggggagagaagagccagatctggttcttttatccctcgtccttggctttgtggaacattttctcgccgtcaatcgcgtcatccccaccaacgtgcccgagctaacatttcagccatctcctgcacccgatccacctggtggattgacttactttccagtcgccgatctgagcatcatcgcggctttgtatgcccgtttcacagcccaaattcgcggagccgtagatctgtcgctgtatcccagggagggcggagtgagcagtcgggagcttgttaaaaaggtgtctgatgtgatctggaacagcctgagtcggtcgtacttcaaagatcgggctcacatccagtccctctttagcttcattaccggttggtctcccgttggtaccaagctcgattcctcgggagtcgcattcgccgtagtgggcgcttgccaggccctgggcttgagggatgtgcacctggccctgagtgaggaccacgcctgggtggtattcggtcctaacggggagcagacggctgaggtaacctggcacggaaagggcaacgaagaccgaagaggccagaccgtgaatgcgggagtagctgaacgctcatggctttatctaaaggggtcctacatgaggtgcgacagaaaaatggaagtcgcttttatggtatgcgctatcaatccaagtatcgacctacacacagacagcctggagctgctacagttgcagcagaagctgctttggctgctgtacgatctgggacatttagagcgttatcctatggccctgggtaatttggctgacttggaggaattagagcccaccccaggacgtcctgatcccctgaccctctaccataagggaatagctagcgcgaagacttattatagagatgaacacatttacccttatatgtatctcgccggttatcactgccgtaacagaaacgtgcgggaggcacttcaagcatgggccgacacagccacagtcattcaagactataactactgtcgcgaggacgaagagatctacaaagaatttttcgaagtagcaaatgatgttatccctaatctgctgaaagaggcagcctccttgctggaagcaggcgaagagaggcctggggagcagagccagggcactcagtctcagggatccgcccttcaagatccagagtgttttgctcatctgctgcgcttttacgacggtatttgtaagtgggaggagggttcacctaccccagtacttcacgtcggttgggccacattcctggtgcagagtctgggtcgcttcgaggggcaggtgcggcagaaagttcgcatagtttctcgcgaggctgaggccgctgaggccgaagagccttggggagaggaggccagggaggggagaagacggggtcctagaagggaatcaaagcctgaagagcccccacctccaaaaaaaccagcgctggataagggcctaggtacgggtcagggggctgtttcagggccaccacgtaaacctccaggaactgttgccggtacagccagaggcccagaaggaggcagtaccgcccaagtaccagccccaacggcaagtccccctcccgagggacctgtgctcacatttcagtctgagaagatgaagggcatgaaggagcttctagtcgcgacaaaaataaattcaagcgccattaaattgcagctcacagctcagagtcaggtgcaaatgaagaagcagaaagtctccacccctagcgactacaccctatccttcttgaaacgtcagagaaagggactttag

SEQ ID NO: 29565 - DNA, 786 bp, synthetic construct
  misc_feature 1..786: note = Description of Artificial Sequence: Synthetic coding sequence
  source 1..786: mol_type = other DNA
atgggcctgaaggcagctcagaagactttatttccccttaggtctatcgacgatgtcgtccgactgtttgccgcagagttgggcagggaggaacctgacctcgtacttttgagtcttgtactggggttcgtcgagcattttttggccgttaaccgagtgatacccaccaacgtgccagagcttacgtttcagcccagccctgcgcctgatccgccaggcggtctgacctatttcccagtggccgatctctcgatcatcgcagcgttgtacgcgagatttactgcccagatacgaggagctgtcgatctgagtctgtatcctcgggaagggggagtgagttcgagggaactagtgaagaaggtgagcgacgtgatttggaatagcctgagtcggtcctatttcaaggatcgcgctcacattcagagtttattcagtttcataactggtaccaaactcgactcatctggcgtggcttttgccgtggttggcgcttgtcaggctctgggtctccgcgacgtacatctggcactcagcgaagatcacgcgtgggtagtgtttgggccaaacggtgagcaaactgcagaggtgacctggcatggtaaggggaacgaggatcggagggggcagactgtgaacgccggagtggccgagagatcttggctgtacttgaaggggtcctacatgcgctgtgacaggaagatggaagttgcatttatggtgtgcgccattaatccttcaatagatttacatactgacagcttggaacttctgcagctgcagcagtag

SEQ ID NO: 29566 - DNA, 441 bp, synthetic construct
  misc_feature 1..441: note = Description of Artificial Sequence: Synthetic coding sequence
  source 1..441: mol_type = other DNA
atggggttgaaggcggcacaaaagaccctgttcccccttcgatcaatcgatgatgtcgtcaggctgttcgctgccgagctaggaagagaagaaccagacttggtcctcctgtctctagtgctaggattcgtggaacatttcttggccgtcaatcgagtaattccgaccaacgtcccagaactgaccttccagccaagtccagctccagaccccccaggcggtctcacctattttccggttgctgacttgtctatcatcgcggcattgtatgctagattcacagcccaaatcaggggtgcagtggacctcagcttgtaccccagggaaggcggtgtaagttcccgcgaattagtgaagaaggtctcggacgttatttggaactccctgagtcgttcatattttaaagaccgggcacatatacagtccctattctccttctag

SEQ ID NO: 29567 - DNA, 441 bp, synthetic construct
  misc_feature 1..441: note = Description of Artificial Sequence: Synthetic coding sequence
  source 1..441: mol_type = other DNA
atggggctgaaagctgcccagaagacactttttcctctgcggtccatcgatgatgttgtcaggctgttcgcggctgagttgggtagagaggagcccgacctggttcttctgagcttagtgctaggtttcgtggaacattttctcgcagtcaatagggttatccctaccaatgtgcctgaactgacattccagcctagccccgcaccggatcccccagggggactgacatacttcccagtcgccgacctgtccataatcgccgcactatacgctcggtttactgcccagatacggggtgcagttgatctgagcctgtatccaagggagggtggcgtcagtagccgggagctggtcaagaaggtctctgacgtgatctggaactctttgagtcgttcatactttaaagatcgtgctcacattcaatcactcttctccttttag

SEQ ID NO: 29568 - DNA, 1041 bp, synthetic construct
  misc_feature 1..1041: note = Description of Artificial Sequence: Synthetic coding sequence
  source 1..1041: mol_type = other DNA
atgggtctgaaggcggctcagaaaacactgttccccctccggtccattgatgacgtcgtgcgactgttcgccgcagaactgggtagagaggaacccgatttggtcttactgtccctggtgctcggtttcgttgagcatttcctcgccgtcaatagggtgatacccaccaacgtgcccgaactaactttccaaccaagccccgcacccgaccctccaggcggactcacttacttccctgttgccgacctttcaatcatcgccgctctgtacgccaggtttaccgcccaaatccggggagctgtggacctctcactctaccctcgagaagggggagtctcctcacgcgagcttgttaaaaaagtgtccgatgtgatatggaactcgctttcgaggtcatatttcaaggaccgcgcacacattcagtcactctttagtttcatcacgggcactaagctcgattcttccggagtcgcgttcgccgtcgtgggggcatgccaggcattggggctgagggatgtgcatcttgcactctccgaagaccacgcctgggtggtttttggcccaaatggggaacagactgccgaagtcacatggcatggcaagggcaacgaggatcgcagggggcagacagttaacgcaggagtggccgaacggtcatggctctatctcaagggatcttacatgaggtgtgaccggaagatggaggtggcctttatggtctgtgccatcaatcctagcatcgaccttcacacagacagtcttgaactgctccagctacagcagaagctcctctggctgctgtatgatctgggccacctggaaaggtaccccatggccctggggaatctggccgacctggaagaattggagccaaccccaggcaggccagatcccctaaccctgtatcacaagggcattgctagtgctaagacctactatagggacgagcatatctacccttacatgtaccttgctggctatcactgtcggaacaggaatgtacgagaagctctacaggcttgggctgacaccgcgacatag

SEQ ID NO: 29569 - DNA, 1848 bp, synthetic construct
  misc_feature 1..1848: note = Description of Artificial Sequence: Synthetic coding sequence
  source 1..1848: mol_type = other DNA
atgggactgaaggccgcacagaagacgctttttcccctcaggagcattgacgacgtggtgcgcttgttcgccgctgaactgggacgtgaagaaccagaccttgtcctgctcagccttgtgttggggttcgtggagcacttcctcgcagtgaatcgagtgatccccaccaatgtgcccgaactcacttttcagccctccccagctccagacccccctggagggctaacttatttccctgtggccgacctctccattatcgccgcactgtacgcccgatttactgcacagattcgcggtgccgtggatttgagcctttatcctagggaagggggagtgagcagcagagagttagtgaagaaagtgagtgatgtgatatggaactctctctctagatcctacttcaaggatcgagcccacatccaaagccttttttctttcatcactggatggagtccagttgggacaaagctagacagctccggggtggcctttgcagtggtgggggcatgccaggccctgggcctacgcgacgtccacctggctctcagcgaggaccacgcctgggtagtgtttgggcctaacggcgaacagacagcggaggtgacctggcacggaaaggggaacgaagacagaaggggacagacggtcaacgccggagtggcagaacgatcatggctgtatttgaaaggctcctacatgcggtgtgacagaaagatggaggtcgcctttatggtgtgcgccattaacccatctatagacctccacactgacagcctcgagctcctgcagctgcagcagaagctgctttggctgctatatgacctgggacacctggagcgttatcccatggccctcgggaacctcgctgatttggaggaactggaaccaacaccaggccgtccagaccctctcacactgtatcacaagggcatagccagcgccaaaacttattaccgcgacgaacatatttatccttatatgtatctggccggatatcactgtcgcaaccgcaacgtgcgggaggctctccaagcatgggcggacacggccactgtgatacaggactacaactactgtagagaggacgaggaaatttataaggagttctttgaggtcgcaaacgatgtaatacctaatttactgaaagaagccgcttctctgttggaggccggagaggaaaggcctggagaacaatcccagggaacacagagccaaggcagcgcactacaggacccagagtgcttcgcccacttgcttagattttacgatgggatatgtaagtgggaggaaggttccccgacaccagttctccatgttgggtgggccacatttctggtgcaaagtctgggaagatttgaggggcaagtcaggcaaaaagtccgtatcgtttctcgcgaggctgaagcagccgaagcagaagaaccatggggggaggaggcacgggagggaaggagaagggggcctcggagggagtcaaagccagaagagcccccacctccaaagaagccagccctggacaaaggcctggggactggacagggagccgtatctggtccaccgagaaagccacccggaaccgtggctggcacggcaaggggccctgagggaggtagcaccgcacaggtcccagctccaaccgcatccccacctcccgagggacctgttctgacattccagtccgaaaaaatgaagggaatgaaagaactgctggtggcaactaaaatcaacagtagcgcaattaaacttcagctgaccgcccaatcccaggtccagatgaagaaacaaaaggtcagtactcccagcgattacaccctcagcttcctgaagcgtcagaggaaagggctgtag

SEQ ID NO: 29570 - DNA, 846 bp, synthetic construct
  misc_feature 1..846: note = Description of Artificial Sequence: Synthetic coding sequence
  source 1..846: mol_type = other DNA
atgggccttaaggctgctcagaagacactgttccctctgagaagcatagacgacgtggtaaggctctttgccgcagaactgggacgggaggaacccgatctggtacttttatccctggtgctaggttttgtagagcactttctggctgtgaaccgagtgattcccactaacgtgccagagctgactttccagcccagcccggcacctgatccaccaggcggactcacttacttccctgtagctgatctcagcataatcgcagcactttatgctaggtttacggcgcagattagaggtgcagtggatttatccctgtatcccagggagggtggagtgagcagtagagaactagtcaaaaaggtgtcagacgtgatctggaactcactgagccgatcctattttaaggaccgtgcccatattcagtcactctttagttttataaccgggacaaaattggacagctcgggagtggctttcgctgtggtcggggcttgccaagccctggggctgagggacgtgcacctcgctctcagcgaagatcacgcgtgggtggtattcgggccaaatggagagcagacagccgaagtcacctggcatggcaagggcaacgaagaccggagaggacaaacagtgaatgccggtgttgccgaaaggagttggctttatcttaaaggcagctacatgagatgtgaccggaaaatggaggtcgcatttatggtgtgcgccatcaacccttctatcgacctccacacagatagtctcgagctacttcagctccaacagaaactcctgtggctactatatgacctgggtcacctcgagcggtacccgatggccttaggatag

SEQ ID NO: 29571 - DNA, 1656 bp, synthetic construct
  misc_feature 1..1656: note = Description of Artificial Sequence: Synthetic coding sequence
  source 1..1656: mol_type = other DNA
atggccgctcccgtcagattaggtcggaagcgtcccctgcctgcctgcccgaatcctctgttcgtgcggtggcttacggagtggagagatgaagccactcggtctcgcaggcgcacccgcttcgtttttcagaaagccttgcgttctctgcgcaggtatccgctgcctctgaggtctggcaaagaagctaaaattctccagcacttcggagacggtctgtgccggatgctggacgaacgacttcagaggcatcgcacaagcggcggtgatcatgccccagattctccatcgggcgaaaacagccccgctccccaaggcaggttggcggaagtccaagattcctccatgccggtgccggctcagcctaaggctgggggaagcggcagttactggccagctaggcattcaggcgcaagagtaatcttgcttgttctgtatagagaacacctgaaccctaatggacaccatttcctgaccaaggaggaactactgcagcggtgcgcccaaaagtctcctcgggtggcaccgggatctgctcgcccttggccggctctgagaagcctgctccaccgcaacctagtgctgaggactcaccagcccgcacggtattcactgacacctgagggactcgagctggcacagaagctggcagaaagcgaaggcttgtctctgcttaatgtggggattggtcccaaggaaccaccgggtgaggagacagcggttcccggagccgcttcggccgagctggcttccgaggctggagtacagcagcaaccattggagctgaggccaggtgagtacagggtactgctttgcgtggacattggggagacgagagggggtggccaccggcctgaattgttgagggaacttcagcggctacacgtgacccatacggtaagaaaactgcatgtgggagattttgtctgggtggcgcaagagaccaatccccgtgatccagcaaacccaggagagctagtgttggaccatatcgtggaaaggaaacggctcgacgatttgtgctcctctattatcgacggcaggtttcgtgagcaaaaatttcggcttaagaggtgcggcctggaacgccgagtgtacctggtggaggagcacgggtccgtgcacaacctttccttgcctgagtctactctgctacaagctgtcactaacacacaggtcatcgacggttttttcgtgaaaaggaccgctgacattaaggagtcagcagcttatctggctctcctgacgaggggcttgcaaagactgtatcagggacacaccctgagatctcgaccatggggcactccagggaatccagagagcggggctatgacttctcccaatcctctgtgctctctgctgacattcagtgactttaacgcgggtgcaattaagaataaagcccaaagtgtacgcgaggtttttgccagacagttgatgcaagtgcggggtgtgagcggcgagaaagcagcggcactagtggatcggtatagcactcccgcttctttacttgcagcctatgacgcttgtgctactcctaaggagcaggaaacactgctcagcaccataaagtgcggtaggctgcagcgcaacttggggcctgccctgtctcgaactctgagtcagttatattgttcatacgggcctctgacgtag

SEQ ID NO: 29572 - DNA, 1656 bp, synthetic construct
  misc_feature 1..1656: note = Description of Artificial Sequence: Synthetic coding sequence
  source 1..1656: mol_type = other DNA
atggcggctcctgtgaggttaggcagaaaaagacctcttccggcatgccctaatcctctttttgtcagatggttaaccgagtggcgtgatgaggcgacccgatcccgcaggcgaacgaggttcgtatttcaaaaagccctgcggtcgctgcgtagataccctctgcctttgcgaagcggcaaagaagccaagatcctacagcactttggggatgggctctgcagaatgctcgacgaacgcttacagaggcatcggacctccggaggggatcacgctccagattctcctagcggtgagaacagcccagctcctcagggacgcttagccgaagtgcaggatagtagtatgccggttccagcccaaccaaaagccggaggctccggaagctactggccggctcgccactctggagctagagtgatcctgctggttttgtatcgagaacacctcaatcctaacggccaccacttcctgaccaaagaggagcttttgcagcgatgcgcacaaaaaagcccgcgtgtagctccgggaagtgccaggccttggcctgccctacgatcactgttgcatcggaatctggtgcttcgcacgcaccagccagctcgttattctctcacgccagagggactggaattagcccagaaactggcagagtcagaggggctatccttgctgaatgtcggcatcgggccaaaggagccccctggagaggaaacagccgtgcccggagccgcatcagccgagctggcctctgaagccggagtgcagcagcaacccctggaattgagacctggtgagtatagggtgttactatgtgtggatatcggcgaaacccggggtggcggacaccgccctgagctgctccgggagctgcagagactgcacgtaacacataccgtgagaaagctgcacgtcggagacttcgtatgggtggcccaggagactaaccctagagaccctgctaaccccggagagctggtattggaccacatcgtggagagaaagcggctggatgatctgtgcagctccatcattgacgggcgattccgggagcagaagtttcgcctcaaacggtgcgggctcgaaagacgcgtgtatctcgtcgaggagcacggctctgttcacaatctatcattacctgagtctactctgctgcaggccgtgaccaatacccaagttatagatggttttttcgttaaacgcacagcagatataaaggagagtgcggcttacctggcgctgctaacacggggactgcagcgcctgtaccagggccataccttgagaagtagaccttgggggacccctggcaacccagagtccggcgctatgacatccccaaatcctctctgcagcctcctcaccttctctgacttcaacgccggagcgatcaagaacaaagctcagagcgtgcgcgaagtgttcgccaggcagctgatgcaggtccggggagtgtccggcgagaaggccgcagccctcgtggatcgttattccacccccgctagcttactagccgcttatgatgcttgtgccactcctaaagaacaggaaaccttgttgagcacaatcaagtgcggtcgcctgcagcggaatcttggccctgctctcagtcgcaccctatcacagctgtactgcagctacggacccctgacttag

SEQ ID NO: 29573 - DNA, 2490 bp, synthetic construct
  misc_feature 1..2490: note = Description of Artificial Sequence: Synthetic coding sequence
  source 1..2490: mol_type = other DNA
atgaactcaggcgtggcgatgaaatatggcaacgactctagcgccgagctaagcgagttgcatagtgcagcactcgcatcacttaagggagacattgtggagttaaacaaaaggttacagcaaactgaaagggaacgagatctgctggagaaaaagctggcaaaggcccaatgcgaacaaagtcacctgatgagagaacacgaagatgtccaggagcggacaacactgagatatgaagaaagaatcactgaacttcactccgtcattgcagagctgaacaaaaagatagatcgactgcagggcactaccatccgtgaagaggacgaatattcagaactacgatctgagctgtcacagtcccagcatgaagtgaatgaagattccagaagcatggatcaagatcagactagcgtgtctattccggagaatcaatctaccatggtgactgcagatatggacaattgttctgatctgaacagtgaactgcagcgcgtactcaccggactagagaatgtggtgtgtgggaggaagaagtcctcttgttccttaagcgttgctgaggttgacaaacacatcgaacaattgactaccgccagcgagcactgcgatctcgctattaagaccgtagaggagattgaaggcgtattgggacgcgatttgtacccaaatctggcagaggagaggtcgaggtgggaaaaggagttggctgggttgagggaggagaacgaaagcctcaccgccatgctttgctcaaaggaggaggaactaaaccgtaccaaggccaccatgaatgctataagagaagagagagatcgtctccgacgacgcgtgcgagaactgcaaacccgtttacagagcgtacaggcgacaggaccctctagccctgggagacttacatccacaaaccgccctatcaacccgagtaccggggaattgtccactagttcaagctcaaacgacatccctatcgcgaaaatcgcggaacgcgtgaaactgtcgaagacccgctccgagtcttcctcctcagacaggcctgtgctgggcagcgaaatttcatccattggagtgtctagctcggtcgccgagcatcttgcacactccctgcaggactgttcgaacatccaggaaatctttcaaactctatatagccacggatctgctatatctgaatctaaaatacgagagtttgaagtggagactgaaaggctgaactcacgcatcgaacatttgaaatctcagaacgatctgctgaccattacactggaagaatgcaagtcaaacgctgaacgcatgagtatgttggtgggcaaatatgaatccaatgctacagctctgcggctggccttgcaatattcagaacagtgcattgaggcttatgagctcctgctagcactcgcagagtccgaacagtcccttatcctcgggcagtttcgtgccgctggggttggaagctcacctggtgaccaatcaggcgacgagaatatcacccaaatgctgaagagagcccacgactgccggaaaacagccgagaatgctgccaaagctcttctgatgaaactggacgggtcctgcggtggcgcatttgccgtggccggttgctccgtccagccttgggaaagtctgtccagcaactctcatacctcaacaacaagttccacagcctcgtcttgcgatactgaattcaccaaagaagacgagcagcgtcttaaagattatatccaacagctcaagaatgacagggccgctgtgaagctgacgatgctggagcttgaaagcattcacattgacccactatcctatgatgtgaaaccacgaggtgattctcagcgcttagaccttgaaaacgccgtgctgatgcaggagttaatggccatgaaagaagagatggctgaactaaaggctcagctgtacttgttggagaaggagaagaaggcactggaacttaaacttagtactcgcgaggcccaggagcaggcttacctcgtgcatattgaacacctgaagtctgaggtcgaggaacaaaaggaacagcggatgcgctcgctaagttcaacaagctccggaagtaaggacaagcccggtaaggaatgtgcagatgctgctagtcctgcactcagcttggccgagttacgcactacatgttccgagaatgagcttgcagctgagtttaccaatgcaatacgccgagagaagaaattgaaggcccgagtgcaagagctggtctccgccttagagcgattgactaaaagtagcgagatcagacaccagcagtccgccgaattcgtgaacgatcttaagcgcgcaaatagcaaccttgtggccgcttatgagaaagcaaaaaagaagcaccagaataagctcaagaagctggagagtcagatgatggcaatggttgagcgccacgagacccaggtgagaatgctgaagcaacgcatcgccctcctggaagaagagaattcaagaccccataccaatgagacatcactctag

SEQ ID NO: 29574 - DNA, 2133 bp, synthetic construct
  misc_feature 1..2133: note = Description of Artificial Sequence: Synthetic coding sequence
  source 1..2133: mol_type = other DNA
atgaaactggttttcttagtgttgctgtttctgggagctctcggactgtgtctagccggaaggcggaggagcgttcagtggtgcgcagtcagccagcccgaggctacaaaatgttttcagtggcagcgtaatatgagaaaagtgcgtggcccaccagtttcatgtataaagagagacagccccatccagtgcattcaagccattgcagagaatcgcgcagacgcagttactcttgacgggggtttcatttacgaggccggactggccccttacaagctccgccctgtggccgctgaggtttatggaactgaacggcagcctcgtactcattattacgctgtcgctgtcgttaagaaaggtgggagcttccagctcaatgagctacagggccttaaatcgtgccatacaggactgcggcgtacggctgggtggaatgtgcccattggtacgcttcgcccattcctaaactggaccgggccaccagaaccgattgaggctgcggtggccaggttcttttcagctagttgtgtccccggagccgacaaggggcagtttccgaatctgtgccgattgtgcgcgggaacaggggagaataaatgcgccttctctagccaggaaccttacttttcttattccggggctttcaagtgcctgcgcgatggggcaggggatgtggcatttatccgcgagtctacagtcttcgaggatctgagcgatgaagcagagcgagacgagtacgagctgctctgtcccgataacactaggaagcccgtggacaagttcaaagactgccatcttgccagggtgccttctcacgcagttgttgctcgatccgtgaatgggaaggaggatgctatctggaatctgttacggcaagcacaggagaaatttggcaaggataagagtcctaagttccagctctttggctccccctccgggcagaaagacctgctctttaaagactcggcaataggcttttctcgcgtgccaccccgaatcgactctgggctataccttggttccggatacttcacggccattcagaacctccgaaagtcggaagaagaggtggcagctagaagagccagagtcgtgtggtgcgcagtcggcgaacaagagctcagaaaatgtaaccaatggtccggattatccgagggctcagtcacctgcagtagcgcatccacaacggaagactgtatcgcccttgtactaaagggggaggccgacgcaatgagcctggacgggggatatgtctataccgccggtaagtgcggcctggtgcctgtcctggcggaaaattacaaatctcagcaatcatccgacccggaccccaattgcgtggatcgccctgtagaagggtatctggccgtcgcagtggttcggcgaagcgatacttctttaacatggaacagcgttaagggcaagaaaagctgtcatacagcagtggacaggacggctggctggaatatcccaatgggactgttgttcaaccagacaggaagctgcaagttcgacgaatatttctcacagagctgcgccccaggctctgaccctcgcagcaatttgtgcgctctgtgtataggagatgagcagggcgagaacaagtgtgttccaaatagcaacgagaggtactacggatacactggagcatttagatgcttagcagagaacgccggagacgttgcattcgtgaaagatgttacagtgctccagaacactgatggcaacaacaacgaggcttgggctaaggacctgaagctggccgactttgccttgctttgtcttgatggcaagagaaagccagtgacagaggcgagaagctgtcacctggccatggcgcctaatcatgctgtcgtcagcagaatggataaggtggagcggctgaagcaggttctgttgcatcagcaagctaaatttggaagaaacggatccgattgtcctgacaagttctgcctgtttcagagcgagactaagaacttgctgttcaacgacaataccgaatgccttgccaggttacacggaaagactacatacgagaaatatctgggtccccagtacgtagctggcattaccaacctgaagaaatgctctacttcccctctcctggaagcatgtgagttcttacgtaaatag

SEQ ID NO: 29575 - DNA, 1656 bp, synthetic construct
  misc_feature 1..1656: note = Description of Artificial Sequence: Synthetic coding sequence
  source 1..1656: mol_type = other DNA
aaacctctcctcaatcatgttctggccatcaagggacccaggagcagatggaggactttttacaatattgcgacacggagaaaggccctgaagaacccgagtgaggagtatggcaagatacttgaggttgtgggccgatacagtgtacacaacgccggaatcagcttctccgtcaagaagcagggcgagacagtggctgacgtgagaactttgcccaacgcctctaccgtcgataatattcgttctatatttgggaacgccgtctctagagagctgattgaaattggctgtgaagataagacactggcttttaagatgaacggatatatctctaacgccaattacagcgtgaagaagtgtatttttctgctgttcatcaaccatcggctggttgagtctacttccctgcgcaaagccatcgaaaccgtgtatgcagcttacctgcccaagaacacacacccctttttgtacctgtcccttgagatctctccccaaaatgtggatgttaacgtgcacccaacaaaacatgaagtgcacttcctgcatgaggaaagtatcctggagagggtgcagcagcatatagagtccaagctcctagggagcaacagtagccgaatgtactttactcaaaccctgttgccaggactggccggtccctctggcgaaatggtcaaatccactacctccctcactagttctagtacttctggctcaagtgataaagtgtacgcccaccagatggtgcgaactgatagtcgagaacaaaagctggatgcatttctgcagcctctgtccaagcctctgtcgagccagccacaagccattgttaccgaggataaaacggacatttcctctggacgggctagacaacaggatgaagaaatgctcgagctgccggcacccgctgaggtcgccgctaaaaaccaaagtctggagggcgatacaaccaaaggaacttcagagatgtccgaaaaacgtggaccaacttcatctaatcctcgcaaaaggcaccgcgaagactccgacgtggagatggtcgaagatgattccaggaaagaaatgacagccgcatgcacccctcgtaggaggattataaacctgaccagtgttctcagcctgcaggaagagataaatgagcaggggcacgaggtattacgggagatgcttcataaccactctttcgtaggctgtgtaaacccgcagtgggctctcgcccaacatcaaactaagctgtaccttctgaataccactaaactgtctgaggaattattttaccagattctgatttacgactttgccaacttcggggtgctgaggctatcagaacctgcacctctctttgacctggcgatgctggccctggatagcccggaaagcggttggacagaagaggatggtccaaaagagggattagcagagtacatcgtagagtttttaaagaaaaaggccgagatgctcgcggattatttttcattagaaattgacgaaagcgaggtcccaggtagcattccaaactcatggaaatggaccgtcgaacacatcgtttacaaagccttgcgttctcatatcctacccccaaagcacttcactgaggacggtaatatcctgcagctggctaatctgcctgacctatacaaggtttttgaacggtgttag

SEQ ID NO: 29576 - DNA, 351 bp, synthetic construct
  misc_feature 1..351: note = Description of Artificial Sequence: Synthetic coding sequence
  source 1..351: mol_type = other DNA
atgagtgagaagagaggaccaaccagtagtaatcctagaaaacgccatagggaagatagtgatgtagagatggtggaggacgattctcgcaaagagatgactgccgcatgcacacctaggcgacgcataatcaacttgacatctgtgctttcactgcaagaggagattaatgagcagggtcatgaagtgctgagggaaatgctgcataatcattccttcgtcggctgcgtgaatccccagtgggccctggcccaacatcagaccaaactctatttgttgaatactacaaagctgcgtgttaagtgcttagcccctttccaaaccccagggagtggactgtggaacacgtag

SEQ ID NO: 29577 - DNA, 525 bp, synthetic construct
  misc_feature 1..525: note = Description of Artificial Sequence: Synthetic coding sequence
  source 1..525: mol_type = other DNA
atgtcagaaaaacgtggcccaacatcaagcaatccacggaagaggcaccgcgaggattcagatgtggagatggtggaagacgactccagaaaggagatgacagctgcatgcacgcctagacgccgaatcatcaatttgacatcagtcctgagcctccaggaagagatcaacgagcaaggccacgaggttttacgagaaatgttgcacaatcacagctttgtggggtgcgtgaacccccaaccatggcattctatcaagcccagctacacattctctacacccccttcgttttcggaagagctgttttatcaaatcctgatctacgatttcgccaactttggagttctacgcctaagtagcgaggtgccgggatctatccccaactcatggaaatggactgtagaacacatcgtgtataaggccctgagaagtcacatactccccccaaagcacttcaccgaggatgggaacatcctccagctcgcaaatttgccagatctgtacaaagtcttcgagagatgctag

SEQ ID NO: 29578 - DNA, 1977 bp, synthetic construct
  misc_feature 1..1977: note = Description of Artificial Sequence: Synthetic coding sequence
  source 1..1977: mol_type = other DNA
atggcctttgaagcgttagcatcaatcagtcacgttgcccacgtgacgatcacaacaaagacagctgacggtaaatgcgcctatcgggcaagctattctgatgggaagttgaaggcgcctcctaagccgtgtgccggaaaccagggcacccagattacagtcgaagatttgttctataatatagctaccagacggaaggcactgaagaacccatctgaggaatacggaaagatcctggaggtggtgggacgctacagtgtacataacgctgggatttccttcagcgttaaaaagcagggggagacggtcgcagacgtcaggactctgcccaatgcaagtacagtggataatataagaagcatcttcggcaacgcagtgagcagggagctgatcgaaattgggtgcgaagataaaactcttgcatttaagatgaatgggtacatcagcaatgctaactactcagtgaagaagtgcattttccttctcttcattaatcatcgcttggtagagtccacctctctgaggaaagctatcgaaacagtatacgcggcatacctgcccaaaaacacacacccgttcttgtatttaagtctggaaataagtcctcagaacgtggacgttaacgtccatcctacgaaacacgaagtgcatttcttacacgaggagtcaatcctggagcgcgtccagcagcacatcgaatccaaactgctgggatcgaatagcagcagaatgtactttacacaaacactgttacctggactagccggaccctcgggagagatggtcaagtctactacctcgctgacatctagctccacttctggaagtagcgacaaagtctacgcacatcaaatggtccgaacagattcccgcgaacagaaactggatgccttcctccagcccctgtccaaacccctttcctcacagccccaagctattgtcaccgaggacaagacagacatctcgtcaggccgagcacgccagcaggacgaggagatgttggagctgcccgcaccggctgaggttgcagctaagaaccagagcctcgagggtgatacgactaaggggacttctgagatgtctgagaaaagggggcctacctcaagcaacccgaggaaacgccacagggaagactccgacgtggaaatggtggaggacgatagcagaaaggagatgacagcagcctgtacccccaggcgtaggattataaacctcacatcagtgctgtccctacaggaagaaatcaatgagcagggccatgaggtcctgcgggagatgctccataatcatagcttcgtggggtgcgtgaatccccagtgggccttggcccagcaccagacaaagctgtacctgctgaacactacaaagctgtctgaggagttattctatcaaattcttatctatgacttcgctaactttggtgtgttacgacttagtgagccggctccactgtttgatttggctatgctggcgttggattcacccgaatccgggtggaccgaagaagatggaccaaaagaagggttagcggagtacatcgtcgagttccttaaaaaaaaggctgagatgctcgctgattatttttccctagaaatagatgaagaggggaatttgattgggctcccgctactgatagacaactacgtgcccccactggaggggctgcccatcttcatcctacggctagccacagaggtgaactgggatgaggaaaaggaatgttttgaatcactaagcaaggagtgtgcaatgttctatagtattcgcaaacaatacattagcgaggagagtaccctgtctggccagcagtctgaagttcccggatccatacctaactcctggaaatggacggtggaacatatagtttacaaggcactgcgctcccacatactgcccccaaagcacttcactgaggatgggaatatcctgcagctcgcaaacctacctgacctatacaaggtgttcgagagatgctag

SEQ ID NO: 29579 - DNA, 960 bp, synthetic construct
  misc_feature 1..960: note = Description of Artificial Sequence: Synthetic coding sequence
  source 1..960: mol_type = other DNA
atgattgaaaattgcctggacgccaagtccaccagcatccaggtaattgtgaaggaaggcggtctgaaattgatccaaattcaggacaatggaacgggtatccggaaggaggacctagatatagtgtgcgaacgcttcactacatccaagctacaaagttttgaggacctagcttccatctccacatacggatttaggggtgaggcactcgcaagcatctcgcacgtagcccacgtcacaattacgaccaaaactgcagatggaaaatgtgcctatagagcctcctactcagacggcaagctgaaggccccaccaaagccatgcgctggaaaccagggtactcagatcactgtggaagatctgttctacaacatcgccacaagacggaaggctttgaagaacccaagtgaagagtacggtaagatcctagaagtagtcggaagatacagtgtccacaatgcaggcatctcatttagcgtgaagaaacagggggagactgtagctgacgttcgcacactccctaacgcctccacagttgacaatatcaggtcgattttcggtaatgccgtaagtagagagttaatcgagattggctgcgaagataaaacgttagctttcaaaatgaatggctacatcagtaacgctaattattccgtgaaaaagtgcatatttctgttgttcatcaatcataggctggtagaaagtacctccctgcgaaaggcaattgagaccgtgtatgccgcatatctgccaaaaaatactcaccccttcttatacctttcccttgagattagtccccagaatgtggacgtcaacgtccaccccacaaaacacgaggttcatttcctgcacgaagaaagcatcctcgagcgagttcagcagcacatcgaaagtaagctgctggggtccaactctagccgaatgtacttcacacaaaaagagacaagtggtaggttctag

SEQ ID NO: 29580 - DNA, 1548 bp, synthetic construct
  misc_feature 1..1548: note = Description of Artificial Sequence: Synthetic coding sequence
  source 1..1548: mol_type = other DNA
atgaatggatacatctcaaatgctaactacagtgtcaagaaatgtatcttcttactattcatcaaccatcggctggtggagtccaccagcctacgtaaggccatagagactgtttacgctgcgtatttgcctaagaatactcacccttttttgtacctcagtcttgagatttcaccacagaacgttgatgtaaacgtgcatccaaccaagcatgaggtgcactttctgcacgaggaatcaatcttggagcgcgttcagcagcacatagaatccaagctgctgggtagcaactcatctagaatgtacttcacccaaacacttcttcccggtctggctggacctagtggagagatggtgaaaagcacaacctctctcactagtagctccactagcgggtcatcagacaaggtatatgctcaccaaatggttcgcaccgactcaagggagcagaagcttgacgctttcttgcaaccattgagcaagccactttcatcgcaaccccaggcgattgttacggaagataagacagatatctcatcaggcagagcacggcagcaggacgaggagatgctggagctcccggctcccgctgaagttgctgctaaaaatcagtccttggaaggggacacgactaaaggtacgtcagagatgtccgagaagcgcggtcccacttcctccaacccgcgtaaacgacatcgcgaagacagcgacgttgaaatggtggaggacgactcgcgaaaagagatgaccgcagcttgcacaccaagacgccgtatcatcaatttgacgagtgtattaagcctccaggaagaaatcaacgagcaaggtcacgaggtgctgagggaaatgctacataatcatagttttgtaggctgcgtgaacccccagtgggctctcgcacagcaccagacgaaactctacctgttgaataccaccaagttatccgaggagctgttctatcaaattctgatctacgattttgcaaactttggagtgttgcgcttgagcgaaccagctccactcttcgacttggcaatgctggcactggactcccctgagagtggatggacagaagaagacggccctaaagagggccttgcagaatacatcgtcgagttcttgaagaagaaggcggagatgctggccgattacttcagccttgagattgacgaggaaggaaatttaatcggcctgccgctcctcatcgataactacgtcccgccattagaggggctccccatcttcattctgcggttggccacggaggtgaactgggacgaggaaaaggagtgttttgagagcttatcaaaggaatgtgccatgttctattccatacgcaaacagtatataagtgaagaaagtacgctgagtgggcagcaatctgaagtccctgggagcatccccaattcatggaaatggacagtggagcacatcgtgtataaggccctgcggagccacatcctcccgccaaaacacttcactgaagacggcaacattctccagctcgcaaatctccctgacctgtataaggtgttcgaacgctgttag

SEQ ID NO: 29581 - DNA, 2040 bp, synthetic construct
  misc_feature 1..2040: note = Description of Artificial Sequence: Synthetic coding sequence
  source 1..2040: mol_type = other DNA
taaaggctcgatgaaaccgtggttaacaggattgccgcaggcgaggtgatacagcgcccagctaacgccattaaggagatgattgagaactgtctggacgccaagtcaacctcaatccaagtcatagtgaaggaggggggattaaagttgatacagatccaggacaatggcacgggaattcggaaggaggatctcgacattgtatgtgaacgctttacaacttcaaaattacagagttttgaggatctggcaagcatcagcacttatggattcaggggcgaagccctggcgtccatttcgcacgtcgctcatgtcactataaccaccaagaccgcagacggcaaatgcgcctacagagcctcgtatagcgacggaaagctgaaggctccacccaagccttgtgcaggaaaccagggcacccaaataactgtagaggacctattttacaatattgctaccaggagaaaggccttaaagaacccctccgaagagtacgggaaaatactcgaggttgtcggcaggtacagtgtccataacgcgggaattagtttttctgtaaaaaaacagggagagactgtggccgatgtcaggacccttccaaacgcctctaccgtggacaatatacgttccatattcggaaacgctgtctccagagagttgatcgaaatcggttgtgaggataaaacgcttgctttcaagatgaacggatacatttctaacgcaaactactccgtgaagaaatgcatttttctgctgtttatcaaccatcgcctcgtggagagtacatctctcagaaaggccatcgagacagtgtatgccgcatacctgccgaaaaacacccacccttttctttacctgagtctcgagataagtccccagaatgtggatgtcaatgtgcacccaaccaaacacgaggtacactttctacatgaggaaagcattttggaaagagtgcagcagcatatcgagtccaaattgctgggatccaactcctcccgaatgtactttactcaaacactattgcctggtctggctggaccctcgggcgaaatggtgaagtccactacgtcgctcacgagtagtagcacatccggtagctcagacaaggtctacgctcaccagatggtcaggactgactcccgagaacaaaagttagacgccttccttcagcctctgtcaaagcccctcagtagtcagccacaggccatcgtaaccgaggacaagactgatatcagctctggtcgagctaggcaacaggatgaggagatgcttgaactgccggcacctgctgaggtggccgctaaaaaccaaagcctcgagggagatacgaccaaaggaaccagcgagatgtctgagaaacgaggacctacatcctctaatccaagaaagcggcaccgcgaggatagcgatgtagaaatggtagaagacgacagccgaaaagagatgactgctgcgtgcacacctcggagacgtatcatcaacttaacaagcgttttatccctgcaggaagaaatcaatgaacagggacacgaggtgttgcgcgaaatgcttcataaccatagttttgtgggctgtgtcaacccccaatgggcgttggctcagcatcagaccaagctgtacttactgaacaccacaaaacttagcgaggaactgttctatcagatactgatctacgactttgctaacttcggggtcctgcggttaagtgaacctgctccactgtttgatttggccatgttggccctcgatagcccagagagtggctggacggaggaagacgggccaaaagaagggctggctgaatatattgtggagttcctgaaaaaaaaggcagaaatgttggcagactatttttccctggagattgacgagagtgaggttccaggctcaatccctaattcatggaagtggactgtcgagcacatcgtgtataaggcactccggtcccacattttgcctccgaaacattttacagaggacggtaacatactccagctagccaacctcccggacctgtataaggtcttcgaacgctgctag

SEQ ID NO: 29582 - DNA, 1548 bp, synthetic construct
  misc_feature 1..1548: note = Description of Artificial Sequence: Synthetic coding sequence
  source 1..1548: mol_type = other DNA
atgaacggatacatttccaatgccaattatagcgtgaaaaagtgtattttcctactgttcataaatcatagactggttgagagtactagcttgagaaaggcaattgaaacagtttacgccgcatacctgcccaaaaatacacacccctttctgtacttgtcactcgaaattagcccgcagaatgttgacgtgaacgtacatcccaccaagcatgaggttcactttcttcacgaagagtccatactggaacgagtccagcaacatatagaaagtaaactcctgggcagtaatagttctcgtatgtatttcacacagacgctcttgccaggcttagcaggtccaagcggggaaatggtcaagagtaccacctccctcacttcttcctccacgagtggcagtagcgataaggtgtacgcacaccagatggttagaaccgacagcagggagcaaaaactggatgccttcctgcagccccttagtaagcctctgagctctcagccccaggcaatagtgacagaggacaaaacagacatttcttccggccgtgccaggcaacaggacgaggaaatgctggagctgcctgctcccgcagaagtggcagcaaagaatcagtccctggaaggggacactaccaagggaacgtcagagatgtctgagaagcgcggacctacttcatccaatccacgcaaacgccaccgcgaggattccgatgtcgaaatggtcgaggatgacagcaggaaggaaatgacagctgcctgcactcctcgtcgtcggattatcaatctcacctctgttctgtctctgcaagaggagatcaatgagcaggggcacgaagtgctgagagaaatgcttcacaaccactccttcgttggttgtgtcaatcctcagtgggccctcgcacagcatcagaccaagctgtacctcctgaacactactaaactgtccgaggagctgttctaccagatcctgatttacgattttgctaactttggcgtgttgagactgtccgaacccgctccactgtttgacctcgccatgctggctctggactcgccagagtccggatggactgaagaagatggacctaaagaaggtctggctgagtatatcgtggagttcctgaaaaaaaaggccgaaatgctggccgattacttttccctggagattgacgaagagggaaatctgattgggttacctctcctcatcgataattacgtgcctcctcttgaggggcttccaattttcatactacgcctcgccaccgaggtcaattgggatgaggaaaaagaatgcttcgagtcattgtccaaggagtgcgcgatgttttacagcataagaaaacagtacatctcggaggagagtaccctttcagggcaacagtccgaggttccaggttcgatccctaactcttggaagtggactgttgagcatatcgtttacaaggcactgagaagccatatcctaccaccaaagcattttactgaagacggtaatattttgcagcttgcaaacctgccggatctgtacaaggtctttgagcgatgttag

SEQ ID NO: 29583 - DNA, 1383 bp, synthetic construct
  misc_feature 1..1383: note = Description of Artificial Sequence: Synthetic coding sequence
  source 1..1383: mol_type = other DNA
atgaacggctacatctctaacgccaattactctgtgaagaaatgcatatttttattgtttatcaatcaccggcttgtagaatctacgtctcttcgcaaggcaatcgagacagtctatgcagcttatctccctaaaaatacgcaccctttcctgtatctctccttagagatctcccctcaaaatgttgacgtcaatgtgcatcctacaaaacatgaagttcactttcttcacgaggagagcatactggagcgagtgcagcagcatatcgagtcaaagctgctaggctctaattcctcaagaatgtacttcacacagaccctgctccccggactggctgggccatccggagagatggtgaagtcaactacttccctcaccagttcctccacctccggcagcagtgataaagtctacgctcatcagatggtgagaaccgatagtcgggagcaaaagctggatgctttcctgcagcctctgagtaagcccctatccagccagccccaggctatcgtaaccgaagataaaacagatatcagctcaggcagggccagacaacaagacgaggagatgctcgaactgcccgctcctgcagaggtggccgctaagaaccaatctttggagggtgacacgacgaaaggaacctccgagatgagcgagaaaagaggcccaacatcctccaaccccagaaagcggcacagagaggactccgacgtagaaatggtggaggacgactccagaaaggaaatgactgctgcatgcacgcccagacgcaggatcattaacctaaccagtgtgctcagtctacaggaagagatcaatgagcaggggcatgaagtcctacgagaaatgcttcataatcattccttcgtgggatgcgttaatcctcagtgggccttggcccaacaccagacaaaattatatcttctgaacaccactaaactctctgaagaactgttctaccaaatcctgatatatgactttgcaaacttcggagtactgagactttccgaacccgcaccgttatttgatctagcaatgctggccctcgattcccctgagagcggctggacggaagaggatggacccaaggaaggcttggctgaatacattgttgagtttctcaaaaagaaagcagagatgttggctgactactttagtctggagattgacgaggaaggcaacctgattggcctgccgctgctaatcgataactatgtgccgcctttggaggggctgcctatcttcatcttgcgcttagctacggaagtgaactgggacgaggagaaggaatgcttcgagagcctgtctaaggagtgtgccatgttctattctatccgaaagcagtacatctccgaggagagtaccttgagcgggcagcaatag

SEQ ID NO: 29584 - DNA, 843 bp, synthetic construct
  misc_feature 1..843: note = Description of Artificial Sequence: Synthetic coding sequence
  source 1..843: mol_type = other DNA
atgatcgaaaactgcctagacgccaagtccacaagtatccaagtgattgtcaaagagggtggcttgaagttgattcaaattcaggataacggcaccggcattcggaaggaagatctcgacatcgtctgtgagagattcaccacctcaaaactccagagtttcgaggatctggcttctatctccacttatggcttccggggagaggccctggcctcaatttcccacgtcgcacacgtcaccattactacaaagacggccgatggaaaatgtgcttacagggctagctattcggacgggaagctgaaggcgcctcccaagccgtgtgctggaaaccagggcacgcaaatcacagtggaggatctattctacaatattgcaacccgcagaaaagcactgaagaatccttccgaagaatacggaaagatcctcgaagtggtgggtcgctacagtgttcataacgccggaattagtttttctgttaagaaacagggcgaaaccgtcgcagatgtccgtacgctgccgaatgcgtccaccgtggacaacattcgcagcatcttcggtaatgcagtgagtcgagagctgatcgaaatcgggtgtgaagacaagacactggcgtttaaaatgaatgggtatatctccaacgcgaactattccgttaaaaagtgtatcttcctcctgttcatcaatcaccgcctggtagagtccaccagtctccgtaaagcaattgagaccgtttacgcagcgtatctgcctaaaaatacccacccgtttctgtaccttcgcctgtgttaccaggacctactggctccgttaggacgatggcttaatccacagcaggtgtag

SEQ ID NO: 29585 - DNA, 1548 bp, synthetic construct
  misc_feature 1..1548: note = Description of Artificial Sequence: Synthetic coding sequence
  source 1..1548: mol_type = other DNA
atgaatgggtacatctctaacgctaactattctgtaaaaaagtgcatttttcttctcttcattaatcacaggctcgtggagagcacctcattaagaaaagcaatagagactgtgtatgccgcttacctgcccaaaaatacccatccattcttgtatttgagcctggagatctcccctcagaatgttgatgtgaatgttcatccaacaaaacacgaggtccattttctccatgaggaatctatcctcgagcgggttcaacaacacattgaaagcaagctgctgggaagcaactcttcacgcatgtatttcacccagacactgctccccggtcttgctggtccaagcggtgagatggtgaagtcaactaccagcctcaccagtagcagcacgtcaggatctagcgataaggtctatgcccaccaaatggtccggacagactccagggaacagaagcttgacgctttcttacagcctctgtctaagcccctgagcagccagcctcaggccatcgtgaccgaagacaaaacggatattagctccggtagggcccgacagcaagatgaggagatgctggagctacccgctcctgctgaggtcgcagctaaaaaccagtctctggagggcgacacaacaaaaggaaccagtgagatgagcgagaaaaggggtcctacaagctctaaccctaggaaaaggcaccgagaggacagcgatgtcgaaatggtagaagacgattcccgcaaggagatgactgccgcttgcacacctcggaggaggatcatcaatttaacaagcgtgcttagcttacaggaggaaattaacgagcagggacatgaagtacttcgggagatgttacataatcatagcttcgtggggtgcgtgaacccccagtgggccctggcgcagcaccagacgaagctctatctcctaaacaccaccaagctgtccgaagagctgttctaccagatactgatatatgattttgctaacttcggggtcctccggctgagtgagccagccccacttttcgatctcgccatgctagcgctggactcaccagagtctggctggactgaggaagacggcccaaaggaaggcctggctgaatacatcgtcgagttcttaaaaaagaaggccgaaatgttggccgactacttttctttagaaatcgatgaggaaggtaacctgattggtctccctctgctgatcgacaactacgtacctccactggagggactccctatcttcatcctacgacttgccaccgaagtgaattgggatgaggaaaaagaatgtttcgagagtctgagcaaggaatgtgctatgttttactccatacgcaagcaatatataagcgaagagtccacactttctggtcaacagtctgaggtgcctgggtctatcccgaatagttggaaatggaccgttgagcacatagtctacaaggccctgaggtcccatatcctccctcccaagcatttcaccgaggacgggaacatccttcagctggctaatctgcccgatttgtataaggtgtttgaaaggtgttag

SEQ ID NO: 29586 - DNA, 4290 bp, synthetic construct
  misc_feature 1..4290: note = Description of Artificial Sequence: Synthetic coding sequence
  source 1..4290: mol_type = other DNA
atgattaaatgcttatctgtggaagtgcaggctaagctccgttctggactggcaatcagctccctggggcagtgcgtagaggagctggccctgaattctatagacgcggaggccaagtgtgtcgccgtccgcgtcaacatggaaacctttcaagtccaggtgatcgataatggcttcggtatggggagtgatgatgtggaaaaagttggcaacaggtactttacgtctaagtgccattccgtgcaagacctggagaacccacgcttctacgggttccgaggggaggctctcgcaaatattgctgacatggcgtctgccgtggaaatctccagtaagaaaaatcgcacaatgaagacctttgtgaaactcttccagagcggtaaggcacttaaggcatgtgaggccgacgtaactcgcgcaagcgccggaaccacagtgacagtgtataatctgttttaccagttacctgtgcggaggaaatgcatggatcccaggttggagtttgaaaaggtgcgacagcggattgaggccctgagcttgatgcatcctagtatatcattctccttacggaacgacgtcagcgggagtatggtcctgcaacttccaaagactaaggatgtttgctcacggttttgccagatttatggcctcggaaagagtcagaagctcagggagatcagtttcaagtacaaggaattcgaactgagcggatacatttcatctgaagcccattataacaaaaacatgcagttcttgttcgtgaacaagcggctggtattgaggacgaagctccataaacttatcgactttttacttcgcaaagagagcattatttgcaaacccaaaaacggcccaacctcaagacagatgaatagcagccttcgtcaccggagcactccagaactttacggcatctatgtcatcaacgtgcaatgtcagttttgtgaatacgacgtatgtatggaacccgctaagaccctgattgagttccagaattgggacacccttctcttctgtatacaggaaggtgtaaagatgtttctgaagcaagaaaaattattcgtggaactgtccggcgaggacatcaaagagttcagtgaggataacggattttcactgtttgacgctacactgcagaaacgagtaacgagcgacgagcggagcaactttcaggaagcttgtaacaatatcttagattcatacgagatgttcaatctccaatctaaggctgtgaaacgaaaaaccaccgccgagaacgttaatactcaatcatctagggacagcgaggcaacccgaaaaaacactaacgatgcctttctgtatatatacgaatcagggggacctgggcactcgaagatgaccgagccctcactgcagaataaagattcctcatgctcagagagcaaaatgttggaacaggagactatagttgcaagcgaggccggtgaaaacgagaagcacaagaaatccttccttgaacacagtagtctagagaacccatgcggaacaagcctggagatgtttctgtctcccttccagaccccctgtcatttcgaggagtccggacaggatctggaaatctggaaggagtccaccaccgtgaatgggatggccgctaacatcctgaaaaataataggatccaaaaccagccaaagcggttcaaagatgccactgaagtggggtgtcagcctttgccttttgcgaccaccttgtggggcgttcactccgctcaaaccgagaaggagaagaaaaaggaatcctccaattgtggcagacgcaacgtgttcagctatgggagggttaagctgtgcagtacagggttcataacccacgtggtgcagaacgaaaagacaaaatccaccgaaaccgaacactcttttaaaaactacgtgcgcccaggcccaacgcgggctcaggaaaccttcgggaacagaactcggcattccgtggagactccggatataaaagacctcgcttcaacgctgagcaaagagagtggacagttgcccaataagaagaattgccgaacaaatatatcttacggacttgaaaatgaacctactgcgacatataccatgttcagcgccttccaggaggggtccaaaaaatcccagactgattgcatcttgtctgacacttctccatcgtttccttggtatcgacatgtgagtaacgatagtcggaagaccgacaagttgattggtttttccaagcctattgtgcgcaaaaagctgagcctgtcttctcaattgggttccctcgagaagttcaaacgccagtatggaaaagtggagaaccctttggatacagaggtagaggagtctaacggggtgacaacgaatctctcactacaagtggaacccgatatattactgaaagacaagaatcggctggagaactccgacgtgtgcaaaataaccaccatggaacactcagacagcgatagctcctgccagcctgcaagccacatattaaactctgagaaatttcctttctctaaagatgaagattgcctcgaacagcagatgccaagcttgcgagagagtcccatgacacttaaagagctttccttgttcaaccgaaagccattggacttagagaagtccagtgaatctctggcctccaagctcagtcgtttgaaaggctctgaacgggaaacacagacgatgggaatgatgagccgctttaacgagctgccgaactcagactctagccgtaaggactctaaactttgctctgtactgacacaggacttctgcatgttgttcaataataaacatgagaagacggaaaatggagtgattcccacaagtgatagcgcaacgcaggacaacagttttaacaaaaattctaaaacacattctaactcaaacactacggaaaactgcgtaatcagtgaaacgcctttagtattgccgtacaataacagtaaggtcaccggtaaagattcggacgtgctcattcgcgcatctgagcagcagatcggcagtttggactctccatccggaatgttgatgaaccctgtggaggatgccaccggagatcaaaatggcatctgtttccagtcggaagaatccaaggcccgagcctgtagtgaaaccgaagagagcaacacatgctgctcagattggcagcgacacttcgacgtcgctttgggccgtatggtgtatgtcaataaaatgaccggtttgtctacgtttatcgcccctacagaagacatccaggcagcctgtacaaaggaccttactacggtggccgtggatgttgtactggagaatggctcccaatatcgatgccagcctttccggtcggatcttgtacttccgttcctgcctcgggctcgggctgaaagaactgtcatgcgacaagacaatagagatacggtcgatgacacggtgtcctccgagtctctccagtccctgtttagcgaatgggacaacccagttttcgccaggtaccccgaggtcgctgtagacgtgagctcaggacaagcagagtccctggccgtcaaaattcacaatattctttatccataccggttcaccaaagggatgattcactctatgcaagttctgcagcaggtcgacaataagttcattgcctgcttgatgtcaacaaaaaccgaggagaacggcgaggccgactcctacgaaaagcagcaggctcaggggtccggtcgaaagaaactgctgtccagcacgctgattccccctctcgaaattaccgtgaccgaggagcaacggagattgttgtggtgctaccataaaaatctggaagatctgggactggaattcgtgtttccggacacatcagattctctggtgttggtcggcaaggtgcccctgtgttttgtggaacgcgaagccaacgagctgcgccgtgggagaagcaccgttacaaagagcatcgtggaggagtttattcgagagcagctcgaactgctgcagaccactggagggatacaaggcacgctccccctcaccgtgcagaaagtgttggcatcccaagcttgtcacggcgctatcaagtttaacgacggactctctctccaagagagttgccggctgatagaggctctgtcatcctgccagctccctttccagtgtgctcatggcagaccctccatgcttccgcttgcagacatcgatcacctggaacaggagaaacagatcaagccgaacctgactaaactgcgcaaaatggcgcaggcctggagactattcggcaaggcagagtgtgataccaggcaatctttacagcagtcgatgcctccctgtgaacctccctag

SEQ ID NO: 29587 - DNA, 4362 bp, synthetic construct
  misc_feature 1..4362: note = Description of Artificial Sequence: Synthetic coding sequence
  source 1..4362: mol_type = other DNA
atgatcaagtgcttatccgtcgaggtccaggcgaaactgcgatccggactggccattagcagcttgggacagtgcgttgaagagctcgccttgaactctattgacgcagaagctaaatgcgtggccgtgcgagtgaatatggagacgtttcaagttcaggttattgataacgggttcggcatgggctcagacgacgtggaaaaagtgggaaacaggtattttaccagtaagtgccattcagtacaagatctcgagaacccacgcttttacggctttcgtggtgaagccctggccaacatcgctgacatggcttccgctgttgagatctcctcaaaaaagaatcgcactatgaagacgttcgtgaagctgttccaatctgggaaggctctaaaagcatgtgaagcagacgtgactcgcgcttcagcgggaacgaccgtcaccgtgtataatttgttttatcagctacccgttcggagaaagtgcatggatccaagactggaatttgagaaagtacgccaacggatagaagctctttccttgatgcatcctagtataagcttctcactgcggaacgacgtttcaggaagtatggtccttcagctccccaagacgaaagatgtatgttcccggttttgtcaaatctacggcctgggaaaatctcaaaagttacgcgaaatatcgttcaaatacaaggaatttgagctgagtggttacatcagtagcgaagctcactataacaagaacatgcagtttctatttgttaataagaggctagtccttaggaccaaacttcacaaacttatagatttcctgttgcggaaagagtcgattatttgcaaacccaagaacggacccacctctcggcaaatgaatagcagcctgcggcaccggtccacacccgagctgtacggcatctatgtcatcaacgttcaatgccagttttgcgaatacgatgtgtgcatggagcccgctaagacattaattgagtttcaaaactgggacacacttctgttttgtattcaagagggcgtgaagatgttcctgaagcaagaaaagctctttgtggaactgtccggggaagacatcaaggagttctctgaggacaacggctttagcctcttcgatgccactctccaaaagcgagtcacatccgatgaaagaagcaattttcaggaggcctgcaacaatatcttggattcttacgagatgttcaacctgcaaagcaaggccgtgaagagaaagacaaccgctgagaacgtgaacacgcaatctagccgcgacagcgaagccacccgtaaaaacaccaatgacgccttcctctacatttacgagtccggcggaccgggtcacagcaaaatgaccgaaccttcattacagaataaggattcgtcctgctccgaaagcaagatgctggaacaggagaccatcgtcgcatccgaagcgggtgagaacgaaaagcacaaaaagtctttcttggaacactcctcccttgaaaatccttgcgggacttccttggagatgtttctctctcctttccaaacaccttgtcatttcgaagaaagtggacaggatttagagatctggaaagagagtaccacagtcaacggaatggcagccaacattctgaaaaataacaggatacaaaaccagccaaagagattcaaagacgcgacagaggtggggtgtcagccattaccatttgcaaccaccctctggggagttcactcagcccaaaccgaaaaagaaaagaaaaaggaatcaagcaactgtgggaggcgcaatgttttctcctacggccgagtgaaactgtgttcaaccgggtttatcacacacgtggtgcagaatgagaagaccaaatccaccgaaacagagcatagttttaaaaattacgtacgaccagggccaacccgagcgcaagaaacctttggaaataggacgcgccacagcgtcgagactccggacattaaagatctagcatccaccctgtctaaagagtcaggccaactacctaataaaaaaaattgccggacaaatatctcatacgggctggaaaacgaacctacagctacctacactatgttttccgcctttcaggagggaagcaagaagtctcaaacagattgtatcctgtccgacacaagcccgtctttcccatggtatcggcatgtgagtaatgatagcaggaaaactgataagctgatcggtttcagcaaaccaattgttaggaagaagctgagcctcagcagtcagttagggagcttggaaaaattcaagagacagtacgggaaggtggagaatccactcgacacggaggtcgaagaatcaaatggcgttaccaccaacctaagcctccaggtggagcctgacatcctgttaaaagataagaatcgcttagagaactccgatgtctgtaagataactacaatggaacattccgactccgattccagttgtcaaccggcttctcacatccttaattcagaaaagttcccgtttagcaaggatgaagattgcctcgaacagcagatgccaagtctgcgcgagagccctatgacactcaaagaactgagcctttttaacaggaagccactcgatctggagaagagctctgagtcacttgcgtctaagcttagccgcctcaaggggtcagaaagagaaacacaaacgatggggatgatgtctagattcaatgagttaccaaattcagatagtagtcggaaggattctaaactgtgtagcgtgttaacacaagatttctgtatgctcttcaataataagcacgagaaaaccgagaacggcgtgatcccgacatctgatagcgccacacaggacaactctttcaataaaaatagtaaaacgcactccaactctaatactacggaaaattgcgtgatttcggagacgccactggtgctgccttacaacaatagcaaagtcacgggcaaggactccgacgttctgattagagctagtgaacagcaaattggtagcttggacagcccgtccggaatgttgatgaatcccgtggaggacgcaacaggcgaccagaatggaatatgcttccagtcagaagaatccaaggcgagagcatgcagcgaaactgaggagtccaatacctgttgcagcgattggcagcgccacttcgacgtggcattaggcagaatggtgtacgtaaacaagatgaccgggctgtccacattcatagctcctactgaagacatccaagccgcttgtacgaaggatctgactactgttgcagtggacgtagttctggagaacggctcccagtataggtgccagccctttaggtcagatcttgtcctgccttttttgccacgcgcacgagctgagcgtactgtgatgcggcaagacaacagggacacagtggacgacacggtcagcagcgaatcgctgcagagcctattcagcgagtgggacaacccagtgttcgcaaggtaccccgaggtggcagtggatgtctcgtcaggtcaagcagaaagcctggccgttaagatccataacattctttacccgtataggttcaccaaaggcatgattcacagcatgcaagttctccagcaggtggacaacaagttcatcgcctgtctcatgagcaccaaaaccgaagagaatggggaggccggaggtaatctgctggttctggtggatcagcacgcagcccatgagcgcatacggttggaacagttgatcattgattcctatgaaaagcagcaagcacaaggttccggaaggaagaagctgctcagctcaacactaatacccccactagaaattactgttaccgaggaacagaggagactgctctggtgttatcacaagaacctggaggatctcggcttggagtttgttttcccggacacatccgattctctggttttagtaggaaaagttccactctgcttcgtggagagggaagccaatgagcttagacgtggcaggtctactgtgactaagtctatcgtggaagagttcatccgtgaacagctggagctgttacaaactactgggggaatccagggaactctgccactcactgttcagaaggttctcgcgagtcaagcttgtcacggcgcaattaaatttaacgatggactctccttgcaggaatcatgccggcttatcgaggctctgtcgtcctgtcagctgccgtttcagtgcgcacacgggcgacccagcatgcttcctctggcagacattgatcacctcgagcaggagaaacagattaagcccaacctgaccaagctgaggaagatggcccaggcttggagactgttcggtaaggcagagtgcgatacccgccagagcctgcagcagagcatgccgccttgtgaaccgccttag

SEQ ID NO: 29588 - DNA, 1176 bp, synthetic construct
  misc_feature 1..1176: note = Description of Artificial Sequence: Synthetic coding sequence
  source 1..1176: mol_type = other DNA
atggtgtacgttaacaaaatgaccgggctgagtacatttatcgcacctacagaggacatccaggccgcttgcaccaaagatttgacaactgtggccgtggatgtggtcctggagaatgggagtcagtatcggtgtcaaccttttcgtagcgacctcgtgctccctttcttgcctagggccagggctgaacgtactgtgatgcgccaggataaccgagatactgtagatgacaccgtgtcctcggagagccttcagagtctattctccgaatgggataatcctgtgttcgctaggtaccccgaggtcgcagtcgacgtgagctcaggccaggcagaaagcctagcggttaaaatacacaatattctatacccgtataggttcaccaagggcatgatacactccatgcaggtattgcagcaggtggacaataagtttattgcgtgtcttatgtcaacaaaaaccgaggaaaatggggaggcgggaggcaatctcctggtcctcgtcgatcagcacgcagcccatgagagaatacggctggagcagcttattatcgactcgtatgagaaacagcaggcacaaggaagcggaagaaagaagctgctgagctccacgttgatccctcctctcgagatcactgtaacagaagaacagcgcaggctgctctggtgctatcacaaaaacctggaggacctgggccttgagtttgtatttccggacacaagcgatagcctggtgctcgttggtaaagtccccttatgctttgttgaacgcgaggccaatgaactgcggaggggtagatcgaccgtcactaaaagcattgtcgagttgctacagactactggaggtatccaaggaaccttgcccctgacggtgcagaaagtgttggcttcccaggcttgtcacggcgctatcaaattcaatgatgggctgagcctgcaggagtcatgcaggctaatagaggccctttcctcttgccaattgcccttccaatgtgcccacggcagaccctctatgctcccactggcggacatagaccatctagagcaagagaagcagattaaacctaaccttaccaaattacgcaaaatggcccaggcttggagactattcggtaaagccgaatgcgatacaaggcagagtctgcaacaatccatgcctccctgcgagcctccttag

SEQ ID NO: 29589 - DNA, 597 bp, synthetic construct
  misc_feature 1..597: note = Description of Artificial Sequence: Synthetic coding sequence
  source 1..597: mol_type = other DNA
atgaaccctgtggaggacgctaccggggatcagaacggaatttgttttcagtcagaggagtccaaggcgagagcttgcagtgagactgaggaaagcaacacgtgttgcagcgactggcaacgacattttgatgtggcgttagggaggatggtctacgtaaataaaatgactggactctccacctttattgcccctactgaggacatacaggcagcatgtaccaaggatctgaccacggtcgcagtggacgttgtcctggaaaacggatctcagtaccgatgtcagccattccggagtgatcttgttttaccctttctgcctagagccagggctgagaggaccgtgatgcggcaggataacagagatacggtggacgacaccgtatcctctgagtccctccagtcactcttttctgagtgggataacccagtgtttgcaaggtacccagaagtgcttcagcaggttgataacaaattcatcgcttgcctgatgtcaaccaaaactgaggagaatggggaagccgctgaattgatgatgctccaagatccgtgttgccgccagagtagggaggatgagaatcatgagttctccctgtag

SEQ ID NO: 29590 - DNA, 489 bp, synthetic construct
  misc_feature 1..489: note = Description of Artificial Sequence: Synthetic coding sequence
  source 1..489: mol_type = other DNA
atgatcaaatgcctttccgtagaagtgcaggctaaactgcgttcgggactggctatctcaagccttgggcagtgtgtagaggagctcgcccttaattctatcgacgctgaagcaaagtgtgtcgcagtcagagtgaatatggagacctttcaggtgcaggtcattgacaatggatttggcatgggcagcgatgacgtcgaaaaggttggcaatcgatattttacaagtaagtgtcacagtgttcaggatctggagaaccctaggttttacggctttagaggggaggctctcgccaacattgcagatatggcatccgccgtggaaatttcatctaaaaagaatagaacgatgaaaacatttgttaaactgttccagagcgggaaagcattgaaggcatgtgaagcagatgttacaagagctagcgccggaactaccgtgactgtttataacctgttttaccaactcccagtgagacgcaagtgtatgtag

SEQ ID NO: 29591 - DNA, 4362 bp, synthetic construct
  misc_feature 1..4362: note = Description of Artificial Sequence: Synthetic coding sequence
  source 1..4362: mol_type = other DNA
atgatcaaatgtctctcagtggaggtccaggccaagctgagatccggtttggccatttcttcccttgggcagtgcgtcgaggaactcgcattgaactcaatcgacgcagaggctaagtgtgtggccgtacgggtcaacatggagacatttcaggttcaggtcatcgataacggcttcgggatgggatccgacgacgtcgagaaggtaggcaaccggtattttacatcaaaatgtcattccgtccaggacctggagaatcccaggttttatggttttcgaggagaagcactggcaaatatcgccgatatggcatcagccgtcgagatatcttctaagaaaaaccgtacaatgaaaacgttcgtcaaattatttcagtcaggtaaggccttgaaggcctgcgaggccgatgtcacaagagcctcagccggtacaactgtgaccgtgtacaacctgttttaccaactgccagtgaggagaaaatgcatggatccaaggctggagttcgaaaaggtgcgacaacggatagaggccttatctctgatgcacccgtctatatctttttcgttaaggaatgatgtttctggctcgatggtgctccagctccccaagaccaaggatgtgtgctcccgtttctgtcaaatctacggtttgggtaaatcacagaagctgcgcgaaatcagcttcaagtataaggaattcgagttgtcagggtacatttcatccgaggctcattacaacaaaaatatgcagtttctatttgtgaacaaacgcctcgttttacgaaccaagcttcataagttaattgacttcctcctgagaaaggagtccataatctgtaagcccaagaacggtccaacttcaaggcagatgaacagttccctccgtcatcgcagtacccccgagctctatggaatatatgtaatcaacgtgcagtgccagttttgtgagtacgacgtgtgtatggaacccgcaaaaaccctcatcgagttccagaactgggacacactcctgttttgcattcaggaaggagtaaagatgttccttaaacaggaaaagctgtttgtggagctgtctggagaagacattaaagaattttcagaagacaatggttttagtctgtttgacgccacactccaaaagcgcgtgacaagtgatgaacgctctaatttccaggaagcctgcaataacattcttgactcttatgagatgttcaacctccagtccaaggctgttaagagaaagacgacagccgagaatgttaatacgcaatcgtcacgtgattccgaagctaccagaaagaacaccaacgacgcatttctctacatatatgaaagcggcggaccaggtcactccaaaatgactgagccaagtctgcagaataaagactctagctgttccgagagcaaaatgctggagcaagagactatcgtggcatctgaagctggggaaaacgagaaacacaagaaatcgtttcttgaacatagctcactcgagaacccttgcggcacaagtttagagatgtttctgtccccattccagaccccctgccacttcgaggaatcagggcaggatttggagatttggaaagagtcgacaactgtgaatggtatggccgctaatatcctgaaaaataaccgcatacagaaccagcccaagcgctttaaggacgccacagaagtgggctgccagccattaccatttgccacaacgctatggggggttcattctgcacagaccgagaaggaaaagaagaaggagagtagcaactgcgggagaaggaacgtttttagctacggcagggtaaagctgtgtagcactggtttcattacgcatgtggtgcagaatgaaaagacaaagtcaacagaaacagagcatagcttcaagaactatgttagaccaggacccacaagagcccaggaaacatttgggaatagaacacgtcactctgtcgagactcccgacataaaggatttggcctccaccctaagtaaagaaagtggccagctcccaaacaagaagaactgtcgcacgaatatctcctacggtctggagaacgagcccacagcgacatacaccatgttctcagctttccaagagggtagcaagaaatcgcagactgactgcattctgtccgatacaagtcctagttttccctggtaccgccacgtgagtaacgactctcgaaagaccgacaaattaattgggttcagtaagcccattgttaggaaaaagttgtcactgtcatcacaattaggaagtctggagaaatttaagaggcaatacggaaaggtggagaacccacttgacacggaggtggaggaatccaacggtgtcactacaaacctgagcctccaagtcgagcctgacatactgctcaaagacaaaaatcgcctggaaaactctgatgtatgtaaaataacaacaatggagcactcagactctgatagttcctgccagcctgcatcacacattctgaacagtgaaaagttcccattctcgaaggatgaggactgcctggaacagcagatgcctagcctgagagagagccccatgaccctgaaagaactgagcctgtttaacagaaagccactggatctggaaaaaagttccgagtcactggccagcaaattgtctaggcttaagggaagtgagcgcgagacacagacaatggggatgatgagcagatttaatgagttgcccaattccgactcctcacggaaggattcaaaattgtgctccgtcctgacccaggacttctgtatgctgttcaataataaacacgagaaaaccgagaatggggtgatcccaacttccgatagcgccactcaagacaattcctttaacaagaatagcaaaacccactccaactccaatacaaccgagaactgtgtaataagtgaaacacctctcgtcctgccctataacaacagtaaagtaacaggcaaggattctgacgttctgattagagcctccgagcagcagatcggatccttggattcgccaagtgggatgctcatgaaccctgtggaggacgccacgggagaccagaacgggatctgctttcaaagcgaggagagtaaggcgagagcttgcagcgagaccgaggaaagtaacacgtgttgctccgactggcagagacactttgatgtagccctgggcagaatggtctacgtaaacaaaatgaccgggctgtcaaccttcatcgccccaaccgaggatatccaagccgcatgcacgaaggacctgaccactgtggcggtcgatgtggtcctcgagaatggatcacagtatcgttgccagcctttccgtagtgatctcgtactgccattcctgcctcgtgctcgcgctgagcggacagttatgagacaggataatcgggacaccgtagacgacaccgtgtcctctgagtcattacagagcctgttttccgagtgggacaaccccgtctttgctaggtatcccgaggtggcggttgacgtttcttccggccaggcagaatcactggcggtcaaaatccacaacatcctttacccctaccgcttcaccaagggcatgatccattccatgcaggtcttacagcaggtggataataaattcattgcctgcctgatgtccactaagaccgaggagaatggagaggccggaggaaatcttctcgtattagtagaccagcacgctgcccacgaacgcattcgtctggagcagcttatcattgattcctatgagaaacagcaggcccagggttccggaaggaagaagttactttcttcgactcttatcccccctcttgagattactgtcacagaggaacagcgacggctgttgtggtgttatcataaaaaccttgaggacctgggcctcgaatttgtgttcccagacacatccgacagcctggtgctggtggggaaagtgccattatgcttcgttgaacgcgaggcgaacgagctgcgcagaggacgctcaacagtgacaaagtcaatcgtggaggagttcatacgcgagcagctggagctattgcagacaactggaggcattcaaggtacgttaccgctgaccgtccagaaagtcctggcttcgcaggcctgccatggcgcaatcaagtttaatgatggcctatccctgcaggagtcctgtcggctcattgaggctctgtccagctgtcagctgccattccagtgcgcacatggaagaccatccatgttgcctctggcagacatcgaccacctcgaacaggaaaaacagatcaaaccaaacttaactaagttgcgcaagatggcacaggcttggaggcttttcggcaaggcagagtgcgacaccaggcagtcccttcaacaatctatgcccccttgtgagcctccttag

SEQ ID NO: 29592 - DNA, 321 bp, synthetic construct
  misc_feature 1..321: note = Description of Artificial Sequence: Synthetic coding sequence
  source 1..321: mol_type = other DNA
atgataaaatgtttatccgtggaggtccaggctaagctgcggtccggactggccatctcttctttaggacagtgtgtggaggagttagcacttaacagcatagatgccgaggccaagtgcgtggcagtacgcgtgaatatggagacttttcaggtacaagtgattgacaatggcttcggcatgggcagtgacgatgttgagaaggtcggcaataggtattttactagtaaatgccattccgttcaggacctggagaaccccaggttttatggtttcaggggcgaagcattggctaatatcgccgacatggccagcgcctag

SEQ ID NO: 29593 - DNA, 135 bp, synthetic construct
  misc_feature 1..135: note = Description of Artificial Sequence: Synthetic coding sequence
  source 1..135: mol_type = other DNA
atggctgacaagcctgacatgggagagatcgcgagttttgacaaagctaagttgaagaaaaccgagactcaggaaaagaataccctacctactaaggagaccatcgagcaggaaaagcgctctgagatctcctag

SEQ ID NO: 29594 - DNA, 1026 bp, synthetic construct
  misc_feature 1..1026: note = Description of Artificial Sequence: Synthetic coding sequence
  source 1..1026: mol_type = other DNA
atggccgtccaacctaaggagacactgcaacttgagtcagctgccgaggtcgggtttgtaaggttctttcaaggtatgccggaaaagcccacgaccaccgtcaggctattcgataggggagatttttacactgcgcacggcgaagacgctctgctagccgcaagagaggtgtttaagacacagggagtcataaaatacatgggcccagctggcgctaaaaatttgcaaagcgtggtgctgagcaaaatgaatttcgaaagcttcgtgaaagatcttttactggttcgccaatatcgggtcgaagtctacaagaacagggctggaaacaaggcctccaaggagaatgactggtaccttgcttacaaggcatctcctggcaacctgagccaattcgaggatatcctgtttggcaataacgacatgtcagcaagtattggggtggtgggcgtaaaaatgtctgccgtggacggccaacgccaggttggcgtaggttacgtcgactccatccagcgcaagcttgggttgtgtgagttccctgacaatgatcagttctccaatttagaggctctgttaatccagatcggcccaaaagagtgtgtactgccgggaggagagactgctggggacatgggaaagctgcgccagattatccagcgcggaggcattctcatcactgaacgaaaaaaagccgatttctcaacaaaggatatctaccaagatcttaatagactactgaaggggaagaaaggtgagcagatgaacagcgcagtcctgccagaaatggagaatcaggtggcagtgtcttcgttgtctgctgttatcaagttcctggagctcttaagcgacgacagcaattttggccagtttgagctgactaccttcgacttttcccagtacatgaaattggatattgctgccgtcagggctctgaacctgttccagggatcagtggaagatacgaccggctcacaatccctggccgcactgctgaacaaatgtaaaaccccccaggggcagacctgttag

SEQ ID NO: 29595 - DNA, 2766 bp, synthetic construct
  misc_feature 1..2766: note = Description of Artificial Sequence: Synthetic coding sequence
  source 1..2766: mol_type = other DNA
atggctgttcaaccaaaggaaaccctgcagctagaaagtgcagcagaagtcgggttcgtaaggttctttcagggtatgccagaaaagcctactacaactgttagactcttcgaccgaggcgatttctacactgcacacggagaggacgcgcttctggcggcacgagaagtgtttaaaacccagggagtaattaagtacatgggccctgccggagccaagaatctgcagagcgttgtcttgagcaagatgaattttgaaagctttgtgaaggacctgctcctggtgcgccagtaccgggtggaggtgtataagaatcgcgcaggaaacaaagctagcaaagagaacgattggtacctcgcctacaaggcctccccaggcaatctgagtcagtttgaggacatcctgttcggtaataacgatatgtcagcttccatcggcgtggtaggggttaaaatgagtgcggtcgacggacagcgccaggtaggcgtagggtatgtcgacagtatccagcggaaactcggtctttgtgagtttcccgacaacgatcagtttagtaacctagaggccctcttgattcagataggccctaaagagtgcgtgctcccaggtggggaaactgcaggggacatgggaaaactgagacagatcattcaacgcggtggtatcctcatcacagaacgcaagaaggcagacttctccaccaaggatatctatcaggacttaaatcgcttgctgaaaggcaagaaaggtgagcagatgaactccgcggtgctacccgaaatggaaaatcaggtggctgtaagctccttgagcgccgtcatcaaattcctggaactgctgtctgacgattcaaactttggacaattcgagttgactaccttcgatttttcacaatacatgaagcttgatattgccgcagtgcgcgcactgaatctcttccagggctccgtagaagacactacaggctcccagtccctggctgcattgctgaataagtgcaaaactccccagggccagcgtttggtgaaccaatggataaagcagcctcttatggacaaaaaccgtatcgaagaacggctcaacctggtggaagccttcgtggaggatgctgagctaaggcagactctccaggaggacttgcttcgaaggttcccagaccttaaccggttagcaaagaagtttcagcgccaggccgcaaaccttcaggactgttatcggctgtaccaggggatcaaccagttgcctaatgttatccaggctttggagaagcacgagggcaaacatcagaagctgctgttagccgtctttgtgacaccccttacagacttaagatctgacttctccaaattccaggaaatgatcgagactactttggatatggaccaggttgagaaccatgagttcctcgtaaaaccttctttcgatcccaacttaagtgagttaagagagattatgaatgacctggagaaaaaaatgcagtcaacactgatatctgctgccagagatcttggattagacccaggaaagcagattaaactggacagctctgcacagttcggatactactttagggtgacttgtaaggaagagaaggttctccgcaacaacaagaatttcagtaccgttgatattcagaagaacggggtgaaatttacaaacagtaaactgacttccctgaatgaggagtacaccaagaataagaccgaatatgaagaggctcaggatgccatagtcaaggaaattgtaaatatttccagcgggtacgttgagcccatgcaaacactgaatgatgtgctggcccagctcgacgccgttgtcagtttcgctcacgtgtccaatggggcacctgtcccttacgtgcgcccagccatcctggagaaggggcaaggacgaattattcttaaagcttcccgtcatgcctgtgtggaggtgcaagatgagattgcatttatccccaacgacgtctacttcgagaaggataagcaaatgttccatattatcactggacccaacatgggtggcaagtctacctatatcagacagactggagtgattgtgcttatggcacagataggctgttttgtgccttgcgaaagcgctgaggtcagcattgtcgattgcatcctcgcccgtgtgggtgctggtgactcacagctgaagggtgtgagcacattcatggccgaaatgttagagaccgccagtatcctgcgatcggcaaccaaggatagcctgattatcatcgacgaattgggtcggggtacaagtacctacgatggctttgggctcgcctgggctatttctgagtacattgcaaccaaaatcggcgctttctgtatgttcgcaacacacttccacgagttaactgccctggccaatcaaatacccaccgtcaataacctccatgtgacagccctgaccacagaagagactcttaccatgctttaccaagtcaagaagggcgtgtgcgaccagagctttgggattcacgtcgcagaactggccaactttcctaaacatgttattgagtgcgcgaagcagaaggccctcgagctggaggaatttcagtatattggggagtcacaagggtatgacatcatggagccggcagcgaaaaaatgctatcttgagcgggagaatctgcgagtgacagagccaaaggaccagtgcctcatactgctcacatggaagagaaaactcagaggtggcaaacgcagcgcttgttctagacctgagaggcagaatcaaggtagtggagagctgagttag

SEQ ID NO: 29596 - DNA, 2163 bp, synthetic construct
  misc_feature 1..2163: note = Description of Artificial Sequence: Synthetic coding sequence
  source 1..2163: mol_type = other DNA
atgattggaatttggcacatcagattgctcctggctatatctctgagcctcaagaccttcagtcttgtcaccatgatctgccagttaccgttggttctgtgggtgttgaagtgcccgcagttaatggcaagggatatgggcaagttaagacaaataatacaacggggaggtattctaataacagagcgtaaaaaagccgatttctctacaaaagacatctaccaggacctcaatcgattactgaagggcaagaaaggcgaacagatgaattccgccgtgctcccggagatggaaaaccagggcagtgtggaggacactaccggcagccagagtttggctgcccttttaaataagtgtaagacaccccaaggacagcgcctcgtcaaccagtggatcaaacagcctctgatggataaaaaccggatcgaggagagactgaacctcgtagaggcttttgtggaagatgccgagctcaggcagacactgcaagaagatctcctgcgcaggtttcctgatttgaaccggctcgccaagaaatttcagagacaagcagccaacctccaggactgttataggctatatcagggcattaatcagctgcctaatgtaatccaagctcttgaaaagcatgaggggaagcaccagaaactgctcctggccgtattcgttactccgctcactgatttacgaagcgatttttctaaatttcaggagatgattgagactactctggatatggaccaagttgaaaaccacgaattcctggttaaacccagcttcgaccctaacctgtcagagctccgggaaattatgaatgaccttgaaaagaaaatgcagtctaccttaatcagcgctgctagagatctcggcctggaccccggaaagcagataaagctggactcctccgctcagttcggatactactttagggtcacatgcaaagaggagaaagtgctgcggaacaataagaatttctcaaccgtggacatccagaagaatggagtcaagtttaccaatagtaaactcacaagcctgaacgaggaatacactaagaataagactgaatatgaagaggcccaggatgcaatcgtgaaggaaattgttaacattagctcaggatatgttgaaccaatgcagaccctgaatgacgtcctcgcgcaactagatgcggttgtctctttcgcacacgtgagcaatggggcacctgtgccatatgtccgtccagctattctggagaaggggcagggacgcataatcctgaaggcatcaagacacgcttgcgtggaggtgcaggacgagatcgctttcattccgaacgacgtctactttgagaaggacaagcagatgttccacataatcacaggccctaatatggggggaaaatccacatatatccgacaaacaggtgtgatcgttctcatggctcaaataggatgttttgttccatgcgaatccgcagaagtctccatcgtggattgcatacttgcacgagtgggagccggtgactctcagctgaaaggagtgtctacatttatggccgaaatgttggagaccgcatctatcctgcgttccgccacaaaagactccctaattattatcgacgagcttggaaggggtacctccacatacgacggcttcgggctggcttgggctatatcagagtatatcgccacaaaaatcggcgctttctgtatgttcgccacacactttcatgagctgactgctctcgctaatcagattcccacagtcaacaatttacacgtcaccgcactgaccacagaggaaaccctcacaatgctctatcaggttaagaaaggtgtctgcgaccaatcattcggaatccacgtggccgagctcgctaactttccaaaacacgtgatagaatgcgcaaaacagaaggcactggagctggaagaatttcagtacatcggagagtcacaaggttacgatattatggagcccgcagctaagaagtgttatcttgaacgcgaacagggggagaaaattattcaagaatttctttccaaggtgaaacagatgccatttaccgaaatgagtgaagagaacattactatcaagctgaagcagctgaaagcggaagtgattgcaaagaataattctttcgtcaatgagataatttctagaattaaagtgaccacctag

SEQ ID NO: 29597 - DNA, 2433 bp, synthetic construct
  misc_feature 1..2433: note = Description of Artificial Sequence: Synthetic coding sequence
  source 1..2433: mol_type = other DNA
atggctgtccaaccgaaggagactctccagctcgaatcagctgcagaagttggctttgtgaggttctttcaagggatgcccgagaaaccaactaccacggtgcgcttgttcgatcgaggggacttctacactgcccacggtgaagacgcgctcctggcagctcgggaggtgttcaagacacagggagttataaagtatatgggaccagccggtgcgaaaaacttgcaatcagtggtgttgtcgaaaatgaactttgagagcttcgttaaggatctgctgttagtgcggcaataccgagtcgaggtctacaaaaacagagccggtaataaagcatccaaggaaaacgactggtatctggcgtacaaggccagtcccggtaacctctcacagttcgaggatattttgttcggaaacaatgatatgtcagcctctatcggggtggttggagtaaagatgagtgcagtagatggtcaaaggcaggtcggtgtgggatacgtggacagcatacagcgtaagctgggactgtgtgaattccctgataatgaccagtttagcaacctagaggccctcctgatccaaattggtccgaaggagtgcgtgttaccagggggtgaaactgctggcgacatgggaaagttacggcagattatacaaaggggtggcattctgattaccgaacgcaagaaagccgacttttccaccaaggatatttatcaggatcttaaccggttgttgaaagggaaaaaaggcgagcagatgaacagcgctgtgcttcctgagatggagaatcaagtggctgttagcagtttaagcgccgtgatcaagttcctggaattgctgagcgatgactccaatttcggacagtttgagctgaccactttcgacttttctcaatacatgaagctcgacattgccgcagtgagggctcttaacctcttccagggctcagtggaggacacaaccggaagccaatccctggccgcactgctgaacaagtgcaagacaccacagggccagcggttagtcaatcagtggattaagcagccacttatggataagaacaggatagaagaaaggctaaacctggtcgaagccttcgtggaggacgccgagcttagacagaccctccaggaggacttgcttaggagattcccagaccttaataggctggctaaaaaatttcagcggcaagctgcgaacctacaggattgctatagattatatcagggcataaaccagttgcctaatgtgattcaggcacttgagaagcatgagggtaagcatcagaagttgctcttggccgtctttgtcacacctctaacggatctgcggtctgactttagtaaattccaagagatgatagagaccaccctggacatggatcaagtggagaaccacgagttcttagtaaagccgtccttcgaccccaacctgtctgagcttagggagataatgaatgacctggaaaagaaaatgcagtctactttaatatccgcagccagagacctgggcttagaccccggaaaacaaataaaactagactcttcagcacagtttggctattacttccgtgtgacttgtaaggaggagaaggtgctcaggaataataagaacttttcgaccgtcgatatacagaagaacggagtcaagttcaccaacagtaagctaacatcccttaacgaggagtacacaaagaataagacagaatatgaggaggcgcaggatgccattgtgaaagaaattgttaatatctcctcaggctacgttgagcccatgcagacgctgaacgatgtcttggcgcagctggacgcagttgtatccttcgcacacgtctccaacggggcacccgtgccttacgtgagaccggctatcttggagaaaggacaaggcagaatcattttaaaggcctcccgtcacgcttgcgtagaagtccaggatgagattgcattcattcctaacgacgtctacttcgagaaggataaacagatgtttcacattatcaccgggcctaacatgggtgggaagagcacctacatccggcagacaggtgtgattgtgcttatggcccaaattggatgcttcgttccctgcgaatcggcggaggtttccatcgttgactgcatcctggctcgggtgggagcaggtgactctcagctgaaaggggtaagtacattcatggccgagatgctggagactgcaagtattttgcgtagtgctacaaaggatagtttaatcattattgacgagctcggcagggggactagtacttatgatggtttcgggttagcttgggccattagtgagtacatcgccaccaaaataggtgccttttgtatgttcgctaccatcttcatgaaccttctgccgtggcccatcaggtaccaactccttattatctatatgagccagcactctcccttgaagagaccgtag

SEQ ID NO: 29598 - DNA, 507 bp, synthetic construct
  misc_feature 1..507: note = Description of Artificial Sequence: Synthetic coding sequence
  source 1..507: mol_type = other DNA
atggacaagaatcgtattgaagaacgcctgaacctcgttgaggctttcgttgaagacgctgagctgcgccagactctccaggaagacctgctgcgcagatttcccgacctaaatcgactcgctaaaaaattccaaaggcaagccgcaaacttacaggactgctacaggctttatcaggggatcaatcagctccctaatgtaatacaggccctggagaagcatgagggcaagcaccagaagctcctgctggccgtgttcgtgacccctctgacagaccttaggtccgactttagtaagtttcaggagatgatagagacaactctggatatggatcaagttgaaaaccacgagttcctggtcaaaccaagtttcgaccccaatctcagtgagcttagggagatcatgaatgatctagagaaaaagatgcagagtaccctgattagcgccgctcgagatttaggtggttctctccaacctcggtcctctcggcttgcctgcgccacctag

SEQ ID NO: 29599 - DNA, 1602 bp, synthetic construct
  misc_feature 1..1602: note = Description of Artificial Sequence: Synthetic coding sequence
  source 1..1602: mol_type = other DNA
atggctgtccagcccaaggaaacgcttcagctggagtcagccgctgaagtgggcttcgtcaggttttttcagggaatgcctgaaaaacctacgactaccgtccgcctttttgaccgaggcgacttttacactgcccacggcgaggatgccctgctggctgccagagaagtcttcaagacccagggcgttataaagtacatggggccagcgggagccaaaaacctccagagcgttgtactgagtaagatgaactttgagagtttcgtgaaggatctgctgttggtgagacaatatagagtggaggtgtacaagaacagagctggcaacaaggcctccaaggagaacgattggtatctggcatataaagcatcccccggtaatctgagccagtttgaagatatactgttcggtaataacgacatgtccgcatcaatcggggtggtgggagtgaaaatgtcagctgtggacggccagcgccaggtcggagtgggatatgtggattctattcagcgcaaactggggctatgcgagtttcccgacaacgatcagtttagtaacctggaggccctcctgatacagattggtccaaaggaatgtgtgctcccagggggagagaccgcgggagacatggggaaactgagacagattatccagcggggtgggattctgattacagaaagaaaaaaagcagatttttccaccaaagacatttatcaggacctgaataggctgttgaaagggaagaagggcgagcagatgaatagcgccgtgctgcctgaaatggaaaatcaggtggctgtctctagcctatctgccgtgataaaatttctagagcttctttcagacgattctaactttgggcaattcgaactgaccacattcgattttagccagtatatgaagctggacattgcagctgtgcgggctttgaacctgttccagggctctgtcgaagacaccacaggatcccagtcgctggcagccctccttaataaatgcaagacccctcaggggcagaggttggttaatcaatggatcaagcagccgctgatggacaaaaacagaatcgaggaaaggctgaatctggtggaagcctttgtggaggacgccgagctgcggcagacccttcaagaggatctactcagacggtttccagacctcaaccgcctggcgaagaagttccagagacaggcagccaacttgcaggattgctatcgcctgtaccagggcatcaatcagcttcctaatgttatccaagccctggagaagcacgaaggcaaacatcagaagctgctcctggccgtgtttgtcactccattaaccgacctgaggagtgacttctcaaagttccaggaaatgattgaaaccacccttgacatggatcaggtggagaaccatgagtttctggtcaaaccaagcttcgacccgaatctctcagagctcagagaaattatgaatgatcttgaaaaaaaaatgcaatccaccctgatctcagccgctagagacctgggtttggacccaggcaagcagatcaagcttgattcatcggcgcagtttggctactacttcagggtcacttgcaaagagaagtccccatcttag

SEQ ID NO: 29600 - DNA, 1233 bp, synthetic construct
  misc_feature 1..1233: note = Description of Artificial Sequence: Synthetic coding sequence
  source 1..1233: mol_type = other DNA
atggctgtccagccaaaggagacgctgcagctggagtctgccgcagaagtggggtttgtgaggtttttccagggaatgcccgagaagccaacaaccaccgtgagattgtttgacagaggcgacttctataccgcacacggcgaggacgctctgctcgcagccagggaagtgttcaagactcagggcgtgataaagtacatgggaccagccggagccaagaacctgcagagtgtcgtgttaagtaagatgaatttcgagtcttttgtcaaagacttgttgttagtgcgtcagtacagagttgaggtttataagaatagggcgggtaacaaagcctctaaggaaaacgattggtatttggcatacaaggcctcgcccggtaatctcagtcagtttgaggatattctgtttggaaacaatgatatgagtgcttctataggggtggtgggcgtgaaaatgtctgcggtggatggacagcggcaggttggtgtgggatacgtggatagcatccaaagaaagctgggtctgtgtgaattccctgacaacgaccagttcagtaacctagaggctctgcttatccagattggtcccaaggagtgtgtcctacccggaggcgagacagccggtgacatgggtaagctcagacaaatcatccagaggggcggtattttgattaccgagcgcaagaaggccgacttttctaccaaggatatttaccaagaccttaatcggttgctcaagggaaaaaaaggggaacagatgaacagtgccgtacttccggaaatggagaaccaggtggcggtttcgtccctgtcagctgtcattaaattcctcgaactgctgagtgacgatagcaacttcggtcagttcgagctgaccacatttgacttctcccagtacatgaagcttgacatagccgctgtccgcgctcttaatctgtttcaggggagtgtagaagatactaccggctctcagtccctggctgctttgttgaacaagtgcaagaccccccaaggccagagattagtgaaccagtggattaaacaaccgctgatggacaaaaataggatcgaggagcgtttgaacctcgtcgaagccttcgtagaggacgccgagctccgccagacccttcaggaagactacttcgtggatagccagattcttacagatctccccaggagcttcaaggataagcagcaaacctacaaaattgtcaccgactcaattagagtctag

SEQ ID NO: 29601 - DNA, 1458 bp, synthetic construct
  misc_feature 1..1458: note = Description of Artificial Sequence: Synthetic coding sequence
  source 1..1458: mol_type = other DNA
atggccgtccaaccaaaggagacccttcaattagaatcggccgctgaggtaggctttgttaggttcttccagggcatgcctgaaaaacccacaactaccgtgcggttgtttgatcggggtgacttttacacggcccacggagaggatgccctgctcgccgcaagggaagtgttcaaaacccaaggagtaatcaaatatatgggcccagctggcgcaaaaaacctccagagcgtggtgctctccaaaatgaactttgagtcttttgtcaaggacttgctcctggtacggcagtatagagtggaggtttataagaaccgtgctgggaataaagcttctaaggagaatgactggtacctggcctacaaagcttccccgggaaatctaagtcagttcgaggatatcctatttggcaataatgatatgtcagctagtattggcgttgttggcgtgaagatgagcgctgtggacggtcagagacaggtaggcgttggctacgtcgattctatccaaagaaaactgggcctttgtgaatttccggataacgatcagttctcaaacttagaggccctgcttatccaaattgggccaaaagagtgtgtgttacccggaggggaaactgctggagatatgggaaaactgcgccaaatcatccagagaggaggcattctcattaccgagcgaaagaaggccgattttagcaccaaagatatttaccaggacttaaaccgccttctaaaaggcaagaagggggaacaaatgaattccgcagtcctgcctgagatggaaaatcaggtggctgtctcttcactcagtgcggtgatcaaattcctggagctgctgtccgatgactcaaattttggtcagtttgagctgacaacttttgatttctctcagtacatgaaattggatattgccgcagtgagagcattaaatctcttccaaggctccgtggaggacactacaggtagtcaatcgctggcagccctgttaaataagtgtaaaactccacagggccagaggctcgtgaaccagtggattaaacaacccctgatggataagaaccgcattgaggaaagattaaacctcgttgaggcttttgtagaagacgcggaactgcgccagaccttgcaggaagatttgctgcggcgattccccgatctgaataggcttgcaaagaagtttcagagacaggcagctaatctgcaggattgctatcgcctgtatcagggcattaatcagctgccaaacgtcatccaggcccttgagaagcacgagggcaaacaccagaaactgctgttagcggtgtttgtaactccactgacagaccttagaagcgattttagtaagttccaggagatgatcgaaaccacccttgacatggaccaggtggagaatcatgaatttttggtgaaaccgtctttcgatcccaatctgtctgagttgagaaataatgaatag

SEQ ID NO: 29602 - DNA, 2607 bp, synthetic construct
  misc_feature 1..2607: note = Description of Artificial Sequence: Synthetic coding sequence
  source 1..2607: mol_type = other DNA
atgggaccggctggagctaagaatttacaaagtgtggtcctatccaagatgaatttcgagtccttcgtgaaagatctccttctggtgcgccagtatcgcgtggaggtgtacaagaaccgcgcaggcaacaaggcatctaaagagaacgactggtatttagcctataaggcaagccccggtaacctgagccaatttgaggatatcctgtttgggaacaatgatatgagcgccagtatcggagtggtgggtgtgaaaatgtcggcagtggacggacagagacaagtgggcgtgggctacgtcgactcaattcaacgaaagttaggcctctgcgagtttcccgataacgaccagttcagcaacctagaggcactcctgatccaaataggcccaaaggaatgtgtcctcccaggcggtgagactgcaggcgacatggggaagctgcggcagatcatccagcggggaggcatcttgatcaccgaacggaagaaggccgatttcagcaccaaagacatctatcaggaccttaatagactcctgaagggaaaaaagggagaacagatgaattctgcagtcttgccagaaatggagaaccaggtcgccgtgtcatccctgtctgctgtaatcaagttcttggaactattgtctgacgatagcaattttgggcagtttgagctcactacatttgatttctctcagtacatgaagctagacattgccgcagtgagggctttgaatttatttcagggctcagtcgaggacactactggaagccagagtctcgccgctttactgaacaaatgcaagacaccacaggggcagagacttgtcaaccaatggatcaaacagccgcttatggataaaaaccgaatagaggagcgcctgaaccttgtcgaagcttttgtggaagacgccgaattgcgccagacgctacaggaggatcttttacgccgttttccagacctgaatcgattggcaaaaaaatttcagcgccaagctgctaacctccaagactgctaccgtctctaccaggggatcaatcaactaccgaatgtcatccaagctctggagaagcacgagggcaaacatcagaaactgttgctagctgtgtttgttacccccctaacagacctacgctcagacttttcaaaattccaggaaatgatagagaccaccctggacatggatcaggtggagaatcatgagtttctggtgaagccttccttcgatcctaatttaagtgagctgcgggaaattatgaacgaccttgagaagaaaatgcagtccacccttatctcggcagctagagacttgggtctggacccagggaaacagattaagcttgactccagtgcacaattcggatactactttagagtgacatgtaaggaagagaaggttttgcggaacaataaaaacttctccaccgtagatattcagaagaacggggtcaaattcaccaattccaaattaacctctctgaacgaggagtacactaagaataaaacagaatacgaggaggcccaggatgcaattgtgaaggagattgtcaatatcagttccggttatgtggaacccatgcagaccttgaacgacgtcttagctcagttggacgccgttgtgtcctttgcccatgtgtcgaatggcgctccagtgccctatgttcgacccgctatattggaaaaagggcaaggcaggatcatcctcaaggcatctcgccatgcctgcgtggaggtgcaagatgaaatcgcgttcatcccaaacgacgtatatttcgagaaagataagcagatgttccacattataactggacccaatatggggggaaagagtacctatatccgtcagactggagtgatagtcttgatggcccagatcggatgttttgtgccatgtgagagtgcagaggtgtctattgtcgattgcatcttggccagggttggcgctggtgactcccagctgaaaggagttagtaccttcatggccgagatgctggaaaccgcttctatcctccggagcgccacaaaggattccctgattatcattgacgaactggggaggggtacctcaacatacgatggcttcggattggcttgggctattagtgagtatatcgcaaccaaaatcggggctttttgtatgttcgcgacccacttccacgagcttaccgctctggccaaccagattcccaccgtcaataatctccacgtgacggctctgacaaccgaagagaccctgaccatgctctaccaggtgaaaaaaggtgtgtgcgaccagagctttggaattcatgttgccgagctggccaattttccaaagcacgtaatcgaatgcgcgaaacagaaggcccttgagctagaagagtttcagtacataggagaaagccaggggtatgatataatggagccagcagccaagaagtgctacttggaacgcgaacagggggagaagatcatccaggaatttttaagtaaggtcaagcagatgccctttacagagatgtcggaggaaaacatcacaattaaactgaagcagctgaaagcagaagtcatcgcaaagaacaattcctttgtcaatgagattatttcccggattaaagtcaccacatag

SEQ ID NO: 29603 - DNA, 3414 bp, synthetic construct
  misc_feature 1..3414: note = Description of Artificial Sequence: Synthetic coding sequence
  source 1..3414: mol_type = other DNA
atgtcaaggcgaaagcctgcatctggcggactggcagcttcttcttctgcacccgcacggcaagcagtactgtcacgattctttcaatccaccggttcacttaaatccaccagctcttccactggtgctgccgatcaggtggatcccggagcagctgccgctgctgccgctgctgctgccgctgcccctccagctccaccagctcctgcttttccccctcagctacctccgcacattgctaccgagatagaccgacggaaaaagcggcctttggaaaacgatggacctgtcaaaaagaaagtcaagaaggttcagcaaaaagaggggggttcagatctggggatgagtggaaacagcgagccaaagaagtgcctacgtacccggaacgtgagcaaatcgctggaaaagttgaaagaattttgttgcgatagtgccttacctcaaagccgagtgcagacggagtctctccaggaacgttttgcagtacttcccaaatgtactgatttcgacgatatctccctactccacgcaaagaacgccgtgtcctctgaggacagcaagaggcagattaaccaaaaagacacaaccctctttgatttatcccagtttggcagttctaatacttctcacgaaaacttgcaaaagaccgcgagcaagtcggccaacaagagaagtaaatccatatatactcccctagagctgcagtatatcgagatgaagcagcagcacaaggacgccgtgttgtgtgtagaatgtggttacaaatacagattcttcggagaggatgcggaaatcgcagccagggaactgaatatatactgtcatcttgaccataatttcatgaccgcaagtattcccacccacagactgtttgttcatgtgcgacgactcgtggccaaaggttataaagtgggcgttgttaagcagactgagactgcagcacttaaagctatcggagacaataggagcagcctcttttctagaaagttaacagctctgtacaccaagtcaacactgatcggggaggatgtaaaccccctgattaaattggatgacgccgtgaacgttgacgagatcatgaccgacacctcaaccagctatctactgtgtatcagcgagaacaaagagaatgtgcgggataagaaaaagggcaacatcttcatcggaatcgtgggcgtgcagccagcaaccggcgaggtggtctttgactccttccaagacagcgcttccagaagcgaactagaaacgcggatgtcatcgctacaaccggtggagcttcttctgccttctgctctgtccgagcagacagaagccctgatacatagagcgacctcagtgtctgtccaggacgatagaataagggtcgagcggatggacaacatatatttcgagtactcccatgccttccaggcagtaacggaattttacgctaaggatacagtcgacatcaagggcagtcagatcatctcggggatcgtgaatctggagaaaccagtgatatgctcactcgcggcaattatcaagtacctaaaagagtttaacttagaaaaaatgctgagcaaacctgagaatttcaaacaattgtctagcaaaatggagttcatgacaatcaacggcacaactctcaggaatttagagatcctgcagaatcagacagatatgaaaaccaagggcagcttgctttgggtcttggaccacactaaaacctctttcggacggcgaaaattgaagaaatgggtgacccaaccactgctcaaactccgcgagattaacgcgaggctggatgccgtgtctgaagtgctgcactctgagtccagtgttttcggacagatcgagaaccacctgagaaagttgccagacattgagaggggcctgtgttctatctaccataaaaagtgtagtactcaggaattcttcctgatcgtgaagaccctctaccacctcaagtctgagttccaggcaattatcccagctgtcaattcccatatccagtctgatctcctaagaactgttattctggagataccagagctgttgtctcctgtggaacactaccttaagattctgaacgagcaggccgctaaagtgggtgataaaaccgaactgttcaaagacttgtcagactttcccctgattaaaaagaggaaagatgagattcagggtgttatcgacgagatccgaatgcacctgcaagaaatcagaaagatcctaaaaaaccctagtgcccagtatgtaactgtgtcagggcaagagtttatgatcgaaattaagaactcagcagtgagttgcatcccaaccgactgggttaaagtcggaagcacaaaagccgtctcacggtttcattccccctttattgtggagaattacagacacttaaatcaattgcgcgaacagctggtattagattgtagcgcagagtggttagatttcttggaaaagtttagtgagcattatcacagcttgtgtaaggctgttcatcatctggccacagtggattgcatattctccctcgcgaaagttgccaagcaaggtgactactgccgaccaaccgtgcaggaggagaggaagattgtgattaaaaatggcagacatccagtgatcgatgtgctcctcggggagcaggatcagtatgtgcctaacaacaccgatcttagcgaagattcagagcgagtgatgatcatcaccggtcctaatatgggcggaaaatcttcctatatcaaacaggtggccctgataactatcatggcccaaattggcagctacgtcccagcagaagaggccaccattggcatcgtcgatggtatttttacaaggatgggcgcagctgacaatatctacaaaggccagtcgacctttatggaggagttgacagatacggctgagattatccgtaaggcaacttctcagtcgctggtcatacttgacgaactaggaaggggcactagcactcatgacggcattgcaatcgcatatgcgaccctcgagtacttcatccgggatgtgaagtccctgacattgtttgtaacacattatcccccagtatgtgaactggagaagaactattcccaccaagtgggcaactaccatatggggtttcttgttagcgaagacgaaagtaaactcgacccaggcgcagccgagcaggtgcctgacttcgtaacctttctgtatcagatcacccggggtattgctgccaggtcttacggcctgaatgtggcaaaattagcagatgtgcccggagaaattctgaaaaaagccgcacacaagtcaaaggagctcgaaggcctgataaacaccaaaaggaagcgacttaaatatttcgccaagctctggacaatgcataacgcacaggaccttcagaaatggactgaagaatttaacatggaagagacccagacatctctgcttcattag

SEQ ID NO: 29604 - DNA, 3387 bp, synthetic construct
  misc_feature 1..3387: note = Description of Artificial Sequence: Synthetic coding sequence
  source 1..3387: mol_type = other DNA
atgtctcggaggaagcccgctagtgggggactggccgcatcctctagtgcccctgcccgacaggccgtcctatcgagatttttccagtccactgggagcctgaaaagcacgagttcatctacaggtgccgctgatcaagtagacccaggcgctgccgctgccgctgctccaccagcgccagcttttccaccacagctgcccccacacatcgctactgaaattgataggcgtaagaaacgtcctctggaaaacgatggcccagtcaagaaaaaggttaagaaagtgcagcaaaaggaaggcggatccgacttgggcatgtcaggcaatagcgagccaaagaaatgtttgagaactcgcaacgtgtccaagtcgttagaaaaactaaaagagttctgctgcgactccgctctcccccagtcaagggttcagacagaatccctgcaagaaagattcgctgtcctacctaagtgcacagactttgatgacatctccctgttgcatgcaaaaaatgcagtgagctctgaggattccaagcgacagattaaccagaaagatacaaccctctttgacctgtcccaattcggttcctcaaacacatctcacgagaatctccagaagaccgctagcaaatcagccaataagcggagcaaatccatatacaccccactggagctgcaatacatcgaaatgaaacagcagcataaagatgccgtgctgtgtgtggagtgtggttataagtacaggtttttcggcgaagacgctgagattgccgcacgggaacttaacatttactgccacctggatcacaatttcatgacggcatctatcccaactcaccgcctattcgtgcacgtgcggaggctggtggcaaaaggatataaagtgggcgtcgttaaacagaccgaaaccgccgcactgaaggccatcggcgacaaccgctcttcactctttagtagaaagctcaccgccctgtacaccaagtcaactctgattggagaggacgtgaaccctctcatcaagctggacgacgcagtaaatgtggacgagattatgaccgacactagcactagttatctgttatgcatctccgagaacaaagaaaatgtgcgcgacaagaagaaaggcaatatctttatcggtatcgtgggagttcagccggcaacaggcgaagtggtctttgacagtttccaggactcggccagtaggtcagagctggagacccgaatgtctagcctgcagccggttgaactcctgctcccaagtgcgttgagcgaacaaaccgaggccttaattcacagagcaacctctgtgagcgtgcaggacgatcgaattcgagtggagagaatggacaacatttacttcgaatacagccacgcgtttcaagccgtgaccgagttttatgccaaggatacagtggacattaagggctcacagattatctcaggcatagtgaacttggagaaacctgtgatctgtagcctagctgccatcattaaatacctcaaggagtttaatctggagaaaatgctgagtaagcctgaaaatttcaagcagttatcttctaagatggagtttatgaccattaatggaactactctcaggaatctggagatcttgcagaaccagacagatatgaagactaagggcagtcttctatgggtgctcgaccacaccaaaaccagtttcggcaggaggaaactgaaaaagtgggtcacacagccactgcttaagctgcgagagattaatgctaggctagacgccgtgagcgaagtgctgcacagtgaatcttcagttttcggacagatcgaaaaccacctcaggaagctcccggacattgaaaggggtctttgcagtatctaccacaagaaatgcagtacccaggaattttttctgattgtgaagactctgtatcatctcaagtccgagttccaggccattattcccgctgttaatagccatatacagagtgatcttctgagaaccgtcatcctggagatcccagaactcttgtcacccgtggaacactacttgaaaatactcaacgagcaagccgcaaaagttggcgacaaaaccgagttattcaaagacctgagtgacttccctctgattaagaagaggaaagatgagattcagggagtgatcgacgagatccggatgcatttgcaggagattcgcaaaatactgaagaatcctagcgcccagtacgtgaccgtgagcggacaggagttcatgattgagatcaaaaacagcgccgttagctgcatcccaactgactgggtcaaggtgggcagcaccaaggctgtctctcgatttcattctccgttcattgtggaaaactatagacatcttaaccagcttcgcgagcaactggtgttggactgcagcgccgaatggctcgattttctggagaaatttagcgaacattaccatagcctatgcaaagccgtgcatcaccttgcaactgtggactgtatctttagcttggccaaagtggccaagcagggagattactgtcggccaacggtccaagaggaacggaaaatcgtaatcaagaacggcaggcacccggtcatcgacgtgctgctgggcgaacaagaccaatatgtgcctaataacaccgacctttcggaagactctgaacgcgtgatgattattaccggtcctaacatggggggtaaaagctcttatatcaagcaagtggccctgatcacaatcatggctcaaatcggcagttatgtcccggcagaagaagccactatcggtattgtcgacgggatttttacccgaatgggcgctgccgacaatatttataagggccagtcaacctttatggaagagctgactgataccgccgaaatcatcagaaaggctacctctcaaagcctggtgattctggacgagcttggccgagggacctctactcacgatggaattgctattgcttatgcaacgcttgagtacttcattcgggatgtgaagagccttacattgttcgtaacacactatcccccagtatgcgagctggagaaaaattatagccatcaggtggggaattaccacatggggttccttgtgtccgaagacgagtccaagctcgacccaggagcagccgaacaagttcctgacttcgtcacctttctgtaccaaatcacccggggaatcgccgcacgaagttatggtcttaatgtggcaaagttagccgatgtccctggcgaaatcctgaaaaaggctgctcataaatctaaggagctggaggggctcattaacactaagaggaaacgactcaaatacttcgccaaactgtggaccatgcataacgcacaggatctgcagaaatggacagaggagtttaatatggaggaaacgcagacatccctgctgcattag

SEQ ID NO: 29605 - DNA, 2811 bp, synthetic construct
  misc_feature 1..2811: note = Description of Artificial Sequence: Synthetic coding sequence
  source 1..2811: mol_type = other DNA
atgttgaggcctgagatctccagtacgtctccatccgccccagccgtgtccccgtcatcaggcgaaaccaggtcaccacagggacccagatacaacttcggtttgcaggaaactccccaaagtcggccttctgtccaagtggtatccgcttccacttgcccaggaacctctggtgccgcaggggaccggtcctcttcttccagctctttaccttgccccgcaccaaatagtcgtcccgctcagggtagttacttcggaaacaagcgcgcttacgccgagaataccgtcgcatccaactttacctttggtgccagctcttctagcgctcgcgatacgaattatcctcagacattaaaaactcctcttagcaccggaaatccccagcggagcggttacaagtcctggaccccgcaagtcgggtacagcgcctcatcttcctctgcgataagcgctcatagtccttctgtaatagtcgccgtcgtagagggacggggactggcgaggggcgaaatagggatggcgtcaattgatttgaaaaacccgcagatcattctttcacagtttgctgataatacaacctacgctaaggttattactaagctcaagattctgagcccactcgaaattatcatgagtaatacagcctgcgccgtcggcaatagcacaaagctcttcactctgatcaccgagaactttaagaacgtgaacttcacaaccattcagagaaagtatttcaacgagaccaagggactggagtatatcgagcagttatgcattgcagaatttagcacagtattgatggaagtgcagagcaaatactattgcctcgcagctgtcgccgctcttctaaaatatgttgagtttatccaaaactcagtatacgcaccaaaatctctgaagatctgtttccagggcagtgaacagacagcgatgatcgatagctcgagcgcccagaatctggaactgctgattaacaaccaagactacagaaacaatcacacccttttcggcgtgctgaattacactaaaacaccgggtggatctcgacgactgcgatcaaatattctggaacccctggtggatatcgagacgatcaatatgcgcttggattgcgtacaggaattactgcaggacgaggagctgttcttcgggttgcaaagcgtgatatcgcgatttctggatacagagcaattgctcagcgttctggtccaaataccaaaacaggacactgtgaacgctgctgagtcgaaaatcactaatttgatctacctgaaacacactctggaacttgtggaccccctgaagatcgccatgaagaattgtaacactccactgctgcgggcttactacggatcactggaggacaagaggtttggtattattcttgagaaaatcaaaaccgtgatcaatgatgacgccagatatatgaagggttgccttaatatgagaacacagaagtgctatgctgtgcgttcaaatatcaacgagtttctggatattgcccgacgcacttacacagaaatcgtggacgacatcgctggcatgataagtcagctgggagagaagtacagccttcctctgcggacttcgttttctagtgccagagggttcttcatccaaatgacaactgactgcattgcccttccgtctgatcagctcccgagcgagttcataaagatttccaaagtcaaaaatagttactcatttacctccgctgatctgatcaaaatgaacgagcggtgccaggagagcttgcgggaaatatatcacatgacgtatatgatcgtctgcaagcttcttagtgaaatctatgaacacatccactgcttgtataagctgagcgatacagtgtccatgctcgacatgctgttgagctttgcccacgcgtgcacactgagcgactatgttcgaccggagtttaccgatacactggctataaagcagggatggcatcccatcctcgagaaaatttctgctgaaaagccaatcgctaataatacttatgtcactgagggcagcaacttcctgataatcacagggcctaacatgtcaggcaagtctacttacctcaagcagattgccctgtgtcaaattatggcccagattgggagctatgtgcccgcagagtacagttccttcagaatcgctaaacagatattcacaaggatctcaaccgacgacgacattgaaacaaattcttcaacatttatgaaagaaatgaaggagatcgcttatatattgcataacgcaaatgacaagtcactcattctcatcgatgagctggggcgaggaacaaataccgaagaggggattggtatatgttatgctgtgtgtgagtacctgctttctcttaaggcatttactctattcgccacccacttcttagagctgtgtcacattgacgctctctaccctaacgtggagaacatgcatttcgaagtccagcatgtgaagaacacctcccgcaataaggaggctatcctctatacttataagctgtcaaaaggactgaccgaggagaaaaactatggcctcaaggcagctgaggtgtccagcctgcccccaagcatcgtactcgacgcaaaagagattacaacccagattaccagacaaattctccagaaccagcgatctacacccgagatggagcgccagagggcagtgtaccacctggcgaccaggttagtgcagaccgcaagaaactcccagctggacccagacagtctgaggatatacctctcaaacttgaaaaagaaatataaagaggatttcccacggactgaacaagtccccgagaagaccgaggagtag

SEQ ID NO: 29606 - DNA, 813 bp, synthetic construct
  misc_feature 1..813: note = Description of Artificial Sequence: Synthetic coding sequence
  source 1..813: mol_type = other DNA
atggcatccttaggggctaatcccaggcggacaccccaggggccacggcctggcgcagcctcgtctggctttccttcaccagctcctgtgccaggacccagagaggccgaggaggaggaggtggaggaggaggaggagctggctgagatccatctctgcgtgctctggaactccgggtatctcggaatcgcatattatgacacaagcgattccacaatccactttatgcccgatgctcccgaccatgaaagtcttaagttactgcaacgcgttctggatgaaattaaccctcaaagcgtcgtcacaagcgcaaagcaggacgaaaatatgactcggttcctgggcaaattagcctcccaggaacacagagagcccaagcgccctgagattattttcctcccatcggtcgacttcggtcttgagatcagcaagcaaagactactttccggcaattattcatttatcccggacgctatgactgccacagagaaaatattgttcctgtcctctataattcctttcgactgtctgctgaccgtccgggcactgggaggtctcctaaaatttcttggcaggaggcgcatcggtgtggaactggaggactataacgtctctgtacccatattgggcttcaaaaaatttatgttgacccacctggttaatattgatcaggacacatattcagtattacagatcttcaaatccgagtcacaccctagcgtgtataaagttgcttcggggctaaaggaaggcttgagcctgttcggtatcctaaaccgatgtcactgcaaatggggcgagaaattgctgtag

SEQ ID NO: 29607 - DNA, 813 bp, synthetic construct
  misc_feature 1..813: note = Description of Artificial Sequence: Synthetic coding sequence
  source 1..813: mol_type = other DNA
atggcgagtctaggagccaatcctagacggacaccccagggccctaggcctggtgcagcgtcctctggcttccctagcccagcgcctgttcctgggccacgtgaggctgaagaagaggaagttgaggaggaggaggagctggctgagattcacctgtgcgtactgtggaattccgggtacctagggatcgcttattacgacacatctgactccacaattcactttatgcctgacgcacctgatcacgaatctttaaagctcttacagcgggtgctggacgagattaatccacagtccgttgtcaccagtgcaaagcaggacgaaaatatgacaagatttctgggtaaactggccagccaggagcatagggagcccaaacggcctgagataatttttctgccatcagtggactttggtttggagatctctaaacagagacttttaagcggcaactattcatttattcccgatgctatgaccgccacagaaaaaatcctgtttctgtccagcatcatcccctttgattgtctgctgaccgtcagagctcttgggggactgctcaagtttctgggtaggcgacgcattggcgtcgaactggaagactacaatgtgtctgtgccaattttgggtttcaagaagttcatgctaactcatctggtgaatatcgaccaggatacgtacagcgttctgcagatcttcaaatctgaaagccacccatccgtatacaaggtggcgtctggtctgaaagaaggcctgagtctcttcgggatcttgaatcggtgtcattgcaaatggggggaaaagttgctctag

SEQ ID NO: 29608 - DNA, 585 bp, synthetic construct
  misc_feature 1..585: note = Description of Artificial Sequence: Synthetic coding sequence
  source 1..585: mol_type = other DNA
atggcttccctgggtgccaaccctaggagaacaccccagggacccaggcccggagctgcgagctccggtttcccatctcccgcacctgtccctggaccacgggaagcagaggaggaagaggtagaggaagaggaggagctagctgagatacacttgtgcgttctgtggaacagtggatatttaggaatcgcctactatgatacctccgattcaacgatccattttatgcccgatgctccggaccacgagtctcttaaactcctccagagagtgctggatgaaatcaatcctcaatccgttgttacatctgctaagcaggatgaaaatatgacgcgcttccttgggaaactcgccagccaagagcatcgggagccaaagaggcccgagattatcttccttccttccgtcgatttcgggctagagatcagtaaacagcggctgctctcgggtaactattccttcatccccgatgccatgacagcgactgaaaagatcctttttctctcgtccataattccttttgactgcctcctcacagttcgtgctcttggcggactgcttaaattcctaggaagacgcagatag

SEQ ID NO: 29609 - DNA, 813 bp, synthetic construct
  misc_feature 1..813: note = Description of Artificial Sequence: Synthetic coding sequence
  source 1..813: mol_type = other DNA
atggcctccctgggcgcaaaccctagaaggacacctcagggccctaggcctggcgctgcctccagtgggtttccatcacccgctccggttcctggcccaagggaggctgaagaggaggaagtggaggaggaggaggagcttgcagaaatccatctgtgtgttctgtggaactctggatacctcggtatagcctactacgatacatccgactccaccatccatttcatgccggatgctccagaccacgaaagcctgaagttactccaacgcgtgttggacgaaattaatccccagtccgtggtgacttccgcaaaacaagacgagaatatgacccgcttcctaggcaaactggcatcccaagagcacagagagcccaagcgaccggaaatcatttttctacccagtgttgattttggcttggagatctctaaacagcggctgctatctggaaattattctttcattcccgacgcaatgacagccaccgaaaagatactgtttctttctagtatcattcccttcgattgtctcctgacagtgagggctcttggtggattgctgaagtttctcggaagacgccgtattggggtagaactggaagactacaatgtgagtgtcccaatcttgggatttaagaagtttatgctcactcaccttgtgaacatcgaccaggacacttattctgtcctgcagatttttaaaagtgagagccaccccagcgtctacaaggtggcaagcgggctcaaggaggggttgagtctgttcggcatcctgaatcgctgccattgcaaatggggtgaaaagcttctgtag

SEQ ID NO: 29610 - DNA, 864 bp, synthetic construct
  misc_feature 1..864: note = Description of Artificial Sequence: Synthetic coding sequence
  source 1..864: mol_type = other DNA
atggccagcctaggtgcaaaccccagacggaccccccagggacctaggcccggtgcagcatcttccgggttcccctcaccagcacctgtacccggaccaagggaggcagaagaagaagaggtggaggaagaggaagagctggctgagatccacctctgcgtactgtggaactcagggtatcttgggatcgcttattatgacacatcagacagcacaatacatttcatgccggatgccccagaccatgagtctctcaaactgttgcagagagtgctcgatgagattaacccacaaagcgtcgtaacgagtgccaagcaggatgagaatatgacgcgattcctgggaaaactggccagtcaggaacacagggagcctaagagaccagagattattttcctgccaagcgtggactttgggctggagatcagcaaacaaagattgctgagcggtaactacagtttcatccctgatgccatgacagcgacagaaaagattctgttcctcagtagtattatcccttttgattgtttgctcacccctccaggtgatctcagatttacacccattcctctcctaattccctcacaagtgcgcgcactcgggggtctgttgaaatttttagggagaagacgcataggtgtcgagttggaggactataatgtctcagtccccatcctcgggtttaaaaagttcatgctgactcacctggttaatattgaccaggatacatatagcgtgcttcagatttttaagtcagagagccatcccagtgtatacaaggtggcttccggcctgaaggagggattgagcctgttcggtatcctgaaccgctgccactgcaaatggggcgagaagcttctgtag

SEQ ID NO: 29611 - DNA, 324 bp, synthetic construct
  misc_feature 1..324: note = Description of Artificial Sequence: Synthetic coding sequence
  source 1..324: mol_type = other DNA
aagatcctgtttctctcatccattatacccttcgattgcctgctgaccgtgcgagcgttgggagggctgctgaagtttcttgggaggagaaggatcggcgtggaactggaagattataacgttagcgtgcctattttaggttttaaaaagttcatgctcacccacttggttaatatagaccaggacacatactcggtcttgcagatctttaagagtgagtctcatcccagtgtctataaagttgctagtggtctcaaggagggactttccttattcggcattcttaacaggtgccattgcaagtggggggaaaagttgctgtag

SEQ ID NO: 29612 - DNA, 765 bp, synthetic construct
  misc_feature 1..765: note = Description of Artificial Sequence: Synthetic coding sequence
  source 1..765: mol_type = other DNA
atggcctctcttggcgctaaccccaggagaacacctcagggacctcgaccgggtgcggcatcctcagggtttccaagcccagcccctgtgcccggacccagggaggctgaggaagaggaggtagaggaggaggaggaattggctgagatccatttatgtgtgctttggaattctggctatttggggattgcttactatgatacttcagacagtaccatacacttcatgcctgacgcacctgaccacgagtctcttaaacttcttcagcgggtccttgatgaaatcaatcctcaaagcgttgtgactagtgctaagcaggacgagaatatgacccgcttccttggcaaactcgcgtcccaggaacacagagagcccaagcgaccagaaatcatattcctgccgagcgtggatttcggactagaaatttccaaacagagactgctttccggcaactattcattcataccagatgcaatgaccgcgaccgaaaaaattctatttctcagtagtattattccctttgactgcctgctaacagttcgagcattggggggactgctcaaattcttgggacgcaggaggatcggggtagaactggaagactacaacgttagcgtgcctatactgggcttcaagaaatttatgctgactcacctagtcaatattgatcaggacacataccgactggagtgtaatggagccatatcagcacagtgcaacctttgcctcctgggctccagtgattcccctgcttctgccagctag

SEQ ID NO: 29613 - DNA, 1542 bp, synthetic construct
  misc_feature 1..1542: note = Description of Artificial Sequence: Synthetic coding sequence
  source 1..1542: mol_type = other DNA
atggcgatggaaattgactccagacccggtggtttacctggtagttcatgcaacctcggcgctgctagagagcatatgcaggccgtcacgcgcaactatataactcatccgagagtcacctatcggaccgtttgttcagtcaacggcccactggtggtgctcgatcgggttaaattcgcccagtacgccgagatcgtccacttcacgctgcccgatggcactcagagatctggacaggtgctcgaggttgcgggaaccaaagccattgtccaagtcttcgagggcacatccggcatcgatgcccgtaagactacatgtgaattcaccggtgacattcttcgcacacccgtgagcgaggacatgctcgggagagttttcaatggcagtggaaaaccaattgacaaagggccagtggttatggctgaagactttctggatatcaacggacagcccatcaatccccatagcaggatctacccggaggaaatgatccagaccggaataagtccgattgatgtgatgaatagtatcgccaggggtcaaaagattccgatcttctcagccgctggcctgcctcataatgaaatcgcagcccagatatgcaggcaggcaggcttggtgaagaagtcaaaggcagtgctggattatcacgacgacaacttcgcaatcgtcttcgccgcaatgggggtgaacatggaaaccgcacgattttttaaatcagattttgaacagaatggaaccatgggaaatgtgtgtcttttcctcaacctggccaatgaccctaccattgagcgtatcattactccccgactggcattgaccactgctgaattcctggcataccagtgtgagaagcacgttttggtgattttgaccgacatgtcatcctatgccgaggctctgcgggaagtatcggcagccagagaagaggtgccgggacgcaggggctttccgggatacatgtatacagatttggccacgatatatgagcgcgctggccgagtagaaggtagaggcggatcgatcactcagatacccatcctgaccatgcctaatgacgatataacacaccctattcccgatctgacagggttcataacagagggtcaaatctacgtcgaccgacagttacataatcgccagatctacccaccaataaacgttcttccatccttatctcgactgatgaagtctgccatcggcgaagggatgacgagaaaagatcacggagacgtctcaaatcagttatacgcatgctacgccatcggaaaagatgtgcaggcgatgaaagccgtggtgggagaagaagcactcacaagtgaggacctgctgtatctggaatttttgcagaaattcgaaaaaaattttatcaaccaaggaccatatgaaaatagaagcgtgttcgaatcactggacctggggtggaagctcctccggattttcccgaaggagatgctgaaacgaatcccccaggccgttatcgacgagttttatagtcgggaaggagctcttcaggatctcgcccctgataccgccctttag

SEQ ID NO: 29614 - DNA, 759 bp, synthetic construct
  misc_feature 1..759: note = Description of Artificial Sequence: Synthetic coding sequence
  source 1..759: mol_type = other DNA
atgtcccggcaaagcaccctgtatagcttcttcccaaaatctcccgcactctctgatgcaaacaaggcaagtgctcgggcaagccgcgaaggcggtcgtgcagcagccgcaccaggcgcatccccaagcccgggaggcgacgccgcttggtccgaagccggacctgggcctcggcctcttgcccgttctgcatccccacccaaggccaagaacctgaatggtgggctccgccgttccgttgcacccgcagcacctacgtcatgtgactttagtccgggagacttggtgtgggcgaagatggagggatatccatggtggccttgccttgtatataaccatccttttgatggcacatttatccgggaaaagggcaagtctgtcagagttcacgtgcaattctttgacgattctccgacccgagggtgggtatctaagcgcttgctcaagccatatacaggctctaagtctaaggaggctcagaaaggtggacatttttattcagccaagcccgagatcctgcgcgctatgcagagggccgatgaggcgttaaataaggacaaaatcaaaaggctcgagctggcagtttgtgacgaaccaagtgagcccgaggaagaagaagagatggaggtcgggacgacctacgtaacggacaagagcgaggaagacaacgagatcgagtcggaagaggaagtgcagccaaaaacccaagggtccaggagaagtagtcggcaaatcaagaaacgccgaaagaaaaggtag

SEQ ID NO: 29615 - DNA, 3177 bp, synthetic construct
  misc_feature 1..3177: note = Description of Artificial Sequence: Synthetic coding sequence
  source 1..3177: mol_type = other DNA
atggtcacgggtaatggttccctgaaacggaagtccagccgaaaagaaacaccctctgctacgaagcaggctacaagcataagctctgaaaccaagaataccctgagagcgttctccgcccctcagaatagtgaaagccaggctcatgttagcggcggaggagacgacagctcgcgcccaacagtgtggtatcacgagacactggaatggttaaaagaggaaaagagacgagatgaacacaggaggcggcctgatcaccctgactttgatgccagcaccctttatgtgcctgaggattttctgaattcctgcaccccagggatgagaaaatggtggcaaattaaaagccagaattttgatcttgtgatatgctacaaagtggggaagttttatgaattgtaccatatggacgctctcataggagtctccgagcttggtctggtgtttatgaaaggaaattgggcccattcaggatttcccgagatcgcatttggaaggtactcagactccctcgtacagaaaggatacaaagtagccagggttgagcagactgagacgcctgaaatgatggaagcacgctgcaggaaaatggcccatattagcaagtacgaccgagtggtcagacgggagatttgccgaatcattacaaagggaactcagacctatagtgtactagaaggcgacccgtccgaaaattattctaagtacttgctaagcctaaaggagaaagaggaggatagctcgggtcacacccgggcatatggcgtctgcttcgtggacacatccctcggcaagttcttcataggacagttcagtgacgatcgccattgcagtcgtttccgtactctagttgcccattaccctcccgtgcaggttctgttcgaaaagggaaacctgtctaaagagaccaagacgatactgaagagctccttgtcctgctcccttcaagaaggtctgatcccaggttcacagttttgggacgcctccaaaacccttcggactctgttggaagaggaatacttcagggagaagttatcggatggtataggtgtgatgttgccacaagtgctgaaaggtatgacatcagagagtgacagtattggacttactcccggagaaaaaagcgagctggccctttcagccttaggaggctgcgtcttttacctcaaaaagtgtcttatagaccaggagctcctctccatggccaacttcgaggagtacatccctctcgacagcgacaccgtttcgaccacccggagcggagcaatcttcacaaaggcgtaccagcgcatggtcctcgatgccgtcactctcaacaacctggaaattttccttaatggcaccaacggtagcactgagggcaccctcttagaaagggtggatacttgtcacacccctttcggcaaaagactcctgaagcagtggctgtgtgccccactctgcaaccattatgctatcaatgaccgactggacgctattgaggacttgatggtcgtccccgataagatctccgaagtcgtggaactgttgaagaagcttcctgacctggagcgtctcctgtccaaaatccacaatgtcggatcacctctgaagtcgcagaaccatccagacagtcgtgcaatcatgtacgaggagaccacgtattctaagaagaaaattatcgatttcctttctgccctcgaaggattcaaagtcatgtgcaagatcatcggcatcatggaggaagttgctgacgggttcaagtctaaaattctgaaacaggttatcagcctacagacaaaaaatcccgagggcaggttcccagacttgaccgttgagttaaacaggtgggacaccgccttcgaccacgaaaaggccagaaagacaggactaatcactcccaaggccggattcgacagcgattacgaccaggcacttgcggacattagggaaaacgaacagagccttctagagtatctagagaagcagcggaaccggattggctgtcgcactatcgtctactgggggatcggccgaaaccgatatcagttggaaatccccgaaaacttcacgacacgcaaccttcccgaagagtatgaattaaagtcgactaaaaagggctgcaaaagatattggactaagaccatcgaaaagaaactcgccaacctaattaacgctgaagaacgcagggatgttagcctgaaggattgtatgagacgtctattctataacttcgacaagaattataaagattggcagtcagcagtggaatgcattgccgtgttggacgtcctgttatgcttggctaactactcgcggggtggagacggtccaatgtgtcgacccgtgatcctcctacccgaggatacccctccgtttctcgagttaaaggggtcccgtcacccttgcattaccaagacattcttcggagatgacttcatcccaaatgatattctgatcgggtgtgaggaagaagagcaggagaacggcaaagcctattgtgtactggtgaccggaccaaatatgggaggcaagtccaccttgatgagacaggccggtctgctagcggttatggcacagatgggatgctacgttcccgctgaggtgtgcagactgacaccaatcgaccgagtgttcacgcgcctgggggcatctgatcgaattatgagtggcgaaagcactttctttgtagaacttagtgagactgcaagcatccttatgcacgctactgctcatagcctggtcctcgttgatgagttagggagggggacggctacgttcgacggaacagccatcgcgaatgcagtcgttaaagagttggcggaaaccatcaaatgtcggacactattctccactcattatcacagcctcgtggaggactactctcagaacgtggcagtgaggttgggccatatggcctgcatggtggaaaacgagtgtgaggaccctagtcaggaaaccattacctttttgtacaagtttattaaaggggcatgcccaaagagctacgggtttaatgccgctaggcttgccaatctgcctgaggaggtgatacagaaaggccacaggaaagccagggagtttgaaaagatgaatcaatcgttgcggttgttcagagaagtgtgtctggcctccgaaagatccacagtggatgcagaagctgtgcacaagctcctcaccctcatcaaggagctatag

SEQ ID NO: 29616 - DNA, 3693 bp, synthetic construct
  misc_feature 1..3693: note = Description of Artificial Sequence: Synthetic coding sequence
  source 1..3693: mol_type = other DNA
atgtcccggcaatccactttgtacagcttcttccctaagtccccggctctgtccgatgcaaataaggccagtgcgagagccagtcgcgaaggcggaagggccgctgccgctccaggtgcctcaccatctccaggtggcgatgcagcctggtctgaggccggaccaggccctaggcccttagctagatcagctagtcctccaaaagccaaaaatcttaacgggggtctgcggcgatcagtcggcacgacatacgtcaccgacaagtctgaggaggacaatgagatcgagtccgaggaggaagtgcaacctaaaactcaggggagccgaaggagcagccgccagattaaaaaaaggagggtcattagcgactctgaaagtgatattggcggtagcgacgtggaattcaagcctgacacgaaggaagagggctctagcgatgaaatctcctccggggtgggagattccgagtccgagggactaaattctccggttaaagtggctcggaagcgtaagaggatggtgaccggcaatgggagcctgaagaggaagagcagccggaaagagactcctagcgcaaccaagcaggctacaagtatctctagtgaaactaaaaacacactgcgagccttcagcgcaccccagaactctgagtctcaggcacacgtaagtggcggtggggatgattccagccgtcccactgtctggtatcacgagaccctggagtggctgaaagaagagaaacggagagatgaacacaggcgaaggccagaccacccggactttgacgcatcgactctgtatgtgccggaggattttttaaatagttgcacccccggaatgcggaagtggtggcagatcaagtcacaaaattttgacctcgtgatctgctataaggtcggaaaattttatgaactttatcatatggatgcgcttattggggtgtccgaattggggttagttttcatgaagggaaactgggctcacagcggtttccctgaaattgcattcggacgatacagcgattctttggttcagaagggctataaggtggccagagttgagcaaacagaaacccccgaaatgatggaggcgagatgccgtaagatggcacatatcagtaaatatgatcgtgtggtgaggagggaaatttgtagaattattaccaaaggcacccagacgtatagcgttttagaaggtgaccccagcgaaaactattccaaatacctgctgtctttgaaagaaaaagaggaggattccagcgggcatactagagcctacggagtgtgtttcgtggacaccagcttggggaagttcttcattggacagttctcagacgatcgacattgctctcgtttcaggacacttgtcgctcactaccccccagtacaggtcctcttcgaaaagggcaatttatctaaggagacaaaaacaatactgaagtcaagtctcagttgtagcttgcaggaaggattgattcctgggtcccaattctgggacgctagcaagactctgagaaccctgctcgaggaagagtattttagggaaaagctatctgacggcatcggggtgatgctcccccaggtactcaaaggtatgacatcagagagtgattccattggtcttacacctggtgagaagagcgaattagcgctttcggctctgggcggttgcgttttctacctcaaaaaatgcctcatagaccaggaactcttgtctatggctaactttgaagagtacatcccactggatagtgataccgtcagcaccactcgttctggagcaatatttaccaaggcctaccagcgaatggtgctcgatgcagtgactctgaataacctggaaatcttcctgaacggcaccaatggaagtactgaagggactctgctggagagggtggacacctgccacactccgttcggcaagcggctgctgaagcagtggctttgcgctccactttgtaatcactatgccattaacgacagacttgacgcaatcgaagacctgatggttgttcccgacaagatcagcgaggttgtagagcttcttaaaaaattacctgacttggagagactgctgagtaaaatacacaacgttggctcccctctgaagagccagaatcaccccgactcgagagctatcatgtacgaggagacgacgtattcaaagaaaaaaataatcgactttttaagcgccctggaagggtttaaggtcatgtgcaaaatcatcgggatcatggaagaagttgccgatggtttcaaatccaagatactcaagcaggtgatcagcctgcaaaccaagaaccccgaaggcagattcccggacctcaccgtggagttaaacaggtgggacacggcgtttgaccacgagaaagctcgaaaaactggtctgatcacacctaaggctggctttgattccgattacgatcaggcgctcgccgatattcgggagaatgagcaatccttgctcgagtacctggaaaagcagcgaaaccgtatcggatgccgcaccattgtatattggggcattggacgtaacaggtaccagcttgagattccggagaacttcacgacacgtaacttgccggaggagtatgagttgaagagtaccaagaaaggctgcaagcggtattggaccaagacgattgaaaagaaactggcgaatttgataaatgctgaagaacgacgcgatgtgagccttaaggattgtatgagaagactgttctacaactttgataagaactacaaggactggcagagtgctgttgaatgcattgcagtgctggatgttttgctctgcttagcgaattactctagaggtggagacgggcctatgtgccgccctgttatcctgttgcccgaggacacaccgccattcttagagctgaaggggagccgccatccatgtattacaaagacgtttttcggcgacgatttcatcccaaatgatattttgatcggatgtgaggaggaagagcaggaaaatggaaaagcatactgtgtcctggttacagggccaaacatgggaggcaaatctaccctaatgagacaagccggattgctggccgtgatggcccagatggggtgttatgtccccgctgaagtctgcagactcactcccatagaccgggtttttaccagacttggggcatcagacagaatcatgagtggcgagagcacctttttcgtggaactgtcagagacagccagcattttgatgcatgccaccgcccattccctggttcttgtggatgaactgggaagggggaccgcgaccttcgacggcaccgcaatagcaaacgcggtagttaaagaactggctgaaaccatcaagtgcagaaccttgttctctacacattatcacagcctcgtagaagattactctcaaaatgtggctgtgagattgggtcacatggcttgtatggtggagaacgagtgcgaggatccaagccaggaaaccataacgttcctgtacaaatttataaaaggcgcttgccccaagtcttatggcttcaacgccgctaggctggcaaatctgcctgaagaagtcatacagaaaggacaccggaaagcgcgagagttcgaaaaaatgaaccagtctcttcgcctgttccgtgaggtctgtctagcttccgagaggagcactgtcgatgctgaagctgttcataagttgctgacccttattaaagaattatag

SEQ ID NO: 29617 - DNA, 975 bp, synthetic construct
  misc_feature 1..975: note = Description of Artificial Sequence: Synthetic coding sequence
  source 1..975: mol_type = other DNA
atgcgaagattgttctataacttcgacaagaattataaagattggcagtcagcggtcgagtgcatagccgtgttagatgtcctgctctgtctcgccaattattcaagagggggtgatggcccaatgtgtcgcccagtcattctgctgccagaagacacaccgcctttcctcgaactgaaaggatcccgccatccctgtatcactaaaaccttctttggcgatgacttcatcccaaacgatatcttgatcggctgcgaggaggaggaacaggaaaacggcaagattgtgtgcctcctgctggaccagatctggggcgcaagcctccggatgcggcaggcaggcctgctggccgtgatggcccagatgggctgttatgtcccagctgaggtatgtcggctgacacccatcgatcgggtgttcacacgtcttggagcatcagatcgtatcatgtccggagagtctacgttttttgtagagctgagtgaaacagcctcaatactgatgcacgctactgcacactctctggttctagtagacgagctgggacgagggaccgctacattcgacgggaccgctattgcgaatgccgtggtgaaggaacttgcagaaactattaagtgccgtactctgttttccactcattaccacattagtcggaggttgttttcaaaatgttgctgtttggggcatatggcctgtatggtcgagaacgaatgcgaagacccttctcaagagaccatcaccttcctctataaattcatcaagggggcttgccccaagtcttatgggtttaacgcagccagactggctaatctcccagaagaggtgatccagaaagggcaccgcaaagctagggaatttgagaaaatgaaccaatcgctgcgcctttttcgcgaggtgtgcctggccagcgagcggtctacagtggatgctgaggccgtccacaaactcctgactctgatcaaagaactctag

SEQ ID NO: 29618 - DNA, 3201 bp, synthetic construct
  misc_feature 1..3201: note = Description of Artificial Sequence: Synthetic coding sequence
  source 1..3201: mol_type = other DNA
atgtctcggcagtccactctgtattctttcttcccgaagtcccccgctctttctgatgcaaataaagcctccgccagagcgtcacgggaaggaggccgtgccgcatgtccaaggggcctgagttttcctagaagaggctgtgggctggagcgcggttgggcctggcgacctctggctcgcagtgcgtcacctccaaaggccaaaaaccttaacgggggtcttagacggtcagtcgctccggctgcccctacctcatgtgatttctccccaggggatctggtctgggcaaaaatggaaggatacccttggtggccttgcctggtatacaaccaccccttcgacggtaccttcattcgcgagaagggcaagtccgtcagggtgcatgtgcaattctttgatgattctcctacgcgcggatgggtcagcaagagactcctgaagccatataccgggagtaaaagtaaagaagctcaaaagggtggtcatttttattcagccaagccagagatcttgcgtgccatgcagcgagccgacgaggcactcaacaaagataaaataaaaaggttggagctagctgtgtgcgatgaaccgagcgaacccgaagaggaggaggaaatggaggtggggactacatacgtgactgataagagcgaggaagacaacgagatagaatcagaggaggaagtgcagcccaaaactcagggctctcgaagatccagccgacagattaaaaagaggcgtgtgattagcgatagcgagtccgatatcgggggttccgatgttgagttcaagcctgacacaaaagaggaagggtctagtgatgagattagcagtggggtgggagatagcgaatctgaaggtctgaattcaccagtcaaggtggctcggaagagaaagcggatggtcacaggcaatggctcactaaagcggaaatcctcaaggaaagagaccccaagtgcgaccaagcaggcgacatccatttcctcagaaacaaaaaacactctacgcgcattcagcgccccacagaactcagaatctcaagctcacgtctctgggggaggtgacgattcctcccggcctactgtttggtatcacgagacactggagtggcttaaggaggaaaagcgccgtgacgagcaccgacggcgacctgaccaccctgactttgatgcatccactctgtatgtcccagaggattttctaaactcatgcacgcccggtatgcggaagtggtggcaaataaaaagtcagaattttgacctggtaatttgttacaaggtcggtaagttctatgaactctaccacatggacgcccttattggggtcagcgagctgggtctagtgtttatgaaagggaattgggcccactcagggtttccggaaatcgcatttggtcgctactccgatagtctggtgcagaaggggtacaaggttgcgagagtcgaacagacagagacaccggagatgatggaagcaaggtgccgtaaaatggctcacattagcaagtacgacagggtggtgcgtagggagatatgccggatcattaccaaaggtacgcagacctacagtgtcctggaaggggatccttctgagaattacagtaagtacttattgtctcttaaggagaaggaagaagactcttccggacatactagagcctatggagtgtgctttgtggacacttccctcggaaaattcttcatcggccagtttagcgacgacaggcactgtagccgctttaggaccctcgtagcgcattaccctccggtccaggtgctgttcgagaaagggaacttatcgaaggaaacgaaaaccatcctcaaatcttctttatcatgttctctccaggagggcctgatccctgggagtcaattttgggatgcttctaagacactgcggacattgcttgaagaagagtatttcagagagaaattatccgatggtattggagtgatgctcccccaggtcttgaaaggcatgacaagcgaatccgattcaatcgggctgactccaggcgagaaatcagagctcgctctatctgccctcggtggctgcgtgttctatttaaagaagtgcctgatcgatcaggaactgctcagcatggccaatttcgaggaatatataccacttgacagtgatacggtatcgacaacaagatcaggcgcaatctttactaaagcctatcagcggatggtactggatgccgttactttgaataacctagagatcttcctgaatggcacgaacggctctaccgaagggactttgttagagagggtggacacatgtcacacacctttcggaaagcgcctgctcaaacagtggttgtgcgctcccttgtgtaatcattatgctattaatgatcgacttgacgccatagaggatctcatggtggtgcctgataaaatcagtgaagtcgtagaactgttgaaaaaattgcccgacttggagagacttctcagtaaaatccataacgtcggtagtcctttgaaaagccagaatcacccggatagcagggccattatgtatgaagaaaccacttactcaaagaaaaaaatcattgacttcctaagcgccctcgagggttttaaagtcatgtgcaagatcatcggcatcatggaggaggttgcagacggcttcaaaagcaaaattctgaaacaagtgatatctctgcagaccaaaaatcccgagggacgcttcccagacctcacagtggaactgaataggtgggatacggcctttgatcatgaaaaagcccgaaaaaccggcctcattaccccaaaggctgggtttgatagcgattacgatcaggcgttggccgacatcagagagaatgagcaatctctcttagaataccttgaaaaacaacggaaccggataggttgtagaaccatagtctactggggcatcggccgtaacagataccagctggaaatcccagagaactttactacacggaatcttccggaagagtatgagttaaaatctacgaagaagggttgcaagcgatattggactaagactatagaaaagaagttagccaatcttatcaatgcggaggagcggagggatgtgagtttgaaggactgcatgcgcagactgttctacaactttgacaagaattacaaggattggcaatcagcagtggaatgtatcgctgtgctgggcaagaccttaaataaacttgtcttgagactgtag

SEQ ID NO: 29619 - DNA, 1569 bp, synthetic construct
  misc_feature 1..1569: note = Description of Artificial Sequence: Synthetic coding sequence
  source 1..1569: mol_type = other DNA
atgaggaagcctagggctgctgtgggatctgggcatcgtaaacaggccgcttcccaggaaggtcggcagaaacatgccaagaataactcacaggccaagccctcagcctgcgacgccggactggcgagacagcccgaggaggtggtgcttcaggcttcagtgtcaagctatcatctcttcagggatgtagccgaggtgacagctttcagaggcagccttctgtcttggtatgaccaagaaaaacgagacctgccatggcgaaggagagctgaggatgaaatggacctggaccggagagcttacgctgtttgggtatccgaggtcatgttgcaacaaactcaggttgccacggtgatcaactactacactggctggatgcagaaatggcctactttgcaggaccttgcctccgcgtctctcgaagaagtaaaccagttgtgggccggtctgggttattactcaagaggcaggagactgcaagaaggggctcgcaaggtggtcgaggaactggggggtcatatgccacgcaccgccgaaacacttcaacagctcctgccaggagtcgggagatacaccgctggggcaattgcgtctatagccttcggtcaggccaccggagttgttgacggaaacgtagcacgtgtgttatgtagggtgagggcaataggagcggatccttcatccaccttagtgtctcagcagctgtggggcctggcccaacagctggtggaccccgcacgccctggagacttcaaccaggctgctatggagctgggagcgactgtttgtaccccgcaacgtcccctctgtagtcagtgtcccgttgagagtctctgtcgcgctaggcagagggtggaacaggagcagctgttagccagcggctctcttagtgggagccctgatgtcgaggagtgtgccccaaacactggccagtgtcacctgtgtctcccaccatccgaaccatgggatcaaaccctgggcgtagtgaacttcccaaggaaggcttctaggaaaccaccgcgagaggagtcatcagccacctgcgtgttagagcagccaggcgcactgggcgctcagatcctgctggttcagaggccgaactctgggctgctcgccggactttgggagtttcccagcgtgacatgggagccaagcgagcagttgcagcggaaagccctcctccaggaacttcaacggtgggcagggccactgcctgcgacacatctgcggcacctgggggaggttgtgcacaccttttcacatattaagctgacttatcaggtctatggactggcactcgaaggacagacccccgtgacaactgtgccccctggggctaggtggttgacccaggaggagttccacacagccgctgtcagcacagctatgaaaaaagttttccgagtctatcagggtcaacagcccggaacatgcatgggatctaagcgctcccaggtttccagcccttgctcccgtaagaagccccgaatgggtcaacaagtgctggataatttcttcagatcccacatatccactgacgcccacagtttgaattctgctgcccaatag

SEQ ID NO: 29620 - DNA, 1566 bp, synthetic construct
  misc_feature 1..1566: note = Description of Artificial Sequence: Synthetic coding sequence
  source 1..1566: mol_type = other DNA
atgcgcaagcctcgggcagcggtgggatcaggccatcgcaaacaagctgcgtcccaagagggtaggcagaaacatgctaaaaataactcccaagcgaagccgagcgcttgtgacggcctggctcgccaaccggaagaggtcgtcctgcaggcatcggtgagcagttatcatctgtttcgcgatgtggcagaggttacagcctttcgagggtctctgttgtcatggtatgatcaagagaaaagagacttgccatggaggcggcgagctgaagatgagatggacctggacagacgagcctacgcagtgtgggtttcagaagttatgctgcagcagactcaggtggctacagtcattaattactacactggatggatgcagaagtggcctaccctccaagacctcgccagtgccagtctcgaagaagtgaatcagctttgggctgggctcggctattacagtcgcggaagacgactacaggagggagcacgaaaggtcgtggaggagctgggcggacatatgcccaggacggccgagaccctgcagcagttactcccaggagttggaaggtatacagctggggctatcgcttctatcgccttcggtcaagcaacaggtgttgtggatggcaatgtcgcgcgtgttctttgccgagtacgtgccatcggggcagacccctccagcactttggtgagccagcaactttggggccttgcccaacaactggttgatccagcacgtcctggcgactttaaccaggctgccatggagctcggggcaaccgtgtgtacaccacagagaccgctgtgcagccagtgtcccgtggagtcactctgtcgggctagacagcgcgtggaacaggagcagctcctggcctcaggttctctgtctgggtcccctgacgtggaggagtgcgccccaaacacaggtcaatgccatttatgtctaccccctagtgagccatgggatcaaaccctgggggtggttaatttccctcgaaaagcatcacgcaagcccccaagagaagaatcatccgcaacctgtgtgctggagcagcctggagcgctcggggctcaaatactgctggtgcagcgccctaacagcggcctgctagccggtctgtgggagttcccttccgtaacttgggagcctagtgaacaactccagaggaaggcccttctacaggaactgcagaggtgggccggaccgctgcccgctacacatctgcgtcatctcggtgaggtagtgcacactttttcacatatcaaactgacttatcaagtttatgggctggcactggaaggacagacccccgttactacggtgccccctggagcaaggtggctcacacaagaagaattccatactgccgcagtgtctacagctatgaagaaggtcttcagggtgtaccagggtcagcaacctggcacttgcatgggcagcaagcggagccaggtcagttccccttgttctcgaaagaaacccagaatgggccaacaagtacttgataacttctttcgatcccatatcagcacggatgcccattccctcaacagcgccgctcagtag

SEQ ID NO: 29621 - DNA, 1641 bp, synthetic construct
  misc_feature 1..1641: note = Description of Artificial Sequence: Synthetic coding sequence
  source 1..1641: mol_type = other DNA
atgacaccactcgtgtcgcgactgtctaggctttgggcaattatgcgaaagcccagagcggcagttggatcgggccaccggaagcaggcggcatcccaagaggggaggcaaaaacacgctaaaaacaactctcaagccaagccgtcggcgtgcgacgggatgatcgccgagtgtcccggagcaccagcagggttggcacggcaacccgaagaagtggtgcttcaggcctcagtctcatcttatcacctgttcagagacgtggcagaagtgaccgccttccgcggatctcttctatcatggtacgatcaggaaaaaagagacctcccctggagaagaagagccgaagacgaaatggatctggatagaagagcctatgctgtgtgggtgagtgaagtgatgctgcaacagactcaggttgccacggtcatcaattattacaccggttggatgcagaagtggccgaccctacaggacttggccagtgcgtcgctggaagaagtgaatcagctgtgggctggcctcgggtattattcaaggggccgtcgcctgcaagagggagcccgaaaggtggttgaggagctgggcggacacatgccacgaacagccgagactttacagcagctgctgcccggagttggcagatacactgccggagctattgcctctattgctttcggccaggcgaccggcgtcgtggatggcaacgtggcacgggtcctatgtagagttagggccattggggcagatcccagtagtactctcgtgtcccagcagctatggggcttggcgcagcaattagttgatcctgcaaggcccggtgactttaatcaggctgccatggaactgggggctaccgtgtgcacgcctcagcgacccttgtgctctcagtgccctgtagaaagtctttgtcgtgccaggcagagggtggagcaggagcagctcctcgcgtcgggctccctatcaggcagccccgacgtagaagagtgtgccccaaacacagggcagtgtcatctgtgcctcccccctagcgaaccatgggatcaaacgctcggcgttgtcaacttcccgagaaaggctagccgtaagcctccccgagaggagtcctcagcaacatgcgtgctggagcaacccggagctctgggcgcacaaatcctgctggtccagaggcccaatagtggcctgctcgccggtctgtgggaatttccaagtgtcacctgggagcccagtgagcaactgcagcgtaaagccctgctgcaggagctgcagcgatgggctgggccactacccgctacccatctgagacacctgggggaggtcgtgcatacttttagtcacattaagttgacctatcaagtttatggcctggccctagaaggacagacacctgtcaccactgtgcccccaggcgctaggtggttgacacaggaagagttccataccgcagctgtttctacagccatgaagaaggtttttagggtttaccaggggcagcagccgggtacttgcatgggctctaaaaggtcacaggtgtctagcccctgctcccggaagaaaccaagaatggggcagcaggtcctggacaatttctttagatcacatatctcaacggacgcgcattcccttaactccgcagcccagtag

SEQ ID NO: 29622 - DNA, 1599 bp, synthetic construct
  misc_feature 1..1599: note = Description of Artificial Sequence: Synthetic coding sequence
  source 1..1599: mol_type = other DNA
atgagaaagccaagggccgctgtgggcagtggccaccgcaagcaggccgcttcacaggagggccgtcaaaaacacgccaagaacaactcacaagcgaagccaagcgcatgtgatgggatgatcgcggaatgtcctggcgctccagcgggattggccaggcagccagaagaagtagtgcttcaggctagcgtgtcctcctatcatctgttcagggacgtggctgaagtgaccgccttccgcggtagcctcctgtcatggtatgatcaggagaaacgggacttgccgtggcgcaggcgggcagaagacgagatggatctggatcgcagggcctatgcagtgtgggtgagcgaagtgatgctgcagcaaacgcaggttgccaccgttatcaattactacacaggatggatgcagaaatggcctactctccaagacttagcctccgcatccctagaggaggtcaatcagctgtgggccggacttggctactatagtagggggcgacgactgcaggagggagcacgtaaagttgtggaagagctgggcggtcatatgcctaggaccgctgaaactctgcagcagttactccccggtgtgggtagatatacagcaggggctatcgcaagtatcgcttttggccaggccacaggagtggtagacggaaacgtggctagagtcctatgccgagtgcgcgctattggcgctgacccttcttcgaccttagtcagtcaacagctctggggcctggcccagcaacttgtcgaccccgctcgacctggggactttaatcaagcagccatggagctgggggcaaccgtatgtacaccacagcgacccttgtgcagtcagtgccccgttgagtctctctgtagagctaggcaacgcgtggagcaggagcagctccttgcctccggaagcctgtctgggtccccagatgtggaggaatgtgcgcctaacactggacagtgccatttatgtctgcccccaagcgagccttgggaccaaacactgggagtcgtgaactttccgaggaaagcaagcaggaaaccaccacgggaagagtcttctgctacatgcgttcttgagcaacccggagctcttggagctcaaattctgttggtgcagcggccaaattctgggttgctggccggtctttgggagtttccctctgtgacatgggagcctagcgagcagctccagaggaaagcccttctacaggagctgcagcgttgggccggaccactgcccgctacgcatctgcgccatttgggcgaggtagtgcacaccttcagccatatcaagcttacttatcaggtgtacggactcgcccttgagggacagacccctgtgaccacagtgcccccaggcgcacgctggcttacacaggaggaattccacacagcagctgtaagcaccgcgatgaaaaaggtatttagagtgtaccagggacagcagcctgggacctgtatgggctctaaaagatctcaagtaagtagcccgtgctcccggaagaagccaaggatgggtcaacaggtcctggacaatttttttagaagccacattagcaccgatgctcacagcctgaattctgccgcacagtag

SEQ ID NO: 29623 - DNA, 1566 bp, synthetic construct
  misc_feature 1..1566: note = Description of Artificial Sequence: Synthetic coding sequence
  source 1..1566: mol_type = other DNA
atgagaaagccacgcgctgccgtcgggtcgggtcacagaaagcaggcagctagtcaagaagggaggcagaaacacgcaaagaataattctcaggccaagcccagcgcttgtgatggcctagctcggcagccagaagaggtggttctgcaggcttccgtttcttcctaccacctgttccgggatgtggccgaggttaccgcgtttagagggtccctactgtcatggtacgaccaggagaaacgggatctcccatggagaagacgggctgaggacgagatggacctggataggcgcgcttatgccgtctgggtcagcgaggtaatgcttcaacagacacaggtcgcaaccgtaattaactactataccgggtggatgcagaaatggcctacacttcaggacctggcctctgcctctctcgaggaagtaaaccagctctgggccggacttggctattactcccggggaagaaggcttcaggagggggctcgcaaggtggttgaagagctgggtggacacatgcccaggactgctgaaactcttcagcagctcctgcctggcgtggggaggtacaccgccggagctatcgctagtattgcattcggccaggccacaggcgttgtagacggtaacgtggctagagtcctctgccgggtgcgcgctattggcgcagacccatcatcaacactggtgtctcaacaactctggggcctggcacagcagttagtggatccagccaggcctggcgacttcaaccaggcggctatggaactgggtgcaactgtctgcacaccccagcggcctctttgctcacagtgtccagtggagagcttgtgccgggcacgacagcgggtggagcaggagcagctgttggcgagtggcagcttaagtggttccccagatgtggaggagtgtgctcctaacaccggacaatgtcatctgtgtctccccccatcagagccctgggaccagacgttgggtgtggtgaatttccccaggaaggcatccaggaaacccccaagggaagagtccagcgccacttgcgtgcttgaacagccaggggctctgggcgctcagatcctcctcgtgcagcggcctaattcggggctcctggcagggctttgggagttcccaagcgtgacatgggaacccagtgaacagttgcagcggaaagccttacttcaggagcttcagcgctgggccggtcccctcccagctacacatctaaggcacctcggcgaggtcgttcacacctttagtcacatcaagttaacatatcaggtctacggcctcgctttggaaggccaaacccccgtcactaccgtcccacccggtgcgcgttggctaactcaagaggagtttcatacagcggcagtgagcacggccatgaagaaggtgttcagggtatatcagggacagcagccaggcacatgcatgggctctaagcgcagccaagttagcagtccatgctcccgcaagaagcccaggatgggacaacaggtcctcgacaatttcttccgcagccacatctctacggacgcacactcgctgaatagcgctgctcagtag

SEQ ID NO: 29624 - DNA, 1611 bp, synthetic construct
  misc_feature 1..1611: note = Description of Artificial Sequence: Synthetic coding sequence
  source 1..1611: mol_type = other DNA
atgacaccgttagtcagtaggttatctaggctatgggctatcatgcggaagcctagggcagccgtagggtcaggacacaggaaacaagcagcaagtcaagagggccgtcagaaacacgctaaaaacaattcgcaggcaaaacctagcgcctgcgacgccggactggctcggcagcctgaggaagtggtgctgcaggcttcagtctcatcataccacctctttagggacgtggcagaggtgactgccttcagggggagcttgctgagttggtatgatcaagaaaagcgcgaccttccttggagacgacgggctgaggacgagatggatcttgaccgcagggcatacgccgtatgggtgagcgaggtgatgctgcagcagactcaggtggctaccgtcattaactattacacggggtggatgcagaaatggcccactctgcaggacctggccagcgccagcttagaggaagttaatcagttgtgggccggtcttgggtactacagtcgaggaagaaggctgcaagagggggctcgtaaggttgtcgaggaactggggggtcacatgccgagaacagccgaaacgcttcagcagctgctcccaggcgtagggagatataccgccggagccatcgcctccatagcgttcggacaggcgacgggcgtagtagatgggaacgtcgctcgagtgctttgcagggtcagggcgatcggagctgacccgagctcgacgctggtgagtcagcagttatggggcctcgctcagcagctggtcgaccccgctcggccaggcgacttcaaccaagctgccatggaactaggggctacggtttgtacccctcagagaccactgtgtagtcaatgcccagtcgaaagtctctgtagggctaggcagcgcgtggaacaagagcagctactcgccagcgggtccctttccggctcccctgacgtcgaggaatgcgcacctaacaccggccagtgccacctgtgtctgccaccgtctgaaccgtgggaccagacacttggggtcgttaacttcccacgcaaagcctcccgtaaacctccacgtgaggagagctctgctacgtgcgttctggaacaaccaggggctcttggggcacagattttacttgtgcagagacctaacagcgggttgctggccggactgtgggagttccccagtgttacttgggaaccttcagagcagctgcagcgaaaagctctcctgcaggagctacaacggtgggctggcccactgcccgctactcacctgagacacctgggagaagtggttcacaccttctcccatatcaagctcacctatcaggtttacgggctcgccctggaaggccagactcctgttacaacagttcctcccggagctcgctggctgacacaagaagagttccacaccgcagccgtttcaaccgctatgaagaaggtgtttcgcgtttaccaaggccagcaaccaggcacatgcatggggtccaagcgttctcaggtgagcagcccttgctcccgcaaaaagccaagaatgggccagcaggtgctggataatttcttccgcagccatataagtacagacgcccattcactcaactcggcggcacaatag

SEQ ID NO: 29625 - DNA, 1608 bp, synthetic construct
  misc_feature 1..1608: note = Description of Artificial Sequence: Synthetic coding sequence
  source 1..1608: mol_type = other DNA
atgacgcccctggtgagccggctttcccgcttatgggccatcatgagaaagcctagggcagccgtgggatcagggcatcgaaagcaggctgcatcacaagaaggaaggcagaagcacgccaagaacaactcacaggcaaagccctcggcatgtgatggcctggcccgtcagcctgaggaggtcgtgctgcaggctagcgtgtcatcttatcacctttttcgtgatgtggcagaggtgacggctttcagaggtagcctgctgagctggtatgaccaggagaaaagagatcttccttggcgcagacgggctgaagatgaaatggatttagatagaagagcgtacgcagtgtgggtttcagaagtcatgctgcagcagactcaggtagcaaccgtgattaactattatacaggatggatgcagaaatggcccacactgcaggacctcgctagtgcttcgctggaggaggtcaaccagctttgggccggattaggatactatagcagaggccgacgtcttcaagaaggagccagaaaggtggtcgaagagctgggtggacatatgcctcgtacagccgaaacactgcagcagctcctgccaggcgttggcagatataccgccggagccatcgcgtctatcgcctttgggcaggctaccggcgtcgtggacggtaatgtggccagagtcctgtgccgcgtgcgcgcaatcggagccgatcctagcagcacactggtctctcagcaactgtgggggctggcacaacagctggtcgaccccgctcgccctggggatttcaatcaggcagccatggaacttggtgcaaccgtctgcacacctcagaggccactgtgctcccagtgccctgtggagtccttgtgtcgggcacggcagagggtcgaacaggagcagcttctagcctcaggcagtcttagcggcagccctgacgttgaagagtgcgctccaaacaccggtcagtgccacttgtgcctgccaccaagcgagccatgggatcagaccttgggagttgtcaactttcccagaaaggctagccgaaagccgcctagagaggaaagtagcgcaacttgcgttttggaacagcctggcgctctaggtgctcagatactgttagtccaaagacctaactcaggactcctcgcgggactgtgggaattcccgagcgtcacgtgggagcccagtgaacaactacagcgcaaagcacttctgcaggagttacagcgctgggctggccctcttcccgctactcacctgcggcatttaggggaggtcgtgcataccttctcccacatcaaattgacctatcaagtgtacggtctcgccttggagggccaaacacccgttacgaccgtgccccctggtgccaggtggctgacccaggaagagttccatacagcagcagtttccacagcaatgaagaaggtgtttagagtgtaccagggccaacaaccgggaacatgcatgggatctaaaagatctcaggtgtctagtccatgctctaggaaaaaaccccgaatgggccagcaagtgttggacaacttttttcgcagtcatatcagtaccgacgcccattctctcaactcagccgcacagtag

SEQ ID NO: 29626 - DNA, 876 bp, synthetic construct
  misc_feature 1..876: note = Description of Artificial Sequence: Synthetic coding sequence
  source 1..876: mol_type = other DNA
atgcgcaagcctagagccgcagtcgggtccgggcatcgcaaacaagcggcatcccaggaaggccgtcaaaaacatgctaagaacaattcccaggccaaaccgagcgcatgcgacggtatgatcgccgaatgccccggagccccagctggcctggcccgtcagcctgaggaggtggttttacaggcctccgtctcatcttatcacttatttcgcgacgtcgcagaggtgaccgctttccggggaagcttgctctcttggtacgaccaggaaaagcgcgatctgccatggcggagacgcgcagaggatgaaatggacctggatcgcagagcttatgcagtgtgggtgagcgaggtcatgctgcagcagacccaagtagctactgtgatcaactactacactgggtggatgcagaaatggcctaccctgcaagaccttgccagtgcttctctcgaggaggtgaatcaactgtgggccggtttaggttactattctagaggtcggaggttacaggagggcgctcgaaaggtggttgaggaactgggagggcacatgcctcgaactgccgaaactctgcagcagttattgccaggtgtcggacggtacacagccggagccattgcatctatagccttcggccaagctaccggcgtagtcgacggcaatgtggctcgcgtgctttgcagagtccgtgcgatcggtgccgacccctcctcgaccctggtgtcccagcagctgtgggggctggctcagcagcttgtcgatccagcccgacccggagactttaaccaggcagccatggagctgggcgctactgtctgtactccccagcgccctctgtgttcgcagtgcccagtcgaatcattgtgcagagcctag

SEQ ID NO: 29627 - DNA, 1599 bp, synthetic construct
  misc_feature 1..1599: note = Description of Artificial Sequence: Synthetic coding sequence
  source 1..1599: mol_type = other DNA
atgaggaaacccagggctgcagtgggtagcggccaccggaagcaggcagcctcacaggaggggcgacaaaagcacgccaaaaataacagccaagccaagccatcggcatgcgacggtatgatcgcggaatgccctggggctcccgctggactcgccagacagcccgaagaagttgtgctccaagccagtgtgagcagttaccacctgttccgcgacgtggcagaggtcacagcctttagggggtctttgctgtcctggtatgatcaggagaagcgggatctgccatggaggaggagagcggaagacgagatggacctggatcggagggcttatgccgtatgggtttccgaggtcatgctccagcagacacaggtcgccacggttatcaactattatactggctggatgcagaagtggccaactcttcaggacctcgctagcgcttccctggaggaggtgaatcagctgtgggctggactgggctactactctcgaggtcggaggctgcaggagggagctagaaaggttgtagaggagttgggaggacatatgcccaggactgctgagaccctccagcagcttctgccaggggtcggcagatacaccgctggggcaatcgcatctattgcattcggacaggcgaccggagttgtggacgggaacgtggcacgcgtcctgtgcagggttcgggctatcggtgcagatccctcctccacactggtttctcagcagctatggggcctcgctcagcaactggtggatcccgctcggcctggagattttaatcaggccgctatggagttaggggcaaccgtttgtactccccagagaccactgtgttctcagtgcccagtcgagtccctatgcagagcccgtcaaagagtggagcaggagcagttactggctagtggatcactgtctggttctcccgacgtggaagagtgcgcccctaacactgggcagtgtcatttgtgtttacccccatcagagccctgggaccagacattgggcgtcgtgaacttccccaggaaagcgtcgaggaagcctcccagggaagaatcaagcgctacttgtgtattagagcaacctggggcactaggtgcccagatactcttggtacagcggcctaactccgggctcctggcgggactttgggagtttcccagcgttacctgggagccatctgagcagttgcaaaggaaagctctacttcaagagctacaacggtgggctggccctctgccagctacccacctgaggcatctgggcgaggtggtgcataccttcagtcacattaagctaacttaccaagtctacggcctcgccctggaaggccagactcctgtgaccaccgtgcctccaggtgctcgctggctcacccaggaggaattccatacagccgctgtgtctaccgccatgaaaaaggtgttccgcgtataccaggggcagcaacctggtacctgtatgggctcaaagaggagtcaagtctcctccccatgtagccgcaagaaacctcgcatgggccagcaggtcctggataactttttcaggtcccatatctcaacagacgctcacagtctcaactccgcagctcagtag

SEQ ID NO: 29628 - DNA, 1650 bp, synthetic construct
  misc_feature 1..1650: note = Description of Artificial Sequence: Synthetic coding sequence
  source 1..1650: mol_type = other DNA
atgacaccacttgtaagtcggctgtcacgtctctgggctattatgagaaaaccacgggctgctgtcggatctggccataggaagcaggcggcaagtcaggaggggagacagaagcacgctaaaaacaatagccaggctaagccaagcgcgtgcgacgcctgcgccggaatgatcgccgagtgtccaggagcccctgctgggctggctagacaaccggaagaagtggttctccaggcttcggtttcgtcgtaccatttattccgagatgtggccgaggtgactgcatttagaggcagtctgctgtcctggtacgaccaggagaaaagggatctgccttggcggcgacgcgcagaagacgaaatggatctggatcgcagggcctatgctgtgtgggtcagtgaggttatgctgcagcagacacaggtggcgacagtcattaactattacaccggctggatgcagaagtggcctacgcttcaggatcttgccagcgcctcactggaagaggtaaatcaactctgggccggtctgggatactacagcagagggcgtcgactccaggagggggctcggaaggtagttgaggagctgggtgggcacatgccccgaactgctgaaacattgcaacaattgcttcccggagttggacggtacactgccggtgcaattgcttccatcgccttcggtcaggctaccggggtggtggatggtaacgttgcccgagtactttgtcgcgtgcgggctatcggggcagaccccagttctacactggtcagtcagcagttgtggggattagctcagcaactggtcgatccagctcggccaggggacttcaaccaagccgcaatggaactgggggctaccgtgtgcactccacagcgcccactgtgctcgcagtgtccagtggagagtctgtgtcgcgcacggcagcgagtggagcaggaacagctgctggcctcgggatccttatccgggtcgccagacgttgaagagtgtgccccaaataccgggcagtgccacctttgcctgcccccttccgaaccctgggatcagacactcggagtggtcaattttcctagaaaggcaagccgcaagccaccaagggaagagtcgagcgccacctgtgtgctcgagcagcccggagccttgggggctcagatcctgctggtccagagaccaaactctgggctgctggcaggcctttgggaattcccaagtgtgacctgggagccttccgaacagctgcagcgtaaggccctgctccaagagctgcagaggtgggctggacccttgcctgctacccatcttcgtcatctgggggaagtcgtgcatacgtttagccatatcaaactcacttaccaggtgtatggactggctctggaaggccagactcctgtaactaccgtaccaccaggcgcacgttggctgactcaagaagaatttcataccgctgccgtgagcaccgctatgaagaaggtgtttcgagtttatcaggggcagcagccagggacgtgcatgggtagtaaacgttctcaggtcagtagtccgtgtagtaggaaaaagcccaggatgggtcagcaggtgctagataacttctttagatctcacatctcaaccgatgcccactcactgaattcggccgctcaatag

SEQ ID NO: 29629 - DNA, 1566 bp, synthetic construct
  misc_feature 1..1566: note = Description of Artificial Sequence: Synthetic coding sequence
  source 1..1566: mol_type = other DNA
atgcggaaacccagagcagctgtgggatccgggcaccggaagcaggccgctagtcaggagggacgccagaagcatgcaaaaaataattcacaggccaagccatcagcttgtgacggtctggctagacaaccagaggaggttgtgttacaagcctcggtgagctcctatcatctttttagagatgttgccgaggtgaccgcttttcgcggatccctcctctcttggtatgaccaggagaagagagatctgccgtggagaaggagggccgaggacgaaatggatctggataggcgcgcatatgccgtctgggtgtccgaagtcatgttacaacaaacacaggtggccaccgtgatcaactactacacgggttggatgcaaaagtggcccaccctgcaggatttggcaagcgcaagcctagaagaggttaatcagttatgggcaggtctcggctattacagccggggaagacggctccaggagggcgcacggaaggttgtggaggaactcggcggacacatgcctcgcaccgccgagaccctgcaacagttactccctggagtgggcaggtacacggcgggagctattgctagtatcgcctttggccaggccaccggagttgtggatgggaacgtggcaagagtcctttgccgggtgagagctattggtgccgatccatcctccacattggtgagtcagcagctatggggactcgcccagcagctggtggacccggctcggcctggggacttcaatcaagcagctatggagctcggagccaccgtctgcacaccccagcgccctctgtgctcccagtgccctgtcgagtctttgtgtcgagcgcgacaaagggtcgagcaggagcaacttttagccagcggcagcctgagcggctccccagatgtggaggagtgtgctcctaacacaggccagtgccatctgtgtctaccaccttcagagccatgggaccagaccttgggggtagtcaactttccaaggaaggcgtcacgcaaacctccaagggaagagagcagtgccacctgtgtactggagcaacctggggcactcggtgctcagatcctgctggtgcagcggcctaactccggtctgctggcaggcttgtgggaatttccctcagtcacctgggagcccagcgagcaactgcaaagaaaggccctgcttcaggagttgcagcggtgggcgggtccgctccccgcaacgcaccttcgtcacctgggtgaggttgtccacacgttcagtcacattaagctgacctaccaggtatatggccttgccctagagggacagactcctgtgactacagtcccacctggcgcaaggtggctgacgcaagaagagttccacaccgctgcggtgtccaccgcaatgaaaaaggtattcagagtataccaaggccagcaacccggaacctgtatgggaagtaagcggtcacaggtgtcgtccccatgttctcggaaaaagcccaggatgggacagcaagtactggacaattttttcaggtcacacatctcaacggacgcacactctctcaactcagctgcccaatag

SEQ ID NO: 29630 - DNA, 648 bp, synthetic construct
  misc_feature 1..648: note = Description of Artificial Sequence: Synthetic coding sequence
  source 1..648: mol_type = other DNA
atgaccccactggtgagccggctgtctcggttatgggaagtaaatcagttgtgggcaggcctgggctactatagcaggggaagacggctgcaagagggcgctcgtaaggtggtggaggagttgggtgggcacatgcccaggaccgccgaaacactgcaacaactcctgcctggagttgggaggtatactgctggcgcaatagccagtattgcgtttggacaggccaccggggtggttgacggcaacgtggccagggtgttgtgtagggtccgggctattggcgcagacccttccagcactctggtctcccagcagctgtggggcctagcccaacaactagttgaccctgccaggcccggagacttcaaccaggccgctatggagctcggcgctaccgtgtgtactccacaaagaccactgtgtagccagtgccccgtggaatcactctgtcgagccagacagagagtcgagcaagaacagctgctcgcgtcaggctccctgtctggttcacccgatgtggaagagtgcgccccaaatacaggacagtgccacttatgtctaccaccaagtgagccttgggatcagactctgggcgtggtgaattttccacgtaaagcaagccggaagcctccaagagaagaatcatag

SEQ ID NO: 29631 - DNA, 693 bp, synthetic construct
  misc_feature 1..693: note = Description of Artificial Sequence: Synthetic coding sequence
  source 1..693: mol_type = other DNA
atgaccccattggtgagccgcctgtctcgtctgtgggccataatgcggaagcccagagctgccgttggctcaggacaccggaaacaagcagccagtcaggagggacgacaaaagcacgcgaagaataatagtcaagccaaaccgtccgcctgcgatggcggtgaaagcactctggggtggccaggtcttctcttctcctggcctgcagccgcaggcggatcttcagagggtctgctcgcaggcctttgggagtttccctcagtcacatgggagccttctgagcagcttcagcgcaaagccctgcttcaggagttacaaagatgggccggaccactcccggctacccaccttagacatctgggggaggtggtgcacacgttctcccacataaagctgacgtatcaggtttacggcctggccctcgaggggcaaactcccgtaaccactgtccccccaggtgccagatggctgacgcaagaggagtttcatacagcggcagtgtctaccgccatgaagaaggtttttcgagtgtaccagggacagcagccaggtacctgtatgggaagcaagcgaagccaagtttcctcaccatgttcgaggaagaagcctcggatgggccaacaggtcttagataacttctttagatcgcatatcagcactgatgctcactcactgaattctgccgcacagtag

SEQ ID NO: 29632 - DNA, 291 bp, synthetic construct
  misc_feature 1..291: note = Description of Artificial Sequence: Synthetic coding sequence
  source 1..291: mol_type = other DNA
atgtctgataatgatgacattgaagttgagagtgatgaagagcagccaaggtttcaaagtgccgctgataaacgagcacatcataatgccttggaacgcaagcgccgagatcatattaaggatagcttccattccctacgggactcggtgccctcgctccagggagagaaactatacttcttgttctggaaactgtgtacccccgtattgcacaggcagtccctgatgcagaagtgccacacatttattagctcctaccaggtgcacaaaaaaaaagagtgtaagatttag

SEQ ID NO: 29633 - DNA, 405 bp, synthetic construct
  misc_feature 1..405: note = Description of Artificial Sequence: Synthetic coding sequence
  source 1..405: mol_type = other DNA
atgtcagacaatgatgacattgaggttgaaagcgatgaagaacagccaaggttccagtctgccgctgataagcgtgctcaccacaacgctctggaacgtaaaagacgagatcacataaaggactcttttcattctctgcgtgactccgtcccatctctgcagggggaaaaggcctctagggctcaaatcttagacaaagctactgagtatatccaatacatgagacggaaaaatcacacgcaccagcaagacatcgacgatctcaagcggcagaacgctctgctcgagcagcaaggggaacacccctcttcgtggggctcttggccatgttgtgctcctgctaggagcggcttcggaacttgggcctgccgcgtccgagcatctcacggggtgtgcgctcagtag

SEQ ID NO: 29634 - DNA, 252 bp, synthetic construct
  misc_feature 1..252: note = Description of Artificial Sequence: Synthetic coding sequence
  source 1..252: mol_type = other DNA
atgtccgacaatgatgatatcgaggtggagtccgatgaggagcagccccgtttccagtccgccgctgacaagagagcacatcacaacgccctggagcgtaagcggagggaccatatcaaggacagctttcacagcctgcgagattcagtgccatctctgcaaggagaaaaaggaactaaaatgaaactcactcttcctcccgtgtttccttacgagcacttaccttttccaaccgtcttctgtcacggatag

SEQ ID NO: 29635 - DNA, 456 bp, synthetic construct
  misc_feature 1..456: note = Description of Artificial Sequence: Synthetic coding sequence
  source 1..456: mol_type = other DNA
atgtctgacaacgatgacatcgaggtggaaagtgacgccgacaaaagagcccatcacaacgcactagaaaggaaaaggagagaccatattaaggatagcttccatagcctcagagactccgttccatctctccagggcgagaaagcctcgcgggctcagattcttgacaaggccaccgagtacatacagtatatgcggaggaagaatcacactcaccagcaagatattgacgatttaaagcgccagaacgccctgctagagcagcaagttagagcactggagaaggctcggtcttcagcccagctgcaaactaattaccctagctctgataatagcctgtacacgaatgcgaaaggttcaacaatttcagccttcgacgggggaagcgattcgtccagcgagagcgaacccgaggagccccagtcccgaaagaagctgcggatggaagcgagctag

SEQ ID NO: 29636 - DNA, 483 bp, synthetic construct
  misc_feature 1..483: note = Description of Artificial Sequence: Synthetic coding sequence
  source 1..483: mol_type = other DNA
atgtctgataatgatgatattgaggtagagtccgacgaagaacagcccaggttccaatccgccgctgacaagcgggcacaccacaacgctttggagcgaaaacggagagaccacatcaaagactcatttcattccctgagggactccgtaccttcactccagggagaaaaggctagtagggcacagatcttggataaggccacagaatatatccaatatatgagaagaaagaatcacactcaccagcaggacatcgacgatctgaaaaggcagaatgccttactggaacagcaagtacgggctttggaaaaagcccgttcttctgcgcagctgcagacgaactacccttcgtctgacaatagcttatacactaacgccaaggggagcacgatctcagccttcgatgggggatccgacagctcaagtgaaagcgaacctgaagagccccaatctagaaaaaagctgcggatggaagcgtcatag

SEQ ID NO: 29637 - DNA, 426 bp, synthetic construct
  misc_feature 1..426: note = Description of Artificial Sequence: Synthetic coding sequence
  source 1..426: mol_type = other DNA
atgctgtctgtcaaaattacctccattttctcaatcttcttcttcttgctcttccaagaggaacagcctcgctttcaaagcgccgcagacaagagagcccaccataacgctctggagcgcaaaaggcgagatcatattaaagacagcttccactccctgcgggactcggtgcctagcctacagggggagaaagcttccagagcacaaatcctcgacaaggcaaccgagtatatccagtacatgaggcgcaaaaaccacacgcatcagcaagacatcgatgacctgaagagacagaatgctctgcttgaacagcagggggagcacccctcctcatggggatcttggccttgctgcgcacctgcacgctccggttttggtacctgggcctgcagagttcgtgcttctcacggcgtctgcgcccagtag

SEQ ID NO: 29638 - DNA, 312 bp, synthetic construct
  misc_feature 1..312: note = Description of Artificial Sequence: Synthetic coding sequence
  source 1..312: mol_type = other DNA
atgtctgacaatgacgacatcgaagtcgagagcgacgaagagcagccccgattccagagcgcagccgacaaacgtgcgcaccataacgcgctggagaggaagagaagagaccacattaaagactcctttcatagtctgcgagactccgtccctagtctgcaaggcgagaaggcgagccgcgcacagatcttggataaggcaacagaatacatccagtacatgcggagaaagaatcacacccaccaacaagacattgacgacctcaagcgacagaatgccctgctggaacaacagggagagtctgagagctag

SEQ ID NO: 29639 - DNA, 312 bp, synthetic construct
  misc_feature 1..312: note = Description of Artificial Sequence: Synthetic coding sequence
  source 1..312: mol_type = other DNA
atgtcggataatgatgatatcgaagtcgaatctgacgaggagcaacctcgcttccagagcgccgctgacaagcgggctcaccataacgcactcgagcgaaagcggagagatcatatcaaggacagtttccattccctgcgtgacagcgtgccaagtctccagggcgagaaagcctctagagcacaaattttggacaaggcgaccgaatatatacaatatatgcgacgaaagaaccatactcaccagcaggatatagacgatctgaaaagacagaacgccctgctggagcaacagggagaaagtgagtcttag

SEQ ID NO: 29640 - DNA, 13923 bp, synthetic construct
  misc_feature 1..13923: note = Description of Artificial Sequence: Synthetic coding sequence
  source 1..13923: mol_type = other DNA
atgcctgtacccgatggatctgtggccgctgccggtctgggactggggttacctgctgccgattctagaggacactaccagcttctgttgtcaggcagggccttggctgataggtatcggaggatttacactgctgccctaaatgacagggatcaggggggaggttccgctggacacccggcatcccgcaacaagaagatcctcaataaaaagaaacttaagaggaagcaaaaatcaaaaagcaaagtcaaaacccggtccaaaagtgaaaatctggagaataccgtgattattcccgacatcaaactccattccaacccaagtgcatttaatatctactgtaacgtgcggcactgtgttttagaatggcaaaagaaggagatcagcctggcagctgcttccaaaaatagcgttcagagcggagagagcgatagtgatgaagaggaagaaagtaaagaaccaccaataaagctgccaaaaatcattgaggtcggcctatgtgaggtgtttgaactcatcaaagaaactcggttctcacacccgagcttgtgcctccgaagtcttcaggccttgctgaacgttttgcaggggcaacagcctgaagggctgcagtctgagcctcctgaggtcctcgagagtcttttccaactgctgctcgagatcacggtcagatcaacaggtatgaatgattctactggtcagagtttaactgccttgtcttgcgcttgcttgttcagtcttgtggcttcttggggcgaaactggcaggacgcttcaagccatctccgccatcttaacaaacaatggctcacacgcatgtcaaacaatccaggtcccaaccatcctgaactctctgcaacggtcagtacaggctgtattggtgggcaagattcaaattcaggattggtttagcaatgggatcaagaaggctgcactcatgcataagtggcctcttaaagaaatctctgtggacgaggacgatcagtgtctcctgcagaatgacggatttttcctgtacctgctctgcaaggacggcttgtataagattgggtctggttacagcggtactgtcagaggccacatctacaattctacttcacgcatccggaacagaaaggagaagaagagctggctggggtacgcacagggctatttgctataccgggacgtgaacaaccacagtatgacagccatcaggataagtccagaaacattggagcaggacggcacggtcatgctgccggattgccatacggaagggcagaacatcctgtttaccgatggagagtacattaaccaaatcgcagcatctagggacgatgggtttgtagtgagaatcttcgccacgagcaccgaacctgtgctgcagcaagagctccagctgaagctcgcccgaaagtgtcttcacgcctgcgggatttcacttttcgaccttgagaaagacctccatatcatcagcacagggttcgacgaggaatctgcaattctgggggctgggagagagtttgcactcatgaagaccgccaacgggaagatctactataccggaaagtaccagtctttgggcatcaagcagggcggtcctagcgcgggtaaatgggtcgagctccccattacgaagagccctaaaatcgtgcactttagtgttggtcatgatgggtcacatgcactgctcgtggctgaagatggtagcatctttttcacagggtcagcctcaaaaggagaagacggtgagagcaccaagtccagacgacaaagtaagccctataaaccgaagaagattattaagatggagggaaagatagtcgtctatacggcctgtaacaacggtagttcttctgttatctccaaagatggcgagttgtatatgttcggcaaagacgcaatttattctgacagtagctccttggtcacagaccttaaagggcatttcgtcacacaagtcgctatggggaaggctcacacatgtgtgctgatgaagaatggggaggtttggactttcggcgtgaacaacaagggacagtgcggccgtgacacaggtgctatgaaccagggcggaaagggcttcggcgtcgagaacatggcaactgccatggatgaggacctcgaagaggagctcgacgagaaagatgaaaagtcaatgatgtgcccaccgggaatgcacaaatggaagctggaacagtgcatggtttgtactgtgtgtggcgactgcactggctacggagcgtcttgtgtgtcatcaggtagaccagatagagtcccgggtggtatctgcggatgcggcagcggtgagagtggctgtgcggtttgcgggtgctgtaaagcatgcgcacgggagctcgacggtcaagaggcaagacagaggggcatcctagacgctgtgaaagagatgatcccgcttgacctgttactcgccgttcctgtgcctggagttaacatcgaggagcacctgcaactccgccaggaagagaagagacagagggttatccgcaggcacagacttgaggagggcagaggtccgcttgtatttgcgggtccgattttcatgaatcatagggagcaggctttggcccgactcaggtcccacccggcacagctgaagcataagcgggataagcacaaagatggaagcggagagagaggggaaaaagatgcctcaaaaatcaccacttacccgccaggatccgtccgcttcgactgtgagcttcgggcagtgcaggtttcgtgtgggtttcaccacagcgtggttctgatggaaaatggcgacgtgtatacgttcggctatggacagcatgggcaacttgggcatggcgacgtgaattctagaggatgccccactctcgtgcaggcccttccaggcccttccacccaggtgactgccggaagcaatcatacggcggtgttgcttatggatggacaggtgtttacattcggttctttttctaagggccagctggggcgaccgattttagatgttccatactggaacgcaaaaccagcgcctatgcccaatattgggtccaagtacggacgcaaggccacttggatcggggcttccggtgatcagacatttcttcggatagatgaggctttgatcaattctcacgtgctggctacgtcggagattttcgcatctaaacacataatagggttagtgccagcttctatctctgaaccacctccatttaaatgcctgctgattaataaagtggacggaagctgcaagacattcaatgacagtgagcaggaggatctgcagggtttcggtgtatgcttggacccagtttatgatgtaatctggcggtttagacctaacacccgggaactctggtgctataatgctgtggtggctgatgctcgcctcccttcagcagcagacatgcagtcacgatgttctattctgtcaccagagctggcgctgcccactggctctcgagcactgacaacgcgtagccatgcagctcttcacattctgggatgtttggacaccctggcagcgatgcaggatctgaaaatgggggtagcttctacagaggaggaaactcaggcggtgatgaaggtgtacagtaaggaggactactcagtggtcaaccgtttcgaatcacatggaggaggctgggggtattctgcgcacagcgtggaggctatccgcttctctgctgatacggacatcttgctgggcggtttgggactgttcggagggagaggggagtataccgccaaaatcaagttgttcgagcttggtcccgatggcggagatcacgaaactgatggggatctcctggccgagaccgacgttctggcctatgactgtgccgcaagggaaaaatacgctatgatgtttgatgagccagttctgttgcaagctggatggtggtatgtagcttgggcaagggtgagtgggccaagctctgactgcggaagtcatgggcaggcctctatcaccacagacgacggagtggtttttcagtttaagagttcaaaaaaaagtaataatggtaccgacgttaacgcaggacagattcctcagctgttgtatcgcctccccacatccgatgggtcagccagcaaaggaaagcagcagacctcggagccagtccatattctgaagcgcagttttgcgagaaccgtgtctgtagagtgctttgaatctcttctgtctattcttcactggagctggactacactggttctaggtgttgaggaactgagaggcctgaagggcttccaatttaccgccactttactcgacctggagcggctgagatttgtgggaacatgctgcctcagactgcttagagtttatacctgtgaaatatacccagtctctgcaactggaaaggccgttgtggaagaaacctctaaacttgcggagtgcattggaaagaccaggaccctcctgcgcaaaattctgtcagagggcgtagatcattgtatggttaaacttgacaatgatcctcagggttatctgagtcagcccctctcactgctggaggccgtgttgcaggagtgccataacacctttacagcctgctttcactcattctatcccacccccgctcttcagtgggcctgcttgtgtgatctgctcaattgtctagatcaggatatccaggaggctaacttcaaaactagttcatctaggctcctggcagctgttatgagtgcgttgtgccatacaagcgttaaactaacatccatattcccaattgcttatgacggcgaggtgctgctccggtccattgtgaaacaggtgtcaacagagaacgattccacgttggtccaccggttccctctgcttgttgcccacatggaaaagctctctcagtcggaagagaacatctctggcatgaccagtttccgggaggtgcttgagaaaatgttagtcattgtggttttaccagtgcgaaactctcttcgcagggagaacgagttgttcagttcccatttggtgagcaacacgtgcggactgctcgcttctatcgtaagtgagctgactgcctctgcacttgggtccgaagtggacggactgaacagcctgcattctgtgaaagcgtccgcgaaccggttcaccaaaactagccaagggaggtcatggaacactggaaacgggtctccagacgcgatttgtttttctgttgataagcccggtattgtagtggtcgggttcagcgtgtacggagggggtggcatccacgagtacgagttagaagttctcgtggacgattctgaacacgctggggacagcacccacagtcacagatggacctccctggagttagttaagggcacctacaccacagacgactcccctagcgacatcgcagagatccgccttgacaaagtggttcccctcaaagaaaacgtaaagtacgctgtcaggctccggaactacggatctagaaccgccaacggggacggcggtatgaccaccgtgcaatgtcccgatggggtaacgtttactttcagtacgtgtagtttgagttcaaacgggacaaatcagacccgaggacagattcctcagatcctttactaccgctctgaatttgacggggacttacagtcacagctcctttcaaaggccaacgaggaggataaaaattgttcaagggcacttagtgtggtgagtacggttgtcagagcgagcaaagatttgcttcaccgcgcactcgctgttgacgcagatgatatccccgagctattgtcgtccagctctctgtttagcatgcttctgcctctgattattgcttatatcggaccagtcgccgcagcaatccccaaggtggcagtggaggtcttcgggctggtccagcagctcctaccctctgttgcgatactaaaccagaagtacgcccctcccgctttcaatcctaatcagtctacggactctaccacagggaatcagccagaacagggactgagtgcgtgcacgactagctcacactacgccgtaattgaaagcgagcacccctacaagccagcctgcgtgatgcattacaaagtgactttccccgaatgtgtacggtggatgacgattgagttcgacccccagtgcggcacagcccaaagcgaggatgtgctgcgtctgttgatcccggtcagaactgtccagaatagcggatacgggcctaagctgaccagcgtgcacgaaaatctcaactcttggatagagttgaaaaaattttccggctccagtggctggcccaccatggtgttggtcctacctggaaatgaggcattattttctttggaaaccgcatcagattacgttaaggacgacaaagccagtttctacggctttaagtgtttcgccatcggttatgagttctctccgggacccgacgaaggcgtcattcagctcgagaaagagttagctaatcttggcggtgtgtgcgcagctgctctcatgaagaaggatctggcgctgccaattggcaacgaactggaagaggacctggagatcctggaggaagcggctctacaagtgtgtaagacacactccgggatcctcggtaaaggattagccctgagccactctcctacaattctagaggcgttggagggaaacctccctctgcagatccagtcaaacgagcagtcattcctggatgactttatcgcttgcgttcccggaagctcaggcggaagactagctcgatggttgcagcccgacagttacgccgaccctcagaaaacgtccctgatcttgaacaaggatgatatacgctgtggttggcccaccaccatcacagttcagaccaaagaccagtatggcgatgttgtccacgtacctaatatgaaagttgaagtgaaagccgtgcccgtgtctcagaagaagatgagtctacaacaagaccaagcaaaaaagccacagcgcataccagggtctcctgccgtgaccgcagcttcttccaatacggacatgacatacgggggactggcatcacctaagctcgacgtgagttacgaaccgatgatagtgaaggaggcacggtacattgcgatcactatgatgaaggtgtatgagaattatagcttcgaggagcttagatttgcttcccctaccccaaaaaggccctcggagaatatgctcattcgcgtgaacaacgatgggacctactgcgccaattggacacctggcgctatcggtctgtacactctccatgttactattgacggtatagagatcgacgccggtctcgaggtgaaggttaaggatccaccaaagggtatgatcccacccggaactcagctcgtgaagccgaaatcagaaccacagcctaataaagtgcgcaagtttgtcgccaaggatagtgcagggctgcggatccgatctcatccgtccctccagtccgagcaaattgggattgttaaggttaacggcactatcacatttatagacgaaatccacaatgatgacggcgtatggctgagattgaacgacgaaactatcaagaaatatgttcctaatatgaatggctataccgaagcttggtgtctaagcttcaatcagcatctgggaaaaagtctcttggttcctgtggatgaaagtaagacgaatactgatgatttctttaaggatattaacagctgctgcccacaagaagcaactatgcaggagcaagacatgccttttcttaggggaggcccaggcatgtataaggtggtcaaaactggaccctctggtcacaatatacgttcatgccccaacttaaggggcatccccataggcatgttggtcctgggaaataaagtgaaggcagtaggggaggtgaccaacagcgagggaacatgggtgcaactggaccagaacagtatggtggagttctgcgaatccgacgaaggcgaggcttggtcactggcccgtgacagaggcggaaaccagtacttaagacatgaagacgaacaagcattactggaccaaaatagccagacaccgccaccaagccctttttctgtgcaggccttcaataagggcgcaagttgttctgcgcaaggctttgactacggccttggcaacagcaagggcgaccgcggaaacattagcacaagtagcaagccagcctcaacctccggaaagtccgagctttccagtaagcactcgcgctcccttaaacctgatggccgaatgtcccggaccactgccgaccagaaaaaacctcgcggtacagagagcctgagcgcaagcgagagcttaattcttaagagcgatgccgcaaagctgcgctctgattctcactcccgaagtctgtcacccaatcacaacacgctgcagacccttaagtctgacggtcggatgccatcaagcagtagagcggagagcccgggacccggatctcgtctgagcagcccgaagcccaaaactctgcccgcaaaccgtagctcccccagtggtgccagtagcccaaggtccagctctccccacgataaaaatttgcctcagaaaagtactgctccagtcaaaactaaacttgacccacccagagaaaggagcaagtccgatagctatacactggacccagatacactccgcaagaagaaaatgcctttaacggaacccctcagagggaggtccacctcccctaaacctaagagtgtgcccaaagattcaaccgattcccctggctccgagaatcgcgctccaagcccgcatgtggtgcaggaaaacctgcatagcgaagtggtggaggtttgcacctcttctaccctgaaaacaaactcattgactgacagcacatgcgacgactcatcagagttcaagtccgtggatgagggctcaaataaggtccacttcagcatcggtaaagctccgctgaaagacgaacaggagatgcgggcatctcccaagatcagcagaaaatgcgccaaccgccacactaggcctaagaaggagaagtcctcctttctgttcaaaggagatggtagtaagcccttggagcccgcaaaacaggctatgagccccagcgtggccgaatgcgctcgcgcagtcttcgcctccttcctttggcacgaaggaattgttcacgacgccatggcctgcagcagtttcctcaaatttcaccctgagctgtccaaagagcatgccccaattagatcctccctcaattcccaacaacctactgaagagaaagaaacgaaactgaagaacaggcattccctcgaaatctcctcagctttaaacatgttcaatatagcacctcacgggccagatatatcgaaaatgggctccattaacaagaacaaggtcctcagcatgctgaaggagcctcctttgcatgaaaagtgcgaggacggaaaaacagagaccactttcgaaatgtctatgcataataccatgaagagtaaatccccattgccccttactctccagcatctggtggccttttgggaagacatctccctagcgacaatcaaggctgctagtcagaacatgattttcccttctcccggatcctgcgccgtcctcaagaagaaagaatgcgagaaagagaacaagaagtcaaaaaaggagaaaaagaaaaaagagaaagccgaagtgaggcctaggggcaacctgtttggggaaatggcccaactggccgtggggggtcccgaaaaagacaccatctgcgagctctgtggtgagagccatccctatcccgttacttaccacatgcgccaggcacatcctggttgcggaaggtatgctggtggtcagggctacaacagtataggccacttttgtggcggatgggccggtaattgtggggacggagggatcgggggatcgacatggtatctggtatgtgataggtgcagggaaaaatacttgcgcgagaagcaggccgcagccagagaaaaagtgaagcagagcaggcggaaaccaatgcaggtaaagactcccagggccctgccgacaatggaagcgcaccaggtcataaaggcaaatgctctctttctcctgtcactgagcagcgccgctgagccgagtatcctgtgttaccacccagctaagcccttccagagccagctccctagcgttaaggagggcatatccgaggaccttcctgtgaaaatgccatgcctctatttgcaaaccctcgctcgacaccaccacgagaactttgttggctatcaggacgacaatctcttccaggatgaaatgcggtacctccgatccacttctgtgccagccccatacatctccgtgacacctgacgccagccccaatgtcttcgaggagccagagtctaacatgaaaagtatgccaccttccctggagaccagcccaatcactgatacagacctggctaagcgaactgtgtttcagcgatcttactctgtggtggcctcggaatacgacaagcagcactctatcctccccgcaagggtgaaggcaatccctcgacggcgagtaaacagtggcgatacagaagtgggctctagtctgttaagacacccgagcccggaactgagtcgcctcatttccgcacattcctcgctttcaaagggagagagaaacttccagtggcccgtgcttgcctttgtcattcagcaccatgacctggaaggactggagatcgccatgaaacaggcactacggaagagtgcctgtcgggtgttcgctatggaagctttcaactggctgctctgcaacgtgatccaaactacatccctccacgacatcttatggcatttcgtggccagcttaacccccgctccggtggaacccgaagaagaggaagacgaggagaacaagacatcgaaagaaaattccgagcaggagaaggacacgagggtctgcgaacaccccctgtccgatatagtgatcgccggtgaggctgcgcaccccctgccgcatacatttcacagactcctgcagaccataagcgatcttatgatgtcccttccttcaggaagcagtctccagcagatggcgctccgctgttggagtctgaaattcaagcagagtgatcaccagtttctgcatcagtctaatgtgttccaccatatcaacaatatcttgtcaaaatctgacgatggagactctgaagagtcattttccatttccattcagagcgggttcgaagccatgagccaagaactgtgcatagtgatgtgccttaaggacctgacctcaattgtggacatcaagacttcatctcgccctgctatgataggatctctcaccgacggcagcaccgaaacattttgggaaagtggcgacgaggacaaaaataagaccaagaatataactataaactgcgtcaagggtatcaacgcgcgttatgtttctgtccacgtagacaatagcagggacttgggtaataaagtaacctcgatgaccttccttactgggaaggcagtcgaagatctctgcagaatcaagcaagtggacctggactccaggcacatcggatgggttacttctgagcttccagggggagacaaccatattataaaaatcgagctgaagggtcctgaaaatactctgagagttaggcaggttaaggtgctcggctggaaagatggggagtccacaaaaatagccggacagatctccgcttcagttgcccagcagagaaactgtgaggctgaaacccttcgcgtcttcaggctaatcacatcacaagtgttcggcaaactcataagtggcgatgccgaacctacccctgaacaagaggagaaggctctgctgagttctcctgagggcgaggagaaggtctacaatgccaccagcgacgctgacttgaaggaacacatggtaggcatcatctttagccgttcaaaacttaccaatttacaaaagcaggtgtgtgcccacatagtccaggccatccggatggaagctacccgggttcgggaggagtgggaacacgccatctcatctaaagaaaatgccaactcccagcccaatgatgaggacgcgtcatcggacgcctactgttttgaactgctgtctatggtcctcgccctgagtggcagtaacgtaggacgccagtacttagcccaacagctgacactgttacaggatctgtttagcttgcttcataccgcgagccccagggtgcaacgtcaggtgacaagcctgctgagacgagtgctgcctgaggttactccgagtagactggcaagcattataggcgtgaaatccttaccaccagccgatatctccgacataattcatagtactgaaaagggagactggaataaactagggatactggatatgttcctcggttgcattgccaaggctttgacggttcagctgaaagctaaaggcaccactatcaccggtaccgctggaactacggtaggcaaaggagtgactacagtgacactgcctatgatcttcaattcctcatacctccgtcgcggagagtctcattggtggatgaaaggtagtactccaacgcaaatctcggagattatcataaagctgataaaggacatggccgcagggcacctgagcgaggcgtggagtcgcgtgaccaagaacgctatcgcagagacaataatcgctctgaccaaaatggaagaagagtttagatccccagtgagatgtatcgccacgacacgcctgtggctagccctggcatcattgtgtgtattagaccaggaccacgtggatagattaagcagcgggcgatggatgggaaaggacggacagcagaagcaaatgcccatgtgtgacaaccatgatgacggcgaaaccgccgctatcattctgtgtaacgtgtgcgggaatctgtgcaccgactgtgaccgatttctgcatctacaccggcgaactaaaacacaccagaggcaagtgtttaaggaagaggaagaggcaattaaggtcgacctgcacgaagggtgtggacgcaccaaactcttctggttaatggcactcgccgacagcaagaccatgaaagctatggtcgaattcagagagcatacaggtaagcccactacctccagctccgaggcctgtaggttttgcggcagtcggagtggaacggagctcagcgcggtgggaagcgtttgcagcgacgccgactgccaggaatacgcaaagatcgcctgcagcaagacacatccttgtgggcacccttgtggaggggtgaaaaacgaagagcattgtctgccctgtctgcatggctgtgacaaatctgccacttccctgaaacaagacgcagacgatatgtgcatgatctgcttcaccgaagccctttccgccgcacctgcaattcaactggactgctcccacatatttcatctgcagtgctgcaggcgggtccttgaaaatagatggctcgggccacgcatcacttttggttttatcagttgtcccatctgtaagaacaaaattaaccatatagttctgaaggacctgctggacccaataaaggagctgtacgaagacgtccgacgcaaagccctaatgcgtctggaatacgagggccttcacaaatccgaagctataaccacgccgggagtgcggttctataatgatcctgccggttatgctatgaaccgctatgcttattacgtttgctataagtgtaggaaggcttacttcggcggtgaggctcgatgtgacgcagaggctggcagaggggatgattatgaccccagggaactcatctgcggagcatgctcagacgtcagcagagctcagatgtgcccaaaacatggaacagacttcctggagtataagtgtcgatattgctgttccgtagccgtctttttctgcttcggcaccacacacttttgtaacgcctgccacgacgacttccagcgtatgacttctatcccaaaggaggagttgcctcactgccccgcaggtcccaagggaaaacagctcgaggggacggaatgccctctgcacgtggtgcaccccccaaccggcgaggagttcgcccttgggtgcggagtgtgccggaatgcccacacattctat

SEQ ID NO: 29641 - DNA, 1542 bp, synthetic construct
  misc_feature 1..1542: note = Description of Artificial Sequence: Synthetic coding sequence
  source 1..1542: mol_type = other DNA
atgcaggagcaggatatgcccttcttgcggggagggccagggatgtacaaggtagtaaagaccggcccttccggccacaatatccgcagttgtcctaatctaagagggatcccaatagggatgctggttctaggtaacaaagtcaaagccgtcggagaggtgaccaactcggaaggcacctgggtccagctggaccagaattccatggtggaattttgcgagtctgacgagggagaggcctggagcctggctagagatagggggggtaaccagtacctgaggcacgaggacgaacaagctttacttgatcagaattcacaaaccccgcctccctctccattcagcgtccaggcatttaataaaggggcatcctgtagcgctcagggctttgattatggcttgggaaactccaaggtactcactgtgctgcctacagccggagaccaactaagcgcaatcctgaatagtattcagtcaaggcctaacctgccagctccctccatcttcgatcaggcagcaaaaccccctagctcgctagtccatagtccatttgtgttcgggcagccacttagcttccagcaacctcagctgcagtcggatcgtgggaacataagtacaagcagtaaacccgcaagtacttctggaaaaagtgagctaagcagtaaacatagtcggtctcttaaacctgacggcagaatgtcacgaacaaccgctgatcagaagaagcctagaggaacagagtccttgagtgcttcagaatccctgattctgaagtcagacgccgctaagttgagatccgacagccattctcgatctctgagcccaaatcacaatacgctgcagacactcaaatccgatggccgaatgccaagcagctctcgcgcagagtcccccggtccaggctctcggctttcgtctccgaagcctaaaactcttccagccaatcgctcttcccccagtggggcttcctctccacgcagtagctcaccccacgacaaaaatctcccgcagaaatcgacagcgccagtgaaaaccaaactcgaccctccgcgtgagaggtctaaatcagatagctacaccctggacccagacacccttagaaagaaaaaaatgccactgacagaaccactcaggggcagaagtaccagcccaaaacccaagtccgtacctaaggactccacggactcccctgggagtgaaaatcgagcccctagtccacatgtcgtgcaggaaaatctgcacagcgaggttgtagaagtgtgtacgtccagtacactcaagactaactcactcacggactccacatgtgatgactcaagcgaatttaagtcagtagatgagggatccaacaaagtccatttctctattggtaaggctccactgaaagacgagcaggaaatgcgcgcaagccccaagatttcacgaaagtgcgccaacagacacactagacccaagcggaagatcgagttttcgttccagcgcaggtggattcaggcattcagagcatcccaggcttctcatgtgagcttctgcggtagatag

SEQ ID NO: 29642 - DNA, 14037 bp, synthetic construct
  misc_feature 1..14037: note = Description of Artificial Sequence: Synthetic coding sequence
  source 1..14037: mol_type = other DNA
atgatgatgtgtgcagcaactgcctctccggcagccgctagtagcgggttggggggagatggattttatcctgcagctacgttttccagctcaccggctcctggcgcactgtttatgccagtcccagacggaagcgtggccgcagccggactggggctaggtcttccggctgcagattctcgtggccattatcagctgctgctctcaggcagggctctggcagaccgataccgcaggatttacaccgcagcgctgaatgaccgcgaccagggaggtggtagcgcagggcaccccgcatcgaggaataaaaaaattctgaataaaaagaagctaaagagaaaacagaaatcaaaatcaaaagtcaaaacacgctcaaaaagcgagaaccttgagaatactgtgataatacctgatatcaagttgcactctaacccttctgcgtttaatatatattgcaacgtcagacactgcgttctagagtggcagaagaaagagatatctttggctgcagcctctaagaacagcgtccagagtggggagtctgacagcgacgaggaagaggagtccaaagagccccctattaaactccccaagatcattgaagtgggtctgtgcgaggtgttcgagctgataaaggagacacgcttcagccatccaagtttgtgccttaggagcttgcaggcgttgctgaatgtgttgcagggccagcagccggaggggttacagagtgagccccctgaggtgctggagtcattattccagctcctgttggagattacagtgaggtcgaccggtatgaatgatagcaccggccagagcttaacagcattgtcatgcgcatgtctgttctccttggtcgcctcttggggtgagaccgggaggactttacaggcaatatccgccatcctgaccaataatggctctcatgcgtgccaaacgatccaggtccctactatactcaattcacttcagcgctccgtgcaagcagtcttggtcggcaagattcagatccaggattggttctctaacgggataaaaaaagctgccctgatgcataagtggcctttgaaggaaatatccgtggacgaggatgatcagtgtctcctccagaacgatggtttcttcctctacttactctgtaaggacggtctgtacaagataggctccggatactctggcacagtgagaggtcatatatacaacagcacatcgcgcatccgcaaccggaaggagaagaagtcctggcttggctatgcgcaagggtacctcctttatagagatgtaaataaccactctatgacagccattaggatatctcctgagaccctcgaacaggacggtactgttatgcttccggactgccatacagaggggcaaaacattctctttactgacggggagtacatcaaccagattgctgcctctcgggacgatggtttcgtggtgaggatttttgctacttccactgaacctgttctgcaacaggaactgcaactcaaactggcaagaaaatgccttcacgcctgtggcatttccttgtttgatctagaaaaggacctacatatcatttccaccggcttcgacgaggaatctgccatacttggcgctgggagggagttcgctttgatgaaaacagctaacgggaagatttattatacaggtaaataccaaagcctgggtattaagcaaggaggtccttcagctggaaaatgggtcgagcttcccatcacaaagtctccaaaaattgtgcacttctccgtggggcatgatggaagtcatgctctactggttgctgaggatggatctatctttttcactgggtccgcctccaagggtgaagatggcgagagcactaaaagccgcaggcagagtaagccctacaaacccaagaagatcatcaaaatggaagggaaaattgtggtgtacacggcttgtaacaatgggtcatcttccgttatctcaaaagatggcgaactgtatatgtttggtaaagacgccatctactctgatagcagctcactggtgaccgacttgaaagggcacttcgtaacacaagtggcgatggggaaagctcacacatgtgtgcttatgaagaatggagaggtttggacctttggggtgaataataagggccagtgcggcagggataccggagctatgaatcaaggtggcaaaggcttcggggtggagaatatggcaaccgccatggacgaggatctcgaggaagagctggacgagaaagatgaaaaaagcatgatgtgccctcctggaatgcacaagtggaaactggaacagtgcatggtgtgtacagtatgcggcgattgtacaggatacggggcatcgtgcgtgtctagcggcaggcctgatagggttccgggaggcatctgcggatgcggatccggcgaaagtggatgtgccgtgtgcggttgttgtaaagcatgtgcaagagagctcgatggtcaagaagctagacaacggggtatactcgacgcagtcaaagagatgattccacttgatttgttactggcggtgccggtcccaggggtgaacattgaagagcacttgcagctccggcaagaagagaaaaggcaaagagtgatccggaggcatcggttggaggaggggagagggccattggtttttgccggtccaatctttatgaaccaccgagagcaggcattggcccgactgcgaagtcatcctgctcagctgaagcacaagagagacaaacataaagacggctcgggggagcgcggagagaaagacgcatcaaaaattacgacctacccgcctgggagtgtgcgcttcgactgtgagctaagggctgtgcaagtgagttgtggctttcatcactcagtggtgctgatggaaaatggcgatgtttacaccttcggatatggccagcacggtcagttgggccacggggacgtgaacagtaggggttgccctaccctcgtgcaggctctgccgggtccctccacccaggtaacagctggaagtaatcacaccgcagtgctgctgatggatggtcaggtatttactttcgggtcattttctaagggccaattgggtaggcctattctggacgtgccctactggaatgccaagcctgcgccaatgcccaacatcggatccaaatatggcaggaaggccacctggatcggtgcatctggagatcaaaccttcctccggatcgatgaagcactcatcaattcccacgtcctcgctacctccgagatcttcgcttccaagcacattattgggctggtcccagcctctatctccgagccccctccctttaagtgtctgctgatcaataaggtggacggctcctgcaagacattcaacgacagcgagcaggaggatttacaagggttcggcgtttgtctggatccagtgtatgatgttatttggaggttccgcccaaacaccagggaactctggtgttataatgcggttgtggccgacgctcgacttccatccgcagccgacatgcagtctcgctgctctatactgagtccagaactagcgctgccgaccggcagtcgagctcttacgacacggtctcatgcggcattgcacattctaggatgcctggatactttggccgcaatgcaggatctaaagatgggagtcgcttcaacagaggaggagacacaagccgtcatgaaggtgtactcaaaagaggattacagtgttgtcaaccgattcgagtctcacgggggaggctggggatactctgcacattccgtggaagccattaggtttagcgcagatacagatattctactgggaggccttggattgtttggcggaagaggcgagtatactgcaaaaattaaactttttgagcttggtcctgatggcggtgaccacgaaacggatggggaccttctggccgaaacagatgtgctcgcatatgattgcgcggcacgggagaaatacgctatgatgttcgacgagccggtgcttctgcaggcgggatggtggtatgtagcttgggctcgggtgtcagggccatcctccgattgtggcagtcacggccaagcttcaatcaccaccgacgatggagtcgtgttccagtttaaatcatctaagaagtccaataacggcactgacgtcaatgccggtcagatcccccagctcctgtacagattacctacttccgatgggtcggcaagcaagggcaagcagcagacgtctgagcctgtccatatcctgaaacgttccttcgctagaacagtgtccgttgagtgtttcgaatcactgttaagcattctgcactggtcgtggaccacactcgtgcttggggtcgaggagctacggggtctgaagggattccagtttacagctaccctacttgacctggagagattgcgattcgtcggcacatgctgtcttcgactcctgcgcgtgtacacctgcgagatatacccagtgtcagcgacaggaaaagccgtcgtggaggagacttccaaactggctgagtgcataggaaaaacaaggacgttgctgcggaagatcttatccgagggtgtggatcactgcatggtgaagttagataatgatccgcagggatacctgtctcagcccctgagtcttctggaggccgtactgcaggagtgtcataacacttttaccgcttgttttcatagcttctacccaacgccggctttgcagtgggcctgtctttgcgatctgctgaactgcttggatcaggacattcaggaagcaaatttcaaaactagctcaagccgtctgctggccgcagtgatgagcgccctgtgccacacatccgtgaagctgaccagcattttccctatcgcatatgatggcgaagtccttctgcgatctatagtgaagcaggtctcaacagaaaacgacagtaccctcgtgcatagatttccactgctggtcgcacacatggagaagctgtcacagtccgaagagaacatcagtggcatgacatctttcagagaagtgctggagaagatgcttgtgattgtcgtgctccctgtgcggaacagcttgcggagagaaaacgaactgttttccagccatctggtttcgaacacctgcggcctgctcgctagcatcgtatcagagttgacagcttccgctctaggctccgaggtggatggcctcaatagcctgcattccgtgaaagcctccgctaatcgcttcactaaaacttcccagggtaggagttggaacacaggaaatggatcccccgacgctatttgcttcagcgttgataagcccggtatcgtggtggttgggttctccgtgtacggcggaggcggaatccacgaatatgagcttgaggtgctggtagacgactcagagcacgccggagacagcacacatagtcatcgttggaccagtcttgagcttgtcaagggaacttacacgactgacgattctcccagcgatatcgcggagattcgactggataaagttgtccctttaaaggagaatgtgaagtatgccgtcagactgcgtaattatgggtctagaacagcaaatggcgatgggggaatgaccactgtccagtgccccgatggcgtgacatttacattctctacctgttccttgtcttccaatggaactaatcagactcgtgggcagatcccacagatcctttattaccgcagcgagttcgatggcgacctgcaatcacaactgcttagcaaagccaatgaggaagataagaattgtagcagagcgctttctgtggtgtctactgtggtccgggcttctaaggatctactgcatcgcgctctagctgtcgacgccgacgacatacctgagttgcttagcagttcgtccctgttttccatgctcctgcccctcatcatcgcgtacataggaccagttgcggctgccatccctaaggtggctgtggaagtctttggactggtgcaacagttactgccaagcgtggcaattctaaatcagaaatatgcgccacccgctttcaacccgaatcagtcaacggattctaccacgggaaaccaacccgagcagggtctgtccgcttgtactaccagttcccactatgcggtcatagagtcggaacacccatacaaacctgcctgcgtgatgcactacaaagtgacatttccagagtgtgtgaggtggatgactatcgagttcgacccccagtgtggcaccgcgcagtccgaggatgtccttcggttgctgattcccgtgaggacagtacaaaactcaggatacggaccgaaactgacctctgtccacgagaacctcaactcatggatcgaacttaaaaaattttcaggctcaagtggttggccaactatggtgcttgtgctccctggaaacgaggccttatttagcctcgagacggccagcgactatgtgaaagatgacaaggcatcattctacggcttcaagtgtttcgctatcggctacgaattctcccctgggccagatgagggcgttattcaactagagaaggagttggcgaacctaggtggtgtctgtgctgctgcccttatgaagaaggatctagccctgccaattggcaatgaattggaggaggatctggaaatcttggaagaagcagccctgcaggtgtgcaagacgcacagcgggattctgggcaaaggtctggccctgtctcacagtccaacaatactggaggctctggaggggaatctcccactgcagatacaatctaacgagcagtccttccttgatgattttatcgcctgcgtgcctggctcaagcggcggaagactggcccgatggttacagcccgacagctacgcggatcctcagaaaaccagcctgatcctcaataaagacgatatccgatgtgggtggccaaccaccatcactgtgcagaccaaagaccaatatggggatgtagtgcacgtccctaacatgaaggtggaggtcaaggcagtccctgtgtcacaaaagaagatgagcctccaacaggatcaggccaaaaagccgcaaagaatccccggatcaccggctgttacagccgcatcaagtaatactgatatgacatatggcggtctggctagccctaaactggacgtgtcctacgagcctatgattgtaaaagaggcgaggtatatcgccataaccatgatgaaggtgtatgaaaactacagctttgaggaacttcgatttgccagtcccacgccaaagcgccctagcgagaatatgctcatccgcgttaacaatgatggaacctactgcgctaactggaccccaggagccattggactatatacactgcacgtcacgatcgacggaatcgagatagacgccggtcttgaggtcaaggtgaaagacccccctaagggaatgattcctcctggaactcaattggtcaagcctaaaagcgaacctcagccaaataaggtgagaaagttcgtggccaaggactcagctggcctacggatccggagccacccttccctccagagcgaacagattggaattgtcaaagtaaacggcacaattacgtttattgatgaaatccataatgatgacggggtctggctccgcttgaatgacgagacaatcaagaagtacgtcccgaacatgaacggatacaccgaggcctggtgcctctcgtttaaccaacatctggggaaatcactgctcgtccctgtggacgagtcgaaaactaataccgatgatttcttcaaggacataaactcttgctgtcctcaggaggctacgatgcaggaacaagacatgccttttctgcgcggtgggcctgggatgtacaaagttgtgaaaacaggaccctcagggcacaacataagatcctgcccaaaccttcgaggtatacccatcggaatgctggtgttgggcaacaaggttaaagccgttggggaggtaaccaattccgagggaacctgggtgcagctggaccagaactccatggttgagttttgcgagagcgacgagggagaggcctggtcactggccagagaccgcggtggcaaccagtatctgcggcacgaagacgaacaggcgcttctggaccagaactcacagacccctccacctagccccttttcagtccaggccttcaacaaaggcgcttcatgcagcgcccaggggtttgattacggattgggaaactcaaagggcgaccggggaaatatctccaccagctcaaaacccgcaagcacaagcggtaagtcggagctgtcgtcaaaacacagtcgtagtctgaaaccagacggaagaatgagtagaaccaccgctgatcagaaaaagcctaggggcaccgaatcattgagcgcatctgagagcctgatcctaaagtcggacgccgctaagctgaggagtgacagccacagccgatccctgagccccaatcacaacacgctgcagaccttaaaaagcgacggcagaatgccttcttcttcgagggcggagtcccctggcccagggtctaggctttcttcgcctaaacctaagacactgcccgctaacagatcctcaccgagcggggcatcttctcccaggtcctcatctccacacgataaaaatctccctcaaaaaagcacagcaccagtaaagacaaaactggaccctcctcgcgagcgttcaaaaagtgattcttataccctggatcctgacactctgcgtaagaagaaaatgccccttactgaacctctcaggggaagatctacctcccctaagcccaagagtgtacccaaagattcaacagattcgcctggctcagagaatcgggcaccaagcccccatgtagtgcaagaaaatttgcacagtgaggttgtggaagtgtgtacctcaagcactctgaaaaccaacagtctcactgacagtacctgtgacgactcatcggaatttaaatcagtggatgaggggagtaacaaggtgcacttcagtatcggcaaagccccactgaaggacgaacaggagatgcgcgcttcacccaaaattagtaggaagtgtgctaacaggcatactaggccaaagaaggagaaatcttcctttctatttaagggcgacggttcaaaacccctggaacccgctaagcaggctatgagtccaagcgtagccgagtgtgccagggccgtgttcgcaagttttctgtggcacgagggaatcgtgcacgacgccatggcatgcagttcattcctcaagttccatccagagctttccaaggaacacgcacctatccgatcttccctgaactcccaacagcctacagaggaaaaagagaccaagctcaagaaccgccattcactagaaatatcctcagccctgaatatgttcaatatagccccacacggccctgacatcagtaagatggggtctataaacaagaacaaagtgctctcaatgctgaaggaaccccctctgcacgagaaatgtgaagacggaaagacagagactaccttcgaaatgtctatgcataacaccatgaaaagcaaaagtccgttgccactgacccttcagcacctggttgctttttgggaagacatatctttggcaactataaaggcagcctcgcagaatatgatcttccccagccccggtagttgtgcagtgctcaagaaaaaagagtgcgaaaaggaaaacaaaaaaagcaagaaggaaaagaaaaaaaaggaaaaagctgaagtgagacccaggggcaatctgttcggcgaaatggctcagttagccgtaggcggtcccgaaaaagacaccatatgtgaactttgcggagaaagtcacccttaccctgtgacatatcacatgcggcaagctcatcccggatgcggaagatacgccggtggtcagggatacaactcaattggccacttttgcggtggctgggccggtaactgtggggatggaggaatcgggggatcaacatggtacctggtttgcgaccggtgcagagagaagtacctcagggaaaagcaagcagcggcaagagagaaagtaaaacagagtcggaggaagccgatgcaggtcaagacacccagggcactccccactatggaagcccaccaggtcatcaaggccaatgccctgtttctgctctcactatcaagcgctgccgagccttccattttgtgttaccatcccgctaagcccttccagtctcagctcccaagtgtgaaagagggaatttcggaagatcttcctgtaaagatgccctgtctttacctccagaccctggccaggcaccaccatgaaaactttgtaggctaccaagatgacaacctttttcaggacgagatgagatacctgcggagtacctcagtccccgcaccttatatttcagtgacacccgacgccagcccaaacgtatttgaggaaccagagagcaacatgaagtctatgccaccctcactggaaacttcgccgattaccgatacagatctcgctaagcgaacagtctttcaacggtcctacagtgtcgtcgccagcgaatacgataagcagcatagcatactccccgctcgagttaaggccattcctaggcgccgtgtcaacagcggcgacaccgaagtaggctcttccctgctgcgacacccctcaccggaactgtcgcgcctgatctctgcccatagctctctgtccaaaggcgagaggaacttccagtggcccgtgctagcatttgttatccagcatcacgaccttgaggggctcgagatcgccatgaaacaggccttaagaaaatccgcctgccgggtgttcgccatggaagctttcaattggctgctgtgcaatgtgattcaaacgacgtctctgcacgatatcctgtggcatttcgtggcatccctcacaccagcacctgttgagccagaggaagaagaggatgaagagaataagacatctaaggagaacagcgaacaggagaaagacacgagagtttgtgaacaccccctgtctgacatagtgatagctggggaggccgcacaccctctgcctcacaccttccacagactattacaaacaatcagtgatctgatgatgagcctcccttcagggtcatcattgcagcagatggcactgcggtgctggtccttgaagttcaagcagtcagaccaccagttcctacaccagagtaacgtgtttcatcacatcaataacatccttagcaaatccgacgacggagattcagaggagtctttctccattagcatccagtccggattcgaggcaatgagccaggaactgtgcatcgtgatgtgtctgaaagatctcaccagcatcgttgatatcaagacgtcttctcgtccagccatgattgggagcctgacagatggctctacagaaaccttctgggaatctggcgatgaggataagaacaaaactaagaacatcacaatcaactgcgttaagggtattaatgctcgatacgtgtctgtacacgtggacaattctagagacctgggcaataaagttacctcaatgacgttccttaccggcaaggcagtggaagatctctgcagaattaagcaggtggacctggattcaagacatatcgggtgggttacatccgagctgcccggtggtgataaccatataattaaaattgaattgaagggaccagagaataccttacgggtacgccaggtgaaagttctcggatggaaggacggagagagcaccaaaatcgctggccaaatctcagcttcagtggctcaacagcggaactgcgaggccgagacactcagagtgtttcgcctgataacgtctcaggtgtttggcaagctgattagtggggatgcggaaccgacccctgaacaagaggaaaaggccctcctgtcttcacctgaaggagaggagaaggtgtacaatgcaacctccgatgcagacctcaaagagcatatggtgggtattatcttctctcgctcgaagctgactaacctccagaagcaggtctgcgctcatattgtgcaggcaatccggatggaagctacaagagtcagggaagagtgggaacatgcaatcagttccaaagagaatgctaactcacagccaaatgatgaagacgcgtctagcgacgcctattgttttgagctgctctctatggtgctggcactgtctggctctaatgttgggagacagtacttggctcagcagctgacgctgctgcaggacctgttctctcttctgcacactgcaagccctagagtccagagacaagtgacaagccttcttagacgggttcttcccgaagtcacaccatcaaggctggcatctattatcggtgtcaagtctttaccacctgctgacattagtgatatcatccactccaccgaaaagggcgattggaacaaactgggcattcttgacatgtttttgggctgcatcgccaaagcccttacggtgcaacttaaggcaaaggggactacgatcacaggtactgcaggaacgacagtcggtaagggcgtgacaaccgtgacgctgcccatgatcttcaattcctcttatctgagacgtggtgaaagccattggtggatgaagggttccacgccaacacaaattagcgagattataattaaactgatcaaggatatggccgctggccacttgtctgaagcctggagtcgggtcacaaagaatgccattgcggagaccatcatagcactgaccaagatggaagaggaatttagatcccctgtcaggtgcattgcgaccacacgcctctggcttgccctggcgagtctctgtgtcctcgatcaggatcatgtggatagattgtctagcgggcgatggatgggaaaagacggccagcagaaacagatgccaatgtgtgacaatcatgatgacggcgaaaccgctgccatcatcctttgcaatgtatgtgggaacctatgtacggactgtgatcggtttcttcaccttcatcggagaactaagactcaccagaggcaagtatttaaggaggaggaggaagcaattaaagtggacctgcatgagggttgtggtagaaccaaactgttctggctgatggctctagctgactcgaagaccatgaaggctatggtggaattccgagagcacacgggaaagcccaccacatcatctagcgaggcttgccgtttctgcgggtccagaagtgggactgagctctccgctgtgggcagcgtttgtagcgacgcggattgtcaagagtatgccaagatcgcatgttcaaagacccatccatgtggccatccttgcggaggtgtgaagaacgaagagcactgcctaccatgcttacacggatgcgataaatccgctacaagtctcaaacaagatgctgacgacatgtgcatgatttgctttaccgaggcactgagcgccgctcctgcgatccagctggattgcagtcatatcttccacttgcagtgctgtcgaagagttctggagaatcggtggcttgggccaaggatcaccttcggattcatctcctgcccaatttgtaaaaacaagattaatcatatcgttctcaaagatctgctggatcctatcaaggagctttacgaggacgtacggaggaaagccctgatgcgcctcgaatatgagggcctgcacaaatccgaagccatcacgaccccaggagtgagattctacaatgacccggcaggttacgctatgaaccggtatgcctattacgtttgttacaaatgtaggaaggcctattttggcggagaggctaggtgtgacgcggaagccggaagaggggacgattacgatcctagggagttgatctgcggggcttgctccgacgtgagcagagcccagatgtgccccaagcacggcacggatttcctcgaatataaatgcagatactgttgtagtgtggcagtgttcttttgcttcgggactacacatttctgcaatgcatgccacgatgacttccagcggatgacaagcatacccaaggaggagctgcctcattgtccagccggacctaaaggcaagcagcttgaggggacagagtgccctctccatgtcgtccatccacctacaggcgaggaattcgccctgggatgcggcgtctgtcgaaacgcacacacattctag

SEQ ID NO: 29643 - DNA, 13923 bp, synthetic construct
  misc_feature 1..13923: note = Description of Artificial Sequence: Synthetic coding sequence
  source 1..13923: mol_type = other DNA
atgccggtccccgatggaagtgtcgccgctgctgggctgggactgggcctgcctgccgctgattcaaggggtcactatcagctgctcctgagtggcagagctcttgcggatcggtacagacgcatttacacagcggcactgaatgatcgagatcagggaggcggaagcgcaggtcaccccgcatcaaggaacaaaaaaatactaaataaaaaaaagcttaaaagaaaacaaaagagcaaatccaaggtgaagacccggtcgaagtcagagaacttagagaacactgttatcattcccgacatcaagctgcattccaatccttccgcgttcaacatctactgtaacgtccgccactgtgtgttggaatggcaaaaaaaagaaatctccctggctgccgcttcaaaaaactcagtgcaaagtggggaatccgactcagacgaagaagaggaaagcaaagagccccctatcaagctaccgaaaattattgaggtcggactctgcgaggtattcgaactcattaaagagactaggtttagccatcccagcctgtgcctgcgttctctgcaggcattgctgaacgttctccaggggcaacagccagaaggcctgcagtcagagccacctgaagtgctggaatctctttttcagctgttacttgagattacagtgagaagtacgggcatgaatgactcaacaggccagagcctgacagctctttcctgtgcctgtctgttttccctcgtagcaagttggggagaaacagggaggacactccaggccatcagcgctatcctaacaaacaacgggtcacacgcctgccagaccatccaggtgccaacgatcctgaattcacttcagcgctctgtccaagctgtcctggtgggtaaaatacagatccaggactggttcagcaatggaataaagaaagcggcactgatgcacaaatggccactgaaagaaatatccgtggacgaagatgatcagtgtctgctccaaaacgatggctttttcctttacctgttatgcaaggatgggctgtacaagatcggttccggttattcgggtacagtgaggggacacatttataattccacttcccggatccgcaataggaaggagaaaaaaagttggttaggatacgctcagggttaccttctgtaccgggacgtaaacaatcactccatgacagctatccgaatctcccctgaaacactggagcaggacggcactgttatgctacccgactgccatactgagggccagaacattttatttacggacggagaatatattaatcagatcgcggcatcacgcgacgacggattcgtggtgaggatctttgccacctctaccgagcccgttttgcaacaagagcttcagctcaagctcgctcggaagtgtttacatgcttgtggcataagcctttttgatctggaaaaagaccttcacattatctccacgggcttcgatgaagagtccgcgatcctcggagctgggagggagttcgctttgatgaaaactgccaatggaaagatatactacacgggaaagtaccaatcactcggcatcaaacagggtggtcccagcgcaggtaaatgggtagagctccccattaccaagtccccaaagatagtgcatttttccgtgggacacgacggaagccatgcgttgcttgtggcagaggatggcagcatcttctttaccggctccgccagcaagggtgaggatggcgagagtactaaaagtcggcgacagagtaagccctacaagcctaagaagataattaagatggagggaaagatagtagtgtataccgcatgcaataatgggtcatctagcgtcatttctaaagacggtgagctctacatgtttgggaaggacgcgatttacagcgactcttccagcttggttacggatcttaagggccactttgtcacccaggttgctatggggaaggcccatacctgcgtgctgatgaaaaacggagaggtctggacatttggggtgaacaataagggacagtgtggacgcgatacgggtgccatgaaccaggggggaaaaggctttggtgtggaaaacatggctacggcgatggatgaggacctggaagaagagcttgacgagaaggatgagaagtctatgatgtgtccacccggtatgcacaagtggaagctcgaacagtgcatggtatgtacagtgtgcggggattgcaccgggtacggagctagctgcgtttcttcaggccgtcctgacagagtgcccggtggcatttgcggatgtggcagtggcgagagcgggtgcgcagtgtgcggctgctgtaaggcctgcgctcgagaactagatggccaggaagcaagacagagagggatactcgacgcagtgaaggagatgatccctcttgacctgctgctggcagtgcccgtccctggagttaacattgaggaacacctccagctgcgtcaggaagagaagaggcagcgagtgattaggaggcaccggctcgaggagggtcgcggtcccctggtctttgccggtcctatcttcatgaatcatcgcgaacaggcgctagcacgcctgaggagccatccagcccagctgaagcataaacgcgacaagcacaaagacgggagcggagagagaggagaaaaagacgcctctaagataacaacctacccacctgggtccgtgagatttgattgtgaactgcgcgcagtgcaagtctcttgtggcttccaccacagcgtggttctgatggaaaacggggacgtttacactttcggatacggtcaacatggtcagttgggccacggagacgttaattccagaggctgtccaaccttggttcaggctctgcctggccctagtacgcaggtgacagctggctctaatcatactgccgtgctattaatggatggccaggtgttcacttttggctcttttagtaagggccagctgggcaggcctattctggacgtcccatactggaacgccaagcctgctccgatgcctaatattggtagcaagtatggacgaaaagccacctggataggtgcttctggtgatcagacatttctacgaatcgacgaggcattaattaacagccacgtgctggctacgtctgaaattttcgcgagcaagcatatcattggcctggtgccggctagtatctcagaacccccaccattcaaatgtttactcattaacaaggttgacggatcctgcaaaacgttcaacgacagcgaacaggaagacctccagggctttggcgtttgcctcgatccagtgtatgatgtgatctggcgatttagaccaaacacacgagagttgtggtgctacaatgctgtggtcgccgacgccagactacctagtgcagccgatatgcagtcacgatgttcaattctctcacctgaactcgccctgccgacgggcagtcgagcactcaccactaggtcacatgccgctctgcatatactcggatgcctggacaccctagctgccatgcaggatttgaagatgggcgtggccagcactgaggaagagacacaagccgttatgaaagtgtacagtaaggaggactactcagtggttaataggtttgaatctcatggtgggggttggggctactctgcccactcagtggaagctattcggttttccgccgacaccgatattcttctggggggtctgggactttttggaggtcggggtgaatacacagcaaagatcaaactctttgagctgggacctgatggcggtgaccatgaaacagatggcgatctattggccgagacagatgtattggcatatgactgtgccgctcgggagaaatacgccatgatgttcgatgaacccgtcctcctccaggccggttggtggtacgtggcatgggctcgcgtgtctggaccttcatcagactgcggatctcacggacaagccagtatcactacagacgatggggtcgtgtttcaattcaagtcatctaagaagagtaacaacggaacagatgtcaatgctgggcagatccctcaactactctaccgcttaccaacctcagatggcagtgccagcaagggtaagcagcagacttctgagcccgtgcacatcctaaaaaggtcattcgccagaacagttagtgtggaatgctttgaaagcctgctaagtatactccactggtcctggactactttggtgctgggtgtggaggaactgagagggctcaaggggtttcagtttactgcaacactgctggacctcgagagactacgctttgtgggtacgtgctgcttgaggctcctccgcgtgtacacatgtgaaatttaccctgttagcgccacaggtaaggccgttgtcgaggaaaccagcaagctcgcagagtgcattggaaaaacacgcaccctcctgaggaagatcctcagtgaaggagtggatcactgtatggtaaagctggataacgatccacaggggtacctctctcagcccctcagtctgttggaggccgtcctccaggagtgccacaacacttttacggcatgtttccattccttttaccctacccccgctctgcagtgggcatgtctctgtgatctactcaactgtctggatcaggacatccaggaagctaatttcaagacttcatcatcacgcctcctggcggctgtcatgtctgccctctgccacacatctgtgaagctcacgagtattttccccattgcatacgatggggaggtgctgctgcggtcgatcgtcaaacaagtatctaccgagaacgattccaccctcgtccataggttccccctgctggtcgcacatatggagaagctcagtcagagcgaagagaacatcagcggcatgaccagctttcgcgaagtactggaaaagatgctcgtgatcgtagtgctgcctgtgcggaacagcctgaggcgggaaaacgaacttttctcatctcatttggtgagtaatacatgtggacttctagcaagcatcgtgtctgagctcacagccagcgcactgggcagcgaggtcgatgggctgaactcgctgcactcagttaaagcgtccgcaaaccgcttcacaaaaactagccaaggaaggtcttggaatacaggcaatggatctccagatgccatctgtttctcagtggacaaacctgggatcgtggtcgtaggtttcagcgtttatggcggtgggggtatccatgagtacgagctggaggtgcttgtggatgacagcgagcacgctggagattcaacccattcccatcgctggacctccttggaacttgtgaagggcacatacacgaccgacgactcaccaagtgatattgccgaaatcaggctggataaggttgtccctctaaaagagaacgttaaatacgctgtccgcctgcgaaactacggcagtagaacagcgaacggagacgggggaatgaccaccgtgcagtgtcccgatggcgtcactttcacgttttccacctgcagcttatcctcaaatggaacaaatcagacaaggggccaaatacctcagatcctctactatcgcagtgagtttgacggtgaccttcagtcacagcttctgagcaaagccaatgaagaagacaagaactgctctcgcgctctgagcgtcgttagcaccgtggtgcgtgcgtctaaagaccttctgcatcgtgccctggccgtcgacgccgacgacatccctgaactgcttagtagctcttcattgttctcgatgctcctgccacttatcattgcttatatcggacctgtggccgctgcaatccctaaggtcgccgtggaagtcttcgggctggttcagcagctcctgccttcagtcgccattctgaaccagaagtacgctcccccagcattcaatcccaaccagtccaccgactctactactggaaaccaacccgagcaggggctgtccgcttgcaccaccagttcacattacgccgtgatagagtctgaacacccttataagccagcctgcgtcatgcactacaaggtgacattccctgagtgcgtaaggtggatgaccatcgagttcgaccctcaatgtggcaccgcccagtcagaggatgtcctccggctgctgatccccgtgagaactgtccagaatagtggttatggcccaaagctgacttccgtgcatgagaatctgaattcttggatcgagctgaagaaatttagcggatcaagcggatggcctacaatggtgctcgtcctgcctggcaacgaggcgttgttctccctggaaaccgcgtctgattatgtgaaagatgacaaagctagcttttatggtttcaagtgctttgcaattggctatgagtttagtccaggacccgacgaaggcgtgatccagctggagaaggagctggctaacctcggaggtgtctgtgcagccgcactgatgaagaaagatctggctctacctattgggaacgaattggaggaggatctagaaattctggaagaggccgcattacaggtatgcaagacgcattccgggattctcggcaaagggcttgcattgagccactctcccactattctcgaagctctagagggaaacctgccgctgcaaatacagagcaatgagcagtccttccttgacgatttcattgcctgcgtgcctggctccagcggtgggaggctcgcgagatggctccagccagactcctatgctgatcctcagaaaacttccctgatccttaacaaggatgacatccgctgtggttggccaaccaccatcaccgttcaaactaaggatcagtatggggacgtggtgcatgtgccaaacatgaaggtggaagtaaaggctgtgccagtctctcaaaagaagatgtccctgcaacaggaccaggccaagaagccgcaaaggatcccgggaagccccgctgtaaccgcagcctcatccaatactgacatgacgtacggcggattagctagccccaaactcgatgtgagctacgaacccatgatcgtgaaagaggctcggtacattgctattaccatgatgaaggtctatgaaaattattcatttgaagaacttaggtttgccagcccgacccccaaaagaccgtcagagaacatgctcatcagggtgaataatgacgggacctactgcgcaaactggacccccggtgctatagggttatataccctgcacgtgactatcgacggaattgaaattgacgcaggcctggaagtgaaggttaaggatcctcctaaaggaatgatcccgccaggcactcagcttgtgaagccaaaatcagagccacaacctaataaggtccgcaaatttgtggctaaagactctgcaggactgagaatcagatcccacccttcgcttcagagtgaacagatcgggatcgtcaaggtgaatggcacgatcacatttatcgacgagattcataacgacgatggcgtgtggttgagattgaatgatgagaccattaaaaaatacgttcccaatatgaatgggtacactgaggcgtggtgcctgagttttaaccaacatctggggaagagcctcctggtcccagtggatgagtcaaagacaaatacggacgactttttcaaggatattaactcctgctgcccacaggaggctacaatgcaagagcaggacatgcctttcctccgcggagggccagggatgtataaggttgtcaagactggtcccagcggccacaatattagatcgtgtccaaatctgcggggaattcccatcggcatgctcgtgctcggcaacaaagtgaaggccgtaggtgaggtgactaacagcgagggcacctgggtacagctggatcagaactccatggtggagttctgcgagtcagacgagggtgaggcttggagcctggccagggatagaggcggaaatcagtacctccgacacgaagacgaacaggcactgctcgaccagaattcccaaacccccccaccatcacccttctcagtgcaggcttttaacaagggagcttcctgcagcgcgcaagggttcgattacggactgggtaattcaaagggcgatcggggtaacatatctacttcctccaaacctgccagcacgtcagggaagagcgagctatcttcgaagcacagccgctcacttaaacccgatggcaggatgtcgcgtacgacagctgaccagaagaagccacgcggaactgagagtctgagtgcctctgagtcactcattctgaaatcagacgccgctaaactaaggtcggactcccattctcgcagtctgagccctaatcacaatacattacagactctgaaatcggacggcaggatgccatcttcaagccgcgctgagagccccggaccaggatcccgcctgtccagcccaaagccaaaaactctgccagcaaatcgtagcagcccaagcggcgcttcgagccctcgcagtagctccccacatgacaaaaacctcccccagaaatccacagcccctgtcaaaaccaagttggatccccctagggagagatccaaatccgattcatatacactcgaccccgacacacttcgaaaaaagaaaatgcccctaaccgaacctctcagaggcaggagcacatcccctaaacctaaaagtgtccctaaggatagcacagactcaccagggtctgagaacagagctccctctccccacgtcgtgcaagaaaacttacacagcgaggtcgtggaggtttgcacgagctctacccttaagacgaactccctcacagactcaacttgcgatgactcatccgaattcaagagtgtagacgaaggttccaacaaggtacacttcagcattggtaaggcgcctctgaaagacgaacaggaaatgcgggcttctcccaaaataagccgcaagtgtgccaatcgccataccaggcctaagaaagaaaagtctagtttccttttcaagggtgacggcagcaaaccattagaacctgccaagcaggcaatgagtccttctgtagccgagtgtgcccgagctgtctttgcttccttcctgtggcacgaggggatcgtgcatgatgccatggcctgttcaagcttcctgaagttccaccctgagttgtcaaaggaacacgccccaattaggtcttctctcaacagccagcagccaaccgaagaaaaagaaactaagttgaagaaccgacactccttggaaatctcatccgccttgaatatgttcaatattgccccacacgggcctgatatttccaagatgggctcaattaataagaataaggtgttgtccatgctaaaggagccacccctgcatgaaaaatgcgaagacggcaaaacagagaccaccttcgaaatgagcatgcacaacaccatgaaatccaagtcccccctgcccctgactctacagcacctcgtggctttctgggaagacataagcctcgccacaataaaggcagcgtcgcagaacatgatcttccccagccctggcagctgcgccgtcctgaagaagaaggagtgtgagaaagagaataaaaaaagcaagaaggaaaaaaagaaaaaagaaaaggccgaagtccggcctagaggcaatctgtttggcgagatggcacaactggccgtgggtggcccagaaaaggacaccatatgcgagctctgtggcgaatctcatccttatccagtgacttatcatatgcgccaggcccacccgggttgcggacggtacgcaggaggtcaggggtacaacagcatcggtcacttctgtgggggttgggcaggaaactgcggcgacgggggaatcggcggatcaacctggtacctggtatgcgatcgttgtcgcgagaaatacctcagagaaaagcaggcagccgctagagaaaaagtgaaacagtccagacggaaaccaatgcaggtaaagacaccacgcgctcttcccacaatggaggcccaccaggtgattaaagcaaacgctctctttctactttcccttagttctgccgcagagccatctatactatgttaccaccccgctaagccttttcagagtcagttgccatccgttaaggagggcattagtgaggacctgccggtaaagatgccatgtctttaccttcagactttggcacgtcaccaccacgaaaacttcgtgggctaccaggacgataacctctttcaggatgaaatgcgctatctccgcagcacctctgttcctgccccatacatcagtgttacccccgacgcttccccaaacgtcttcgaggagcctgaaagtaatatgaaaagcatgcccccttccctggaaacttcaccaatcaccgataccgatctagcaaagcgaacagttttccagcgctcttatagtgttgtggcaagcgagtatgataagcagcactccatacttccggcacgcgtaaaggccatcccccgtcgtcgtgtgaattccggcgacaccgaggtgggttcaagtcttctcagacatccttcccctgaactgtcacggctgatttctgcccactctagtctgagtaaaggggaacggaattttcagtggcccgttctggcttttgtaattcagcaccacgacctggaaggtttggaaatcgccatgaaacaggcactgaggaaaagtgcctgcagagtgtttgcaatggaggcgttcaattggttgctctgcaatgtaattcaaactacttcactccacgacattctatggcactttgttgccagcctcacacccgctcctgtcgaaccagaagaagaggaggatgaggaaaacaagacctcaaaggagaactccgagcaggagaaggatacccgagtgtgcgagcatcccctgtccgacatcgtgatcgccggagaagccgctcatcctttaccccacaccttccatcggcttttgcaaactatctcagaccttatgatgtccctgccttccgggtcttccttacagcagatggcactgcggtgctggagtttaaaatttaaacagagcgaccaccagttcctgcatcagagcaatgtctttcatcacattaacaacattctgagcaagagtgatgatggagactctgaagagtcatttagcattagcatccaaagcgggttcgaggctatgtcacaggagttgtgcatcgtgatgtgtcttaaggatctcacttctattgtggatattaaaacatccagcagacctgccatgatcggctccctgaccgacggcagtactgaaacattctgggaatctggagatgaagataagaacaagacaaaaaacatcaccatcaattgcgtaaaaggcatcaatgcccgttacgtatcagtgcatgtggataatagtcgggatttggggaataaggtgacttctatgacctttctgacaggcaaagcagttgaggatctatgccgcatcaagcaggtggacctggacagccgacatatcggttgggtgacttcagagcttcccggtggtgacaaccacattataaaaattgaacttaaggggcctgaaaacactctaagagtgcggcaggtcaaggtgctggggtggaaggatggcgaaagtacaaagattgccggtcagattagtgcatccgtggcccagcagcgcaattgcgaagccgagacattgcgtgtatttaggcttataaccagccaggtgttcgggaagctcatctctggagacgccgagcccacacctgagcaggaggagaaggctctgctgagctctcccgagggggaagaaaaagtctataacgcgaccagcgatgcagatctcaaagaacatatggtgggtattatcttttccagaagcaaattaaccaatcttcagaaacaagtttgtgcccacatcgtgcaggcgatccgaatggaggcaacgcgcgtgagagaggagtgggaacacgccattagttcgaaggaaaacgcaaattctcaacctaatgatgaagacgcttcctctgacgcgtattgttttgagctactatccatggtattggcgctctcagggagcaacgtcgggaggcagtacctggcacagcagctaacgctgctgcaagacctcttttctctgctgcatacggcgtcacccagagtgcaacggcaggttacgagtctcctccgcagggtgctcccagaggtgacacctagccgcctggcctctatcattggcgtaaaatccctaccaccggctgatatctcagacattattcattccacggaaaagggcgattggaataagctgggcatcctggacatgttcctgggttgtatcgcaaaggctcttactgtgcagctcaaggctaagggtactacaattacaggaaccgcaggaacaactgtgggaaaaggagtgaccaccgtgacccttccaatgatctttaatagctcatacttgaggcgcggagagtcacactggtggatgaaaggttccacccccactcagatctctgagattattattaagctcattaaagacatggctgctggacacctcagcgaggcttggtcgcgggtcacaaagaatgccattgccgagacaataatcgcccttactaaaatggaggaagagttccgcagtccggttagatgcattgctaccacccgactgtggttggcactggcttccctgtgcgtattagatcaagatcatgtggataggctgagctcaggcaggtggatgggaaaggacggacagcagaagcaaatgccgatgtgtgataatcacgatgacggagaaacggcggctatcattctttgcaatgtgtgcgggaacctatgtacagactgtgataggttccttcatttacataggagaaccaaaacccaccaaaggcaagtgttcaaggaggaggaggaggccattaaggtcgatttgcacgagggctgcggccgaactaaactcttttggcttatggctttggccgactcaaaaacgatgaaggcaatggtggagttcagggaacacaccggcaagcccaccactagtagttcagaggcgtgccgtttttgcggctcaaggagcggcacagagctgtcggctgtggggtcagtgtgctctgacgctgactgccaagaatacgccaagattgcgtgttctaaaactcacccatgcggacatccgtgcggaggcgtaaaaaatgaagaacattgcctgccctgcctgcatggatgcgataagtccgcaacaagcttaaagcaggatgccgacgatatgtgtatgatttgctttactgaggccttgagcgctgcacctgccatccagttggactgctcacatatttttcacttgcagtgctgtagacgagtactcgagaaccgctggttaggaccaaggataaccttcggatttatcagctgtcccatctgcaagaataaaattaaccatatagtactcaaagatctcctggacccaatcaaggaactctatgaagacgtgaggcgaaaggcccttatgagactggaatatgagggcctgcataagagcgaggcaatcaccactccaggggttcgattctacaacgaccccgcaggctatgccatgaatagatacgcctactacgtttgctacaaatgccggaaggcgtactttggcggagaagcccgttgcgacgcagaagctggacgtggggatgactacgatccccgtgagcttatatgtggcgcttgctcagatgtaagccgagcacagatgtgcccaaagcatggaactgacttcctcgagtacaagtgcaggtattgctgttcagtcgccgtgttcttctgctttggcacgacacacttttgcaacgcatgtcatgatgattttcagcgcatgacctcaattcccaaggaggaattgcctcactgtccggcaggtccaaaaggcaaacagctggagggcacggaatgtcccctgcacgtggtacacccgccaacaggggaagagttcgctttggggtgcggggtctgccgcaacgcgcacaccttctag

SEQ ID NO: 29644 - DNA, 930 bp, synthetic construct
  misc_feature 1..930: note = Description of Artificial Sequence: Synthetic coding sequence
  source 1..930: mol_type = other DNA
atgagacccgaccgcgctgaagccccaggtcctccagcgatggcagccggtggtccaggcgcaggctctgcagccccagtctcaagtacttccagtctgcctcttgccgctctgaatatgcgggtgagaagacggttgagtctcttcctcaatgtcaggacccaggtcgccgctgattggaccgctttagcggaagagatggacttcgagtacttggagatcagacagctagagacccaggccgaccctactgggaggctgctggacgcttggcaggggagacctggagcctccgtggggaggcttctggagttactgaccaaactaggcagagatgatgtgctactggagctgggacctagcattgaggaagactgtcagaaatatattcttaagcaacagcaagaagaggctgagaagccactgcaagttgcagcggtcgacagtagcgtgcccagaacggccgagcttgctgggatcaccaccctggacgaccctctgggccatatgccggaacgtttcgacgccttcatttgctactgcccctccgatatccaattcgtccaggagatgatacggcagcttgagcagaccaactatcgtctgaagttgtgcgtttcggacagggatgttctgcctggaacgtgcgtctggagtatcgcctccgaacttattgaaaagagatgccggagaatggtcgttgtggtgagtgacgattatctgcagagtaaggaatgcgattttcaaacaaagttcgctctcagtctgagtccaggagcacaccagaagcgtctgattcccatcaagtataaggctatgaagaaggagtttccttctatcctgcgatttattactgtctgtgactacaccaacccttgcacaaaatcttggttctggactcgcctggccaaggctctatccctgccctag

SEQ ID NO: 29645 - DNA, 858 bp, synthetic construct
  misc_feature 1..858: note = Description of Artificial Sequence: Synthetic coding sequence
  source 1..858: mol_type = other DNA
atggcagcaggtggccctggggctggctcagctgcccctgtgtcctccacctcctcattacctctcgccgctttaaatatgagggtccggagacgcctcagtctatttctgaatgtcagaacacaagttgcggcagattggacagccctcgccgaggaaatggatttcgagtaccttgaaatccggcaactggagactcaagccgatcctacaggtgcaagcgtgggccgtttgctcgagctgcttaccaagctcggacgcgatgacgttctgctcgagctcggccctagtatcgaagaggattgccaaaagtatatattaaagcaacagcaggaggaagcagaaaaacctctccaggtcgccgctgtggactcatccgttcctcggacagccgagctggccggaataactaccctggatgatccactcggccacatgccggaacgatttgacgcatttatttgttattgcccctccgatattcaatttgtgcaggagatgatcaggcagctggagcagactaactatcgactcaaactctgtgtttcagatcgggatgtgctgccagggacgtgtgtctggagtatcgcctcggagctgattgaaaaacgctgtcggagaatggtagtagtggtttcagacgactatcttcaatcaaaagagtgcgacttccaaacaaaattcgcgctcagcctgtcccctggagctcaccagaagcgtctgatccccatcaagtacaaggcaatgaagaaagagtttccgtccattctccgcttcattaccgtttgtgattacactaacccctgtacaaaatcatggttttggactcgcctggccaaggctctctctctgccatag

SEQ ID NO: 29646 - DNA, 954 bp, synthetic construct
  misc_feature 1..954: note = Description of Artificial Sequence: Synthetic coding sequence
  source 1..954: mol_type = other DNA
atgcggcctgatcgcgcagaagctccagggccacctgcaatggccgctggaggacctggcgcaggatctgctgctcccgtctcctcgaccagcagtctgcctctggctgccttaaacatgagagtcagaagacggttatctcttttcctgaacgtaaggacccaagtggccgcagactggactgcacttgctgaggagatggatttcgaatacctagaaatacgccagctggaaactcaagccgatccaacaggacgattgctggacgcctggcagggaagacctggagcttctgtcggtcgactgctggaattgctgacaaagctgggacgcgacgatgtgctgctcgaattggggccttctattgaggaggactgccagaagtacattcttaagcagcaacaagaagaggctgagaaacctctgcaggtggcggcagtcgattcatctgtgcctcgtacggcagaattagccggtataaccacactcgatgacccccttgggcacatgccggagcgctttgatgcttttatttgttattgccctagcgacatccagttcgttcaggaaatgatcagacagctcgagcagactaactaccggttgaagctttgtgtctctgatcgtgatgtgcttccaggtacatgcgtgtggtctatagcaagcgagctgatagaaaagagactggcccgaagacctagagggggttgccggagaatggtggtggtggtatccgatgactacctccagtccaaggaatgtgatttccagacaaagtttgccctctcattgtcacctggtgcgcatcagaaacgcctgattcccatcaagtacaaggctatgaaaaaggaattcccaagtattctccgatttatcaccgtatgcgactacaccaacccgtgtaccaagtcttggttttggactcgacttgcaaaggctttgtctctgccttag

SEQ ID NO: 29647 - DNA, 510 bp, synthetic construct
  misc_feature 1..510: note = Description of Artificial Sequence: Synthetic coding sequence
  source 1..510: mol_type = other DNA
atggctgccggaggcccaggcgctggcagcgctgcacccgtctcttccacaagttcactaccgctggccgcactaaacatgagggtcaggcggcgactgtcactgttcctcaacgtccggacccaagtcgcagctgactggacagctttggccgaggaaatggactttgaatatcttgagattagacagttggagacccaggccgatcccactggacggctcctcgatgcgtggcagggaagaccaggagcttctgtgggacgcctgctggagctactgactaagctaggccgagatgatgtgctcctggagctcggaccatccatcgaagaggattgccagaagtacattctgaaacagcagcaggaagaagccgaaaaaccactgcaggttgccgctgtcgacagctctgtcccccctcacctgatgaccccctggggaatttgcctctcagtgagtatgcctagctcagcaatagcgcctgctacctcaagcctctgccgcaggtag

SEQ ID NO: 29648 - DNA, 963 bp, synthetic construct
  misc_feature 1..963: note = Description of Artificial Sequence: Synthetic coding sequence
  source 1..963: mol_type = other DNA
atggaactgctctctccgcctctgcgagacgtcgacctgactgcccctgatggttccctttgttcatttgctaccactgatgacttttatgacgatccctgtttcgacagcccggacctccgattctttgaagatttggatcccagactgatgcacgtgggcgcactcttaaaaccagaggaacacagccactttccggctgcagtgcatcccgctcccggagcacgggaagatgagcacgtgagagcaccctctggccaccaccaggcagggcgatgtctgttatgggcttgtaaagcttgtaagcggaagactactaacgctgataggcgcaaggccgctacaatgcgtgaacggcgtcgcctgagtaaggttaacgaggcctttgagaccttgaaacggtgcaccagctctaaccccaatcagaggctgcctaaagtcgagatcctgagaaatgcgatacggtatatcgagggactgcaggcactgctccgagatcaggacgcggctccgcctggcgctgccgcagccttctatgcacctgggccattacctcctggtcgagggggagagcactattcaggggactctgacgcctcttctccaaggagcaactgttcagatggcatgatggactactcagggccaccatctggtgctcgcaggcgtaactgttatgaaggtgcctattacaatgaagcaccatcagaacctcgacccggtaaatccgcggctgtgtcttctctggactgtctgtcctctatagtggaacgtattagtactgaatctccggcagctccagcgttactgctggccgatgtgccatcggagagccctccccgtaggcaggaagcagccgctccatcagagggggaatcatctggagaccctacacagtcacctgatgcagcccctcaatgccccgcaggggcaaatcctaatcctatctaccaggtgttgtag

SEQ ID NO: 29649 - DNA, 5537 bp, synthetic construct
  misc_feature 1..5537: note = Description of Artificial Sequence: Synthetic coding sequence
  source 1..5537: mol_type = other DNA
atgggggacgtaaagcttgtggcatcttctcatatctcaaaaacttcattgtcagttgacccttccagggtcgactccatgcctctcaccgaagccccagcatttatcctgccacccagaaatctctgtatcaaagagggggcaacagccaagtttgaaggtcgtgttcggggataccccgaaccacaggtgacctggcacaggaacggacagcctatcacgtctggtggacgcttccttctcgattgtggaatcagaggcacattcagtctggtgatccatgcggtgcatgaagaggacaggggtaaatatacatgtgaggccacaaacggttcaggtgcaagacaagtgaccgtcgaattaactgtagagggatctttcgccaaacaactcggtcagcccgtagtgtctaaaacactaggggaccgctttagcgcccctgctgtcgagacccggccatctatctggggagagtgcccccctaagttcgccactaagctgggcagagtggtcgttaaagagggccagatgggccgattttcctgcaagattaccggcaggccacagccccaggttacatggcttaagggaaacgtgcctcttcagccgtccgcgcgagtcagcgtcagtgagaaaaacggtatgcaggtcttggagatccatggcgttaatcaggacgatgtgggagtctatacgtgcttagtggttaacggctccggcaaggcatccatgagtgcggaactcagtatacaggggttggacagtgctaaccggtctttcgtgagagaaactaaagctacaaattccgacgttagaaaggaggtgacgaacgtgatctcaaaggaatctaagctggattctctggaggctgccgcaaagtctaagaactgctcaagtccccagcgaggcggttcacctccctgggccgctaatagccagccccagcctcccagggaaagcaaacttgagtcttgtaaagacagtccgaggaccgcccctcagactcctgttctgcagaaaacttcttcctctatcacccttcaggcggctcgcgtccagcccgaacctcgggctcctggcctaggtgtgctgagtccctctggggaggagcgtaagcgacctgctccccctcgcccagcaacatttcctacaaggcagccaggactaggaagccaggacgtggtctccaaggctgctaataggaggattcccatggagggtcagagggattctgcctttcctaagtttgagtctaaaccccaaagccaggaagtcaaggaaaatcagaccgtgaagtttaggtgtgaaggtttggcagtgatggaagtcgccccttctttcagttccgtgctcaaagattgcgcggtcatcgaaggccaggattttgtgctgcagtgctcagtcagaggtacaccagtccccaggatcacctggttgttgaacggacagccaatccagtacgcccgttcgacatgcgaagccggtgtggctgaattgcatatccaagatgcccttcctgaagaccacggtacttatacatgcttagccgagaatgcactggggcaagttagctgttcagcctgggttactgtgcacgaaaagaagagtagccgtaaatccgagtacctcctaccagtggccccttcaaagccaaccgcacctatctttcttcagggcttgagtgacttaaaggttatggacgggagtcaggtaaccatgacagtgcaggtcagcggaaacccccctcccgaggtaatctggctccataatgggaacgagattcaagaatcagaggacttccacttcgagcagcgtggcacccagcactcgttatgtatccaggaggtgttcccggaggatacaggaacctacacgtgtgaagcctggaactctgcaggggaagtgagaacccaggctgttctgacagttcaggagccgcacgacggaacccagccgtggttcatttccaaacccagaagcgtgaccgcctcccttgggcagagcgttttgatcagctgcgcaatcgctggtgaccctttccccactgttcactggctgagagacggaaaggcgctttgtaaggacacagggcattttgaagtactgcaaaacgaagacgtattcaccctggtgctgaagaaagtacaaccctggcacgccggtcagtatgaaatcctcctgaagaacagagtgggcgaatgtagctgccaggtgagcctcatgctgcagaattcgtctgccagagcgctcccacgaggcagagagcccgctagctgcgaggacctctgtggtgggggtgtgggagcggacggaggcggatctgatagatatgggagcctgcggccaggctggcctgctaggggacagggctggctcgaggaagaggacggggaggatgtgagaggcgtgttgaagagacgcgtggagacacggcagcacacagaagaggccataagacagcaagaggtagagcagctggatttccgcgacctattaggaaaaaaagtaagtacgaaaactctttccgaagacgatttgaaggagatcccggctgaacagatggacttccgggcaaaccttcagcgtcaagtaaagcctaagacagtgtctgaagaagagcgcaaagtgcactccccacagcaggttgacttccggagcgtactagccaagaagggaaccagcaagacacccgtccccgaaaaggttccacccccaaagcccgcaacacctgattttcgctcggtgttgggaggaaaaaagaaactgcccgcagagaatggtagttcttcagctgagacattgaacgcaaaagctgtcgaaagctccaagcctctgagcaatgcccaaccgagcgggcctctcaagccagtgggaaacgccaagcctgcagagactctcaaacccatgggcaatgccaaacccgctgagaccttgaagcctatgggcaatgctaagccagatgaaaacttgaaaagtgcatcaaaggaagaacttaagaaagacgtgaaaaacgatgttaattgcaaaaggggccacgcaggaacaacagacaacgagaagagaagtgaaagccaggggaccgccccagctttcaagcaaaagttacaggatgtgcacgttgctgagggaaaaaaactgcttttgcagtgtcaagtctcaagcgatccccctgccaccatcatttggaccctgaacggcaaaaccctcaaaaccaccaagtttatcatcctgagtcaagaaggcagcctctgttccgtttcaatcgagaaggcgctccctgaagataggggcttgtacaaatgcgtcgcaaagaatgacgctggtcaagcagagtgttcttgccaagtgacagtggatgatgcccctgcaagcgaaaataccaaggcaccggagatgaagtcccgccgtcctaagtcctccttgccacctgtgttgggtactgagtccgatgcaaccgttaaaaaaaaacccgctccgaaaactcctccaaaggcagccatgccacctcaaatcattcaatttcctgaggaccagaaagtcagagccggtgagtccgtcgaactctttggaaaggtgactggcacgcaacccatcacttgcacttggatgaagttcagaaaacagatacaggagtcagagcatatgaaggtggaaaatagtgagaatgggtcgaaacttacaatcttagctgccaggcaggagcactgtggttgttatacactgttagtggagaataagctagggagccgacaggcccaagtgaacctaactgttgtggacaaaccagaccccccagccggtaccccatgtgcgtccgatatccgctcaagttctctgactttaagttggtacgggagttcctacgacggaggttctgccgttcagagctactctatcgagatctgggacagtgctaacaagacctggaaagagctggcaacctgcaggagcacctcttttaacgtgcaggacctgctgcctgatcatgagtataaatttcgggtccgagcaatcaatgtgtatggaacctccgagccatcccaagagagcgaacttactactgtcggagaaaaacctgaagagccaaaagatgaggttgaagtgtccgacgacgatgaaaaggagcccgaagtcgattatcgcacagtcaccatcaacactgagcagaaagtttcagatttttatgacatcgaggaacgcctcgggtctggcaagtttgggcaagttttccgactggtcgaaaaaaaaacccggaaggtgtgggccggtaagttctttaaggcatactctgccaaggaaaaagaaaatattcgccaggaaatcagcataatgaactgcctgcaccatccaaagttggttcaatgcgttgacgcttttgaagaaaaggccaacatcgtcatggtgctggagattgtgtccggaggcgagctcttcgagcgcatcatcgacgaagattttgagttaaccgagagagagtgcattaaatacatgagacagatctctgagggagtggaatacatccacaagcagggcatagtccaccttgacctaaaacctgaaaatattatgtgcgtcaacaagacagggacaagaattaagctgattgacttcggtttggctcgacgcctcgagaacgccggttccctaaaagtcctgttcggcactccagagtttgtggcgcctgaggtcatcaattatgaacccatcggatacgccacggatatgtggagtattggtgtgatctgctatatccttgtttcaggcctgagcccgtttatgggagacaacgataacgaaaccctcgcgaacgtgacatctgccacttgggacttcgatgacgaagccttcgacgagatatctgacgatgccaaggacttcatttccaatctcttaaagaaggatatgaaaaatcgactggattgcactcagtgtctgcagcacccatggctgatgaaagataccaaaaatatggaagctaaaaaactgtccaaggaccgaatgaagaagtatatggccaggcggaagtggcagaagaccggcaacgcagtgcgagcaattggcaggcttagcagtatggccatgatcagcggcttgtccggcaggaaatcgagcacaggttctcccacatcccctctgaatgcagagaagctcgagagcgaagaggacgtctcacaggcattcctggaggcagtcgcggaggagaaacctcacgtaaagccctatttttccaagacgatccgggacctcgaagtggttgaaggaagcgccgcacggtttgactgcaagatcgaaggttatccagacccggaagtcgtgtggtttaaggacgaccagtctatcagagagtcacggcattttcagatcgattatgacgaagacggaaactgctccctaattattagtgatgtgtgcggggatgacgatgcaaagtacacatgtaaggccgtgaacagtcttggggaagccacatgcaccgccgagttgatcgtggagactatggaagaaggtgagggggaaggcgaggaggaggaggagta

SEQ ID NO: 29650 - DNA, 2145 bp, synthetic construct
  misc_feature 1..2145: note = Description of Artificial Sequence: Synthetic coding sequence
  source 1..2145: mol_type = other DNA
atgaagtctaggagacccaagtcaagcttaccgccagtcctgggtaccgagagtgacgcaaccgtgaagaagaagcccgcaccgaagaccccccctaaggcagcgatgcctcctcagataatccaatttccagaggatcagaaagtcagggccggagagtcagtggagctcttcggcaaagtcaccggaacacaacctattacttgcacctggatgaaatttaggaagcagattcaggagagtgaacacatgaaggttgagaacagcgagaacggctcgaaattgacaatcctggcagctagacaggagcactgcggatgttataccctcctggtggagaacaagctgggttctcgacaagcccaggtgaaccttactgtggtggataaacccgatccccctgccggaactccctgcgcaagcgacattaggtcatcaagcttgacactgtcctggtacggatcatcgtacgacggaggctctgccgtacagtcatatagcattgagatatgggattccgccaataaaacctggaaggaactggctacttgtagatcgaccagtttcaatgttcaggatcttttgccagaccacgaatacaagtttcgggtcagagccattaatgtttacggtacgagcgaaccttctcaggagagtgagctgacgaccgtcggggagaaacccgaggaacccaaagacgaggtcgaagtgagtgacgatgacgaaaaagagccggaggtggattatagaaccgtgactattaatactgaacaaaaagtgagcgacttttatgatattgaagaacgtctgggcagcggcaagtttgggcaggtgttcagacttgtcgaaaaaaagaccaggaaagtctgggcgggaaaattcttcaaggcctactcggctaaggagaaggagaatattagacaggaaattagtatcatgaattgcttacatcaccccaagctagtacagtgcgtcgatgctttcgaagagaaagctaatatcgttatggtactcgaaattgtgagcggtggagagctgttcgagagaatcatcgatgaagatttcgaacttactgagagggagtgcatcaagtacatgaggcagattagtgaaggtgtcgaatacatccacaagcaggggatcgtccacctggatctgaaacccgaaaacattatgtgtgtgaataagacggggacccgcatcaaactgattgatttcgggctggcgaggcggctagaaaacgctggatccctgaaggttttatttggcaccccagagttcgtggccccagaagtcatcaactacgagccaatcggatatgcaaccgacatgtggagtattggcgtcatatgctacatcttggtatctggattatctccttttatgggggacaatgacaatgagactcttgccaacgttacatctgctacttgggactttgatgatgaggcattcgatgaaatcagcgatgacgccaaagacttcattagtaacctgctgaagaaagatatgaagaatcggctggactgtacacagtgtctccaacatccatggctgatgaaagacacaaagaatatggaggccaagaaactgtctaaagaccgaatgaagaagtacatggccagacgcaaatggcaaaaaacagggaacgcggtgagagctatcggtcgactttcttccatggccatgataagcgggctgtcgggacgcaaaagcagcacaggatcccccacctccccactgaacgcagagaagctcgaaagcgaagaggatgtgagtcaggccttcctggaggccgttgctgaggaaaaaccccacgttaagccatactttagcaagactatcagggacctggaggtggtggagggctctgcggctaggttcgactgcaaaattgaagggtatccagatccggaagtcgtgtggttcaaggacgatcagagcatccgggagtcccgccattttcagatcgattatgatgaggacggcaactgctcactaatcatcagcgatgtgtgtggggatgacgatgccaagtatacgtgtaaagccgtgaacagccttggcgaggccacatgcacagccgaactgattgtcgagaccatggaggaaggtgagggcgagggcgaagaggaagaagagtag

SEQ ID NO: 29651 - DNA, 5591 bp, synthetic construct
  misc_feature 1..5591: note = Description of Artificial Sequence: Synthetic coding sequence
  source 1..5591: mol_type = other DNA
atgggagacgtcaagctggttgcaagtagtcacatctcgaaaacaagtctgagcgtcgacccttcccgcgttgactctatgcccctcactgaagctccagccttcattcttccacccagaaatctgtgtataaaagagggcgcaaccgcgaagttcgagggccgagtgaggggatatccagaaccgcaagtgacctggcataggaacgggcagccgatcaccagcggcggacgctttctgttggattgtggtattagaggtacttttagccttgtgatccacgcggtacatgaggaggataggggcaaatacacctgcgaagctacaaatggctcaggagccagacaggtgacagttgagctcactgtcgaaggttctttcgctaagcaactgggccagcccgtcgtttcaaagactttaggtgacaggttctctgcccctgcagtcgaaacccgccctagtatctggggggagtgccctcccaaattcgcaacaaagctgggcagagtggttgtgaaggaggggcagatggggaggttctcgtgcaaaatcactggcagaccccagccacaagtaacttggcttaaagggaatgtgcctctccagccatccgcaagagtctccgtgtcagaaaagaacgggatgcaggtgttagaaattcacggcgttaatcaggacgacgtgggcgtctacacatgtctcgtggtgaatgggagcgggaaagcatctatgtccgctgagctgtcaatccaaggtttagatagcgcgaatcgctcattcgtgagggagaccaaagctaccaattcggacgtgcgcaaagaggtcactaatgttataagcaaggagtctaagctcgactccctggaagcggctgctaagagcaaaaactgttccagcccccagcggggtggctctccaccttgggcggctaactctcaaccacagccccctcgggagtccaaattggagagctgtaaagacagtccccgtaccgccccacagactccagtattacaaaaaacgtcctccagtatcactctgcaggccgctagggtgcaacccgagcccagggctccagggctcggcgtgcttagtccatccggagaggagcgaaagaggcctgcaccgcctcgccctgccacattccctacacggcagccgggactgggctcgcaggatgtggtgtccaaggccgctaaccgcagaatccctatggagggccaacgcgactccgccttccccaagttcgaatctaaaccccagtctcaggaagtcaaagagaatcaaacagtgaaattccgttgcgaagtttcaggtataccgaagcccgaagtagcttggttccttgagggcaccccagtccgcaggcaggaaggctctatcgaggtctatgaagacgcaggcagccactacctctgtttgttgaaagcgaggacgagggattcaggcacctatagctgtacagcaagcaatgcccaaggtcagctaagctgttcttggaccttacaggtcgaacgtctcgccgtgatggaagtagctccttccttcagtagtgtcctcaaggactgtgccgtaatcgagggccaggatttcgtgctgcagtgctctgtgagaggtactccagtccccagaataacctggctgctcaacggccagccaatccaatacgcaagaagcacctgcgaggccggagtggctgaactgcacattcaagacgcccttcctgaggaccacgggacatatacctgtctggccgagaacgccctcggccaggtgagttgttctgcatgggtaacggtgcacgagaaaaagagctccaggaaatctgagtacctgctgcccgttgcaccctcaaagcccacggccccaatttttcttcaagggctgtcggatctgaaggtgatggacggatctcaggtgactatgacagttcaagtgagtggcaaccctccaccagaggtcatatggttgcataacgggaacgagatccaagagagcgaggatttccacttcgaacaacgagggactcagcactccctgtgcatccaggaggtattccctgaggacactggtacttacacctgcgaggcatggaatagtgcaggcgaggtgaggactcaggcagtcctgacggtgcaggagccacatgacggcactcagccctggttcatttccaaaccgaggtctgtcactgcgtcactggggcaaagtgtgctaatttcatgtgcaattgcgggagacccgttccctaccgtccactggcttcgtgatggcaaggctctgtgtaaggacacaggccactttgaagtcttgcagaacgaggatgtattcaccctcgtgctcaagaaggttcagccttggcatgccggtcagtacgaaattctgttgaaaaatagggtgggcgaatgcagctgtcaagtctccttgatgctgcagaattcgagcgcgagagccctaccacggggacgggagcctgcgtcttgtgaagacctttgtgggggaggggtgggggctgacggaggaggcagcgacaggtatggttcgttgaggcccggatggccagctcggggtcagggctggctggaggaggaagacggagaagacgttagaggcgtgctcaaacggagagtcgagacacgccagcatactgaggaggcaattcgccaacaggaagtggaacagctggacttcagagatctgctgggtaagaaagtgtctacaaagacactctctgaggacgatctgaaagaaatcccagctgagcagatggactttagagccaatctccaaagacaggtcaagcctaagactgtatccgaggaggagcggaaggttcatagtccgcaacaggttgatttcagaagtgtgttagctaaaaaaggaacctccaagaccccagtacctgaaaaagttccccctcctaagcctgccacccccgacttccggtcagtgttgggcggaaagaagaagttaccagccgaaaatggatcgtcctcagcggagaccttgaacgccaaagcagtggagtcctcaaagcccctaagcaatgcacagcccagcggacccctgaagcccgtaggtaacgccaagcctgccgagactctgaaacccatgggcaatgctaaaccagctgaaacactgaaaccaatgggaaacgccaagcccgacgaaaacctcaaatccgcctccaaagaagaactgaaaaaagatgtgaagaacgatgtcaattgcaagcgcggtcacgccggaactactgataatgagaagaggagcgagtcccaggggactgccccagccttcaagcagaaactgcaggacgttcatgtggcagagggaaagaagctgctcctgcagtgtcaggttagctcagatcctcccgcaactatcatctggactctgaatgggaagacattgaaaaccactaagttcataatcctatctcaggagggctccctgtgttccgtctccatcgagaaagctctccccgaagatagggggctgtacaagtgtgtggcaaagaacgacgcaggacaggctgagtgctcttgccaggtgacggtagatgatgctcctgcttcggaaaacaccaaagccccagaaatgaagagccggagacctaagagcagcctccctcctgtgcttggtaccgaatccgacgcaacagtgaaaaagaagccagcaccaaaaactccccctaaggcagcgatgcctccacagatcatccagtttccagaagatcagaaagtacgggctggagagagcgtagagctgtttggaaaggtcacaggaacccagcctatcacgtgtacctggatgaagttcaggaagcagatacaggagagcgagcatatgaaggtggagaatagtgagaacgggagcaagcttactatcttagccgcaagacaggagcactgtggatgctatactctgctggtggagaacaagctggggtcacgtcaggcgcaagtcaatctgaccgtcgtggataagcccgatcctcccgcaggcacaccctgcgcatccgacatcaggagctctagcctgacactgagctggtatgggtcttcatacgacggcggaagcgctgtccagtcgtatagtatagaaatctgggatagtgcaaacaagacgtggaaggaactggcaacctgcagatccacctctttcaatgtgcaggacctgctacccgatcatgagtataaatttagggttagagctattaacgtttacggcacaagcgagccgagccaggaatctgagctaacaaccgtgggagagaaacccgaggagcctaaggacgaggtcgaagtctcagatgatgatgaaaaggaaccagaggtcgattaccgtactgtcacaattaacacagaacagaaggtctccgatttctatgacatagaggagcgcctggggtctggcaagtttggccaagtttttaggctggtcgaaaagaaaaccagaaaagtatgggccggaaaattctttaaggcctattctgccaaggagaaggagaacatacgtcaggagatatcgataatgaattgtctgcatcaccccaagctggtacaatgcgtggacgcttttgaggaaaaagccaatatcgttatggtgttagaaatcgtgtcagggggagagttgttcgagcgcatcatagacgaggatttcgagttaaccgagagggagtgcatcaaatatatgcgccagatttccgaaggggtggagtacattcataagcagggaatcgtgcacttagatctgaagcccgaaaacatcatgtgtgttaataagactggaaccaggatcaaacttattgacttcggcttggcgagaagattggaaaatgctggcagcctgaaggtactttttgggacccccgaatttgttgcccctgaggtgatcaattacgaaccaatcggctacgccacagacatgtggtcaataggggtgatatgttatattctgaatcggctagattgtacccagtgtctccagcacccttggctcatgaaggacacaaaaaatatggaggccaaaaaactgtcgaaagaccgaatgaagaagtacatggccaggagaaagtggcagaagaccggaaatgcagtccgagctatagggaggttatccagcatggcaatgataagtggactaagcggcagaaagtcaagcaccggaagccccacttcccctcttaatgccgagaagctggaatctgaagaggatgtttctcaggccttcctagaggctgtggctgaagagaaacctcacgttaaaccctacttttcaaagacaatcagagacctcgaagtggtcgaaggcagcgctgcgagatttgattgtaaaatcgaagggtacccggaccctgaggtggtctggtttaaggacgatcagtcaattcgagaatcccgccacttccagatcgactatgatgaagatggcaattgcagcctaatcatttctgacgtgtgtggcgatgacgacgccaagtacacatgcaaagccgtgaattctctgggcgaagctacctgcacggctgaattgatcgtggagacaatggaagagggcgaaggagaaggagaagaagaggaggaata

SEQ ID NO: 29652 - DNA, 5744 bp, synthetic construct
  misc_feature 1..5744: note = Description of Artificial Sequence: Synthetic coding sequence
  source 1..5744: mol_type = other DNA
atgggggacgtcaagctggtggcaagctcccatatctccaaaacctcgttgagcgtggatcctagccgggtggactcaatgccccttaccgaggcgcctgcctttatactaccaccaaggaatctctgcatcaaggagggtgctacggctaaattcgaaggtcgggtcagaggttatccggagccgcaggtaacctggcaccgaaacggacaaccaataacaagtggaggtaggtttctcttggattgtggcatacggggaacattcagtctggtaattcacgctgtccacgaggaggaccgaggaaagtacacctgcgaggctacaaacggcagtggtgccaggcaggttaccgttgagctgactgtggaaggaagctttgctaagcagctgggccaacctgttgtgtccaagacactgggcgatcggttttctgcgcctgcggttgagacccggccttccatctggggcgagtgccctcctaaattcgcaaccaagcttggacgggtggtggtcaaagaagggcaaatggggagattttcatgtaagatcaccggcaggccacagcctcaggtgacatggttaaagggaaatgttcccctccagccgtccgccagagtgtcagtttcagaaaagaacggcatgcaggtactcgagattcacggggtaaatcaagacgacgtgggggtgtacacatgtctggtggtgaacggaagtggaaaggcctctatgagcgccgaactgtccatccagggactagactccgctaatcgatctttcgtaagggagaccaaagcaaccaatagcgacgttcgtaaggaggtaacaaacgtcattagcaaggagagcaaacttgacagcctcgaggctgccgctaaatctaaaaattgctcatcaccccagcgtgggggaagccccccttgggcggcaaactcgcagcctcagccccctcgcgagtccaaactagaatcctgtaaggacagtccacgcaccgctcctcagacaccagttctgcaaaagacttcatccagcatcacgctacaggccgctagggtgcaaccagagcccagagcgccaggattgggggttctatccccaagcggtgaggaacgtaaaaggcccgctcctcccagacccgcaacttttcccacgaggcagcccggtcttggaagccaagacgtagtctctaaggctgccaatcggagaatccccatggaggggcaacgagatagtgcattccctaagttcgagtcaaaaccccagtctcaggaggtcaaagaaaaccagactgttaagttccggtgcgaggtgtcaggtattcccaagcctgaagtggcttggttccttgaagggacccccgttcggaggcaggaaggatcaatcgaggtatatgaagacgctgggagtcactacttgtgtctcctgaaggcccgaacaagggattctgggacctatagctgtaccgctagtaacgcgcaaggccaactctcatgtagctggacattgcaggtagagcgtctggcagtcatggaggtggcgccaagtttttctagtgtcctcaaggattgcgcagtcatcgaagggcaggatttcgtcctccagtgtagtgtaaggggcacgccagtacctagaattacttggctgctcaatggacagccaatccagtacgcacggtctacttgtgaggctggggtggcggagcttcacattcaggatgctctgcccgaagatcacggcacctacacctgcttggccgagaacgccctgggtcaggtgtcttgctccgcctgggtgactgtccacgagaagaagtcaagtcgtaaatcagagtacttgttacccgtcgctcccagtaagcctacagcccctattttcttgcagggattgtctgatcttaaggtcatggacgggtcccaggtaaccatgactgtgcaggtctccggtaacccccctccagaggttatctggttgcataatgggaacgagattcaggagagcgaggatttccactttgagcagcgcggtacccagcattccctgtgtattcaggaggtgttccctgaagacaccggcacttatacgtgcgaagcatggaatagcgcgggtgaggtacggacccaggcagttctcacagtccaggagcctcacgacggcacccaaccctggtttatctccaagccacggagtgtgacagcctcgctgggacagagcgttctgattagctgcgcaatcgccggagaccccttcccaactgttcactggttgcgcgatggaaaagcactgtgcaaagatacgggtcatttcgaagtcctgcaaaacgaagacgtgttcacgctggtactcaaaaaagttcagccttggcacgctgggcagtacgagattctgctgaagaaccgagtcggcgaatgctcttgtcaggtgtctttgatgcttcaaaactcatccgcacgtgcactccctcgcggacgtgagcctgccagttgcgaggacttgtgtgggggtggtgtgggggcagatggcggtgggtccgataggtatggttcactcaggcccggttggcccgctcgaggacagggatggttggaagaggaggacggggaggacgtacgaggcgtgctgaagcggagggtagaaaccaggcagcacactgaggaagccatccggcaacaggaagtcgagcagcttgactttcgcgacctcttgggcaagaaggtgagcactaagacactttctgaggatgacctgaaggagataccggcagaacagatggatttcagggcgaatcttcaaaggcaagtcaagcctaaaacggtgtccgaggaagaacgcaaggtgcattcacctcagcaggtggattttcggagcgtcttggcaaagaaagggactagtaagacacctgtacccgaaaaagtgccacctcctaagcccgcaactccggatttccggagtgtcctcgggggtaaaaaaaagctgcctgcggagaacgggtcgagtagtgccgagaccttaaatgcaaaggccgtggaaagctctaaaccactcagcaatgcgcagcccagtgggccactgaagcctgttggaaatgcgaagccagctgaaaccctcaagccgatggggaatgccaagcccgctgaaactctaaagcctatggggaacgcgaagcctgacgaaaatctgaagagcgcctctaaggaagaattgaagaaggacgttaagaatgacgtgaattgtaagcggggacatgccggtacgacggacaatgaaaaacggagcgagtcccagggaactgccccagccttcaagcagaagctgcaggatgtccatgtagccgagggcaagaagctccttttgcagtgccaagtatcctccgacccgcctgccaccattatctggacgctcaatggaaaaactttgaaaacaaccaagtttatcatcttgagccaggagggctcgctgtgcagtgtgtccatcgaaaaggcccttccagaagaccggggtttatataaatgcgtggcaaaaaacgacgccggtcaggctgaatgttcgtgccaagtcacagtcgacgatgccccagcatccgagaacactaaggcccctgagatgaagagtaggcgccctaaaagcagcctgcccccagtgttagggactgagagtgacgccacagtgaagaagaagcctgcacccaagactcctcctaaggcagccatgcctcctcagatcatacagtttccggaggaccagaaagttcgcgctggggagtctgtcgagctgttcggtaaggtaaccggcacccagcctatcacttgcacctggatgaagtttaggaaacagatacaggaatcggagcatatgaaagttgagaattcagaaaacggctctaagctaaccatcctggcagccagacaagagcactgcggctgttacactctcctggtggaaaataaacttggctcgcgacaggcccaggtgaacctaacagttgtggataagcctgacccccctgcaggaactccatgcgcgagcgatatccgaagcagctccctcactctgagttggtacggttcttcctatgacgggggatcagctgtccagagttattccatcgagatctgggactcagcaaacaagacttggaaagagctcgccacttgccggagtacttcttttaatgtgcaggacctgcttccagaccacgagtacaagttcagagttagagccatcaacgtgtatggaacaagcgaaccctcacaagagagcgagctcacaaccgtgggcgaaaagcccgaggagccaaaagacgaagtcgaggtgtccgatgacgatgaaaaagagccggaggtagattatcggacggtcacgattaatacagaacagaaagtgtcagacttttatgacatagaagaacgattaggctcagggaagttcggccaggtctttaggctagttgaaaaaaagacccggaaggtctgggccggtaagtttttcaaggcgtatagcgcaaaggaaaaagagaacatcaggcaggagataagtattatgaattgcctccaccaccccaagctcgtgcagtgcgtggatgcattcgaggaaaaggctaacatcgtgatggtccttgagattgtatccggcggtgagctctttgagagaatcatagatgaagatttcgaactaacggaaagggagtgtatcaagtatatgagacagatcagcgaaggagtggaatacatccacaagcaggggatcgtgcatctggacctgaaaccggagaatataatgtgtgtgaacaagaccgggacaaggatcaaactgatcgacttcggcctggccaggcggctggaaaacgccggaagtctgaaggtgttattcggaactcccgaatttgttgcacctgaagtgattaattatgagcctatcgggtacgctacagacatgtggagcatcggtgttatctgctatatccttgtttcgggacttagtccattcatgggggataatgataatgagactctcgctaacgttacgtcagcgacctgggatttcgatgacgaagcgtttgacgaaatcagtgatgatgctaaagacttcataagtaatctgctgaagaaagatatgaagaatcgcctggattgcacgcagtgtttacaacacccgtggctcatgaaggatactaagaatatggaagcaaagaagctgtcgaaagatcgcatgaaaaaatatatggccaggagaaagtggcagaaaactggtaatgccgtgagagctatcggacggttgagtagcatggctatgattagtggactcagcggacgcaaaagctcgaccggaagtcccacttcacctttaaacgcggagaaactggagtcggaagaggacgtgtcccaagctttcctggaggcagttgctgaggaaaagccacatgttaagccctacttctcgaagactatccgagatctggaggtggttgagggctccgcggcaagatttgactgcaagatagagggataccccgacccggaggtggtttggttcaaggatgatcagtccattcgggagtctcgacactttcaaatcgattacgatgaggacggaaactgttccttgatcataagtgacgtgtgtggggacgacgacgcgaaatacacttgtaaggcggtgaattcgcttggtgaggccacctgtactgctgagctcattgtggaaacaatggaggagggcgagggagaaggtgaggaagaagaggagta

SEQ ID NO: 29653 - DNA, 231 bp, synthetic construct
  misc_feature 1..231: note = Description of Artificial Sequence: Synthetic coding sequence
  source 1..231: mol_type = other DNA
atgggtgatgttaaactggtggcgtcttcccatatctccaaaacatcactgtcggttgacccatcacgggtggacagcatgcctctgactgaggccccagctttcatcctgccccctcggaatctgtgcatcaaagaaggtgcaaccgctaagttcgagggacgcgtgagggggtaccccgaaccccaggttacatggcaccgcaatggccagccaataacatcaggatag

SEQ ID NO: 29654 - DNA, 5591 bp, synthetic construct
  misc_feature 1..5591: note = Description of Artificial Sequence: Synthetic coding sequence
  source 1..5591: mol_type = other DNA
atgggagacgtgaaattggttgcgtccagtcatatttcgaaaacgtcactgagcgtagacccatcccgcgtggactccatgcctctgactgaagcgccagccttcatactgccccctagaaacttgtgcattaaagaaggcgctaccgccaaatttgaaggcagagtaagaggttacccagagccgcaggttacatggcacaggaacggccaacctatcacaagtggcggacgatttttactggactgcggcattcgtggcacattctcattggtcattcacgctgtgcatgaagaggacagaggaaagtacacatgtgaggccaccaacggtagtggcgctaggcaggtgactgtcgagctgaccgtcgagggcagcttcgctaagcagttgggccagcccgtggtctctaaaacattgggcgatcgcttttcggcccctgctgtggagactcgccctagcatttggggcgagtgtcctccaaaattcgccacaaaactcggaagagtcgtggtcaaggagggccagatgggccgattttcctgtaagatcacagggcgtccccagccacaagtcacttggctgaagggcaacgtgccactccaaccctctgcccgagtgtctgtatctgaaaaaaatgggatgcaggtgctcgaaatccacggcgtgaaccaggacgacgtgggggtgtacacgtgtctcgtggtgaacggctctgggaaggccagtatgtcagcagagctatccatccagggtcttgattcagcaaaccgttcctttgtcagggaaacaaaggcaactaattccgacgtccggaaagaggtcacaaacgtgatcagtaaagagtccaaacttgacagcctggaagccgctgccaagtctaaaaactgttcttcaccacagagagggggttcacccccttgggctgcaaattctcagccccagccacctagagaatccaaattagaatcatgcaaggattccccgagaaccgcaccacagacgccagtgttgcaaaaaacctcttcttcaatcactctgcaggcagcaagagtccagccagaaccgagggctcccggactcggcgtcctgtccccctcaggagaggaacgcaaacggcctgcacccccacgccctgccacatttcctacaaggcagccgggactggggagccaagacgtcgtgtcgaaagctgccaaccggagaatccccatggagggccaaagggactctgcatttcccaagttcgagtcgaaacctcagagccaagaggtgaaggaaaaccagactgtcaaatttaggtgcgaggttagcggtattcccaagcctgaggttgcctggttcttagagggcacaccggtcaggcgacaggaaggctcgatcgaagtgtacgaggatgccggtagtcattacctttgcctcttaaaagcacgcacccgcgactccggcacatattcctgcacggcctcaaacgcccagggccagctctcatgttcttggactcttcaggtagagcgtttggcagtaatggaagtggctcctagcttttcctcagtcctcaaggattgcgccgtgatcgagggccaggatttcgtgttgcaatgttctgtgcgcggaacaccggtccctaggatcacctggcttttgaacggccaaccaatccagtacgcacgctccacctgcgaggccggagtggccgagctgcatatccaggacgctctgccagaagaccatgggacttatacatgtttagccgagaatgctcttggacaagttagctgtagcgcgtgggtgactgtacatgagaagaagagtagccggaagtccgagtacttgcttcccgttgccccatcaaaacctaccgcaccgattttcctgcaaggcttgagcgaccttaaggtaatggatggttcccaggttaccatgacggtacaggtatcaggcaacccccctcctgaagtcatctggctgcataacgggaacgagatacaggaatcagaggacttccactttgaacagcggggtacccaacactctctctgtatccaagaggtctttcccgaagataccggcacctacacctgtgaggcctggaattcggccggtgaggttcgcacgcaggccgtcctgactgtccaggaaccccacgatggaacccaaccctggttcatttccaaacctaggagcgtcacagccagccttggccagtctgtgctgatctcctgcgccattgctggtgatccatttccaaccgtgcactggctccgtgatggaaaagctctttgcaaagataccggccacttcgaggtgctgcagaacgaagatgtgttcaccctggtcctcaagaaggttcagccctggcatgccggtcagtatgaaatactccttaagaacagggtcggtgaatgcagttgccaggtctccttgatgctccagaattcatcagctcgggctctgccaagggggcgagagccagccagttgcgaagatttatgtgggggtggggtgggtgcagatgggggaggatccgataggtatggcagcctcaggcccggatggcccgctcgcggtcagggttggttagaagaggaggatggcgaggatgttcgcggtgtattaaagaggcgtgttgagacgcgccagcacacagaagaggctatccgtcagcaagaagtggaacagctggacttccgagacctcctgggaaagaaagtgtctacaaaaactttgtccgaagacgatttgaaagagatacccgcagagcagatggactttcgcgcaaatctccagcggcaggtcaagccaaaaaccgtctctgaagaagaacgtaaggtgcatagtcctcagcaggtcgacttccgctctgtactcgctaagaaaggaacatccaagacacctgtcccagaaaaggtgcctcctcccaagccggcaacccccgatttcagatctgtcctggggggaaaaaaaaagctgcccgctgagaatggttctagctccgcagagactttgaatgctaaagcagtcgagtcatccaagccgctgtcaaacgcacaaccaagcggcccacttaagcctgtggggaacgccaaacctgccgagacacttaagcccatgggcaacgcaaagcccgcagagaccctgaagcctatgggaaacgcaaagccagatgaaaacctgaagtctgcgtcaaaggaggagcttaagaaggatgtgaagaacgatgttaattgcaagagagggcatgccggtacaacggataacgaaaagaggagtgaaagtcagggtacggcgcctgcgtttaagcagaagctccaggacgtccatgtggctgaggggaaaaagcttctccttcagtgccaagtgtcatcagatcctccagccacaatcatatggactcttaacgggaagacactgaaaacaactaagttcatcatcctgtcccaagagggcagcctctgctcagtttccattgagaaggctctgcccgaagaccgcggattatacaaatgcgtcgctaaaaacgatgccggacaggctgaatgcagttgccaagttacagttgacgacgctccagccagtgaaaatactaaggcacccgagatgaaaagccgcaggcccaagtcctctctcccccctgttctgggtaccgagtcggatgctactgtgaagaagaagcctgctcccaaaacaccaccgaaggcagctatgcctcctcaaataattcagtttcccgaagaccagaaggttagggccggagagtccgtggagctattcggcaaggttacggggacgcaacccatcacatgcacctggatgaaatttcgcaagcagatccaggagtcagaacacatgaaggtggagaatagcgagaatgggtctaagttgacaatcctcgcagcaaggcaggaacactgtggttgttacactctgcttgttgaaaataagctgggctccaggcaagctcaggtcaatctaaccgtggttgataagcccgatcctccagctgggacaccgtgcgcctctgatatccggtcatcgagcctcaccctgtcatggtacggtagttcttacgatggcggatccgctgttcagtcatattcaatcgagatctgggattccgctaataaaacctggaaagagcttgccacatgcaggtcgacgagctttaacgttcaggacctgctgccagatcacgaatataagttcagggtccgggctatcaacgtctacggtacctcggaaccgtctcaggagagtgaactgacaacagtaggcgagaagcccgaagagccaaaggacgaagtcgaggtttctgacgatgacgagaaagagccggaggtggattaccgtaccgttacaataaacactgagcaaaaggtgagcgacttttatgacattgaagaaaggctcggctcaggaaaattcgggcaggtgttcaggctggtggaaaagaagactagaaaggtgtgggccggaaagttttttaaggcttacagcgcaaaagagaaagaaaatatccgacaggaaataagcatcatgaactgcctgcaccaccccaagcttgtccagtgcgtggacgccttcgaagaaaaagctaacattgttatggtacttgagatagtctccggaggagaactgtttgaaagaataatagatgaggactttgaactcacagagagagagtgcataaaatatatgcgccagatttccgagggggttgaatatatccacaaacagggaattgtacacctggatcttaaacctgagaatattatgtgtgtgaacaagaccggcactagaattaagctcatcgacttcggtctcgccagacgtctcgaaaatgcagggtctctcaaggtgttatttggcacgcccgaatttgtcgctccagaagtgataaactacgaaccaattggctacgcaaccgacatgtggagcataggagtgatttgttatatcctcaatcggctcgattgtacacagtgcctgcagcacccttggctgatgaaggacacaaaaaacatggaggcaaaaaagctcagcaaggaccgaatgaagaaatacatggccaggcggaagtggcagaagacaggcaacgcggttagagcaattggcagactctcttctatggccatgatctccggtctgagcggacgcaagtcttcaacaggctcgcccacctcaccacttaatgcggaaaagctcgagtcagaggaggacgtgagccaggcctttttggaggccgtggccgaggaaaagcctcacgtaaagccatacttctcaaagactatcagagacctagaggttgtggaagggtcagccgcacgctttgattgcaaaattgaaggttacccggatccggaggtggtgtggtttaaagatgatcaaagcatcagggaatctcggcacttccagatcgattacgacgaagacggtaactgtagtctgatcatcagcgacgtgtgcggagatgatgatgccaagtacacttgtaaagccgtgaactctctgggggaagcgacctgtacggccgaattgatcgtagagacaatggaagagggtgagggggagggagaagaagaggaggagta

SEQ ID NO: 29655 - DNA, 465 bp, synthetic construct
  misc_feature 1..465: note = Description of Artificial Sequence: Synthetic coding sequence
  source 1..465: mol_type = other DNA
atggcaatgataagcgggctttcaggacggaagagcagcacaggctctccaacctcccccctgaacgccgaaaagttagagtcagaagaagatgtctcgcaggccttcttggaggcagtggccgaggagaaaccgcacgtgaagccatacttcagcaagactatcagggacctcgaggtggtggagggcagcgccgcacggtttgattgcaaaatcgaaggttacccagatcctgaggtcgtgtggttcaaggacgatcaatctattcgagagtcgcgtcacttccagattgactatgatgaggacggcaattgcagcctgatcatcagcgatgtctgtggggacgacgatgccaagtacacatgcaaggcagtgaactccttgggggaggccacctgtacggccgagcttattgttgagacaatggaagagggagagggagaaggggaagaggaagaagaatag

SEQ ID NO: 29656 - DNA, 5744 bp, synthetic construct
  misc_feature 1..5744: note = Description of Artificial Sequence: Synthetic coding sequence
  source 1..5744: mol_type = other DNA
atgggcgacgttaaactcgtggcaagctcgcacatttcgaagacgtcattgtcagtagatcctagccgggtagacagtatgcctctcactgaagccccagcattcatactccccccacgcaacctctgcatcaaggagggcgctactgctaagttcgaaggtagggtgaggggataccctgaaccccaggtgacttggcatagaaatggacagcctattacttcgggtgggcgtttcttactggattgtggcatacggggaacctttagcttagtaattcacgccgtccatgaggaagacagaggcaagtatacttgcgaggccacaaacggaagtggggctcgccaggttaccgtggagcttacagtggagggctcatttgccaagcagctcgggcagccagtcgtgagcaaaacgcttggggataggttcagtgctccagcagtggaaacaagaccttcgatctggggtgagtgcccccctaagtttgctaccaaattgggtagggtggtcgtgaaggaaggtcaaatgggcagattttcctgcaaaataaccgggagacctcaacctcaggtcacatggcttaaggggaatgttcctctgcagcccagtgcacgcgtttccgtatctgagaagaatggcatgcaggtgctcgaaatacacggggttaaccaagacgacgtgggtgtctacacatgcctggtggtcaacggcagcggaaaggcctctatgtccgcagagctgagtattcagggactggactccgcgaaccgttcgtttgtgcgggaaacgaaggcgaccaatagcgatgtcagaaaagaagtaaccaacgtcatatccaaggagagcaagctggattcactggaggctgcagccaagagtaagaactgttcaagcccacagagaggcggttctccaccttgggccgcaaatagccaaccgcagccacccagagaaagtaagctggaatcttgcaaagattctcctaggaccgctccgcagacgccagtactccaaaaaacatcttcatccatcaccttgcaagccgctcgggtacagcctgaaccacgggcacccggactgggagttttatccccgagcggtgaggagcgtaagcgcccagccccacctcgccctgcaacgtttcccacacgacagccaggtctgggctcccaggacgtggtgagtaaggcagccaataggaggatcccaatggagggtcaacgtgacagtgccttccctaagttcgagagcaaaccccagagccaggaagtgaaagaaaatcagaccgtcaagttccgatgtgaagtctcagggattcctaagcccgaagtcgcttggttcttggagggtacccctgtgcggagacaggagggatctatagaagtttatgaagacgccggttcccactacctctgtctcctaaaggctagaacaagggactccggcacatacagttgtacagcgagtaatgctcagggccaactttcttgtagctggacgctgcaggtcgaaaggttggcggtaatggaagtcgccccttcattctcaagcgttttgaaggactgtgcagttatcgagggccaggattttgtcttacagtgctccgtgcgcggtacaccagtgcccagaattacatggttactgaatgggcagcctatccaatatgctcggagcacttgtgaggccggtgtggccgaactgcacatacaggatgcactgccagaagaccacggtacctacacttgtctggccgaaaacgcactggggcaagtgtcatgttcagcttgggtcaccgtgcacgaaaaaaaatcctctcgcaagagcgagtaccttctccccgtcgcaccctccaaacccaccgccccaatttttctgcagggcctgtcagatctaaaagttatggacggctcccaggttacaatgactgtgcaggtgtcaggcaacccacccccagaagtcatatggctccataatggcaatgaaattcaagagtctgaggatttccatttcgagcagcggggtactcagcacagcctatgcattcaggaagtgttcccggaggacaccggtacctatacttgcgaagcgtggaactcggcgggagaggtccggacgcaggcggtcctgacagtgcaggagcctcacgacggtactcagccttggttcatctctaaacctcgtagcgttaccgcatcacttgggcaaagtgttctcattagctgcgcaatcgctggcgaccccttccccaccgtgcactggctacgtgacgggaaggccctttgtaaggacacaggtcatttcgaagttcttcagaatgaagatgtgttcactctcgttctcaaaaaggtccagccctggcacgcaggacaatatgaaattctactgaagaatcgcgtgggagaatgcagctgccaagtctctctgatgctacagaactctagtgctagagcactgccgcgaggacgcgaacctgcctcctgtgaggacctctgcggagggggtgtaggggcagacggaggtggaagtgaccggtatggaagtctgagacccggatggcctgcccgagggcagggttggctagaggaggaagatggagaggacgtacggggtgtactaaaaagaagagtggagacaagacagcacaccgaagaagccattcgtcagcaagaggtcgagcagctcgactttagagatctgctgggtaagaaggtttccacgaaaacgctgagtgaagacgatctgaaggagatccccgctgagcagatggactttcgcgcaaatctccaacgacaagtgaaacctaaaacagtatctgaggaggagcgcaaggtgcacagccctcagcaggtggactttcggtccgtgctcgccaagaaagggaccagcaaaactcctgtgccggagaaagtgccacctccaaagcctgccacaccagatttcaggtccgtgttagggggaaagaaaaagttgcctgctgaaaatggaagttcaagcgctgagaccctaaatgcgaaggctgtggaaagctctaagccgttgtctaatgctcagcccagtggcccacttaagcccgttggaaacgcgaagcccgctgaaaccctgaagcctatgggaaatgctaaaccagctgagacccttaaacctatgggtaatgcaaaaccagatgaaaatctcaagtcagcttccaaagaagaactaaagaaggatgtaaagaatgacgtgaattgcaagagaggtcatgcagggacaacagataatgagaagagaagcgagtcccaagggacagccccagcctttaagcagaaactccaagatgtgcacgtggcggagggcaaaaaactcttgctgcaatgtcaggtgtcaagtgatccccctgcaaccatcatctggaccctgaacgggaagaccttgaagacaacgaaatttattattctgtctcaggaaggatccctgtgcagcgtatccattgagaaagcattgccagaagacaggggtttatataaatgcgtggccaagaatgatgcgggacaggcggaatgcagctgccaggtcactgtagacgatgcacccgcaagcgagaacacgaaagcgcctgagatgaagagcagaagacctaagtcctccttgccccctgtactgggcacagagagcgatgcgacggtgaagaagaagcctgccccaaaaactcctcctaaggctgctatgcctccacagattattcagttccccgaagaccagaaggttagagccggagaaagtgtggagttgttcggaaaagtcacaggcacccagcccatcacctgtacatggatgaagtttcgaaagcagatccaggagtccgaacacatgaaagtggagaattctgagaacgggtccaagctgactattctagccgctcgccaggaacattgtggctgctatacactcttggttgagaataagcttgggtcacgtcaagcccaggtcaacttgaccgttgtcgacaaaccggatccccctgcaggaactccgtgtgctagcgacattagatcgtcgtcattgacactgtcctggtacgggagctcctacgatgggggttcagcagtacagtcttatagcatcgaaatctgggactctgctaacaaaacttggaaggaactggccacctgccgcagtacatccttcaatgttcaagatctgcttcctgaccacgaatacaaattcagggtgcgagctatcaatgtgtatggcacaagcgagccttctcaagagagtgagctgaccactgtaggagaaaaaccagaggagccgaaagacgaggtagaggtgtccgatgatgacgagaaagaaccagaggtggattatcgcacagtgaccattaataccgagcagaaagtgtcagatttttatgacattgaagaaaggctaggatccgggaagttcggccaggtgttccgccttgtggaaaagaagactcggaaggtttgggcagggaagttcttcaaggcctattccgcgaaagagaaagaaaacatccgccaggagatcagcatcatgaactgcctccatcaccctaagctggtgcagtgtgtggacgcctttgaagagaaagccaacattgtgatggtgctcgaaattgtctccggcggagagctgtttgaacgcataatcgacgaagactttgaattgacagagcgcgaatgcatcaaatatatgagacagattagcgagggggtcgagtatatccataaacagggcatagtgcacttggacttgaaaccagagaatatcatgtgcgtgaataagacaggcacaagaattaagctgattgatttcggcctggccaggagactggagaatgccggatcgctaaaagtgctttttggcacacccgaatttgttgcacctgaggtaatcaactatgagccaatagggtatgctaccgatatgtggtccattggtgtcatttgttacattcttgtgtctggactttctccttttatgggagataatgataatgaaaccctcgcaaatgttacaagcgcaacctgggattttgacgacgaggcattcgacgaaatcagtgacgacgccaaagacttcatctctaacctactcaagaaagatatgaagaatcgcctcgactgtactcaatgcctgcagcatccctggctaatgaaagacaccaagaatatggaagccaagaaactctctaaggaccgaatgaagaagtatatggcaaggagaaagtggcagaagactggcaatgccgtgagagctataggacgcctgtcatccatggctatgattagtggcttgtcaggacgaaagtctagtacaggctcaccaacgagcccattgaacgccgaaaagctggagagcgaagaagatgtcagtcaggcctttctggaggccgttgcggaagagaagcctcacgttaaaccgtacttcagcaaaactatccgcgatctggaggtggtggagggaagtgcagcacgctttgactgtaaaattgaggggtatcccgaccccgaggtggtgtggttcaaagacgatcagtctatcagggaatcacgccacttccagatcgattatgatgaggatggtaattgttctctaattatctcagatgtgtgcggggatgatgatgcaaagtatacctgtaaggccgtgaactctctgggggaagcaacatgcactgcggaactgatcgttgaaaccatggaggaaggagaaggagaaggcgaagaggaggaggaata

SEQ ID NO: 29657 - DNA, 5930 bp, synthetic construct
  misc_feature 1..5930: note = Description of Artificial Sequence: Synthetic coding sequence
  source 1..5930: mol_type = other DNA
atggcccagcgaacaggactggaggacccagaaagatatctcttcgtggatagggcagtgatttataatcccgcaacacaggccgactggaccgccaagaagctggtgtggatcccctctgagcgccatgggttcgaggccgcatcaattaaggaggagcgcggtgacgaggtgatggtggagctggcggagaatggaaagaaggctatggtcaataaggacgatatccagaaaatgaaccctccgaaattttccaaagtagaagacatggccgagctgacatgtctcaatgaggcatcggtgctccacaatctgaaagaccgatattatagcggattgatttacacttattcaggccttttctgcgtagtaatcaacccatacaaaaaccttcccatctattccgagaacatcattgaaatgtatcgcggtaagaaacgacatgaaatgccgccacacatatatgcaatatctgagtccgcttaccgttgtatgttgcaagatagggaagatcagtcaattctctgcactggcgagtctggagccggaaagacggagaacacgaagaaggtaatccaatatttggcacacgtggccagcagccacaaaggcagaaaagatcacaacatcccgggagagctggaaagacagctgctccaggctaaccccattctggagtcctttgggaacgctaaaaccgtgaagaacgataattcatcacggttcggcaagtttatccggatcaactttgacgtgaccggatatatcgttggcgctaatattgaaacctaccttctggaaaagtctagggccgttcgccaggctaaggacgaaaggacattccacatcttttaccaactgctcagtggggcaggtgaacacctgaagtccgacttgttgctagaggggtttaataactaccgatttctatccaatggctacattcccattcccggacagcaggataaggacaatttccaggagacaatggaagccatgcatatcatgggcttctctcacgaagaaattttgtcaatgcttaaggtggtttcatctgtcctccaattcggaaatatctcatttaaaaaagaacgcaatacagaccaggctagcatgccagagaatacagtagcacagaagctgtgtcatttgcttggcatgaacgttatggagttcactcgcgcaatacttaccccacgcattaaagttgggagagattacgtgcaaaaggcccagaccaaggagcaagcagatttcgccgtcgaggcactggcgaaagccacatacgaaaggttgtttcgatggctggtgcaccgaataaataaagccctggacaggaccaaacgccagggggcttcttttataggcattttggatatagctggttttgagattttcgaattgaatagtttcgagcagttgtgtataaactacacaaacgagaagttacagcagctctttaaccatacaatgtttatacttgagcaggaggagtatcaacgtgagggcattgagtggaactttatcgattttggcctggatctccagccctgtattgatctgattgagaggcccgctaatccccctggcgtcctcgccctgttggatgaagaatgttggttccctaaagcaaccgacaagacatttgtggaaaaactcgttcaggagcaaggatctcacagtaagtttcagaaacccaggcagctcaaggacaaggccgacttctgtatcattcactatgcaggtaaggtggactacaaggctgacgagtggctgatgaagaatatggacccgctgaacgacaacgtggccaccttgctacaccaatcctccgaccggttcgttgcagaactctggaaagacgttgaccgcattgtggggctcgatcaagtgactggtatgactgagaccgcattcgggtccgcttataaaacgaaaaaggggatgtttcggacggtgggccagctctacaaagagtcactgacgaagctgatggccacccttaggaacaccaaccctaactttgtgaggtgtatcattcccaatcacgaaaagagagccggaaagctggatccccacctggttctggatcagctccggtgtaatggcgttctggagggcattaggatatgtcgacaagggtttcctaaccgcattgttttccaggagtttaggcaaagatacgaaattctgactccgaatgctatacccaaaggattcatggatggcaaacaggcatgcgagcggatgattcgagccttggaacttgatccgaacctgtacaggattgggcagtcaaagatcttcttccgcgctggtgtgctcgcacatctggaggaggagcgcgacctgaaaatcacagacatcattatattcttccaggctgtgtgcagggggtatctggccaggaaagcatttgcaaagaagcaacagcagctgtctgccctgaaagtgctccagaggaactgcgcagcttatttgaaactaagacattggcagtggtggcgcgtgttcactaaggtgaaacccctcttacaagtcactagacaggaagaggagttgcaggccaaggatgaggaactcctcaaagtgaaagagaagcaaacaaaggtcgagggagagcttgaagagatggagaggaaacatcagcagctgcttgaagagaaaaacatactcgccgaacaacttcaggcggagacggagttgtttgccgaagccgaagagatgagagcccgtctggcagccaagaaacaggagctggaagaaattcttcatgacctcgagagcagagtggaggaggaagaggaacgaaatcagatcctccagaacgagaaaaaaaaaatgcaggcacacatacaagacctagaggagcagctggacgaagaagaaggagcacgccagaagctgcaattggagaaagtaacagcagaggccaaaatcaagaagatggaggaggagattctactgctggaagatcagaattctaagttcattaaggagaagaaactgatggaggatagaattgcagagtgcagtagccagctggctgaggaggaggagaaagctaagaacctggcaaaaattagaaacaaacaagaggtgatgatttccgatctggaagaaaggttaaaaaaagaagagaagaccaggcaagagttggaaaaagccaaaaggaaactcgacggagaaactaccgatttgcaggaccagatcgctgaactgcaggctcaaatcgacgaactgaagctccagctggctaaaaaagaggaagaactgcaaggagccctggcgaggggagacgacgagacgctacataaaaataacgccctgaaggtggtgcgggaattgcaggctcagattgcagagctgcaagaggatttcgagagcgagaaagccagcagaaataaggcagaaaagcagaagagggatctcagtgaagaactcgaggcgcttaagaccgagctggaggacacactggacacaaccgctgctcagcaggaactgcggaccaaacgcgagcaggaggtggctgagttaaagaaggccctagaggaagaaaccaagaaccacgaggcccaaattcaggacatgcggcaacgccacgcaaccgcactcgaggaactgagcgagcagttagaacaagccaaacgcttcaaggcaaatctagagaagaataaacaaggcctggaaactgacaataaggaactcgcatgcgaggtgaaggttctgcagcaggtgaaggctgagagtgaacacaagcgaaaaaagttggatgcccaggttcaggaattacatgctaaggtgtccgaaggagatagactcagggtggagctggctgagaaggcaagcaagttacagaatgaactggacaatgtgtctactcttttggaggaagccgagaagaagggcattaaatttgccaaggatgcggcatcattagagtcccagcttcaagatacccaggaattactgcaggaggaaactcgacaaaaactgaacctcagtagcagaatccgccaactcgaagaggaaaagaactcactgcaagaacagcaggaagaggaggaggaggcaagaaaaaatctcgagaaacaggtactggcactgcagtcccaattggccgataccaagaagaaagtggacgacgatctcgggacaatcgagagcctggaagaggctaagaagaagttactgaaggacgctgaggctctgagtcagcgcctggaggagaaagccctggcctacgataagctcgaaaagaccaaaaacaggttgcagcaagagctcgacgatctcacagtggatctcgaccaccagcggcaggtggctagtaaccttgaaaagaaacagaagaagtttgatcagctgttagccgaagaaaaatccatcagtgcccgatacgccgaagaaagggacagggctgaagccgaagccagagagaaagagacaaaggcactatctcttgctcgagccctagaagaggccctcgaagccaaagaggaattcgaacgccagaataagcagctgcgagccgacatggaagatctaatgtcttccaaagatgacgttggaaagaatgtgcacgaactggaaaaaagcaagcgggctctcgaacagcaggtggaagaaatgagaactcagttggaagagctggaggacgagctgcaggccaccgaagacgccaaactccgattggaagtgaacatgcaggccatgaaggctcaatttgagcgggatctgcaaacacgtgatgaacagaatgaggaaaaaaagagactgttgattaagcaggttagagagttggaagctgaactggaagatgagaggaagcagagggcactggccgtggcctcaaagaagaaaatggaaatcgacctgaaagacctggaggcacagatcgaggccgctaacaaagcgagagatgaggtgataaagcagttgcgcaagttgcaagctcagatgaaggactaccaacgcgagctcgaggaggccagggcaagtagggacgagattttcgcccaaagtaaagagagcgagaaaaagctcaaatccctggaggccgagattctgcagctacaagaagaactcgccagttcggaacgggcacgccgacacgctgagcaggaaagagacgagctagcggatgaaatcaccaactcagccagtggcaaatccgcgctgctggacgaaaagagacggctcgaagctcggatcgcacaactggaagaggagctggaggaagaacaatcgaatatggaactgctgaacgatcgcttccgtaagaccacacttcaagttgacacccttaatgctgaactggccgcagagagaagcgctgcccaaaagagtgataatgcaagacagcaacttgagcggcagaataaagagttgaaggctaagctgcaggagctggagggagccgtgaaatccaagttcaaggcaaccatcagcgccctggaggccaaaatcggccagctcgaagagcaattggaacaagaagctaaggagcgcgcagcagctaataagttggtgaggcgcacagagaagaaactgaaggaaatcttcatgcaggtggaggacgaaaggagacacgcagatcagtataaagaacagatggagaaagccaatgccagaatgaagcagctcaagcggcaactggaggaggccgaggaagaagcaacccgcgctaatgcctcccgacgtaagttgcagagagagcttgatgacgccacggaagctaacgagggcctgagtcgggaagtttctaccctgaagaaccggctgcgccgtggagggccaatcagtttctcgagttcaagaagcgggagacgtcagttacacctcgaaggcgcaagcttggagttgtctgatgacgatacagaatccaagaccagcgatgtgaacgagacgcagccacctcagagcgagta

SEQ ID NO: 29658 - DNA, 6023 bp, synthetic construct
  misc_feature 1..6023: note = Description of Artificial Sequence: Synthetic coding sequence
  source 1..6023: mol_type = other DNA
atggctcagcggaccggactggaagatcccgagagatacctgttcgtggatcgggctgtgatctataatcctgccacacaggccgactggactgccaaaaagctggtgtggatcccctcagaaaggcatggctttgaagcagcctcaatcaaagaagagagaggcgatgaagttatggtagagcttgctgagaatggcaaaaaggccatggtgaacaaggatgatattcagaagatgaatccgccaaaatttagcaaagtcgaggatatggccgaattgacatgtctgaatgaggcaagcgtgttacataacctgaaggatcgttactactcaggcttaatctatacctattcaggactattctgcgtggtgataaacccctataaaaatctccccatatactctgagaacattatcgaaatgtaccgaggcaaaaaaaggcatgaaatgccgccacacatttatgcaatctccgagtccgcataccgctgtatgcttcaagaccgtgaggaccaatccatcttgtgcaccggcgagagcggtgctggaaagaccgagaatacaaaaaaagtgatacagtacttggcccacgtggctagctcccacaaagggaggaaagaccacaatattccccaggagtctcctaagccagtcaagcaccagggggagctcgaacggcaactcctgcaggcaaaccctattcttgagtcctttggtaatgcaaaaaccgtgaagaatgacaactcctcgcggtttggcaagttcattcggattaattttgatgtcaccggctacattgtgggagctaatatagagacttacctgcttgaaaaaagtagagccgtacgccaagctaaggacgagcggactttccatatcttctaccaattgctgtctggggctggggaacatctcaagagcgacctactgctggagggcttcaacaattatcgcttcctgtcaaacggctatattccgattcccggtcaacaggacaaggataacttccaagaaacgatggaggctatgcacatcatggggttctctcacgaagagatcctgagcatgttgaaagtggtctcctcagtgcttcagtttggcaatatttcctttaagaaggaaagaaatactgatcaggcatcaatgccagagaacactgtggcgcagaaattgtgtcatctccttggtatgaacgtgatggaatttactcgggctattcttacaccgaggatcaaggtaggcagagactacgtccagaaagctcaaaccaaagagcaggctgattttgcagttgaggccctagccaaggctacctatgaaaggcttttccgttggctggtccatagaattaacaaagctctcgaccgtacgaagagacagggggcatccttcatcggaattctggatatagcaggtttcgaaatctttgaacttaattcctttgagcagctgtgcataaattacaccaacgaaaaactgcagcagctgttcaaccacactatgtttatcctggaacaggaggagtaccagcgcgagggaatcgagtggaactttatagactttggtcttgacttgcaaccatgtatcgatctcatcgagcgccctgccaatccaccgggagtgctcgcactactggatgaagagtgttggtttcccaaagctaccgacaaaacttttgttgagaagctcgtgcaggaacagggaagtcactccaagttccaaaaaccaaggcagttaaaggacaaggccgatttttgcatcatacactatgcaggaaaggtggactacaaagcagacgaatggctgatgaagaacatggatcccctgaacgacaatgtggctactctcctgcaccaaagttcagatcggtttgtggcagagctctggaaggacgagatccagaatattcagagagcatccttttatgattcggtgtcaggactgcatgagccccctgtagatagaatcgtcggcttagatcaggtgaccggaatgaccgaaaccgccttcgggagtgcttacaagacaaagaaggggatgttcaggacagtgggccagctctacaaggaaagtcttaccaagttaatggccaccctccgaaacactaacccaaatttcgttcgctgtatcatccctaatcatgagaagcgggctggtaaactggacccacatctggtgttagatcagctccgatgcaatggcgttttagaaggtatccggatttgtcgacagggctttcctaatcgcattgtgttccaggaattccggcagcgttacgagattctgacgcccaacgctatcccgaaggggtttatggacggtaagcaagcttgtgagcgaatgatcagagctctagagctggatccaaatctgtacagaataggccagagtaagatctttttccgagccggtgtgttggcgcacctggaggaagaacgagacctgaaaatcactgacatcatcatcttcttccaggcagtgtgcagagggtacctagccagaaaagcttttgcgaagaaacagcagcagctgtccgcccttaaagttctgcagcgaaactgcgcagcatacttgaaactccgccactggcagtggtggagagtgttcacaaaagtgaagcccctcctgcaggtaacaagacaagaggaggagttgcaagctaaggacgaggagctgctcaaggtgaaggagaagcagacaaaggttgagggggagttagaagagatggagcgaaagcaccaacagctgttagaagagaagaacatcctagccgagcagctgcaggctgagacagaattgttcgccgaggctgaggaaatgcgagccaggcttgccgctaagaagcaggagctcgaagagatcctgcacgacctggaaagtcgtgtcgaagaagaagaagagcgtaatcaaattctccagaacgagaaaaaaaaaatgcaggcacacatccaagacctggaggagcagctcgatgaggaagagggtgccaggcagaagctgcagctggagaaggtgacagcagaagccaagatcaagaagatggaggaggagatcttgttactggaggaccagaacagtaagttcattaaggaaaaaaagctaatggaagaccgcattgctgaatgctccagtcaactagccgaggaagaagagaaagctaagaatctcgccaaaattagaaacaaacaggaggttatgatcagtgatcttgaagagcgcctgaaaaaggaggagaaaacacgacaggagctggagaaagctaaacgcaaattggatggagaaaccaccgacctgcaggaccaaattgcagagctgcaggcccagattgatgagctgaagctgcaattagccaaaaaagaagaagaactgcagggggcactggctcggggagacgacgagactctccacaagaataacgctcttaaagtcgttcgggagctacaggctcagattgccgagctccaggaggactttgagagcgagaaggcctcacgcaacaaggcagaaaagcagaaaagggatttgagtgaagagctggaagcgctgaagacggagctagaggacacactggatactaccgctgcccagcaagagcttcgcacaaagagggaacaggaggttgccgaactgaaaaaagctctagaggaggagactaaaaaccatgaagcccagattcaggacatgagacagcgtcatgccacggccctggaggagctctctgagcagcttgaacaggccaaacgctttaaggcaaacctggagaaaaacaaacaagggttggagacagacaacaaagaattggcgtgtgaggtgaaggtgctccagcaggttaaagcagagtcagaacacaagagaaaaaagttagacgcccaagtccaggagctacatgctaaggtatccgaaggggacaggctccgggtggagctcgctgaaaaggcgagcaagctgcagaacgagcttgacaatgtgagcacactcctggaggaggcagaaaagaagggtataaaatttgcaaaagacgccgcaagcttagaaagtcagctgcaagacactcaggaattgctccaggaagaaacgcgccagaaactgaacctgagctctcggattaggcagctggaagaggaaaaaaattccctgcaggaacagcaggaggaggaagaggaagcccgtaaaaatctagaaaagcaggtgctcgctctgcagtctcaactggccgacactaagaaaaaggtagacgatgacctgggcaccatcgaatccctggaagaggctaaaaagaaactactaaaggacgcagaggccctttcacagcgcctggaggagaaggccctggcttatgataagctcgagaaaactaaaaatcgactacagcaagagctcgatgacctgacagtggaccttgaccaccaaaggcaggtggcctccaatctggaaaagaagcagaaaaagtttgaccagctgctggctgaagaaaaaagcatctctgccagatacgccgaggaaagggacagggccgaggccgaggcgcgagaaaaggaaaccaaagctttaagcctcgccagggcgcttgaagaggccctcgaagccaaggaggagtttgagcgccagaacaagcagctgagagccgatatggaggatctgatgagctcaaaagatgatgtgggcaagaacgtgcacgagctggagaagtcaaagcgggctctcgagcaacaggtggaagagatgcgcacccagctggaagagctggaagacgagctgcaagctactgaggatgccaaactaaggttggaggtcaacatgcaggctatgaaggcccagttcgaacgagacttgcagacaagagatgaacagaacgaagagaaaaagcgcttgctcattaaacaggtgcgggagctggaggctgaactagaggacgaaagaaaacagagggctctggccgtggcttcgaaaaaaaagatggagatcgatttaaaagatctggaagcccagatcgaagcagccaacaaagcccgtgacgaggttattaagcaacttaggaaactgcaggcgcagatgaaagactaccagagggagctggaggaagctagggctagccgtgatgagatcttcgcacagagcaaggaaagcgaaaaaaagctcaagagcctggaggctgaaattctccaactacaggaggagttggcaagcagcgaacgcgctcgaagacatgccgagcaagagagggacgaattggccgacgagatcacaaactccgcctccggcaagtcagcactcctggacgagaagcgcagactggaggctaggatcgcacagttggaggaggaactggaagaagagcagagcaatatggagctgctgaatgacagatttcgcaaaacgactttgcaagtggacactctcaatgcggaactggcagccgagcgctccgccgcacagaagtcagacaatgctcgccagcagctcgagcgacagaataaggaactgaaggccaagcttcaggaacttgagggcgctgtgaagtccaagtttaaggccacgatcagcgccctggaagcgaaaattggacagctggaagagcagctggaacaggaagctaaggaacgggctgcggctaacaagcttgttcgcaggaccgaaaaaaagctcaaggagatctttatgcaggttgaagatgagaggcgccatgctgatcaatataaggaacagatggagaaagctaatgcaagaatgaaacaattgaaaagacagcttgaagaagcagaagaagaagccacaagagcaaacgcctctaggagaaagctccagcgggagctggacgacgccacagaggcgaacgagggcttatctagggaagtctctaccctcaagaaccgactgagaagaggcggaccgattagcttttccagcagtcgctctggacggaggcagctccatctggaaggcgctagtctcgaactgagcgacgatgacaccgagagtaagacctcagatgttaatgagacccagccccctcaaagtgagta

SEQ ID NO: 29659 - DNA, 5978 bp, synthetic construct
  misc_feature 1..5978: note = Description of Artificial Sequence: Synthetic coding sequence
  source 1..5978: mol_type = other DNA
atggctcagcgcacaggcctggaggatccagaacgttatctgttcgtagaccgcgcagtgatctacaacccagctacacaggctgattggaccgccaaaaagcttgtgtggattcccagcgagcgtcatggcttcgaagctgcaagtataaaagaggagcggggagatgaggttatggtggagcttgcggagaacggcaaaaaggcaatggtcaataaagatgacatacaaaagatgaacccaccaaaattctctaaagtggaagatatggcggagttgacatgtctcaatgaagcgagtgtgttgcacaacttgaaggataggtattactccggcttaatttatacttactcagggttattttgcgtggtcattaacccttacaaaaatctcccaatctattctgaaaacatcattgaaatgtacagagggaagaaacggcacgaaatgcctccccacatttatgccatatccgaatccgcttacagatgtatgctgcaagatagggaggaccagagcatcttgtgcacaggcgagtctggggctggaaaaacggagaacacaaagaaagtgatacagtatctggcccacgtggcctcttcccacaaggggagaaaagatcataacattccacaggaatcaccgaagcctgtcaagcaccaggcatccgccctgttgtacggagaactagaacgccaactgctgcaggccaacccgatcctggaatcctttgggaatgctaaaaccgtgaagaatgataattcctccaggttcggtaagttcataagaataaacttcgacgtcacagggtatatcgtcggggctaatatcgaaacgtaccttctcgaaaaatctagagccgtcaggcaggccaaagacgaaagaaccttccacatattttatcagctgctgtctggagccggagagcacctgaaatcagatctgttactggaagggtttaataactatcggtttttgtccaacgggtacattcctatccctgggcagcaagataaggacaattttcaggaaaccatggaagcgatgcatatcatggggttcagccatgaggaaatactgagtatgctgaaggtggtctcttccgttttgcagtttggaaatatctccttcaaaaaggagagaaatacggatcaggcctctatgccagaaaacactgtggcacagaaactgtgtcatctactaggcatgaacgttatggagttcacacgcgcaatccttacaccgcgtatcaaggtcggcagggactatgtacagaaagcccagaccaaggaacaggcagattttgcagttgaagctctggccaaagctacctacgagaggttgtttcggtggctagtgcatcgcataaataaggcacttgacagaaccaagcggcagggggctagcttcattggaattctggacatagccggattcgaaatctttgaattgaactctttcgagcaattatgtataaactatactaacgagaagcttcaacagctgtttaatcatacgatgttcattctggagcaagaagagtaccagagggagggaatagagtggaacttcattgatttcggactcgacttacagccttgcatcgacctgattgagaggcctgcgaatccgcctggtgtccttgcccttttagacgaagaatgttggtttcctaaagccacagataagacttttgtggagaagctggtgcaagagcaaggaagtcactcaaagttccagaagccaagacagctgaaggataaagcagacttttgcatcatccactatgcgggaaaagtagattataaggccgacgagtggctgatgaaaaacatggatcctctgaacgacaacgtcgcaactcttctgcatcaatctagcgatcggtttgtcgccgagctgtggaaagatgtggaccgcatcgtcggcttggatcaggtgactggcatgaccgagacagcctttggatctgcctacaaaacgaagaaggggatgttccgcaccgtggggcaactgtacaaggagagcctaacgaaactcatggctaccctccggaacaccaacccgaatttcgtgagatgtatcatccctaaccacgagaagcgagcagggaagcttgacccccacctcgtccttgatcagctcagatgcaacggggttctcgaaggcatcagaatctgtaggcaggggttccctaatcgaattgtgtttcaagaatttaggcaacggtatgaaatactgacccccaatgctatacccaaaggatttatggacgggaagcaggcttgcgaaagaatgattcgcgctctggagcttgatcccaacctgtataggattgggcagagtaagatatttttccgggcaggggttctggctcatctcgaagaagaacgggatctgaaaataactgacatcataattttctttcaagccgtctgtcgagggtacctggcaaggaaagcttttgcaaaaaaacagcagcagctgagcgccctgaaagtgctgcaaaggaactgtgcagcttatttgaagctccgtcactggcaatggtggcgagtgttcaccaaggtgaaaccactcctgcaggtgactaggcaggaggaagaacttcaggcaaaagatgaagagctcttgaaagtcaaagagaagcagaccaaggtggaaggagaattagaggaaatggaaaggaagcatcaacagctgcttgaggaaaaaaacatccttgccgagcagctgcaggccgaaacagaactctttgccgaagcggaagaaatgcgcgctcgattggcagccaagaaacaggaactggaggagatcctccacgatctcgagtcccgggtcgaagaggaggaggaacggaaccagatcttgcagaatgagaaaaagaaaatgcaagctcatatccaggatttggaggaacagctggacgaggaggaaggggctagacaaaagctgcagcttgagaaggtgactgccgaagcaaagattaaaaagatggaagaagagatcttgttactggaggaccagaattcaaagttcattaaggaaaagaaattgatggaggatcggatcgctgagtgctcctctcaactggcggaagaagaagagaaggcgaagaatctggccaagattcggaataaacaggaggtgatgatttccgacctggaggagcgtctcaagaaggaagagaaaacacgccaagagctcgagaaagccaagcgcaaacttgatggggagactactgacctccaagatcagattgcggaactgcaggcccagatagacgagctcaagctgcaactcgccaagaaagaggaagagctgcagggggcactggctcgtggggatgatgagacgctgcataaaaacaatgccttaaaagtagttagagagttacaggcccaaatcgccgagctgcaggaagatttcgagtctgagaaggcctccaggaataaagccgagaaacaaaaacgcgatctaagcgaagagctggaggctctgaagacagagttggaagacacactggatacaacggcagcacaacaggaactgagaacaaaacgcgagcaggaagttgctgagcttaaaaaagctctggaagaggagaccaaaaatcacgaggctcagattcaggatatgcggcagcggcacgcgactgcactggaagaactcagcgaacagctcgagcaggccaagcgcttcaaggcaaacctggagaaaaacaagcaggggctcgagacagataacaaggaactggcatgtgaagtgaaggtgctacagcaggttaaagccgagtctgaacacaaaagaaaaaagctggatgctcaggttcaggagctccacgcaaaagttagcgaaggtgatcgtttgcgcgtcgaacttgccgagaaggcctcaaaattgcagaacgagttggacaatgtgagcacactcttggaggaagcagagaagaagggcattaaatttgcgaaagacgcagcgtctttggaaagtcagctgcaggacacgcaggagctccttcaggaagagacccggcagaagctgaacctgagcagtcgaatcagacagttagaggaggagaaaaactctctccaggaacagcaggaagaggaggaggaagccaggaaaaacctggagaagcaagttttggctctgcaatctcaattggcggacaccaagaagaaagtggacgatgacctcggcacaatagagtccttggaggaggctaaaaaaaagctcttgaaggacgctgaagccctaagtcagaggttggaagaaaaggccttggcctatgacaagctcgagaaaaccaaaaaccgactacagcaggaactggacgacctgaccgtggaccttgaccaccagaggcaggttgccagcaacttggaaaaaaagcagaagaagtttgatcaattgttggctgaggaaaagagcatttctgctcggtacgcggaggagcgggaccgcgctgaggccgaggcacgggaaaaggagactaaagccctctccttggccagggccctcgaggaagcactggaagccaaggaggagttcgagagacagaataaacagctgcgggcagacatggaagatctgatgtcctccaaggatgatgtcggaaaaaatgtacacgagctcgaaaagtccaagagggctttagaacaacaggtggaggagatgagaacccagctggaagaattggaagacgagctgcaggctactgaggacgcaaaattgaggcttgaagtcaacatgcaggccatgaaggcacaattcgagagggacctacagacccgagatgaacaaaacgaagaaaaaaagagattgctgataaagcaggttcgagagctggaggccgagctggaagatgagaggaagcaacgagctctggccgtggccagcaagaagaagatggagatcgatctcaaagacctggaggcccaaatagaggccgctaacaaggcacgggatgaggtgatcaagcagcttcgcaagctgcaagcccagatgaaggattaccaacgggagctggaggaagcgcgagcttctcgcgatgagatcttcgcccaatcgaaggagagcgagaaaaaactcaagtccctggaagcagagattcttcagctgcaggaagagttggcctcgtcagaacgagccagacgccacgcagagcaggaacgcgacgagctggccgacgagatcactaactcggcttccggcaaaagcgctctgttggacgaaaagaggcggctcgaggctaggatcgctcaactggaagaggagctcgaggaggagcagtctaatatggagctgctcaacgatcgctttcggaagaccacactgcaggtcgatacgttaaacgccgagttagccgctgagcggtccgctgcccagaagagcgataacgccaggcagcaattagaaaggcagaataaggagctgaaagccaagctccaagagctggagggggcagtgaaaagtaaattcaaggccactatctcagcattggaagccaagattgggcagctcgaggaacaactggagcaagaggctaaggaacgggcagcagctaacaaactggtgcgcagaaccgagaagaagctgaaagagatctttatgcaggttgaggacgaaaggcgccatgcagaccagtacaaggaacagatggaaaaagccaatgctagaatgaagcagcttaagcggcagcttgaggaagcagaggaggaggctacacgcgctaatgccagtcgacgcaagttgcaaagggagctggacgatgccaccgaggcaaacgaaggtttatcccgcgaagtaagcacactaaaaaatcgcctcagacgcggaggtcctatctcattttccagcagtagatcaggaaggcggcaattacatctggaaggcgctagcttagaactctccgatgatgacacagaatctaagacctctgatgtcaacgagacacaacctccccagtccgaata

SEQ ID NO: 29660 - DNA, 5993 bp, synthetic construct
  misc_feature 1..5993: note = Description of Artificial Sequence: Synthetic coding sequence
  source 1..5993: mol_type = other DNA
atggcacagcgtaccggattagaagatcctgagcggtacttgttcgtggatagagccgttatttataacccagccacacaggccgactggaccgcgaagaagctggtttggatacctagcgaacgacacgggttcgaagccgcatctattaaggaggaacgcggagacgaggttatggtcgaactggcagaaaatggcaagaaggccatggtgaacaaagatgatattcaaaagatgaacccgcctaaattttccaaagtcgaagatatggctgagttgacatgccttaatgaagctagcgtcctccacaatctgaaggacaggtattatagtgggctcatctatacatattcaggcttattctgcgtcgttattaatccttacaaaaacctgccaatttatagtgaaaatataatcgagatgtaccggggaaaaaagagacacgagatgccgccacatatctatgccatttcggaatcagcgtacagatgcatgctccaggaccgggaagatcagtcgattttgtgtaccggcgaatccggggctggaaagaccgagaatactaaaaaagtcatccagtacctggctcacgtcgcttctagccataagggcagaaaggatcacaacattcctggagagctcgagcgacagctcctgcaggcaaatcccatccttgaatcctttgggaacgcgaaaaccgtaaaaaacgataatagttcacggtttggaaaattcatccgcatcaactttgatgtgaccggctatatagtcggtgcaaacattgaaacctatcttctggagaagtctcgagccgtcaggcaggcgaaggacgaaaggacattccacatattttaccagctcctgtctggtgccggtgagcaccttaagagtgatctgctactggagggcttcaataactaccgattcctctctaatggatacattcctatcccaggacaacaggataaagataacttccaggagaccatggaagccatgcacattatgggcttctcgcacgaggagatcctttcaatgctgaaagttgtgtcaagtgtgctccagtttggtaatatctccttcaagaaggaaagaaatactgaccaagcatcaatgccggagaacaccgttgctcagaagttatgccacctgctcgggatgaacgtgatggagtttaccagggccattttaacgccgcgtatcaaggtcgggcgagattatgtccaaaaggctcagaccaaagagcaggcagactttgccgtggaggcgttggccaaggcaacctacgagcggctgttcagatggctagtgcacaggattaataaagcattagatcgcaccaagcggcagggtgcctcgttcatcggaatacttgatatcgcagggttcgagatcttcgaattgaacagtttcgaacagctatgtataaactataccaacgagaagctccagcagttgttcaatcatactatgttcatcctcgaacaggaggagtaccagcgagaggggatcgagtggaatttcatcgactttggattggacttgcagccgtgtattgacctgatagagaggccagccaatcctcccggagtgttagccctactcgacgaggaatgctggttcccgaaggccacggacaaaactttcgttgaaaaacttgtgcaggaacaaggctctcactccaaattccagaagccacggcaattgaaagataaagccgacttctgcatcatccattatgccggaaaggtggattacaaagctgacgagtggttgatgaagaatatggatcccctcaatgacaatgtggccaccctcctgcatcagagctcggaccgcttcgtagctgagctctggaaagatgagattcaaaacatccaacgggctagcttctacgattcagtttcaggtctacacgagccaccagttgaccgtattgtcggccttgatcaggtgaccggaatgacagagactgctttcggaagtgcttataaaacgaaaaaggggatgttccggacagtaggacagctctacaaggagtctctgactaaattaatggccactcttagaaataccaatcccaactttgtgcggtgcattatcccaaaccacgagaaaagggcaggaaaactggacccccatctcgttctagatcagctgagatgtaacggagttctcgagggcattcgtatctgccgtcagggatttccaaataggatcgtctttcaggagttcaggcagaggtatgagattctgacgccaaacgctatcccaaaggggtttatggacggaaagcaggcctgcgagagaatgatccgtgccctggaactggatccaaatctctaccggataggccagtctaaaattttctttagagccggagttctcgcccacctagaagaggaaagggacctgaagatcactgatattattatcttcttccaggctgtatgtaggggttatttagcacgcaaagcatttgcaaaaaaacagcagcagttaagtgcgctgaaagtactgcagcggaattgtgccgcttatctgaaattgcgccactggcagtggtggcgagttttcactaaagttaagccattgctgcaggtaacaaggcaggaagaggagctccaagctaaggatgaagagctactgaaagtcaaggagaagcagaccaaagttgagggagaactcgaagaaatggagaggaaacatcaacagctattagaggaaaagaatattctcgctgagcaactgcaggccgaaaccgagttgtttgctgaggcggaggagatgcgtgccaggctcgccgctaaaaagcaggaactggaggaaattcttcatgacttggagagccgtgtcgaagaggaggaggagagaaaccagatcttgcaaaacgaaaaaaagaagatgcaggctcatattcaagatttggaggaacaacttgacgaggaggaaggagctcggcagaagctgcagcttgagaaggtgactgcagaagcaaaaattaagaagatggaggaagagatcctcctcttggaggatcaaaattcaaaattcatcaaagagaaaaaacttatggaggatcggatcgcggagtgttcttcccagctcgccgaagaggaggagaaggcaaagaacttggccaagatcaggaacaagcaggaggtaatgatttctgacctggaggagcggctgaagaaagaggagaaaaccaggcaagagttggaaaaagccaagcgcaagctggacggcgagacgaccgaccttcaggatcaaatagctgagctccaagcccagattgatgagttaaagctgcagctggccaaaaaagaggaggagctgcagggcgcactggccaggggggacgacgagaccctacacaaaaataacgctctgaaggtcgtgcgcgaactgcaggctcagatagctgagctacaggaagacttcgagagcgagaaggctagcaggaataaggccgaaaaacaaaagagggatctgagcgaagaactcgaggcattgaaaactgaactggaagacacactggataccaccgcggctcagcaggaattgaggactaagcgcgagcaggaggttgctgagctgaaaaaggctcttgaagaagaaaccaaaaatcacgaagcgcagatccaggacatgcgacagaggcacgcaacagcccttgaggaactgagcgaacaattggagcaagcaaagcggtttaaggcaaacttggagaagaataaacagggcctggagaccgataataaggagctggcctgcgaggtgaaggtgctgcaacaggtgaaggcagagagcgagcacaaaagaaagaagctggatgcccaggtgcaagaactccacgcaaaggtgtccgaaggtgatagactacgggtggagctggctgagaaggcaagcaagctgcagaacgaactggataatgtgtcaactctgctggaggaggctgagaaaaaaggaataaagttcgccaaggatgcggcttccctcgagtcccagctgcaggatactcaagagttactgcaggaagagacccggcagaaattgaatctttcttccagaatcagacagttggaagaggaaaagaatagcctgcaggagcagcaggaggaagaggaggaggcaagaaaaaatcttgagaagcaggtgctggctcttcaatcccagctggcagacaccaagaagaaagtggacgacgatctgggaacgatcgagtctctggaggaggccaaaaagaagctattaaaggatgccgaggccctcagtcagcgccttgaggagaaggcactcgcttatgacaagctcgagaaaactaaaaacaggttacagcaggagcttgatgatctcactgtggatctggaccaccagagacaggtggcttctaacttggaaaaaaagcaaaagaagtttgatcagctgctggcagaagagaaatccatttccgctaggtatgctgaagaacgggatagagctgaagctgaggcccgtgaaaaagagaccaaagcattatccctggcccgagctctcgaggaggcactggaggccaaggaagaattcgaaaggcagaacaaacaactgcgtgccgacatggaggacctaatgagctcgaaagatgatgtcgggaagaatgtgcacgagctggaaaagtcaaagcgggcattagagcagcaggttgaagagatgagaacccagctcgaggagctagaggacgagctgcaggctactgaagacgccaagttgcgtcttgaggtcaacatgcaggcaatgaaggcacagttcgagcgtgacctccagactagagacgagcagaacgaagaaaaaaagcgcctgctcatcaagcaagtgagggaacttgaagccgagctggaagacgaacgaaagcaacgagcattagcagttgcctccaagaagaaaatggagatcgatcttaaagatctggaggcccaaatcgaggcggctaacaaggccagagatgaggtgatcaaacagcttcgcaagctacaggcacagatgaaagactatcaaagagagctggaggaagcccgagcctctcgagacgaaatatttgcccaaagcaaagagagcgagaagaagttgaagagccttgaggccgaaattctgcagctacaggaggaactggcctcatctgagcgagcgagaagacacgccgaacaggaaagggatgagctggccgatgaaatcacgaacagcgcctcagggaagtccgctcttctggacgaaaagcgcagattagaggcgaggatagcgcagttagaggaggaattagaagaagagcagtcaaatatggaactgctaaacgaccggtttcggaagaccaccttgcaggtcgatacattaaacgcggaactggctgctgaacgttccgctgcgcaaaagagtgacaatgcgagacaacagctcgagaggcagaataaggaattgaaggcaaagctgcaggaactggaaggcgcagttaagagcaagttcaaagctactatcagtgctctggaagctaaaattggacagttggaagagcaattggagcaggaggccaaggaaagagctgccgcaaacaagttggtcagaaggaccgaaaagaaactcaaagagatatttatgcaagtcgaggatgaaaggcgccacgctgaccagtataaagagcagatggagaaagctaatgccaggatgaagcagctcaagcgacaactcgaagaagccgaagaggaagctacgcgagccaacgccagccgaaggaaactgcaaagggaattagatgatgcgaccgaagctaacgaaggtctgagtcgagaggtctcaactttgaaaaacagactgcgaagaggcggacccatttccttctcctcttctagatcggggaggaggcagctacacctcgaaggcgctagcctcgaactctccgatgatgatacggagagtaaaacctctgatgttaacgagacccagcctccgcaaagtgaata

SEQ ID NO: 29661 - DNA, 567 bp, synthetic construct
  misc_feature 1..567: note = Description of Artificial Sequence: Synthetic coding sequence
  source 1..567: mol_type = other DNA
atggcgcaaaggactggcctagaggacccagagcgttacctctttgtggatagagcggtgatctacaaccccgcaacacaagcggactggacagcaaagaagctggtgtggatacctagtgagcgccacggattcgaggccgcatctatcaaagaggaacggggtgacgaggtgatggttgagttagcggagaatggcaaaaaagctatggtaaataaagacgacattcagaagatgaatcctccaaaattcagcaaggtggaggatatggcagagctgacctgccttaacgaggccagcgtcctccacaacctgaaggatcggtactattcggggctcatttacacgtattccgggctgttttgcgtggtgatcaacccatataagaacttaccaatctattccgagaacatcatcgaaatgtatcgtggtaaaaagcggcacgaaatgccacctcacatctacgccatttcagaatctgcctacagatgcatgctgcaggatcgtgaagaccagtctattctctgtacaggcgaaagtggagccggaaagacggaaaatacctag

SEQ ID NO: 29662 - DNA, 1446 bp, synthetic construct
  misc_feature 1..1446: note = Description of Artificial Sequence: Synthetic coding sequence
  source 1..1446: mol_type = other DNA
atgtatgacgccgaacggggatggtcactctcatttgccggatgcggattcctgggtttttaccacgtgggggcaacgcggtgtctgagtgagcacgccccacacctgctgagagacgcacggatgctctttggggcttctgccggagcactgcattgtgttggtgtgttatcaggaatcccactggaacagactctgcaggttttgtctgacctggtacgcaaagcccgatcaagaaacatcggcatctttcacccaagctttaatctgtccaagttcctgcggcagggactttgtaagtgcctcccagctaacgtccatcagctgatctctggcaagataggaatctctctgacccgcgtgtctgacggtgagaacgtacttgttagcgattttcgctctaaagacgaggtggtagatgccttagtgtgctcctgcttcatccccttctattccggactgattcctccaagtttcagaggggtgcgctacgtggatggtggggtgagcgataatgtgccatttatcgacgcgaaaaccacgattaccgtgagcccattctacggcgagtacgacatctgccctaaggtgaaatctaccaatttccttcacgtcgatatcacaaagctttcactccggctgtgcaccgggaacctgtatcttttatccagggcgttcgttcctcccgacttaaaagtactgggagagatttgtctgcgcggttatttggacgcctttcgattcctagaagagaaaggtatctgtaatcgaccgcagcctggactcaagagcagctctgaagggatggatccggaggtggccatgccctcatgggcgaacatgtctctagactcatcacccgagagcgccgcacttgcggtccggcttgagggggacgagctgttggatcacctacgactgtctatccttccctgggacgagtccattctcgatacactgtcacctcggctggcaactgccctgagcgaggaaatgaaggataaagggggttacatgtcgaagatctgcaatctgcttccaataagaattatgtcgtacgtgatgctgccttgcactctgcctgtagagtcagccatcgccatagtccagaggctggtgacctggctgccagatatgcccgatgacgtactctggttgcaatgggtaacaagtcaggtttttacacgcgtgctgatgtgtctgctaccggcatctcgttcacagatgccagtgagctcacaacaggcctcaccttgcacacctgagcaggactggccctgctggactccatgtagccccaaaggctgccctgccgagaccaaagccgaggccacccctagaagcatcctgcggagttcactcaacttcttcttgggaaataaagtccccgcaggcgcagaaggactttctacattccccagctttagcttggagaagtccctgtag

SEQ ID NO: 29663 - DNA, 4149 bp, synthetic construct
  misc_feature 1..4149: note = Description of Artificial Sequence: Synthetic coding sequence
  source 1..4149: mol_type = other DNA
atgtacaagggtaagaaacgacacgaaatgccaccccatatctatgccatcacagacaccgcttataggtcaatgatgcaggatcgggaggaccagagcattctgtgtaccggcgaatccggcgctggcaaaactgaaaacaccaaaaaggtgattcaatacttggcctatgtcgcatcaagccataaaagtaagaaggatcagggagaactcgagagacagctgttacaggctaaccccatcctggaggcgtttggcaacgcaaagaccgtgaagaatgacaatagtagtcgattcgggaagtttatcagaattaactttgacgttaatggctacattgtgggagcaaacatcgagacatacctgctggagaaatcacgtgcaattcggcaggcgaaagaggaaagaacctttcatatattctattacttactgtctggtgctggtgaacacttgaaaacggacctgcttctggagccgtacaataaatacaggttcctgagcaatggccatgttaccatacctggccagcaggacaaggacatgttccaagaaactatggaggccatgcgaataatgggaatccccgaggaagagcaaatgggcctactgcgagtgatatctggcgtcctgcagcttggcaacattgtgttcaaaaaagaaaggaataccgaccaggcttcaatgccggacaacacagccgcacaaaaggtgagccatctcctgggtataaacgtcaccgattttacccggggtattctgactccacggattaaagtgggcagggattacgtccagaaagcgcagacaaaagaacaagcagatttcgctatagaggccctggcgaaggctacctacgaaaggatgtttcggtggctcgtgctgagaatcaataaggcactggacaaaaccaagaggcaaggcgcttccttcatcggtattctcgacattgcagggtttgagatcttcgatctaaatagcttcgagcagctttgcattaactatactaatgagaaactgcagcaactgttcaaccataccatgttcatcctagaacaggaggagtaccagcgtgaagggattgagtggaactttattgactttggcttggatctccagccatgtattgatctgatcgagaagccagccggaccgcctggtattctggcactgttggatgaggagtgttggtttccaaaagccactgacaaatcatttgttgagaaagtgatgcaggagcagggcactcatccaaaattccaaaaaccaaagcaactgaaagataaggcggatttctgcattattcactatgctggcaaggtagactacaaggccgatgagtggctcatgaaaaatatggaccctcttaacgataatattgccacactactgcaccagagttctgacaagttcgtaagcgaactatggaaggacgtcgatcgcatcatagggctagaccaggtcgcgggtatgtctgaaacagccttgccgggagcgtttaaaacacgtaagggcatgttccgtactgttggacaattgtataaagaacaactggcaaagctgatggccaccttgcggaacaccaaccctaattttgtgcggtgtatcatccccaaccacgaaaagaaggctggcaagctggatccgcacttagttcttgatcagctccggtgtaacggcgtattagaaggtatccgcatttgcaggcaaggattccctaaccgggtggtatttcaggagtttcgtcagaggtacgagatcctgactccgaactccattcccaaaggcttcatggatggcaaacaggcatgcgttttgatgatcaaggcactggagctggattctaatctataccggatcggccagagtaaagtgttctttagagctggtgttctggcccatctggaggaagaacgggacctgaagatcactgacgtgatcattggatttcaggcttgctgtagggggtacctagcacgcaaggccttcgccaagaggcagcagcagctgaccgccatgaaagtactgcagcgaaattgcgccgcatacttgaagctaagaaattggcagtggtggaggctcttcaccaaagtgaagccgctgctccaggtatctcgccaggaggaggagatgatggctaaggaggaagagctcgtaaaagtgagggagaagcagttggccgctgaaaaccgactgaccgagatggagaccttgcagtcccagttaatggccgaaaagcttcaactgcaggaacaattgcaggcagagaccgaactgtgtgcggaggctgaagaattgcgagccaggttgactgcaaagaagcaggaactggaagagatttgtcacgatctggaagcgagagttgaagaagaagaggaaaggtgccagcacttacaagccgagaagaaaaaaatgcagcagaacatccaagaactcgaagaacagctagaggaagaggagtcagcacgtcagaagttacaattagagaaggtgactactgaagctaaattgaagaagctagaggaagagttagacgacctgctggttgacctggatcaccaaagacaatcggcatgtaacctggagaaaaagcagaaaaagttcgatcagttgttagctgaggagaagacaattagtgcgaaatatgccgaagagagggacagagccgaagcagaagcccgtgaaaaagagacaaaagctcttagcttagccagagcactcgaggaagctatggagcaaaaagctgagctcgagagactcaataagcagttccgaaccgagatggaggatctgatgagtagtaaggatgatgtcggcaagtctgtgcatgagctggagaagtccaagagggcccttgaacagcaggtcgaggagatgaagacacagctcgaggagcttgaggatgagcttcaggccaccgaggacgccaagcttcgcctcgaggtcaacttacaggccatgaaggctcagttcgaaagggatttacagggccgtgatgagcagtctgaggaaaaaaaaaagcagcttgtgaggcaggtgcgagaaatggaggccgaactcgaggacgagcgtaagcagagaagcatggcggtggccgctcggaagaaactagagatggacttgaaggatctggaagcacatatcgactccgctaacaaaaaccgagatgaagccatcaagcagctccgaaagttacaagctcagatgaaagactgcatgagggagttggacgatacacgagcctcgcgggaagagatcctggcacaggctaaagagaatgaaaaaaaactgaaatctatggaagccgaaatgattcagctgcaggaagaacttgccgctgccgagagagctaagagacaggcccagcaagagagagacgagctagcagatgagatcgcaaatagtagtgggaagggagcccttgcgctcgaggagaaacggcgtctggaggccagaatcgcacagcttgaagaagagttggaagaggagcaggggaacacagagcttattaatgatcggctcaaaaaagccaatctgcagattgatcaaattaacactgacttaaatctggagcggtcacacgcgcagaagaacgaaaatgccagacagcaactcgagcgccagaacaaagaattaaaggtgaagctgcaagagatggaggggacagtaaaaagtaagtacaaggccagcatcaccgcacttgaggctaaaattgctcagttggaagaacaactggacaacgagaccaaagagcgtcaggccgcatgcaaacaggtgcgcaggactgagaaaaagctgaaggatgtgctcctgcaggtggatgacgaacgccgaaatgctgagcagtacaaggatcaggcagacaaggcttctactaggctgaagcaacttaagcgccagttagaggaagccgaggaggaggctcaacgcgcaaatgcttctcgcagaaagctccagcgagagctcgaggatgcgaccgaaaccgccgacgccatgaacagagaagtctccagtctcaagaacaagctgcgtcgcggagacttgccattcgtggttcccagacgaatggcgcgaaagggggcaggcgatggatccgacgaggaggtggatggaaaggcggacggtgctgaagcaaaacccgcagagtag

SEQ ID NO: 29664 - DNA, 1689 bp, synthetic construct
  misc_feature 1..1689: note = Description of Artificial Sequence: Synthetic coding sequence
  source 1..1689: mol_type = other DNA
gcctcgggaacgaggcggagatggcccccaacaacaagttggcggcgtcctcgtaggggctgctcccgcagttggaccacttgctggtggacgtggacgacctccgcacgggcaagagccacttggagaagaagccgacgatccttgactagctcctggcggagaagacggccttccctcccctccatgcagagatccgcgaccggccttcgtaggaggccagagcggagacggcctcggctgtgcaggtggccgggtcccgaagaagccatggagcagaaagctgagctggagcgcttgaataagcagtttcgcaccgagatggaggatcttatgagctctaaagatgatgtgggcaagagcgtgcacgagctcgaaaaaagtaagagagcccttgaacagcaggttgaggagatgaagacccaactggaggaactggaagacgagctccaggccacggaggacgccaagttaagacttgaggtcaacctccaggccatgaaggcccagttcgagcgcgacctgcagggcagagacgagcagagtgaagagaagaagaaacaattggtgcggcaagtgcgggaaatggaagccgagctcgaagatgaaagaaaacagcgcagtatggccgtcgccgcaaggaagaaactggagatggacctgaaagacctcgaggcccacatagattcagcaaataagaatagagacgaggctatcaagcagttgcggaagctgcaggcccagatgaaagactgcatgcgggagttagatgatacccgagcctcaagggaagaaattttagcacaggcaaaggaaaacgagaagaagttgaaaagtatggaggccgagatgatccaactgcaagaggagctggccgcagccgagcgtgccaaaagacaggcccagcaggaacgggacgagttggctgacgagatcgctaattcctcaggcaagggggcattggccctcgaggaaaagcggagattggaggccaggatcgcccagcttgaggaggagctcgaagaggaacaagggaacacagaattaatcaatgacagactcaaaaaggctaacctgcagatcgatcagattaacacagacttaaacctggagagatcacacgcccagaagaacgagaatgcacgccagcaactagagagacagaataaggaactgaaggtgaagttgcaggaaatggaaggtactgtgaagagcaagtacaaggcatctattacagcactcgaggcgaaaattgcccagttggaggagcagttggacaacgagacaaaggagcgccaagcagcatgcaaacaagtgagacgaactgaaaagaaactgaaggacgtgctcctgcaggtggacgatgagcgcagaaatgccgagcagtataaagatcaggcggacaaggcatccacacgcctgaaacagctgaaaaggcaactagaggaagccgaagaggaggcacagcgagcaaacgcctctcgacggaaactgcaacgcgaactggaggacgccacagaaaccgcagacgctatgaaccgcgaggtcagttcgcttaaaaacaaactgagaagaggggatcttccatttgtagtaccgcgaagaatggctaggaaaggcgctggtgacggctctgacgaggaggtggacgggaaggctgacggggctgaggctaagccggcagagtag

SEQ ID NO: 29665 - DNA, 657 bp, synthetic construct
  misc_feature 1..657: note = Description of Artificial Sequence: Synthetic coding sequence
  source 1..657: mol_type = other DNA
atggcccagcaggcagcagataagtacctctatgtggacaaaaatttcattaacaatcccctcgcccaggctgattgggcagctaagaaattggtgtgggtcccatctgataaatcagggttcgaacctgcttctctgaaggaggaggtaggagaggaagcaatcgtggagctcgtcgagaatggaaagaaagtgaaagtgaataaggacgatatccagaagatgaatcctccaaagttttccaaagtcgaggacatggccgagctcacatgtttaaacgaggcatccgttttacataatctgaaagagcgctactactcagggctgatatacacctacagtggcttattctgcgtcgtgataaacccttataagaacctgcccatttacagcgaagagattgtggagatgtataaaggcaaaaaacgccacgagatgcctcctcacatttacgctatcacggataccgcatatcggtccatgatgcaagatcgggaggatcagtccatcctgtgcacaggcgaaagcggcgcaggcaagaccgagaacaccaagaaggtgatccagtatttagcgtacgttgcaagcagccacaagtccaagaaagatcaggaggcctactttaagaaccgggctgttaggctcggggttctatag

SEQ ID NO: 29666 - DNA, 312 bp, synthetic construct
  misc_feature 1..312: note = Description of Artificial Sequence: Synthetic coding sequence
  source 1..312: mol_type = other DNA
atggctcagcaggcagccgataaatacctttacgtggacaagaacttcataaacaaccctctggcccaagccgactgggccgcaaagaaactggtttgggttccaagcgacaaatcaggcttcgagccagccagcttaaaagaggaggttggagaggaagcgatcgtggaattggtggagaatgggaagaaggtcaaagtgaataaagatgatattcagaagatgaatcccccaaagttctcaaaagtcgaggatatggccgagttgacttgcctcaatgaggcctccgtcctgcataatctgaaagagtag

SEQ ID NO: 29667 - DNA, 519 bp, synthetic construct
  misc_feature 1..519: note = Description of Artificial Sequence: Synthetic coding sequence
  source 1..519: mol_type = other DNA
atgagctcgaagagagcgaaggctaagacaacaaaaaagcggccacagcgagctaccagtaacgtgttcgccatgtttgaccagtctcaaattcaggagttcaaggaagctttcaatatgatcgaccaaaatcgggatggcttcattgataaagaggacctgcacgacatgctggcaagtcttggaaagaacccgactgatgaatacctcgaaggcatgatgtctgaggcccctggccctatcaactttacaatgtttctcacgatgtttggggagaaactgaacggaactgatcccgaggacgtgatccggaatgctttcgcgtgtttcgacgaagaggcctcagggttcattcatgaagaccatttgagagagctgctgaccacaatgggcgaccgtttcacagatgaagaggtggatgaaatgtacagagaggccccaatcgacaagaagggtaatttcaactacgttgagtttacccgcattctgaaacatggagctaaagacaaggacgattag

SEQ ID NO: 29668 - DNA, 357 bp, synthetic construct
  misc_feature 1..357: note = Description of Artificial Sequence: Synthetic coding sequence
  source 1..357: mol_type = other DNA
atgtccagtaagagagctaaggctaagaccaccaagaagaggccacagcgggcaacatccaacgtgttcgcaatgttcgatcagagccagatccaggaatttaaggaggccttcaacatgatcgaccagaatcgcgacggattcattgacaaggaggacttgcacgatatgcttgctagccttgggttcatccatgaagaccacctgcgggagttgctgacaactatgggggaccgattcacggacgaagaggtcgacgagatgtatagggaggcacctattgataagaagggtaattttaattatgtggagtttaccagaattcttaagcacggagcaaaggataaggacgactag

SEQ ID NO: 29669 - DNA, 927 bp, synthetic construct
  misc_feature 1..927: note = Description of Artificial Sequence: Synthetic coding sequence
  source 1..927: mol_type = other DNA
atgcaggaactcacgctgtccccaggacctgctaaactgacccctaccttggacccaacccatagaatggaattaattctcagcaccagccccgctgagctgaccttagatcccgcttgtcagccaaaactccctctcgacagcacttgtcagccagagatgactttcaaccctggccctactgagcttaccctggatccagagcaccagcctgaggagacacccgctccttccctggcagaactcacactagaacccgtgcacaggcgccctgagctgctggatgcctgcgccgatctgatcaacgatcagtggccgcgttctaggacttcaaggctacattccctcggccagtcctctgacgcatttcctctgtgtctgatgctgctctctccacaccctactctggaggctgcacctgttgtggtaggacatgcgcgattatctagagtgctgaaccagccacagtccttgcttgtggagaccgtcgttgtagcacgggctttaagaggaaggggattcggcaggaggctcatggaggggctggaagtctttgccagggctaggggatttagaaaactccatttgactactcatgaccaggtacacttctacacacacctaggataccagttgggagaaccagtgcaagggctggtcttcacgagtaggcggctgcctgcgactctccttaacgccttccccacagccccatcccccaggcctcccagaaaagctccaaatctgactgcccaggctgcccctaggggtcctaagggtccacctcttcctccccctcctcctctaccagagtgcctaacaatttctcctccagtcccttccgggcctccatctaaatccctgctggaaacgcagtatcaaaacgtgcggggtagaccgattttctggatggagaaagatatttag

SEQ ID NO: 29670 - DNA, 861 bp, synthetic construct
  misc_feature 1..861: note = Description of Artificial Sequence: Synthetic coding sequence
  source 1..861: mol_type = other DNA
atggaactgattctgtccacttcacctgctgaacttactctcgatcccgcttgtcagccaaaattgccccttgactctacctgtcaacccgaaatgacattcaaccccggacccaccgaattaacccttgatccagaacaccagccagaggaaacgcctgccccaagcttggccgagcttactctcgaacctgtccaccgcaggcccgagctcctcgacgcttgcgccgacttgattaatgaccaatggccacgctccagaacaagcagactgcatagccttggtcagagctccgacgccttccctctgtgccttatgctccttagccctcaccctactctggaggcagctccagtggtagtcgggcacgcccgtctgtccagggtacttaatcagccgcagagtctgctggtcgaaactgtcgtggtggctagagccttacgtggcagagggttcggtagaaggctcatggaaggtttggaggtctttgctcgcgctaggggcttcagaaaactgcacctgactacacatgatcaggtccacttttatacacacctgggctatcagctcggggagcccgtacaaggcctcgtgttcacctccagacgcctgccagctactctcctgaatgcattccccaccgctccctcccctcgtccgccacgtaaggcccctaatctgaccgcccaggctgcacctcgtggccctaaggggccaccactgcctcctccccctcctttgcctgaatgcttgaccatcagcccacccgtacccagtggccctccctccaaaagcctcttggaaacacagtaccaaaacgtgagaggtaggccaatattttggatggagaaagatatttag

SEQ ID NO: 29671 - DNA, 174 bp, synthetic construct
  misc_feature 1..174: note = Description of Artificial Sequence: Synthetic coding sequence
  source 1..174: mol_type = other DNA
atggaactgatactgtccacgtcacccgctgaattaactctcgaccctgcttgtcaacctaagctgccccttgatagcacttgccagcccgagatgacatttaacccagggccaactgagctgactttggatcccgagcaccagcctgaggagacacctgccccaagtctatag

SEQ ID NO: 29672 - DNA, 861 bp, synthetic construct
  misc_feature 1..861: note = Description of Artificial Sequence: Synthetic coding sequence
  source 1..861: mol_type = other DNA
atggaactcatcctgagtacctccccggctgaattgaccctggacccggcttgtcagcccaagctgccgctcgattccacctgccagccagaaatgacatttaatcccggacctaccgaactgacactggacccagagcatcagccagaggaaacgcctgctccatccctagcggagttgactctggagccggtgcatagaaggcctgagctgcttgacgcatgcgccgacctaattaatgaccagtggccccgaagcaggacatcgagactccattcgctgggacagtcttctgatgcgttccccctctgtctcatgctgctgagtccacatcccacattagaggctgcgccagtcgttgtcgggcatgctagactgagtagggtcctgaaccagccccagtcattactggtagagaccgtggtggtggcgcgtgcgttgagaggtcggggttttggcagaaggctaatggagggtctggaggtatttgcacgtgctcgcggattcagaaaactacacttgaccacccacgatcaggtccatttctatacacatctagggtaccaactgggagagcctgtgcaaggcctcgtcttcactagtaggcgtctgcccgctacactcctgaacgctttccccaccgctccgtccccacgcccacccaggaaggctcctaatctgactgcccaagcagccccacgagggcctaaaggtcctccgttaccacctccaccgccattgcccgaatgtttgacaattagtcctccagtgccatcaggcccaccaagcaagtctctcttggaaacccagtatcagaacgtgcgcggtcggcctattttctggatggaaaaagatatctag

SEQ ID NO: 29673 - DNA, 861 bp, synthetic construct
  misc_feature 1..861: note = Description of Artificial Sequence: Synthetic coding sequence
  source 1..861: mol_type = other DNA
atggaactgattctaagcacatcccccgctgagttaaccctggatcctgcatgccaaccaaagctgccgctggattcgacatgtcagccagagatgaccttcaatcctggaccgaccgaattaacgctggaccctgagcatcaacccgaggagacccctgcgccatcgttggctgagctgacactggaacccgttcatcggagacccgaactgctggatgcctgtgctgatctgattaatgatcagtggcccagatcccggacttcaagattgcatagcctgggccaaagcagtgatgcgttccccctttgtctgatgctgcttagcccccaccctacgctcgaggcagccccagtggtggtgggccacgctaggttgtcccgggttctgaaccagccccagtcccttttggtggaaacagtggtggtcgccagagccctacgaggccgaggctttggtcgcagactgatggaggggctggaagtctttgcacgggcacggggtttccggaagttgcacctgacaacgcacgatcaagtgcacttctacacacatctgggttaccagctgggggagccagttcagggcctcgtcttcacctctcgccgactcccagctactttgcttaatgcattcccaactgccccttctcctcggcctccgaggaaggctcctaatcttacagctcaagccgctccacgcggacctaaagggccaccactccctccacctccgcctttaccagagtgccttacaattagcccccctgtgccctcaggccctccttccaaatcgctactggaaacgcagtaccaaaatgtgcggggacggccaattttctggatggaaaaagacatatag

SEQ ID NO: 29674 - DNA, 261 bp, synthetic construct
  misc_feature 1..261: note = Description of Artificial Sequence: Synthetic coding sequence
  source 1..261: mol_type = other DNA
atggagctgattctgtcgaccagtcctgccgagctgacactggacccagcgtgtcagccaaagctgcctctcgatagtacgtgccagcctgaaatgacattcaatccaggacccactgaactgacgctcgaccctgagcaccagccggaggagacgcccgctccaagccttgccgaactgaccctggagcccgtgcatcggcgacccgaactgttggatgcttgcgcggacctaatcaatgatcagtggccacgctcctag

SEQ ID NO: 29675 - DNA, 30 bp, synthetic construct
  misc_feature 1..30: note = Description of Artificial Sequence: Synthetic coding sequence
  source 1..30: mol_type = other DNA
atggagttaatactcagcacatccccctag

SEQ ID NO: 29676 - DNA, 987 bp, synthetic construct
  misc_feature 1..987: note = Description of Artificial Sequence: Synthetic coding sequence
  source 1..987: mol_type = other DNA
atggcggagcttcaggaggtgcagattactgaggagaaaccgctcttgcccggtcagacgcctgaagccgctaagactcacagcgttgaaaccccttacggatcggttactttcacagtttacggaacgcctaagccaaaaagaccggctatcctgacataccacgacgtgggactcaactacaaaagctgttttcagcccctgttccagttcgaggatatgcaggaaatcattcagaactttgtgcgagtgcacgtggatgcacctggtatggaggaaggcgcaccagttttccctctaggctaccaatatcctagtctcgatcaattggctgacatgattccctgtgttttgcagtatctgaacttctcgacaattattggcgtgggggttggtgctggagcttacatcttagcacggtacgcgctcacagggctgactagctccataccagagatgatactgggacatctctttagccaggaagagctgtcagggaatagcgagctaattcagaagtaccgtaacatcataacgcatgccccaaaccttgataacatagagctttattggaacagttataacaacagacgtgaccttaattttgaaaggggaggcgacattaccttgcggtgcccagtaatgttggtggtgggggaccaggccccacatgaggatgcagtggtggaatgtaattccaagctggaccctactcagaccagtttcctcaaaatggccgacagcggtggtcagccgcagctgacacagcccggtaaactgacagaggcatttaagtattttttgcaagggatgggctacatggcctctagctgcatgacccgactgtctagatcgcgtacggcgagtctgacttccgctgcctcagtggatgggaatcggtctagaagcaggaccttatcccaatcgtccgagtctggcacgctgtcttcaggaccccctggtcacaccatggaggtcagctgttag

SEQ ID NO: 29677 - DNA, 1116 bp, synthetic construct
  misc_feature 1..1116: note = Description of Artificial Sequence: Synthetic coding sequence
  source 1..1116: mol_type = other DNA
atggctgaactgcaggaagtgcagattacagaagagaaacctctgcttccagggcagacacctgaagccgctaaagaggcagaattagccgctaggattctgctggaccagggacagacacatagcgtagagactccttacggtagtgtcacattcaccgtgtacggaactccaaaacccaagagacctgcaattttaacctatcacgatgttggcctcaactacaagagttgctttcagccattatttcaattcgaggacatgcaggagatcatccaaaacttcgtccgggtgcacgttgacgcccctggaatggaggaaggcgctccggtcttccctctaggataccagtatccaagcctggatcagctggctgatatgataccctgtgttcttcaatacctgaacttttctacaattatcggcgtgggcgtcggagctggagcctatatactggccaggtatgccctgaatcaccctgacaccgtcgagggattggtcctgatcaacatcgacccgaacgctaaaggatggatggactgggcggcacacaaattgaccgggttgacttccagtataccggaaatgatcctgggccacctgttttctcaggaggaactcagcggcaacagcgaactgattcaaaagtacagaaatattatcacccatgctccaaatttagacaacatagagctgtattggaactcttacaacaatcgccgtgacctcaattttgaacgcggtggagacatcacattgcgatgccccgtgatgctggtcgtaggcgatcaggcccctcacgaagacgccgtcgtggagtgcaattccaagttggacccaacacagacctccttcctcaaaatggccgacagtgggggacagccacagctcacccaacccggtaagttgacagaagccttcaagtatttcctgcagggaatgggatacatggcctctagttgcatgacaaggctttctagatccagaaccgcttctctgacaagcgcagcaagtgtcgacgggaaccgttccaggtccaggaccctctcccaaagcagtgaatccgggaccctgtccagcggtcctccaggacacacaatggaagtgtcctgttag

SEQ ID NO: 29678 - DNA, 1074 bp, synthetic construct
  misc_feature 1..1074: note = Description of Artificial Sequence: Synthetic coding sequence
  source 1..1074: mol_type = other DNA
atggccgaactgcaggaggtgcagatcaccgaggaaaagccactgctgccgggtcagacgcctgaggcagccaaaacacactctgtggagacaccgtatggatcggtcacatttactgtgtacggtactcctaagccaaagagacctgcgatcttaacatatcacgacgtagggctcaactataagtcttgctttcaacccttgttccaattcgaagatatgcaggaaattatccagaatttcgtgagagtccacgtggacgcaccaggtatggaagaaggtgcaccggtgttccctctcggctaccagtatcccagtttggatcagctcgcagatatgataccgtgtgttttgcagtatctcaatttctctacaatcatcggcgttggcgtcggtgcaggggcatatatcctcgcgagatacgccctaaatcaccccgacactgtggagggcctggttttaataaatatagatcccaatgcaaaagggtggatggactgggccgctcacaagctcactggactgacctcaagcatccctgagatgattctcggtcatttattttcccaagaggaactgagcggaaactcagagctgatccaaaaataccgcaacattattacacacgcccctaacctggataacatcgagctgtactggaactcttataataacaggagagatttgaactttgagagaggtggggatattacactccgatgtccagtgatgttggttgtgggagatcaggcccctcacgaggacgctgtcgtggaatgcaacagcaagctggatcccacacagacgagcttcctgaagatggccgacagcgggggacagccgcagcttacccagcctggcaaattgactgaagcattcaagtattttctgcagggaatgggatacatggcaagtagctgtatgaccaggctgagtcggtcccgtactgcgtcccttacctccgccgcttcagtagatggcaacaggtctaggtcacggaccctcagccagtcttcagagtccgggaccctgtctagtggccctcctggacacacgatggaggtgtcttgttag

SEQ ID NO: 29679 - DNA, 1074 bp, synthetic construct
  misc_feature 1..1074: note = Description of Artificial Sequence: Synthetic coding sequence
  source 1..1074: mol_type = other DNA
atggccgagttacaggaggtgcagatcacagaggaaaagcccctcctccccggtcagacccccgaagctgccaaaacccactctgtggagacaccatacggaagcgtgacatttactgtgtacggcacccccaaacccaaaaggcccgctatcttaacctatcatgacgtaggcttgaactataaatcctgtttccagccgctgtttcaatttgaagatatgcaggagattatccagaactttgtgcgcgtccacgttgatgcaccgggaatggaggaaggagccccagttttccctttgggttatcagtaccctagtttagatcagctcgcggatatgatcccatgtgtgctccaatatctaaacttctccacaatcatcggcgtcggcgtgggcgctggcgcttacattctggccaggtacgcgctaaatcatcctgacaccgttgagggtttggtccttattaacatcgaccccaatgccaaaggatggatggattgggccgctcacaaattgacaggtctaacttcaagtatccctgaaatgattcttggacatctgttttcccaggaggaacttagcggaaattcggagctgatccagaaataccggaatatcatcacacacgcccctaacctcgacaatattgagttgtattggaattcttataacaaccgacgagacctgaatttcgagcgcggaggcgatattactctgcgctgccccgtgatgctggttgtcggagaccaggctccccatgaagacgcagtggtagaatgtaacagcaagttagatcctacacagacatctttcctaaagatggccgatagtggcggacagccgcagctgacacagcctggtaaactcaccgaggccttcaagtacttcctgcagggaatgggctacatggcgtcatcgtgtatgaccagactgagccgaagccgaactgcatctctgactagcgcagcaagcgtcgatggaaataggagtagatcaagaaccttatcacaaagcagcgagagcggtacactcagcagtggcccaccaggccacactatggaagtgtcttgctag

SEQ ID NO: 29680 - DNA, 1026 bp, synthetic construct
  misc_feature 1..1026: note = Description of Artificial Sequence: Synthetic coding sequence
  source 1..1026: mol_type = other DNA
atggcggaactgcaggaggtccagatcacagaggagaagcccctgctgcccggacaaactccagaggcggctaagactcactcagtggaaactccttacgggtcagttacgttcacggtgtatggcacacctaagcccaagaggcccgcaattctgacatatcatgatgtgggacttaattacaaatcctgctttcagcccctcttccagtttgaggatatgcaagaaatcatacagaacttcgttcgcgtgcacgtagatgctccaggaatggaggagggtgcaccagtcttccctctgggataccagtatccgagtttggatcagctcgccgacatgattccctgcgttctccaatacctgaactttagcacaataataggggttggggtcggggctggcgcatacatactggctcgatacgctctgaatcaccccgatactgtggaggggctcgtgctgataaatattgaccctaatgccaagggatggatggattgggcagcccacaaactcaccgggctgacttcctcgatccccgaaatgatactgggacacctgttctcccaggaagaactcagcggtaattccgagctgatacagaaataccggaacatcataactcatgctcccaacctggacaacatcgagctttattggaacagttataacaaccgacgcgatttgaattttgagagaggcggagacataaccctgcgctgcccagtcatgctggtagtaggggaccaggccccacacgaggatgccgtcatggcagactctggcggacagccacagctcacgcaacccggaaaactcaccgaggcttttaagtactttctgcagggcatgggctatatggcaagctcctgcatgactagactgtcgcgaagccggacagcttctctgactagcgccgcatctgtggatgggaaccgttcaagatcacgcacgttaagtcaatcttctgagtccggaacactctctagtggccctcccggacacacaatggaagtgtcctgttag

SEQ ID NO: 29681 - DNA, 1083 bp, synthetic construct
  misc_feature 1..1083: note = Description of Artificial Sequence: Synthetic coding sequence
  source 1..1083: mol_type = other DNA
atggcagaactgcaagaagtgcagataactgaagagaagcccttattaccaggacaaactcctgaggccgctaaagaggcggagctcgccgctcggatcttactcgatcaaggacaaacccacagcgtagaaactccttacggatcagtcacatttaccgtttatggaactcctaagcctaagagaccggcaattctgacgtatcacgatgtcggtctgaattataagtcttgttttcagccactgttccaatttgaggatatgcaggaaatcatccagaacttcgtgcgggtacacgtggatgcgccaggcatggaggaaggcgcacccgtgtttcctctgggataccagtaccccagcttagatcagttggccgacatgataccctgtgtgctacagtatctgaatttctccacaatcattggagttggtgtaggtgcaggggcatatattctggctaggtatgctctaaaccatcctgataccgtggagggcctggtgctgatcaacatcgatcctaatgccaaaggctggatggactgggcggctcacaaactcaccggactgacctccagcatccccgagatgatcctgggacacttgttctcccaggaagagctctcgggaaactccgagctgattcaaaaatatcgcaacattattacgcacgcacctaacctcgataacatcgaactctattggaactcatataataaccgcagagacctgaactttgagagagggggagacattactctgcggtgcccagttatgctggtggtggagtgtaattctaagttagatcccacacagacttcttttctgaagatggccgactctggtggtcagccccagctgacacagccaggcaaactaaccgaagcctttaagtatttcctacaaggaatgggctacatggcttcttcttgtatgacacggctcagtagatcccgcactgcgtccttgacatcagctgcatctgtcgacggcaatcgcagcaggtcccgcacgctttctcagagctccgaaagtggaaccctgagctctggccctcctggacatactatggaggtgagctgctag

SEQ ID NO: 29682 - DNA, 1116 bp, synthetic construct
  misc_feature 1..1116: note = Description of Artificial Sequence: Synthetic coding sequence
  source 1..1116: mol_type = other DNA
atggctgagctgcaggaagtccagattactgaggagaaaccgcttctgcccggacaaacccctgaggcagctaaagaggcggagctcgccgctcgtatcttactggaccaaggccagacccattcagtggaaaccccgtacgggagcgttacatttaccgtgtacggcacgcccaagcccaaacgtccggctatcttaacttaccatgatgtagggcttaattacaaatcttgttttcaacctttgttccagtttgaggatatgcaggaaataattcagaattttgtgagagtgcatgtggacgccccaggcatggaggaaggagctcctgttttccctctgggataccaatacccttcacttgaccaactcgccgacatgatcccttgcgtgctccagtacctgaactttagcacaatcattggagtaggggtgggcgctggcgcttatattttggctaggtatgcactgaaccacccggataccgtggaggggctggttttaatcaatatcgatcccaatgcaaaaggctggatggactgggctgctcataagctcaccggtcttacatcctcgatccccgagatgatcttgggccatctgttctcacaggaagaattgagcggcaattccgaactgatccagaagtatcgcaacatcatcacccatgcacccaatctggataacatcgaactgtattggaacagttataacaacaggagagacctgaatttcgagagaggcggagatatcactctccggtgtcccgtgatgcttgtagtcggggaccaggccccacatgaggatgcagtggtcgaatgtaatagtaaactggatcctacccaaacctcgttcctgaaaatggcagatagcggtggccagccacagctgacccagcccggaaaactgactgaggcctttaaatatttccttcaaggtatggggtatatggccagcagctgtatgacacgcctgtccaggtccagaaccgcaagcctgacctcagccgcatccgtagacggcaatcgatccagatcaaggaccctttcccagtcatccgaatctggcaccctgtcttcaggtccccctggccatactatggaggtcagctgctag

SEQ ID NO: 29683 - DNA, 1116 bp, synthetic construct
  misc_feature 1..1116: note = Description of Artificial Sequence: Synthetic coding sequence
  source 1..1116: mol_type = other DNA
atggctgaactccaggaagtccaaattacagaagaaaaaccacttctccctggccagacaccggaagcggctaaagaagcggagttggccgctcggatcctgctggatcaagggcagacacattcagtggagaccccttacggctccgttacttttacggtctacgggacaccgaagcctaagcgcccagccattctcacgtaccatgatgtggggttgaattataaatcttgttttcagcctctgttccagttcgaggacatgcaggagatcatccagaattttgtgcgggtgcacgttgacgcgccagggatggaagaaggcgctcctgtgttcccactagggtaccagtatccatcactggatcaacttgctgatatgattccctgcgtgctgcaatatctgaacttttccacaatcattggggtcggcgttggagcaggcgcatacattttagctagatatgcactcaaccaccccgatacagtcgaaggtctggttcttataaacattgaccctaatgctaaaggttggatggattgggctgcccacaagttgacagggctgacctccagcatcccagagatgattttgggtcacctgttctcgcaggaggagcttagcggcaattcggaactgatccagaagtatcgcaacatcatcactcatgcacccaatctggacaatatcgaactgtattggaacagctacaacaacagacgggacttgaatttcgaacggggaggggatatcactctcaggtgccccgtgatgttggtcgttggggatcaggcaccacacgaggacgccgttgtggagtgcaattccaaactagaccccacccagactagctttctaaagatggccgatagtggcggtcagcctcagctgacgcaaccaggcaaactgaccgaagcattcaagtacttcctgcagggaatgggatacatggcatccagttgtatgacacgcctatcgaggagcaggacagcaagcctgacgtcagccgcttcggtggacggcaatagatctcgcagtcggacactgagtcaatcatctgaaagtgggactctctccagcggtccaccagggcatactatggaagtctcatgttag

SEQ ID NO: 29684 - DNA, 987 bp, synthetic construct
  misc_feature 1..987: note = Description of Artificial Sequence: Synthetic coding sequence
  source 1..987: mol_type = other DNA
atggctgaactacaggaggtccagatcacagaggagaagccactgctgcctgggcagacacccgaagccgcaaagactcactcagtcgaaactccttatgggtctgtaacatttacggtgtacgggacacccaagcctaaacggccagccattttaacgtatcacgacgtgggactgaactacaagtcgtgcttccaacctctcttccaatttgaggatatgcaggagataattcagaatttcgtccgtgtgcacgtggatgccccagggatggaagagggtgcacctgtgttccctctggggtatcaataccccagtctggatcaactggcagatatgataccttgtgttctccaatatctcaacttctcaacgatcatcggtgtgggtgtaggggctggagcttacattctggcccgatatgcgctgacgggcttgactagcagcatccctgaaatgatcctgggtcatctctttagccaggaggaactgagtggaaactcagagctcatccaaaagtaccgtaacattattacacacgccccaaacttggacaacattgaactgtactggaactcttataacaataggagggacctgaacttcgagcgaggaggcgacattaccctgcgctgccctgttatgcttgtcgtgggtgaccaagcaccccatgaggatgccgttgtggagtgcaacagcaagcttgaccctacccagacctcattcttgaaaatggctgatagcgggggacagccacagctcactcagccaggaaagctcacagaggcatttaaatacttcctccagggcatgggatacatggccagctcctgtatgaccagactcagcagatcccgaactgcatctctgactagtgccgcttccgtggacggaaaccgatctcgttcccgtacactctcgcagtcgagtgagtcaggtactctttcctccggacccccaggccacactatggaagtgtcgtgctag

SEQ ID NO: 29685 - DNA, 1026 bp, synthetic construct
  misc_feature 1..1026: note = Description of Artificial Sequence: Synthetic coding sequence
  source 1..1026: mol_type = other DNA
atggctgagcttcaagaggttcagataactgaggaaaaacccctgcttcccggtcagacacctgaggctgcaaagactcactctgtggagacaccctacgggagcgtaacatttacagtgtacggtacgcccaagcccaagcgaccagcaatcttgacatatcacgatgtggggttgaattataagtcatgtttccagcctctgtttcagttcgaagatatgcaggagattatccagaatttcgtacgagtgcatgtggatgccccaggtatggaggaaggtgctccagtgttcccacttgggtaccaatatccttccctcgaccagcttgcagacatgatcccttgtgttctacagtatctgaatttctctacgatcatcggggtcggggtgggagcaggcgcttatatcctggcacggtacgcgctaaaccacccagacaccgtcgaggggttggtgctgataaacatagaccccaacgcaaaaggctggatggactgggccgcacataaattgacaggtctgacatcctcaattccagagatgatcttggggcacttgttttcacaagaggaactgtccggaaactccgaactcatccagaaatatcgtaacattataacccacgcccctaatcttgacaacatagagctatattggaatagttataataacaggcgcgatctgaattttgagcggggaggggacattacacttcgatgtcctgtaatgctggttgttggcgatcaggctccccacgaggacgctgtcatggccgattccggtggccaacctcagctgacgcaaccaggcaagctgaccgaggcctttaaatactttcttcaaggtatgggttacatggcctcttcttgtatgacgaggctgtcgaggtctcggacagcctcacttacgtccgccgcttccgttgacggcaacaggtcccggagtcgcacactgagccagtcctctgagtccggcaccctctcttccggcccaccaggtcacaccatggaggtgtcctgttag

SEQ ID NO: 29686 - DNA, 1116 bp, synthetic construct
  misc_feature 1..1116: note = Description of Artificial Sequence: Synthetic coding sequence
  source 1..1116: mol_type = other DNA
atggcagagctacaggaggtgcaaatcacggaagaaaaaccactgttaccgggacaaacacccgaagcggctaaggaagcagaactggccgcacgaatcctgctggaccagggccagacccatagtgtggagacaccatatgggtcggtcacattcactgtttacgggactcccaaaccaaagagaccggctatcctaacctatcatgacgtgggcctcaattataaatcttgtttccagcccctatttcagttcgaggatatgcaggaaatcattcagaacttcgtgagggtgcatgtggacgcccctggtatggaagagggagctcccgtctttccgctaggttaccagtacccttcccttgatcagctggccgacatgatcccctgcgtcctccagtatctgaatttcagcactataatcggcgtgggagtaggcgctggcgcttatattctcgctagatacgcgctcaaccatccggacactgtcgagggactagtgttgatcaacattgacccaaatgccaagggatggatggattgggccgcacacaaactcactgggctgacatcgagcattcccgaaatgatccttggccacctgtttagtcaggaagaactgagtgggaactccgaactcatccagaaatatagaaacatcattacccatgctcctaacctggataacatcgagctgtattggaacagttataataaccgcagagatctcaacttcgagaggggcggtgatatcactctcaggtgccccgtcatgctggtcgtgggtgatcaagcacctcatgaagacgcagtcgtggagtgtaatagtaaactggatccaacccagacgagtttcctcaaaatggccgattctggaggtcaacctcagctcacccaaccaggaaagctgacagaagccttcaaatactttctgcagggaatgggctacatggctagcagctgtatgacccggctgtcccgcagcagaacagcttcgctgacctctgctgcttcggtggacggcaatagatcgagaagtcgaacgctctcacagagctcagaatcaggcaccctgtcttccggccctcccggacacaccatggaggtctcctgctag

SEQ ID NO: 29687 - DNA, 1104 bp, synthetic construct
  misc_feature 1..1104: note = Description of Artificial Sequence: Synthetic coding sequence
  source 1..1104: mol_type = other DNA
atggagaacgggggaagtatgcaggctacaatggccgagctgcaggaggtgcaaatcacagaggagaagcccttgctcccaggtcagacaccagaagcggcaaagacccactcagtggagacaccgtatgggtcagtaacctttactgtctatggcactcctaagcctaagcggcctgccatactcacttaccatgacgtcggccttaattataagtcttgtttccagccactctttcagttcgaggacatgcaagaaataatccaaaattttgtgcgggtccatgtggacgcgcctggcatggaagagggtgctcccgttttccccttgggataccagtacccaagccttgaccagcttgcggacatgattccgtgcgttctacagtacctgaatttctctacaattatcggcgtgggtgtcggcgctggagcttacattttggcgaggtacgctcttaatcaccccgacactgttgaaggacttgtcctgatcaatatcgacccgaacgctaaaggatggatggactgggcggctcacaagctgacgggcctgacaagttccataccggagatgatacttggtcatctgtttagtcaggaggaactctccggaaatagtgagttaattcagaaataccgcaatataattacccacgccccaaatctggacaacatcgagctctactggaactcatataataacaggcgggaccttaactttgaaagggggggtgacatcacgcttcggtgccccgtcatgttggtggtaggtgatcaggctcctcatgaggatgccgtggtcgagtgtaatagtaaactcgatccaacccagacgagttttctcaaaatggcagattctgggggacagccacagctgacccaacctggcaaactgaccgaagcgtttaaatactttctccaggggatgggctatatggccagcagttgtatgacacggctgtctaggagtagaacagcgagcttaactagtgctgcctctgttgacggcaatcgatctagatcaagaaccctgtcccaatccagcgagtcgggaactctgtcatctggacctccaggccatactatggaagtgagctgttag

SEQ ID NO: 29688 - DNA, 504 bp, synthetic construct
  misc_feature 1..504: note = Description of Artificial Sequence: Synthetic coding sequence
  source 1..504: mol_type = other DNA
atggctgagctccaagaagtccagattacagaagaaaagcctttactacccggacaaacacccgaggccgcaaagacccatagtgtggagacaccatatggctccgtgaccttcaccgtgtacggtacgcctaaaccaaaaaggcctgccatcttgacatatcatgatgttggcctgaactataagagttgtttccaaccactgtttcaattcgaagatatgcaagagattattcagaattttgtacgagttcacgtagatgctccagggatggaagagggcgcaccggtattccctctaggctaccagtacccttcacttgatcaattagctgacatgatcccctgcgttcttcagtaccttaatttctctacaataatcggagtgggagtgggcgctggtgcatatatcctggcaaggtatgctttgaatcacccggacactgtggagggcttggtgttgatcaatattgacccgaacgccaagggctggatggactggtag

SEQ ID NO: 29689 - DNA, 1074 bp, synthetic construct
  misc_feature 1..1074: note = Description of Artificial Sequence: Synthetic coding sequence
  source 1..1074: mol_type = other DNA
atggcagagctgcaagaagtgcagatcaccgaggagaagccgctgctgccaggccaaacgccggaagcagcaaagactcatagcgtggaaaccccctatggaagcgtcactttcaccgtctacggcacccctaaaccgaaacggcctgctattcttacatatcatgacgtagggcttaattataaatcttgcttccagccattgttccagttcgaggacatgcaggagatcatccagaattttgttcgcgtgcatgtcgacgcccctggcatggaggaaggagccccagtgttcccgctcggatatcagtacccctcactggaccagttggccgacatgatcccttgtgtactgcagtacttgaatttctccacaatcatcggcgtgggagtaggagctggggcatacatcctggctaggtacgcccttaatcatcccgacaccgttgaggggctcgtgctcattaacatagatccgaacgccaagggatggatggactgggctgcccataaattgaccggcctcactagctcaatcccagagatgatcctgggacacttatttagtcaggaggagctgtccggaaatagcgagctgattcaaaaatatcggaatatcattacgcacgcaccgaacctcgacaacatagaactgtactggaattcctataacaatcggcgagaccttaattttgaacggggtggagatataacactaagatgtcctgtaatgctggtcgtgggagatcaggcacctcacgaggatgcagtggtggagtgtaatagtaagctggatccaactcagacttcattcttaaagatggcagattcgggtggacaaccccagctgacacagccaggcaaactcacggaggcattcaagtactttcttcagggcatgggttacatggcttcatcttgcatgacgagattatcgcgaagcagaaccgcctcactgacgagcgctgcctccgtggatgggaatcggagccgcagccgcaccttgagtcagtcttccgagagcggcacattatcttctggccctcctggacacaccatggaagtgagctgttag

SEQ ID NO: 29690 - DNA, 522 bp, synthetic construct
  misc_feature 1..522: note = Description of Artificial Sequence: Synthetic coding sequence
  source 1..522: mol_type = other DNA
atggccgaactgcaggaagtgcaaatcacagaggaaaagcccctgttacccggtcagacgcctgaggctgctaaggaggcggagctcgcagccaggatcttactggatcagggccaaactcatagcgttgagacaccatacggatctgtgactttcacggtttatggcacgcccaagcccaaaagacctgccattctcacataccatgacgtggggctcaattacaagtcttgttttcagcccttatttcagtttgaagacatgcaggagattatccagaattttgtgcgcgtgcatgtggatgctccaggaatggaggaaggggctccagtgtttcctctgggataccagtatccgtccctggatcagcttgcagatatgattccatgcgtgctccagtacctcaatttcagtacgattattggggtaggcgttggggcaggcgcttacattctggctaggtacgcactcaatcatcccgacactgtagaaggccttgtgttgatcaatattgatccatag

SEQ ID NO: 29691 - DNA, 759 bp, synthetic construct
  misc_feature 1..759: note = Description of Artificial Sequence: Synthetic coding sequence
  source 1..759: mol_type = other DNA
atggcagagctccaagaggtgcagattaccgaggagaaacccctgttgccaggccagactccagaagcagcgaaggaggcggagctggccgctaggatcctgctggatcagggccagacccatagcgtggagacaccttacggcagtgtgactttcacagtgtatgggacgcctaaaccgaagcgcccagcaatactcacttaccatgatgttgggctgaattataaaagctgtttccaacctcttttccagttcgaggatatgcaggaaatcatccagaacttcgtccgggtacatgtggatgcaccaggaatggaggagggggctcccgtgtttccgttaggataccagtatccttcactggatcagttggcagacatgattccttgcgtgctgcaatacctgaacttctcgacaataattggagtcggcgttggagccggagcttacattctagccaggtatgctctgaaccatcctgatactgtcgagggactggttctgattaacatcgaccccaacgcaaagggttggatggactgggcagctcacaagctcactggcctaactagttccatcccagagatgatcctcggacaccttttcagccaggaagagctctcagggaatagcgagctcattcagaagtaccgaaacattatcacacatgcccctaacctcgacaatatcgagctctactggaactcttacaacaaccggagggacttaaacttcgagcgcggaggtgacataacttag

SEQ ID NO: 29692 - DNA, 525 bp, synthetic construct
  misc_feature 1..525: note = Description of Artificial Sequence: Synthetic coding sequence
  source 1..525: mol_type = other DNA
atggctgagctacaagaggtgcagataactgaagagaaacctctgcttcctggtcaaacaccagaggctgccaaaacccacagtgtcgagacgccttacggctctgttaccttcaccgtctacggcactcctaaacccaagaggccagcaattttgacttaccatgacgtggggctgaactacaagagctgttttcagcctctgttccagtttgaggacatgcaggagatcattcagaacttcgtacgagtgcacgtcgatgcacccggtatggaagagggtgctcctgttttccctcttggctatcaatatcccagcctagaccagctagctgatatgataccctgcgtgcttcaatatctgaactttagcactatcataggggtgggcgttggcgctggagcttatatccttgctcggtacgccctaaatcatcctgataccgtagagggtctggtccttattaacatcgaccctaacgccaagggttggatggattgggcagctcacaaactgactgggtag

SEQ ID NO: 29693 - DNA, 1074 bp, synthetic construct
  misc_feature 1..1074: note = Description of Artificial Sequence: Synthetic coding sequence
  source 1..1074: mol_type = other DNA
atggcagagctgcaggaggtgcagatcaccgaagaaaaacctctgctcccagggcagactcccgaagccgctaagactcacagcgtggagacaccctatgggtctgtgactttcaccgtatacggaacaccgaagccgaaaaggcccgctattcttacttatcacgatgtcgggctgaattacaagtcctgcttccagcctctcttccagttcgaagatatgcaagagataattcagaatttcgttagggtccatgtagatgcccctggcatggaagaaggagcaccagtctttcccctaggttatcagtacccaagtttagaccaactcgccgacatgatcccctgtgtcctgcagtacttgaattttagtaccattatcggggtgggtgttggcgcaggggcatatattctggcccgatatgccctgaaccaccccgacacagttgaaggactggtacttataaacattgatccgaatgccaaaggttggatggattgggcggcacacaagctgaccggacttacctcatcgattccagaaatgattctgggccacttattttcacaagaagaactgagcggtaattccgaattgattcaaaaatacagaaacattataacacatgccccaaacctggataatattgaactgtattggaacagctacaacaaccgacgggacctgaacttcgagcgcggtggggatattactcttcgctgccccgtgatgttggtggtcggagaccaggcccctcacgaggatgccgttgtcgagtgtaactccaaacttgacccgacccaaacatctttcctcaagatggctgatagcggcggtcagcctcagctcacccaaccgggaaaactgactgaggcattcaaatactttcttcagggcatgggttacatggcctcaagctgcatgacccgcctcagtcgttcacgaactgcctcccttacatcagcagcttctgtggacggcaaccgctcgagatccaggacacttagccagtcatctgagtcagggactctgagctccgggcctcctggacataccatggaggtgagctgttag

SEQ ID NO: 29694 - DNA, 450 bp, synthetic construct
  misc_feature 1..450: note = Description of Artificial Sequence: Synthetic coding sequence
  source 1..450: mol_type = other DNA
atggccgagctgcaggaagtacaaattactgaagagaagccactcctccccggacaaactcctgaagccgcaaaagaggctgagttggctgcccgaattcttctagatcagggccagacccacagcgtggaaaccccttacggttctgtgaccttcactgtgtacggcacacctaaaccgaagagacctgctatcttaacctaccacgatgtgggtctcaattacaaatcttgttttcaaccactgtttcagttcgaggacatgcaagagattatccagaatttcgtgcgcgtacatgtcgacgcacccggtatggaggaaggagcccctgtctttcctcttggatatcagtacccgagcctggaccagctagccgacatgattccatgcgtgcttcaatatttgaatttcagtacgattattggcgtgggtgtgggtgcaggagcctag

SEQ ID NO: 29695 - DNA, 261 bp, synthetic construct
  misc_feature 1..261: note = Description of Artificial Sequence: Synthetic coding sequence
  source 1..261: mol_type = other DNA
atggccgagctgcaggaagtccagattaccgaggagaagcccttgctgcccggtcaaacacccgaagctgccaaagaggccgagctggccgctcggattctgctcgaccaggggcagactcacagtgtggagactccatatggttccgtgaccttcaccgtatatggcacacccaagcctaaaagacctgcaatcttgacctaccacgacgtgggactcaattacaagtcgtgctttcagccactcttccagttcgaatag

SEQ ID NO: 29696 - DNA, 390 bp, synthetic construct
  misc_feature 1..390: note = Description of Artificial Sequence: Synthetic coding sequence
  source 1..390: mol_type = other DNA
atggctgagctgcaagaagtgcagatcactgaagagaagccattattacctgggcagactcctgaggcggctaaggaggctgagttggcggcacgcatactcctggatcagggccagacccacagcgtcgagaccccctatggttctgtaacgttcaccgtctatggcacaccaaagcccaaaaggcctgcaattttaacgtatcacgacgtgggtctgaattataagtcctgtttccagcctctcttccagtttgaggatatgcaagaaatcattcagaactttgttcgcgtgcacgtggacgcacctgggatggaagagggagcgccagtgtttccactgggctatcagtacccatccctggaccagctggctgacatgatcccttag

SEQ ID NO: 29697 - DNA, 447 bp, synthetic construct
  misc_feature 1..447: note = Description of Artificial Sequence: Synthetic coding sequence
  source 1..447: mol_type = other DNA
atggctgaactgcaagaggttcagatcaccgaggaaaagcctctcctaccaggtcaaactccggaggctgccaaagaggctgaactggcggctcgaatcttactagaccagggccagacacactctgtcgagacaccctatggttccgtcactttcactgtgtacggcacccccaagcctaaacgccctgccattttaacctaccatgatgtgggcctgaactataagtcgtgtttccagccccttttccagtttgaggacatgcaggagattatccaaaactttgtgagggtccatgtggacgcccctgggatggaagaaggggctccagtgttcccactgggataccagtatcctagcttggaccagttggctgatatgattccatgcgtgcttcagtacctgaacttttcaaccattatcggtgtgggcgttggcgctggttag

SEQ ID NO: 29698 - DNA, 405 bp, synthetic construct
  misc_feature 1..405: note = Description of Artificial Sequence: Synthetic coding sequence
  source 1..405: mol_type = other DNA
atggcagaattgcaagaggtccagatcacagaagagaaaccactcctgcccggtcagacacctgaagcggctaaaactcacagtgttgagacgccttacggaagtgtaacctttactgtgtacggcacacccaaacccaagaggcccgctatcctgacctatcacgacgttgggttgaactacaaaagttgttttcaaccactgttccagtttgaggacatgcaagagatcatacagaacttcgtgagggtgcatgtggatgctcccggtatggaagaaggcgcaccagtgttcccactcgggtaccagtatccatcacttgatcaactggcggatatgattccctgcgtactgcagtatctcaatttttccaccattattggggtcggagtgggtgcaggctag

SEQ ID NO: 29699 - DNA, 327 bp, synthetic construct
  misc_feature 1..327: note = Description of Artificial Sequence: Synthetic coding sequence
  source 1..327: mol_type = other DNA
atggcagagctccaagaggtccagatcacagaggaaaaacctttgctccctggccagacccccgaagcagctaagacacattctgtggagaccccgtacggatcggtgaccttcaccgtttacgggacaccaaaaccaaaaagaccagccatactgacttatcacgatgttggcctcaattacaaatcttgcttccaaccactctttcagtttgaggatatgcaggagataatccagaattttgtccgggttcatgtggacgccccagggatggaggaaggagcccctgtgtttcccctgggctatcagtatccaagccttgattag

SEQ ID NO: 29700 - DNA, 363 bp, synthetic construct
  misc_feature 1..363: note = Description of Artificial Sequence: Synthetic coding sequence
  source 1..363: mol_type = other DNA
atggcggagcttcaggaagtgcagattactgaagagaaacctctgttgccagggcagacccctgaagcggctaagactcacagcgtcgaaaccccctacggctcagtgacattcaccgtatatggaactcccaagcctaagagacctgccattctgacataccacgatgttggcctcaattataagagctgcttccaaccgttattccagttcgaggacatgcaagaaattattcagaatttcgttagggtgcacgtggacgcccctggaatggaggagggggcacccgtgtttcctcttggctatcaataccccagcttagaccagttggctgatatgatcccctgcgtgttgcagtactag

SEQ ID NO: 29701 - DNA, 300 bp, synthetic construct
  misc_feature 1..300: note = Description of Artificial Sequence: Synthetic coding sequence
  source 1..300: mol_type = other DNA
atggcggaactgcaggaggtgcaaatcaccgaggagaagccgttgttgccaggccaaaccccggaagccgctaaggaagcagagctggccgctagaattctccttgatcaaggacagacacattcagtcgaaaccccctacggcagcgtgacttttacagtttatggcacaccgaagccaaagcgaccggcaattctgacataccatgacgttgggctcaactacaagtcatgcttccagcctctatttcaattcgaggacatgcaggaaattatacagaactttgtaagggttcactag

SEQ ID NO: 29702 - DNA, 279 bp, synthetic construct
  misc_feature 1..279: note = Description of Artificial Sequence: Synthetic coding sequence
  source 1..279: mol_type = other DNA
atggcggagctgcaagaggtacagatcaccgaggaaaaaccactcttacccggacagacacccgaagccgcaaaaactcattccgtcgaaacaccttatggttccgtcaccttcaccgtgtacggtacccctaaacctaaaaggcctgcgatcttgacataccatgacgtcggtcttaactacaagagttgctttcaacccttatttcagtttgaagatatgcaagagattattcaaaactttgttagggtgcacgtagatgccccaggcatggaatag

SEQ ID NO: 29703 - DNA, 462 bp, synthetic construct
  misc_feature 1..462: note = Description of Artificial Sequence: Synthetic coding sequence
  source 1..462: mol_type = other DNA
atggcggaactccaggaagtccagattactgaggagaagcccctgcttccaggtcagactcctgaggcggctaagactcactcagtggagacaccgtacgggagcgtcactttcacggtgtacggaacccctaaacctaagcggccagctattctgacatatcacgatgtgggactcaactataagagctgtttccaaccgctgttccaattcgaagatatgcaagagattatacagaatttcgtcagggtgcacgtggatgcgccaggcatggaagagggcgctcccgtgttccctctaggttatcagtaccccagcctcgatcagcttgccgatatgattccatgtgtgctgcagtatctcaacttcagtacaattatcggagtgggagtaggcgctggggcttacatcctggctaggtatgcgctaaaccatcccgatactgtggaaggcctggtgtag

SEQ ID NO: 29704 - DNA, 1074 bp, synthetic construct
  misc_feature 1..1074: note = Description of Artificial Sequence: Synthetic coding sequence
  source 1..1074: mol_type = other DNA
atggccgagctccaggaagtgcagattacagaagagaagccgcttctgccaggacaaacccccgaggccgcaaaaacccatagcgtggagactccatatggctcggtcaccttcacggtgtacggcaccccaaagccaaagagacctgcgatcctcacgtaccacgatgttggattaaactacaagtcatgcttccagccactattccagttcgaggacatgcaggagattatacagaactttgtccgcgtccatgtcgacgccccaggaatggaggagggagctcctgtgttccctttgggatatcaatatcctagtcttgatcaactggcagatatgataccttgcgttctgcagtacctgaatttttccacgattatcggagtgggcgtcggcgcaggcgcatacatcttggctcgatacgccctcaaccatcccgacacagtggaggggctggtgctcatcaacatcgatcctaacgccaaaggctggatggattgggcagcccacaagctcacgggcctcacctcatcaattccggagatgatcctgggacatttgttctcccaagaggaattaagtggcaactctgagctgatccagaaatacaggaatatcatcacccacgcgcctaatctggacaatattgaactgtattggaatagctacaataatcggagggatcttaattttgagcgaggcggagatatcaccttgcgctgcccagtgatgctagtcgtgggagatcaggcccctcatgaagacgccgtagtcgagtgcaattcgaagcttgacccaacccaaacctcatttctgaagatggctgattccgggggacagccgcagctcactcagcctggaaagcttactgaagcatttaagtacttcctgcagggcatgggatatatggcaagctcatgtatgacccgtctttcacgaagtagaactgccagccttacctctgctgcgagcgtagatggaaatagatcccggtcgcgtacactgtcccagagcagcgaatcaggaaccctgagctcgggaccgcctggccacactatggaggtatcttgctag

SEQ ID NO: 29705 - DNA, 585 bp, synthetic construct
  misc_feature 1..585: note = Description of Artificial Sequence: Synthetic coding sequence
  source 1..585: mol_type = other DNA
atggctgagttacaggaggtacagattacagaggagaaaccacttttgccagggcagactcctgaggccgcaaaggaagctgagctggccgcacggattctgctggaccagggccagactcacagtgtggaaactccttatgggtctgtgacgttcacagtgtacggaacgcccaagccaaagcggcctgctatactcacgtaccatgacgtgggccttaactataaaagttgttttcaaccgctgttccaatttgaagatatgcaagagattattcagaacttcgtaagggtccatgtggatgcacctggcatggaagaaggcgcacccgtatttccattgggataccagtacccctcactcgaccaactggctgacatgataccctgcgtgttgcagtaccttaacttcagtaccataattggtgttggcgtgggagcaggtgcatatatccttgcccgatacgccctgaatcacccagatacggtcgagggcctggttcttatcaatattgatccaaacgcgaaagggtggatggattgggccgcacataagctcaccggcctgactagctctatcccctag

SEQ ID NO: 29706 - DNA, 387 bp, synthetic construct
  misc_feature 1..387: note = Description of Artificial Sequence: Synthetic coding sequence
  source 1..387: mol_type = other DNA
atggcagagctccaagaggttcagattactgaagagaaacctctgctgccaggccagacacctgaagctgccaaaacccactcggtggaaacaccttatggctccgtgactttcaccgtgtacggaactcctaaacctaagcgtccagctatattaacctaccatgatgtcgggctcaattataaaagctgttttcaaccactgtttcaattcgaggacatgcaggaaattattcagaactttgtgcgcgtccatgttgacgctcctgggatggaggaaggagcgcctgttttccccttgggttaccagtacccaagtcttgatcaactagccgatatgatcccatgtgttcttcagtacttgaatttctctaccatcatagggtag

SEQ ID NO: 29707 - DNA, 660 bp, synthetic construct
  misc_feature 1..660: note = Description of Artificial Sequence: Synthetic coding sequence
  source 1..660: mol_type = other DNA
atggccgaactgcaagaagttcagatcaccgaggaaaagccattgttgcctggacagactccggaggctgccaaggaggccgagttggcagcccgaatcctgcttgaccaggggcagacgcattctgttgaaaccccatacggttccgtaacctttacagtgtatgggacaccaaaacccaaacgcccagcaatcctgacctatcatgatgtcggactcaattacaaaagctgtttccagccgctgtttcagttcgaggatatgcaggagataatccagaactttgtaagagtacacgtcgatgccccaggcatggaagagggggcaccggtgtttcccctgggctatcagtatcccagtttagatcagctggctgacatgatcccctgcgtgttacagtatctcaactttagtaccatcatcggcgtgggcgtgggggctggagcctacatcctcgccaggtatgccctgaatcaccctgacacggtagaggggcttgtgcttattaacattgaccctaacgcgaagggctggatggactgggctgcccataaactaacaggtctgacctcaagcataccggagatgatcttgggccacctgtttagtcaggaggaactatcgggaaatagtgaactgatccaaaagtacaggaattag

SEQ ID NO: 29708 - DNA, 666 bp, synthetic construct
  misc_feature 1..666: note = Description of Artificial Sequence: Synthetic coding sequence
  source 1..666: mol_type = other DNA
atggctgaactgcaggaagttcagattactgaagaaaagccccttttaccgggacagacacccgaggctgctaagacccacagcgtcgagaccccttacgggtcagtgaccttcactgtgtacggaacaccaaaacctaaacgtccggctattctgacctaccatgacgttggcctaaattataaatcttgctttcaaccactctttcagttcgaggatatgcaggaaatcatacaaaacttcgtacgggtgcatgtggatgcacccggaatggaggaaggcgcacccgtctttccactgggctatcaatatccatcactggatcagctggctgacatgattccatgcgtgcttcagtatctgaacttcagcaccatcatcggagtaggggtcggtgccggtgcatatattctggctcgctacgccttgaatcatccagacactgttgaaggtctggtccttatcaatattgatccaaatgcgaagggttggatggactgggccgctcacaagttgaccggactgacgtcttctatccctgaaatgattctggggcacctctttagccaggaagagctgtcaggaaatagtgagcttattcagaagtatcgcaatatcatcactcatgccccaaacctcgataacatcgagctgtactggaattag

SEQ ID NO: 29709 - DNA, 1116 bp, synthetic construct
  misc_feature 1..1116: note = Description of Artificial Sequence: Synthetic coding sequence
  source 1..1116: mol_type = other DNA
atggctgaactgcaggaagttcagattaccgaagagaaacctctgctgcctggacagacaccagaagctgccaaggaggctgaactggccgctagaattttgctggaccagggacaaacccacagtgtggagacaccctacggatccgttaccttcactgtgtatgggactccaaagccaaaaaggcccgctatcctcacatatcatgatgtcgggttaaattataagtcctgcttccagcccttattccagtttgaagatatgcaagaaattatacagaattttgtgagagttcatgttgatgctcctggtatggaggagggggcaccagtgttccccctaggataccagtatcctagccttgaccagctggccgacatgattccctgtgtcctacagtatttgaacttctcaaccattattggcgtcggggtgggcgctggcgcatatattcttgccagatacgcacttaatcatccagacactgtggagggacttgtcctgataaacatcgaccctaacgccaaaggatggatggactgggcagcacataagttaactggacttacctcctcaatcccggagatgatcctgggccatctttttagccaggaagaactgagcggtaacagtgagctaatacagaagtacaggaatattattacgcacgctccaaacctcgataatatagagctgtattggaacagctacaacaaccgcagagacctgaatttcgaaagaggtggagatatcaccctccggtgccccgtcatgctggtcgtaggagaccaggcccctcatgaggacgctgtcgtggagtgtaatagtaagcttgaccctacccaaacttcattcttgaagatggcagactccggtggacagccgcagttgacccaacccggaaaactaacggaagccttcaaatacttcctccagggtatgggttatatggcatctagctgcatgacccgcctaagcaggagccgcaccgcatctcttacgtcagccgcttccgttgatggcaatcgctcgcgctcaaggaccctgagtcagagcagtgagagcggtactctgtcttctggcccaccgggacatacaatggaagtatcctgttag

SEQ ID NO: 29710 - DNA, 432 bp, synthetic construct
  misc_feature 1..432: note = Description of Artificial Sequence: Synthetic coding sequence
  source 1..432: mol_type = other DNA
atggcagaactgcaggaggtgcagataaccgaggagaagcccctgctacctggccagactccagaggctgccaagacccatagcgtggaaaccccttatggttccgtcacattcaccgtttacggcacaccaaagcccaaacggccagccatccttacttaccacgatgttggcctcaactacaagagctgctttcagccacttttccaattcgaagacatgcaggagattatacagaattttgtgcgagtccacgtggacgccccaggcatggaggaaggcgcaccggtgttcccactgggatatcaatacccttcactggatcaactggcagatatgatcccatgcgtcctacagtacctcaacttttccactattatcggggtaggcgttggggctggggcttatatcctggccaggtacgccctgtag

SEQ ID NO: 29711 - DNA, 483 bp, synthetic construct
  misc_feature 1..483: note = Description of Artificial Sequence: Synthetic coding sequence
  source 1..483: mol_type = other DNA
atggcagagctgcaggaagtgcaaatcactgaagaaaagcccctgctgccaggccagactcctgaggccgctaaaacacactctgtggaaaccccttatggatccgttacattcactgtctatggcacacccaagcccaaaagacccgcaatcctcacctatcatgacgttggcctcaactataaaagttgtttccagcctctgtttcagttcgaagacatgcaagagattattcagaacttcgtcagggtacatgtcgacgccccaggaatggaggagggagcgcctgtttttccacttggctatcagtacccatccctggatcagttagcagacatgatcccctgcgtgctacagtacctgaatttctcaaccattattggcgttggggtgggggctggcgcttacatcctggcacgctatgctctcaaccacccggatactgtagaaggtctggtactaatcaatatagatcctaactag

SEQ ID NO: 29712 - DNA, 426 bp, synthetic construct
  misc_feature 1..426: note = Description of Artificial Sequence: Synthetic coding sequence
  source 1..426: mol_type = other DNA
atggcagaactgcaggaggtacagatcacagaggagaagcctctgttgcctgggcagacgcctgaagccgcaaaggaggccgagctggccgcaagaatcctcctagaccaaggccaaacacactcagtagaaactccatacgggagcgttacctttacagtatacggaacccctaagccgaaacgaccagcaatcctgacttatcatgatgtgggactgaattacaaatcctgtttccagccattgttccagttcgaggatatgcaggagatcattcaaaacttcgtgcgtgtgcacgtcgacgctcccggaatggaggaaggggcacctgtttttcctctaggctaccagtacccctctttggatcaattagcagacatgattccctgtgtgcttcaatacttaaacttctccactatcatctag

SEQ ID NO: 29713 - DNA, 357 bp, synthetic construct
  misc_feature 1..357: note = Description of Artificial Sequence: Synthetic coding sequence
  source 1..357: mol_type = other DNA
atggccgagctgcaggaagtgcaaatcaccgaagagaagccgctgcttcctgggcagacccctgaggcagccaaggaggctgaactggcagctcggattcttctggaccaagggcagacacactccgtggagactccctacggtagcgtgacgttcaccgtgtatggaacacccaagcctaaacggccagccatactcacttaccatgacgtgggactgaactataagtcttgctttcaacccctgttccagttcgaagacatgcaggaaatcatccagaactttgtgagagtgcatgtggatgcaccaggcatggaggagggcgcaccagtctttcccctggggtatcaatattag

SEQ ID NO: 29714 - DNA, 423 bp, synthetic construct
  misc_feature 1..423: note = Description of Artificial Sequence: Synthetic coding sequence
  source 1..423: mol_type = other DNA
atggccgagctgcaagaggtgcagattaccgaggagaaacctctcctccctggacagaccccggaggccgcaaaagaggcagaattggccgcaagaatactcctcgaccagggccagacacattcagtggagaccccatatggatcggtgacattcactgtatacggcaccccgaaacctaagcggccagctatacttacttatcacgacgtgggactgaattataaaagctgcttccagccactttttcagtttgaagatatgcaagaaatcatacagaatttcgtccgcgtccatgtcgatgctccaggcatggaggagggtgcaccagtatttccactcgggtatcagtacccaagtctggatcagttggccgatatgataccttgtgtattacagtacctgaacttctcgacaatttag

SEQ ID NO: 29715 - DNA, 435 bp, synthetic construct
  misc_feature 1..435: note = Description of Artificial Sequence: Synthetic coding sequence
  source 1..435: mol_type = other DNA
atggcagagctgcaggaggtgcagatcaccgaagaaaagcctctcctccccggacagacacctgaggctgccaagacacactctgttgaaactccttatggaagcgtcacttttactgtttacggtactccaaaacctaaacgcccagctattcttacataccatgacgttggcctgaactacaaaagctgtttccagcctctgtttcagtttgaagatatgcaggaaatcatacagaacttcgttcgagtacatgttgatgctccagggatggaagagggagccccagtgtttcccctcggttatcagtacccttccctggaccaactggcagatatgattccatgcgtgctccaatatctgaacttttcaaccattataggtgttggggttggcgctggtgcatatatcctggcccgttacgctttgaactag

SEQ ID NO: 29716 - DNA, 462 bp, synthetic construct
  misc_feature 1..462: note = Description of Artificial Sequence: Synthetic coding sequence
  source 1..462: mol_type = other DNA
atggctgaactgcaggaggttcaaataaccgaagagaagcctctgctgccgggtcaaactccagaagctgccaagacacactctgtagagactccctacggttccgtcacattcacagtttatggaacgccaaagcccaagcgaccggctatcctcacctaccacgacgtgggcttgaattacaaatcatgtttccagcccctatttcaatttgaggatatgcaggaaatcatccagaactttgtgcgggtgcatgtagacgcccctggaatggaggaaggagccccagtcttcccccttggatatcagtacccttctctcgaccagttagccgatatgatcccttgtgtcctgcaatatttgaattttagtaccataatcggcgtgggtgtaggagccggtgcctatattctggcacggtatgccttaaaccatcccgacacagttgaggggctggtttag

SEQ ID NO: 29717 - DNA, 675 bp, synthetic construct
  misc_feature 1..675: note = Description of Artificial Sequence: Synthetic coding sequence
  source 1..675: mol_type = other DNA
atggccgagttacaagaggtgcaaattacagaagaaaagccactgctacctgggcaaacccctgaagcggctaagactcactctgtagaaacaccatacggctctgtaacttttacagtgtacgggaccccaaagcccaaacgtcccgctatccttacataccacgacgtgggcctcaattacaaaagctgttttcagcccctgttccaattcgaggatatgcaggagataattcagaacttcgttagagtgcatgttgacgcccctgggatggaggaaggcgctcctgtgttccctctgggctatcagtacccatccctggatcagctggccgacatgattccttgtgtactccagtacctcaatttctccactattatcggcgttggggtgggcgctggtgcttatattctggcgagatatgcactcaaccacccggacactgttgaggggctggtgctcattaatatcgacccaaatgccaaaggctggatggattgggcggctcacaagttaactgggctgacaagttctatacctgagatgatcctcggacacctcttctcccaggaggagctgtcaggaaactctgaactgatccaaaaatacagaaacatcattactcatgccccaaatttagataacattgagttgtactggaactcatacaactag

SEQ ID NO: 29718 - DNA, 453 bp, synthetic construct
  misc_feature 1..453: note = Description of Artificial Sequence: Synthetic coding sequence
  source 1..453: mol_type = other DNA
atggctgaactgcaggaggtccaaatcaccgaagagaagcccctcctgccagggcagaccccagaggcagccaagacacatagcgtggaaaccccatacgggtccgtgactttcacagtttatgggaccccaaagcctaagcgtcctgcaatcttgacttaccacgatgttggactgaattacaaaagctgctttcagcctctatttcagttcgaagatatgcaagagatcatccagaatttcgttcgcgtacacgtagacgcacccggtatggaagaaggggctcctgtcttccctctcggttatcagtatccatcgctggatcagctagccgatatgatcccatgtgtgctccagtacctaaattttagtacgatcatcggagtgggcgtcggcgcaggcgcttatatactggccagatacgcactcaatcatccggatacagtcgaatag

SEQ ID NO: 29719 - DNA, 384 bp, synthetic construct
  misc_feature 1..384: note = Description of Artificial Sequence: Synthetic coding sequence
  source 1..384: mol_type = other DNA
atggccgagcttcaggaagtccaaattaccgaggaaaagcccctcctgccaggccagaccccggaggccgctaaaacccactccgtggagactccatatggaagcgtaaccttcaccgtgtatggtactcctaagccaaaacgtcctgcaatcctgacgtatcacgacgtggggttgaattacaagagctgcttccagcccctgtttcaattcgaggacatgcaagaaattattcagaatttcgtccgggtgcacgttgatgcacctgggatggaggaaggagcccctgtctttcccctagggtaccagtatcccagcctggatcagctggccgacatgatcccatgcgttttacaatatttgaacttttcaacaataatctag

SEQ ID NO: 29720 - DNA, 450 bp, synthetic construct
  misc_feature 1..450: note = Description of Artificial Sequence: Synthetic coding sequence
  source 1..450: mol_type = other DNA
atggctgagttgcaagaggtgcagatcactgaggaaaagcccttgctccctgggcaaaccccggaagccgctaagacccacagtgtcgagacaccttacggtagtgtgacatttacggtttatggcaccccaaagcctaagcgaccagcgatcctgacctatcacgatgttggactgaattacaaatcatgcttccagcccctgtttcagtttgaggacatgcaagagataattcagaacttcgtgcgtgttcatgttgacgcccctggaatggaggagggggcaccggtatttccactaggataccaatacccttcactcgaccaattagcagatatgatcccatgcgtactgcagtatcttaacttttctaccattatcggagtaggtgtcggagccggagcatacattcttgcgaggtacgccctgaaccacccagacaccgtgtag

SEQ ID NO: 29721 - DNA, 1128 bp, synthetic construct
  misc_feature 1..1128: note = Description of Artificial Sequence: Synthetic coding sequence
  source 1..1128: mol_type = other DNA
atggatgaattacaggatgttcagctcacagaaattaagccactgctaaatgacaagaacggcacccgcaattttcaggattttgactgccaggagcatgacatagaaaccacccatggcgtggtacatgttaccattagggggctccctaagggtaaccggcctgtaatcctcacgtatcacgatattggtcttaatcataagtcttgcttcaatgcgttttttaactttgaagatatgcaggagattacccagcactttgccgtttgtcacgtcgatgccccaggacaacaggagggcgctcctagctttcccaccgggtatcagtatccaacaatggacgagctggctgaaatgctcccgccagtactgacccacctgtcactcaaaagtatcatcggaattggggtgggcgcaggggcatatattctgagccggtttgctctgaaccacccagagctggtggaagggttggtgctgatcaacgtggacccatgtgcaaaaggctggatcgattgggccgcatccaaactctctggcctgaccaccaacgtcgtggacatcattctcgcacaccattttgggcaagaagagctacaagcaaatctggacttaatccagacctaccgtatgcacattgcccaggacattaaccaggacaacttacagctgttcctgaattcgtacaacggtcggcgtgatcttgagatcgaacgtcctatcctgggtcagaacgacaataagtctaagaccttaaaatgctccaccctgttagtagtgggcgataactcccctgcggtggaagcggtagttgagtgtaacagcagactcaaccccataaacacaaccttgctaaagatggccgactgtggcggtttgcctcaggtggtccagcccggaaagttgactgaagccttcaagtacttcttgcaagggatgggatatatcccaagcgcctcaatgacccggttagcgcgatcccggacacattcgacttcgtcgagtctcgggagcggggagtctccattcagccgaagcgtcacctccaaccagtccgatggaacacaagagtcctgtgagtcacctgatgtgctggaccgacaccagactatggaagtttcatgttag

SEQ ID NO: 29722 - DNA, 1092 bp, synthetic construct
  misc_feature 1..1092: note = Description of Artificial Sequence: Synthetic coding sequence
  source 1..1092: mol_type = other DNA
atggacgaactacaagacgttcagctgactgagatcaagccgctgctgaacgataaagaacatgacatcgagaccactcatggagtagtgcatgtgactataagagggttgccgaaaggaaacaggccagttatattaacatatcatgacattggccttaatcataagtcttgctttaatgcctttttcaattttgaagatatgcaggaaatcactcaacatttcgctgtgtgtcatgttgacgcacctgggcagcaggaaggcgcaccctcgttccccacagggtaccagtacccgacgatggacgagctggccgaaatgttgccccctgtgctgacacacctgagcctgaaatccattatcggcattggggtcggggctggcgcttatatcctgtccaggttcgccctgaatcaccccgaactggtagaaggactggtgctcattaacgtggatccttgcgctaaaggttggattgactgggcggcatccaagctgagcgggctaactactaacgtagtggacatcattctcgcccatcactttggtcaggaggagctccaagctaacctggatctcatccagacttatagaatgcacatcgcgcaggacatcaatcaggacaacctgcagctcttcctgaacagttataacggcagacgagatctggagattgaacggccaattctgggacagaacgataacaaatccaagacccttaaatgttcaaccttactcgtcgttggtgacaactcccccgcagttgaggctgtcgtggagtgcaattctaggctcaatcctattaacacaaccctgctgaaaatggcagattgcggaggactcccccaggtcgtacaacctggaaaattaaccgaggctttcaagtacttccttcaaggcatgggatacattccctctgccagtatgacccggctcgcgaggagccgcacacattcgacctccagttccctgggttccggggagtctccattctcccggtctgttaccagcaatcaaagcgacgggacacaggaatcatgcgaatctcccgatgtgctcgacagacaccaaacaatggaggtgtcgtgttag

SEQ ID NO: 29723 - DNA, 843 bp, synthetic construct
  misc_feature 1..843: note = Description of Artificial Sequence: Synthetic coding sequence
  source 1..843: mol_type = other DNA
atggtgcaggaaaccagcaggaccttaaccgtccgctaccaataccctactatggatgagttagccgagatgttaccgccagtcttaacccacctttccctgaagagcattattggcatcggggttggggctggagcatacattcttagcaggttcgcccttaaccatcccgaactggtcgagggcctggtgttgatcaacgtggacccttgcgctaagggatggattgactgggccgctagtaaactgtccggcctgaccacaaacgtggttgacatcatcctggcccaccacttcggacaggaggagttacaggcgaacctagatctcatccagacctatcgcatgcacatcgctcaggatattaatcaggacaacctgcagctctttctgaactcttataacggacgcagagacctggagatcgaacgcccaatcttaggccagaacgacaataagtctaagactcttaagtgctctacacttctggtggttggtgacaacagcccagcagttgaggctgttgttgaatgcaatagccgcttaaaccccatcaacacaactcttctgaagatggccgactgtggaggcttgccccaggtggtccagccaggcaaactaacggaggcttttaagtattttcttcagggcatggggtatatccctagcgcctccatgacacgcttggcacgcagtagaacacattccacttccagctcactgggctcaggcgaatcccccttcagtcgctccgtcacctctaaccagtctgacggtacgcaggagagctgcgagagtcctgacgtgctggaccggcaccagaccatggaggtcagttgctag

SEQ ID NO: 29724 - DNA, 816 bp, synthetic construct
  misc_feature 1..816: note = Description of Artificial Sequence: Synthetic coding sequence
  source 1..816: mol_type = other DNA
atgattaggtaccaatatcctactatggatgaattagctgagatgttgccccctgtgctgacccacctgtcactcaaaagtatcattggcattggggtgggcgctggagcgtacatcctgtcccggtttgcgttaaatcacccagagctggtagaaggactcgtccttattaatgtcgatccatgtgcgaaggggtggatagattgggcagcctctaaactgtctggtctgacaacgaatgtcgtggatatcatcctagctcaccacttcggccaggaagagctgcaggcaaaccttgaccttattcagacttacaggatgcacattgcccaggatataaatcaggacaatctgcagctgtttttgaattcttacaacggtaggcgcgatctcgaaattgaacggccaatactagggcagaatgataataagagcaaaaccctaaagtgctctaccctcctggtagtgggggataactctcccgctgtggaggctgtggtggaatgcaacagtagattaaatccgattaacaccaccctcctgaaaatggcagattgcggagggctgcctcaggtggttcaaccaggcaaactgacagaggcctttaaatactttctgcagggcatgggctacattccttccgcctcgatgacccgcttggccagatctcgaacccactcgacatccagttcactgggtagtggggagtcaccgttctccagatctgtgaccagtaatcaatccgatgggacgcaggagtcgtgcgagagccccgacgtgctcgaccggcaccaaaccatggaggtttcatgttag

SEQ ID NO: 29725 - DNA, 420 bp, synthetic construct
  misc_feature 1..420: note = Description of Artificial Sequence: Synthetic coding sequence
  source 1..420: mol_type = other DNA
atgccagagggtcccgaattacatctcgcaagtcagtttgtgaacgaagcttgccgcgctctggtgtttgggggatgtgtggagaagtcctcagtgtctcggaaccctgaggtgcccttcgaatcttctgcctatagaatctcggcctcggcacgaggaaaagaactgcgcctgatcctgtccccgctgcctggtgctcaaccccagcaggagccacgcgcacctcgcggagccgctactccatgccccccagcactgctgcacggacctgcttggcctccagccaggccaatgttccgaggccacccgccagttcggcctctcggcccatggggcaaggtcgccgctggacctagggcgctgtgcctcgccggagtaccagctgttcagggggagtgcgccactaagccatctggttag

SEQ ID NO: 29726 - DNA, 1173 bp, synthetic construct
  misc_feature 1..1173: note = Description of Artificial Sequence: Synthetic coding sequence
  source 1..1173: mol_type = other DNA
atgccggaaggccctgaattgcaccttgcttctcagtttgttaacgaggcctgtagagctttagtgttcggcggatgtgttgaaaagtcaagcgtctccaggaaccctgaggtcccgttcgagagcagcgcttatagaatttccgcatctgccaggggtaaagagttgcgactaattctttcccctctgccaggcgcacagccccaacaggaaccgctggctctggtgttccggttcggcatgtcaggtagcttccagctcgttcctcgtgaagagcttccaagacacgcacatcttaggttttataccgctccccctggcccaagattggcgttatgctttgttgatatccggaggttcgggcgatgggacctggggggaaaatggcagcctggcagaggtccttgtgtactgcaggaataccaacagtttagggagaatgtgttaaggaatcttgccgataaggcttttgacaggcctatttgcgaagccctgttagaccagcgctttttcaacgggatcgggaactacctcagagccgaaatactgtacaggctcaagatcccaccatttgagaaggcccgatcagttctggaggcccttcagcagcatagaccttctcctgagttgaccctgtcccagaagatcagaactaagttacagaacccggatctgctggaactgtgtcactccgtgccaaaggaggtggtgcagttgggcggtaaaggttatggatccgaaagtggagaagaagactttgcagccttccgagcatggctgcgatgttacgggatgccaggcatgagctctctgcaagacagacacggcaggacgatatggttccaaggtgatcctggccctctggcaccaaaaggcagaaagtcccgtaaaaaaaagtccaaggctactcaactgtcacccgaagaccgcgtcgaggatgcccttcctcctagcaaagccccatcgcgaacaaggagggctaagagagatctccctaagagaacagccacccaacggcctgagggcacctctcttcagcaggatccagaggctcctactgtgcccaaaaaagggaggaggaaggggcgacaggctgcatccggccattgcagacccaggaaagtgaaggccgacattccttcgctcgagccagagggaacaagtgcatcctag

SEQ ID NO: 29727 - DNA, 1173 bp, synthetic construct
  misc_feature 1..1173: note = Description of Artificial Sequence: Synthetic coding sequence
  source 1..1173: mol_type = other DNA
atgccagaaggcccagagctacacctggcaagccagttcgtcaatgaagcttgcagggcccttgtcttcggtggatgtgtagaaaaatcctctgtgtcccggaacccggaggtcccctttgagtcttctgcctaccggataagcgcctccgcaaggggcaaagaactgcgtttaattttatcccctctgccaggagcacaacctcagcaggagccccttgcactggtgtttaggtttggtatgagcggatcctttcaattggtgccccgagaagaacttccacgacatgcccacttacgattctacacagcgcctcccggtcccaggttggccttgtgcttcgtggacatccgacgatttggcaggtgggatctggggggtaaatggcagccaggaagagggccttgcgtgctacaagagtaccaacaattccgtgagaacgtgctgagaaacctggcagacaaggccttcgatagacccatttgtgaagccctcctggatcagcggttctttaacgggattggaaactacctgagggcagagatactgtatcgcctgaaaattcctcccttcgaaaaggctagatccgtgctcgaagcccttcaacagcaccggcctagcccagagctcactctctctcagaagatccgcaccaaattgcagaacccagacctgctcgaattatgccactccgtgccaaaggaggttgtccagctgggtgggaaaggatatggcagcgaatctggcgaagaggacttcgccgcatttagagcatggctgcgctgctacggaatgccgggtatgagttccctgcaggataggcatgggagaaccatatggttccagggcgatcccggtcccctggcgcctaaagggcgtaagtcacgcaaaaaaaaatctaaggcaacacaattaagccccgaagatcgagtggaggatgccctgcctccaagcaaggcaccatctagaacccgcagagcaaaaagagatctgcctaaaagaaccgccacacaacggccagaaggcacctcccttcaacaagatcccgaagcgccaacagtgcctaagaagggtcgcaggaaagggaggcaggccgcttccggacactgtcgtccaaggaaagtcaaagccgacattccctctctggagccggaggggacctctgcctcatag

SEQ ID NO: 29728 - DNA, 999 bp, synthetic construct
  misc_feature 1..999: note = Description of Artificial Sequence: Synthetic coding sequence
  source 1..999: mol_type = other DNA
atgcctgaagggccattggtccgcaaatttcaccacctcgtgagtccgttcgtgggtcagcaggttgtcaaaacggggggttcatctaaaaaactgcagcctgcgagcctgcaatctctgtggctgcaggacacacaagtgcacggaaaaaagctcttcctgaggtttgaccttgatgaagagatgggaccgccaggcagttcacccacccccgaaccgcctcagaaggaagtgcagaaggaaggagccgcagacccaaagcaggtgggagaacctagcggccagaagaccctggatggttcaagccgctcagcagaactggtaccccagggcgaggacgactctgagtatctggaaagagatgccccagctggagacgctgggcgatggctgagagtcagttttgggctattcggttctgtgtgggttaatgacttttctcgcgctaaaaaggcaaacaagcgcggtgattggagagacccgtcacccagactagtgctacacttcggcggaggcggatttctggctttttacaactgccagctgagttggtcatcatctcccgtggtgacaccaacatgcgatatcctttcagaaaagttccatagaggccaggcccttgaagcacttgggcaggcccagcccgtgtgttataccctgttggaccaacggtatttttctgggctgggaaacataatcaagaatgaggccctgtaccgagccggaatccacccactgtctctaggctctgtgctatctgcatcacgcagggaggtgctcgtggatcatgtggttgagttctccactgcctggctgcagggtaagttccagggacgaccccagcatacgcaagtataccaaaaagaacaatgcccagccggacaccaggtcatgaaagaagcttttggcccagaagatggcttacagcgcctgacgtggtggtgtccccaatgtcagccgcagctcagcgaggaacctgagcagtgtcagttctcttag

SEQ ID NO: 29729 - DNA, 954 bp, synthetic construct
  misc_feature 1..954: note = Description of Artificial Sequence: Synthetic coding sequence
  source 1..954: mol_type = other DNA
atgcctgaagggccactcgtacggaagttccaccatctagtttctccctttgttggacaacaggtcgtgaagaccggtggtagctcaaagaagttgcagcctgcctccctgcagagcctctggttgcaggacacgcaagtgcacggcaaaaaactgtttctgaggttcgatctggatgaagagatggggcctcctggcagcagccctaccccagaaccacctcagaaggaagtccagaaaaaaaccctcgatggctcctctagaagcgcagagctggtgccacaaggggaggacgatagtgagtatctggagcgcgacgcccctgcaggcgatgccggacgctggctgcgggtctcctttggtctttttggtagcgtctgggtcaacgatttctccagagcaaagaaggccaataaaaggggcgactggcgggaccctagccctagactggtgttgcattttgggggagggggattcctggccttttacaactgccaactttcctggagttcctcacccgtggtgacaccgacttgcgatatcctctccgaaaagtttcaccggggtcaagcactggaagccctcgggcaagcccagcccgtgtgttataccctgctggaccaaagatacttttcagggctcggtaatatcatcaaaaacgaagcactctatcgggcaggcatccatccactctccctgggttctgtcctgtcggcctcaagacgcgaggtgctagtcgatcatgtcgtagagttcagcaccgcctggctccaggggaaatttcagggcaggcctcagcacacacaggtctatcaaaaagagcagtgcccggctggccaccaggtcatgaaagaggcgtttggccctgaggacggtttgcagcgccttacatggtggtgtccccagtgtcagccacagctgtctgaggagcccgagcaatgtcagtttagctag

SEQ ID NO: 29730 - DNA, 816 bp, synthetic construct
  misc_feature 1..816: note = Description of Artificial Sequence: Synthetic coding sequence
  source 1..816: mol_type = other DNA
atgggtcccccaggctcatcaccaaccccagagcctcctcagaaggaagtgcagaaggagggcgctgcagaccctaaacaggttggcgagccctctggacagaagaccctagatggtagttcacggagcgcagagctggttccccagggagaagacgattctgagtaccttgagcgggatgccccagcaggtgatgcagggagatggttgcgggtatcatttggcctgttcggatccgtctgggttaacgacttctcaagagccaagaaagcaaacaagagaggagattggcgcgaccctagtccaagactggtgctgcacttcggcggaggtggctttctggctttttacaattgccagctaagctggtcgagttccccagtggtaacccccacgtgtgatatattatccgaaaagttccaccgtgggcaggcattagaggccctgggccaggcacagcccgtgtgttacactctgctggatcagcggtacttttcaggcctaggtaacatcatcaagaacgaagccctgtacagagctgggattcatcctctaagtctcggctccgtacttagcgcgtcaaggcgagaggttcttgttgatcatgtcgttgagttcagtactgcctggctacagggcaagtttcaaggtcggcctcaacatacacaggtatatcaaaaagaacaatgcccagccggacatcaagtgatgaaggaggccttcggccctgaggatggcctgcagcggttaacatggtggtgcccccagtgtcaacctcagctcagcgaggaaccagagcaatgccagttttcctag

SEQ ID NO: 29731 - DNA, 999 bp, synthetic construct
  misc_feature 1..999: note = Description of Artificial Sequence: Synthetic coding sequence
  source 1..999: mol_type = other DNA
atgccagaggggcctttagtccgcaaatttcatcacctagtgagccctttcgtgggccagcaggtggtgaaaacaggtggatccagcaagaagctccagccagccagcttgcagagcctctggttgcaggacactcaggtgcatggcaagaagttatttttacgtttcgacctggatgaggagatgggtccacccggtagcagccctactcccgagccgccacagaaggaggtgcagaaagaaggagctgcagacccgaagcaggtcggtgagccctctggtcagaagaccctggacggaagctcccgcagcgctgaattggtgcctcaaggggaagacgacagcgagtaccttgaaagggacgccccagccggtgacgctggcagatggctaagagtctcttttggattgttcgggtctgtgtgggtcaacgattttagtcgggctaagaaagcaaacaaaaggggggattggagggaccccagtcctcgcctggttctccattttggtggagggggattcttggccttttataattgccaactcagttggtctagctctcccgtggtcacgccaacatgcgacattttgagtgaaaagttccatagagggcaggcactggaagctctgggtcaggcccaacctgtttgttacacattgctagaccagcgctacttttcaggcttggggaacattatcaagaatgaggctttatatagagcagggatccaccctcttagcctggggtcagtactcagcgcttctcgaagggaggtcctcgttgatcatgtggtcgagttcagtaccgcctggctgcagggcaaatttcaggggagaccccagcatacacaggtgtaccagaaggagcagtgccccgctgggcaccaggtcatgaaggaagcttttggacctgaggacggcctgcagcgcctgacctggtggtgccctcagtgccagccccagctgtccgaggagcctgagcagtgccagttttcatag

SEQ ID NO: 29732 - DNA, 999 bp, synthetic construct
  misc_feature 1..999: note = Description of Artificial Sequence: Synthetic coding sequence
  source 1..999: mol_type = other DNA
atgcccgagggtccgctggtccgcaagtttcatcacctggtgagcccatttgtcgggcaacaggttgtcaagaccggtgggtcgtccaaaaaactccaacctgcttcactacagtcactgtggttgcaggacactcaagtgcacgggaagaaattatttctgaggtttgacctggacgaggagatgggcccacctggctcttctccaactccggaaccaccacaaaaagaggtgcagaaggaaggagcggcagatcccaagcaggtcggagaaccttccggacagaagactttagacggatcctctagatccgccgagctggtcccacaaggagaggacgactctgaatacctggagagagacgctccagcaggcgacgcgggacgctggttgagggtttctttcggcctcttcggaagcgtgtgggtcaatgacttttctagagccaagaaagctaataagagaggcgactggcgggacccatctccacgcctcgtgctgcacttcggcggaggaggattccttgccttctacaattgccaattatcctggagttctagccccgttgtgacccccacctgtgatatactgtccgagaaattccacaggggtcaggcactagaagccctgggtcaggcacagcctgtgtgctacacactcctggatcagcggtacttctctgggctgggcaacattattaaaaacgaggccctctatagagccggaattcaccctctgagtctcggatccgtgctgtcggcgtcgaggcgagaggtcttggtggatcatgtcgtggagttttcaactgcctggctccaggggaaattccaagggaggccgcaacacacccaggtctaccagaaagagcagtgtccggcaggccatcaggtgatgaaagaggcgtttggccctgaggatggcctccagaggctgacttggtggtgtccacaatgccagccccagctgagtgaggagccagagcagtgccagtttagctag

SEQ ID NO: 29733 - DNA, 651 bp, synthetic construct
  misc_feature 1..651: note = Description of Artificial Sequence: Synthetic coding sequence
  source 1..651: mol_type = other DNA
atgccagaaggccctctcgtccggaagttccaccacctggtgagcccatttgtcgggcagcaggtcgtcaagacaggaggcagctctaaaaaactgcagcccgcttccctccagtctctctggcttcaggatactcaggtgcgactggtgttgcacttcggtggcggaggatttcttgcgttctacaactgccagctgagttggagcagttctcccgttgtcacacctacttgtgacatcctctccgagaaatttcatagaggtcaagccctggaggcactggggcaagctcagcctgtctgctatacacttttggaccagagatatttctccggcctgggaaatatcatcaagaacgaggctttataccgcgcagggatccatcctctgtcactgggttcagtgctatccgcgtccaggcgtgaggttctcgtggatcacgtggtcgaattttccaccgcttggctccaaggcaaatttcagggccgaccgcagcatacccaagtatatcagaaagaacagtgccccgcagggcaccaagttatgaaggaggctttcggaccagaggatggactgcagagactaacctggtggtgccctcagtgtcagcctcagctcagtgaagaaccagagcagtgccagttcagctag

SEQ ID NO: 29734 - DNA, 1818 bp, synthetic construct
  misc_feature 1..1818: note = Description of Artificial Sequence: Synthetic coding sequence
  source 1..1818: mol_type = other DNA
atggtggaaggccctggctgcactcttaacggcgagaagatccgtgcccgagtcctgccaggccaggctgttacaggagttcgcggaagcgctcttcggtcgctccagggtagagctctgcgactcgcggcatccaccgtggtggtgtctccacaggcggcagcgctgaataatgattctagtcagaatgtgctaagtctgttcaacggatatgtatatagcggcgttgaaaccttgggcaaggagctgttcatgtacttcgggccaaaggcgttgagaatccatttcggcatgaaaggtttcataatgatcaatcccctggaatacaagtataagaatggggcatctcctgtgctggaggtacagctcacaaaggaccttatctgttttttcgacagctctgtagagctgaggaatagcatggagagccaacaaagaattcggatgatgaaggaactcgacgtgtgttctcctgagttcagcttcttaagagccgaatcagaagtgaagaaacaaaaaggccgtatgctgggagacgtactcatggaccaaaatgtcctcccgggtgtcgggaacatcattaaaaacgaggctctgttcgattccggcctgcatcccgctgtgaaggtgtgtcagctgacggatgagcagatccaccacctgatgaagatgattagagactttagtatcctgttctaccgatgtagaaaagccggactggctctgagcaaacattacaaggtttataagaggcccaactgtggtcagtgtcattgcaggatcactgtctgtaggttcggagataataatagaatgacctacttctgtccgcactgccagaaggagaaccctcagcacgtcgacatatgtaagctgccaactaggaacaccattatctcctggactagtagcagggtggatcacgtaatggactccgtagccagaaaatctgaggaacattggacttgtgtggtgtgcactctcattaacaagccttctagtaaggcatgtgatgcctgtctcacatccagaccaatcgatagtgtcctcaagagtgaagaaaattccaccgtgtttagccatctgatgaagtatccctgtaacacctttggcaaaccccacactgaggtgaaaatcaacagaaaaacagccttcggcacaacgacactggtgctaaccgatttttcaaataaatcgagtactctggagcgaaagactaaacaaaaccagattctagatgaggagttccagaattcccccccagcaagcgtgtgtctgaacgacatccagcaccctagcaaaaagaccaccaacgacattactcaacccagctcgaaggtgaacatatcccccacaatcagctccgagtctaagctgtttagccccgcacataaaaagcctaagaccgctcagtactcatctcctgagctcaaaagttgcaatcctggctacagtaacagtgagctccaaattaacatgacagatggacctcgtaccttaaaccctgacagtccaagatgttccaagcacaacaggctgtgcattttaagggtggtcggcaaggatggagagaataaagggaggcagttttatgcatgtcctctccccagagaagcacagtgcggcttttttgagtgggccgatctgagtttccctttctgtaatcacggaaaacgcagtacaatgaagaccgtgttgaagatcggtcccaataacgggaaaaatttttttgtctgccctctcgggaaagaaaagcagtgtaatttctttcagtgggcggaaaacgggcctggtataaaaatcatcccaggttgctag

SEQ ID NO: 29735 - DNA, 1743 bp, synthetic construct
  misc_feature 1..1743: note = Description of Artificial Sequence: Synthetic coding sequence
  source 1..1743: mol_type = other DNA
atgcctggatggccctggggactgttgctcactgccggtaccctgttcgcagctctgtctcctggacccccagccccagctgacccctgccatgatgaggggggagctcccagagggtgcgtccctggactggtgaatgctgccctcggacgggaagtcctggcctccagcacgtgcggcaggcctgcgactcgcgcatgcgacgcttccgaccctagaagagcccacagccctgcgctgcttacaagcccgggaggcacagcgagcccattgtgctggagatcagagtcgctacctcgcgctccactcaacgtcactcttacagtgccgctcggcaaggccttcgaattagtctttgtctctctccggttctgctccgctccccctgcttcagtggctctcctgaagtcccaggaccacggtcgcagctgggctccactggggttctttagttctcattgcgacctggactatggtcgtctgcctgctcctgctaacggacctgcgggtccaggtccagaggcactctgctttcctgctcctttggcccagcccgatggatcaggactcctcgccttctcaatgcaggactctagtccaccagggctggatctggactcttcgccagtcctacaagactgggtgacggcaactgacgtgcgcgtggtgctgacccgcccatctaccgcaggtgaccccagggacatggaggccgttgtgccctatagctacgcggctacagatctgcaggttggcggaagatgtaagtgcaatggtcacgcctccagatgcctgctggatacacagggccatctcatttgcgattgtcgccacggcactgagggtcccgactgcggtagatgcaaacccttttattgcgacagaccgtggcagcgggctaccgcccgtgaaagccacgcctgcctcgcttgtagctgcaacggccacgcgcgaaggtgtcgcttcaacatggaactgtatcgcttgtcgggccgtcgctctggaggcgtctgcctgaactgtagacataatactgccggaagacactgtcactattgcagggaggggttctaccgggaccctggtagggctctgtccgatcgacgagcatgccgggcttgcgactgtcacccagtgggtgccgctgggaagacctgcaatcagacgaccgggcagtgtccctgtaaggacggagttactgggctaacctgtaaccggtgtgccccagggtttcagcagtcgcgttcacccgtcgccccatgtgtgaaaacccctattcctgggcctaccgaagactccagccctgtgcagccacaagattgtgattcccactgcaaaccagcgagaggcagctacaggatttccttgaagaagttttgcaaaaaagattatgccgttcaggtagcagtgggggcacggggagaggcacggggagcctggactcgtttcccggtggccgtgctcgcagtgttcaggagcggagaggagcgggctcggcgaggaagcagcgctctatgggtgccggctggggacgccgcttgcgggtgccctaggctcctgcccggacgacgctatctgttgctaggcggaggcccaggcgctgccgctggaggggcaggaggcaggggtcctggcttgatcgctgcccgtggatcactggtgcttccctggcgggacgcctggacacggaggctccgcaggctccaaaggcgcgagcggcgaggacgttgtagtgccgcttag

SEQ ID NO: 29736 - DNA, 2547 bp, synthetic construct
  misc_feature 1..2547: note = Description of Artificial Sequence: Synthetic coding sequence
  source 1..2547: mol_type = other DNA
ctcttttgcttcgtcttctcagtctctcttcaggtggatatagtgccgtcacagggagaaatctccgtgggagagtcgaaattctttctctgccaagtggccggagacgcaaaggataaagacatttcttggttctcacccaacggcgaaaagctgaccccgaaccaacagaggatctctgtggtctggaatgacgattccagtagtactctcaccatttataacgcaaatattgatgacgcaggcatttacaaatgcgtcgtcaccggggaggatggcagtgaatctgaggccactgttaacgtgaagatattccagaaattgatgttcaagaatgctccgaccccacaagagtttagagaaggcgaggatgccgttatcgtctgtgacgttgtctcatcattgccccctactattatttggaagcataagggcagggacgtgatcttgaagaaagatgtacgctttattgtgctgagcaataactatctgcaaattcgagggatcaagaaaacagacgagggaacataccgctgcgaggggcgtatcctggcaagaggggaaattaatttcaaagatattcaggtgatcgtcaatgtacctcccacaatacaagctagacaaaacattgttaatgccacagctaacctggggcagagcgttaccctcgtctgcgatgctgaaggctttcccgagccaactatgtcctggaccaaagatggagagcagatcgagcaggaagaagacgatgagaaatacattttcagcgatgattcctcccaactgacaataaagaaagttgacaagaatgatgaggctgaatacatctgtatcgcggagaataaagccggtgagcaagacgcaaccattcatttgaaagtctttgcgaaacccaaaatcacctacgtggagaaccagaccgctatggagctggaagaacaagtgaccttaacctgtgaggcgtcgggcgaccccatcccctctatcacctggcgaacctccacacgcaatatttctagcgaagaaaaggcatcttggaccagacccgagaagcaggagaccttagatgggcacatggtggtcagatctcatgccagagtgagttctctaacactgaaatcaatccaatatactgacgccggagaatatatttgcactgcaagcaataccataggtcaggacagccagtctatgtatctcgaggttcagtatgcgcctaagctgcagggccctgtcgctgtgtatacctgggaagggaatcaggtgaacatcacgtgtgaagtgtttgcttatccttctgcaaccatcagctggttccgtgacggccaactgctgccatcttccaactactctaacatcaaaatctacaataccccctctgcgagttatctggaggtgacccctgactcagagaatgatttcggaaactacaattgcaccgcggtgaatcgtatcggccaggaatctctggagttcattctggttcaggccgacacccccagctcaccttccattgaccaggtggagccatattcgtcaaccgcccaagtgcaatttgatgagccagaggcgacagggggagtgcccattctaaagtacaaggctgagtggagagccgtgggggaggaggtctggcacagcaagtggtacgatgccaaggaggcctccatggaagggatcgtgactattgtgggacttaagccagaaacaacctatgcggtgcgcctcgccgctcttaacggcaaagggcttggagagatttcagccgcttctgaatttaagactcagccagtccctggtgaacccagtgcgcctaagctggagggacagatgggcgaagatgggaatagcatcaaagtgaacctgatcaaacaggatgacggaggatctcctataagacactacctcgtgcggtatcgtgctctctcgagtgagtggaaaccggagataaggttaccttctggatccgatcacgttatgctgaaaagcttggactggaatgccgagtatgaggtgtacgtagtggccgaaaaccaacagggcaagtccaaggcagctcacttcgttttccggacttcagctcagccaactgcgatccccgcaaacgggtctccaacttctgggcttagtacgggtgccatcgtgggaatactcatcgtcatctttgtacttcttctggtcgtggtggacataacatgctatttcctgaacaaatgcggactctttatgtgcattgcagtgaacttatgtggtaaagcaggacctggagctaaaggaaaggacatggaagagggtaaggccgcattcagcaaggatgagagcaaagaacccatcgtagaagtgcggaccgaagaggagagaactcccaaccatgatggcggaaaacatacagagccaaacgagacgaccccgttgacagagcccgaaaagggtcctgtggaggctaaaccagagtgccaggagactgaaaccaagccggcaccggctgaggtgaaaaccgtccctaatgatgctactcaaaccaaggagaatgaatctaaggcatag

SEQ ID NO: 29737 - DNA, 1995 bp, synthetic construct
  misc_feature 1..1995: note = Description of Artificial Sequence: Synthetic coding sequence
  source 1..1995: mol_type = other DNA
ataacaatccgagatgaaatctgggtgcttttctgtttcgtattcagcgtgtccttgcaagtggacatcgtgccatcccagggggagataagcgttggagaatctaagtttttcttgtgccaggtggcaggggatgccaaggacaaggacattagctggttttctccaaacggagagaagctgacgcctaaccagcagagaatctctgtggtttggaatgatgactcctcatccactctgacaatttataacgccaatatagatgacgcgggtatttacaagtgtgtagttaccggtgaggacggctccgagtccgaggcaactgtgaacgttaagatttttcagaagctgatgttcaagaatgcaccaactccccaagaattccgggaaggcgaggatgccgtgattgtttgcgacgtcgtttcttctcttccgcctacaattatctggaagcataaaggtagagatgttattcttaagaaggacgtccgattcatcgtgttgtctaataattacctacaaataaggggcatcaaaaaaactgatgaaggcacttacaggtgtgagggaaggattctggcccgaggagagattaatttcaaagatatacaggttatagtcaatgtcccacctacgatacaggctcggcagaacattgttaacgccacggctaacctgggacagtctgtgactcttgtgtgcgacgctgaaggtttccctgagccaaccatgagctggacaaaagatggagagcaaattgagcaggaggaggatgatgaaaagtacatcttctccgacgactcttcccagctgaccattaagaaagtcgacaagaatgacgaggccgaatacatttgtattgccgagaacaaggcaggcgagcaggatgcaaccatccacctaaaggttttcgccaaaccaaaaatcacatacgtggaaaaccaaacggctatggagctcgaggaacaggtcactctaacgtgtgaggcatctggcgatcccattcccagcataacttggagaacttccacacgcaatatttcatccgaagagaaggcctcctggacgagacctgagaaacaggaaacgctagacggccacatggtggtacggagccacgcccgagtatcttctttaacactcaaaagcattcagtatacggacgccggtgagtacatctgcaccgcatctaatacaataggccaagattcccaatccatgtatttggaagttcagtacgcccctaaactgcaaggcccagtcgccgtgtacacttgggagggcaatcaggttaatataacctgtgaggtcttcgcatacccatcagccactatttcttggttcagggatggtcagttgctgccctcatcgaattacagcaacattaaaatatacaacacccccagcgcctcgtatctggaagtaacgcccgacagcgagaacgactttggcaactacaactgcaccgccgtgaaccgcatagggcaagagagtctggagttcatactcgtgcaagctgatactccgagctcgcctagcattgatcaagtggagccttattcttccacagcccaggtccagtttgacgagccggaggccacgggtggagtccctatcctcaaatataaagcagagtggagagccgttggcgaggaggtttggcattccaaatggtacgacgctaaggaggcaagtatggaggggatcgtcactattgtgggccttaagccggaaaccacctatgccgtgagattggctgccctaaacggcaaggggttgggcgagatttccgcagctagcgagtttaaaacccagccagtccaggctccccctcctactgctagcgcctctagttccacccccgtgccacttagtcctccagatactacctggccattgccggcactcgcaactacagaacccgctaaaaatatcgcacagaatcactgctgtaacatgttccaggcaggccttcacaatgctctcatgaagtag

SEQ ID NO: 29738 - DNA, 942 bp, synthetic construct
  misc_feature 1..942: note = Description of Artificial Sequence: Synthetic coding sequence
  source 1..942: mol_type = other DNA
atggagggtatcgtgaccatcgttggacttaagccagaaaccacctacgctgtccgtctggcagcactaaacggaaagggcctcggcgaaatcagcgccgcatcagagtttaaaacccaaccagtgcatagccctccacccccagcttctgcctcctcctcaaccccagtgccgctgtctcctccggacaccggggaaccaagcgctccaaaactggagggacagatgggtgaagacggcaactctattaaggtcaaccttattaaacaggatgacggaggttcccctatccgccattacctggtgcggtatcgtgcccttagtagcgaatggaagccagagattcggctgcctagtggctccgatcacgtgatgctgaaaagcctggactggaacgccgaatatgaagtatacgtggtggctgaaaaccagcaaggcaagtcgaaggcagctcattttgtcttccgcacatctgcccagcccaccgcaattcccgctaacggtagtccaacaagtgggctgtctaccggagccatcgtcggcattctgatcgtgatctttgtgctgctgctggtcgtcgtggatatcacatgttattttctcaacaaatgtggtctatttatgtgcatcgctgtcaatttatgtgggaaagctggccctggcgctaaaggcaaagacatggaggaaggtaaggcagcattctcaaaggacgagtcgaaagaacccatcgtcgaagtgcggacagaggaggagcgcaccccgaatcacgacggtggcaagcacacggagccaaacgagaccactccactgacagaaccggaaaaaggtcctgtcgaggccaagcccgaatgtcaagagaccgaaaccaagcccgctcctgccgaggtgaagaccgttccaaatgatgcaactcagaccaaggagaacgaatctaaagcgtag

SEQ ID NO: 29739 - DNA, 570 bp, synthetic construct
  misc_feature 1..570: note = Description of Artificial Sequence: Synthetic coding sequence
  source 1..570: mol_type = other DNA
atgactgagtataagctggttgtggtgggggctggaggagttggcaagagtgcactcacaattcaactcattcagaaccactttgttgacgagtatgaccctaccattgaagatagttataggaaacaggtggtgatagacggagagacatgtctcctggacatactcgatactgctggccaggaggagtactccgctatgcgcgaccagtacatgaggacgggggaaggatttctttgtgtgtttgctataaacaactcaaagtctttcgccgatatcaatctgtaccgtgaacagatcaagcgggtgaaagattccgacgacgtcccaatggtgcttgtcggcaataagtgcgacctcccaacgcggacagttgacacgaaacaggcccacgagctggcaaagtcttatggcatcccttttatcgagacctctgccaagactaggcagggagtcgaggatgctttctacaccctcgtgagagagatacgacaataccgtatgaaaaagctcaacagttctgacgatgggacccagggatgcatggggctaccctgcgtcgttatgtag

SEQ ID NO: 29740 - DNA, 651 bp, synthetic construct
  misc_feature 1..651: note = Description of Artificial Sequence: Synthetic coding sequence
  source 1..651: mol_type = other DNA
atgccgggaaatctgatgtcgcagacctcaagggctgtgtcaatatggaagttcccggctaaattgggcaaaacacacgggcacagggccttggaagccaccggaatgatgttgagggtcctggttggagccgtccttccagcaatgctcctggccgctccccctcctattaataaattggccctctttccagataagtctgcctggtgtgaagccaagaacatcacccagatcgtcggtcacagtggttgcgaggcgaaatccatccagaaccgggcatgtctaggtcaatgcttctcttactccgtgccaaataccttcccccagtctacggaatccctagtgcattgcgattcttgcatgccagcacagagcatgtgggagatcgttacccttgagtgccctgggcatgaggaggtacccagagtggataagctggtcgagaaaattctgcactgcagttgtcaagcatgcggcaaagagccttcgcacgagggattgagcgtctacgtccagggggaagacggtcctggatctcagcctggaacacatccacacccccatccacatcctcaccccggaggccaaacaccggagccagaggatccccctggcgctccgcatacagaggaggagggggcagaagactag

SEQ ID NO: 29741 - DNA, 546 bp, synthetic construct
  misc_feature 1..546: note = Description of Artificial Sequence: Synthetic coding sequence
  source 1..546: mol_type = other DNA
atgatgctgcgtgtgttggtcggcgctgtgctgcctgcaatgttgttggcagcgccaccacccattaataagctggcccttttcccagataaatccgcctggtgtgaggcgaaaaacatcacccagatcgtgggacatagtggatgtgaagccaagagcatccagaaccgcgcttgtcttgggcagtgcttcagctactccgtaccaaacaccttcccccaatccacggaaagtctcgtccactgcgattcctgcatgccagctcagagcatgtgggaaatagtgacactcgagtgcccagggcacgaagaagtgcctagagtcgataagctggtggagaaaatcctccattgttcatgtcaggcctgtggaaaggagccttcccacgaaggtttgtcagtgtacgttcagggcgaagatggccctggctctcagcccggaacccacccgcacccacatcctcacccccacccagggggacagaccccggaaccagaggatcctcctggtgctccacacactgaagaggagggcgctgaggattag

SEQ ID NO: 29742 - DNA, 351 bp, synthetic construct
  misc_feature 1..351: note = Description of Artificial Sequence: Synthetic coding sequence
  source 1..351: mol_type = other DNA
atgatgctaagagtgctagtaggggcagtgttgcccgcaatgctgcttgctgccccaccaccaatcaataaactggccctgtttccggacaaaagtgcttggtgcgaggcaaagaacataactcaaatcgtgggtcattctggatgtgaagctaaaagtatacaaaacagagcttgcttgggtcagtgctttagttactcagttcccaacactttccctcaaagtacggaatctctggtgcactgtgacagttgcatgcccgcacagagtatgtgggagatcgtgaccctcgagtgccctggacacgaggaggtgccaagggtcgacaaactggtggaaaagatactgtag

SEQ ID NO: 29743 - DNA, 492 bp, synthetic construct
  misc_feature 1..492: note = Description of Artificial Sequence: Synthetic coding sequence
  source 1..492: mol_type = other DNA
atgctcagggtcctggtgggggctgtgctccccgctatgcttctggccgctcctccgccaatcaacaaattagccttgtttcctgataaatccgcctggtgtgaggcaaaaaacatcactcagatcgtgggacacagtggctgcgaggccaaatctatccagaaccgggcttgcctaggacagtgttttagctactcagtgcccaacacattccctcagtcaaccgagtcactggttcattgtgattcttgtatgccagcccagtctatgtgggagattgtcaccctggaatgtcccggtcacgaggaggtgcctcgagtggacaagctggttgagaaaatcttacactgctcatgtcaggcttgtgggaaagaaccatcccacgagggattatccgtatatgtacagggcgaggatggaccaggcagtcagccagggactcatccccacccccacccacacccccaccccggaggccagacgcccgaatag

SEQ ID NO: 29744 - DNA, 354 bp, synthetic construct
  misc_feature 1..354: note = Description of Artificial Sequence: Synthetic coding sequence
  source 1..354: mol_type = other DNA
atgatgctccgagtcctcgtgggagccgtactcccggctatgctgttagccgctccaccacctattaacaagctggccttgtttccagataagtccgcctggtgtgaagcgaaaaacatcacacagatcgttggacacagcggatgcgaagccaagtcaatccagaatagagcttgtctcggacagtgtttcagttattctgtgccaaatacgttcccccagtctactgaatctcttgtccactgtgactcatgtatgcccgctcagtccatgtgggagattgtgacactagagtgccccggacacgaagaggttccaagggttgataagcttgtagaaaagattctgcattag

SEQ ID NO: 29745 - DNA, 330 bp, synthetic construct
  misc_feature 1..330: note = Description of Artificial Sequence: Synthetic coding sequence
  source 1..330: mol_type = other DNA
atgatgctgcgggtgctggtcggggctgttctaccggctatgttgctcgccgctcctcccccaattaataaactggcgttgttcccggacaaatctgcgtggtgtgaagcaaagaatataacacagattgtgggacactctggctgtgaggccaagagcatccaaaaccgtgcttgcctaggtcagtgctttagttatagcgtgcctaacacttttcctcaaagcaccgagagcttggtccactgcgatagttgtatgcctgcccagtcaatgtgggagattgtgaccctggagtgtcctgggcacgaagaggtgcctcgcgtagattag

SEQ ID NO: 29746 - DNA, 387 bp, synthetic construct
  misc_feature 1..387: note = Description of Artificial Sequence: Synthetic coding sequence
  source 1..387: mol_type = other DNA
atgatgctgcgggttctggtcggagctgttctcccagcaatgctactcgctgctccaccccctatcaacaagctagccctgttccccgacaagtctgcctggtgtgaagcaaagaacattacccagattgtcggtcatagcgggtgtgaggcgaagagtatccagaaccgcgcatgcctcggacagtgtttcagctattccgtgccaaacacatttccacagtccacggagagtctcgtgcactgcgattcttgtatgcccgctcaatcgatgtgggagatcgttactctagagtgtcccggacacgaggaggtgcctagagtagataagctcgtagaaaagatcttgcactgctcatgtcaggcctgtggtaaagaaccatcctag

SEQ ID NO: 29747 - DNA, 543 bp, synthetic construct
  misc_feature 1..543: note = Description of Artificial Sequence: Synthetic coding sequence
  source 1..543: mol_type = other DNA
atgctgagggtcctggtgggggctgtgctccctgccatgctccttgccgcaccaccacccatcaataaattggccttgtttcctgacaaatctgcctggtgtgaggccaagaatatcacacagatcgtgggacactctggatgcgaggcaaaaagcatacagaatcgcgcatgcctggggcagtgctttagctatagcgttccgaacacatttccccagagcaccgagtcacttgtgcattgtgacagctgcatgccggctcaatccatgtgggaaatcgtcaccctcgagtgcccaggccatgaggaagtgccaagagtggataaactcgtcgagaagatactccactgtagctgccaggcgtgcggcaaggagcccagccacgaggggctgtctgtgtacgttcagggagaagacgggcctggatcccaacccggaactcaccctcacccccatccacacccacaccccggtggacaaactcccgagcccgaagacccccctggtgctcctcataccgaagaagagggtgcggaggactag

SEQ ID NO: 29748 - DNA, 8456 bp, synthetic construct
  misc_feature 1..8456: note = Description of Artificial Sequence: Synthetic coding sequence
  source 1..8456: mol_type = other DNA
atggccgcacacagaccggtcgaatgggttcaagcagtggttagccggtttgacgagcagctgccaatcaagactgggcagcagaacactcacactaaggtatcaactgagcataacaaagaatgcctaatcaatatctctaagtacaaatttagtctggtgatctccgggctgacaactatccttaaaaacgtcaacaacatgcgtattttcggagaggccgcagagaaaaacctatacctgagccagctgatcatactggacacactagaaaaatgcttagccggacagccaaaggatacaatgcgattagacgaaaccatgctggtaaaacaactgctgcctgaaatatgtcatttcctccacacctgtcgggaaggcaatcagcatgctgccgaactcagaaatagtgctagcggagtactgttctcgctttcgtgtaataattttaacgcagtgttctccaggatttctaccagactgcaggaactgaccgtgtgctctgaggacaacgtggatgtgcacgatatcgagttgctccagtacatcaatgtagattgtgcaaagctgaagagattgttgaaggaaaccgcatttaaatttaaggccctgaagaaagtagctcagctggcagttattaactcactggaaaaagccttttggaactgggtggagaactacccagatgagttcaccaagttgtatcagatccctcagaccgacatggcggaatgcgctgagaagctttttgatttggtggacggctttgccgaaagcactaaacggaaagctgcagtttggcctcttcaaattatattactgatcctctgccctgagattattcaggatatcagtaaggacgtggtagacgagaacaatatgaacaagaagctgttcctcgacagcctccgaaaggccttagcgggacatggcggttctaggcaactgaccgagagtgccgcaatagcctgcgtcaagctgtgtaaagcgagtacctatattaattgggaagataattctgtcatattcctgttagtgcagagcatggtcgtggatctgaaaaacctgctgtttaacccaagtaaaccattctctcgcggaagtcaacctgctgatgtagatctcatgatagactgtctagtgagttgctttaggatcagtcctcacaacaatcaacactttaaaatctgcctggctcaaaattccccctcaacatttcattatgtgctcgttaacagtctgcataggataatcaccaatagtgcacttgactggtggcccaaaatcgacgctgtatactgtcactccgtggagttgaggaatatgttcggtgagacactgcacaaagcggtacagggctgcggcgcacaccccgcaattcggatggctccctcccttacattcaaggagaaggtgacatcactgaagtttaaagagaaacccaccgatctggagaccaggagctacaaatacctcctgctgtcgatggtcaagttgatccatgcggaccccaaactcctcctgtgcaaccctaggaagcaaggaccagaaacacagggaagcaccgccgaactgattacaggtctggtgcagctggtcccccagagtcatatgcccgaaatagctcaagaggctatggaggccctgttggtgctgcaccaactggatagcatcgacctctggaatcccgatgccccagtggaaacattttgggaaatctcatcgcagatgctgttctatatttgtaagaaactaacatcccaccaaatgctctcctcaaccgagattttgaagtggctacgggagattctgatatgtaggaataaattcttgctgaagaataagcaagccgaccggtcaagctgtcattttctcctgttttacggagttggttgcgatatccccagttcggggaatacctcccaaatgtcaatggatcacgaggagctgctgcgtacccccggagccagtctacgcaaagggaagggaaacagttcaatggattccgcagccggttgctccggtacacctcccatttgtcgccaggcccagaccaagttggaggttgccttatacatgtttctatggaaccccgatacggaggccgtcctggtggcaatgtcatgtttccggcacctttgcgaagaagcagatatcagatgcggtgtagacgaagtaagtgtgcataatctcttgcccaactataacactttcatggagtttgcctccgtcagcaatatgatgagcaccggccgtgccgctctccagaagcgggtgatggccctgctaaggcgcatagagcacccaactgccggaaataccgaagcttgggaagacacccatgccaagtgggaacaggcaacaaagctcattctgaattaccccaaagccaagatggaggatggccaggccgctgagtccctgcacaagaccattgtcaaacgacggatgagccatgtatctggaggaggctcaattgacctctcagacactgattctcttcaggagtggatcaacatgactgggttcctgtgcgcattagggggtgtgtgcctgcaacagaggagcaactctggtctggctacctatagtccccctatgggcccagtgagtgagcgcaaaggttcaatgatctcggttatgtcttccgagggcaacgccgatacccccgttagtaaattcatggataggctgctgtcgttgatggtgtgtaaccacgagaaggtaggcctgcagattaggactaatgtgaaggacctggtgggcctcgagcttagccctgctctctacccaatgctgtttaacaagctgaaaaacactatcagcaaatttttcgattcccaggggcaagtcctgctgactgacactaatacccagtttgtggagcagacaatcgccatcatgaaaaacctcctggacaaccacaccgaaggttcttctgaacatctcggccaggcaagtattgaaaccatgatgctcaatctggtgaggtacgtgcgtgtactgggcaacatggtgcatgctattcagatcaagactaaactctgtcagctggtggaggtcatgatggctcgacgggacgacctctctttctgtcaggaaatgaaattccgcaacaagatggttgagtatttgactgactgggtgatgggcacttctaatcaagccgctgatgacgacgtgaagtgtctcactcgcgacttggaccaggcatctatggaggccgtggtttccttgcttgcaggcctgcctcttcagccagaggaaggagacggcgtggagctgatggaggccaaatcccaactgtttctcaagtatttcacactgttcatgaacctgctgaacgactgtagtgaggtggaagacgagtccgcgcagacagggggtaggaaacggggtatgagtcgcaggcttgcctcactgaggcattgcactgtactagctatgtctaatttgctcaatgcaaatgtggacagtggcttgatgcactcaataggactcgggtatcacaaggacctgcagaccagggctactttcatggaagtcttgactaagatattgcagcagggaaccgaattcgatacactggcagaaaccgtgctggccgataggtttgagagattagtggaacttgtgacgatgatgggagatcagggggagctaccaatcgcaatggcgcttgctaacgtggtgccgtgttcacagtgggatgagctcgcgcgtgttttagttaccctgttcgattcacggcacctgctgtaccagcttctctggaatatgtttagtaaagaggtggaactagccgacagtatgcagactctttttcggggaaactccttggcgtcaaagattatgacgttctgtttcaaagtgtatggtgccacttacctgcagaagctgctggacccactgctccgtatcgtgatcacatcatctgattggcaacacgtgtcgtttgaagtggaccccactaggctcgagcctagcgagagtctggaggagaaccagcgaaaccttcttcagatgactgaaaagttctttcacgcaataataagtagtagctctgaatttccaccccagcttcggagcgtgtgccactgtctgtatcaagtcgtctcacagcgttttcctcagaactcgataggtgccgtgggatctgcaatgttcctgcggtttatcaatccagcaattgtgagtccatatgaggcgggaatcctggacaagaaaccgcctccccgaatcgaaagaggcctgaaactgatgagcaaaatactgcaatccatcgccaaccatgtgctctttacgaaagaggagcacatgcggccatttaatgacttcgttaaaagtaatttcgatgcagcccgaaggttctttctggacatcgcatccgactgccctactagcgatgcggttaaccattcgctgtcgttcatctcagacggaaatgtgcttgcattacatcgcttgctgtggaacaatcaggagaagatcggtcagtatttgtcatccaaccgcgatcacaaggcggtgggccgtaggccctttgacaaaatggccaccctcctcgcgtatctgggacccccagagcacaaacccgtggcagacacccattggtctagtctgaacctaacgtcttccaagttcgaagaattcatgaccaggcatcaggtccatgaaaaggaggagtttaaagctctaaagacattgtctatcttttatcaggccggaacttctaaggcgggaaatccaatcttttattacgtcgcgaggcggtttaaaacaggacagataaacggagatctcctgatttatcatgtccttctgaccctcaagccgtactacgccaagccttatgagattgtcgtggatcttacacacactggtcccagcaataggttcaaaaccgattttttgagcaagtggttcgtagtgttccctggtttcgcgtatgacaatgtctccgctgtgtatatctacaactgtaacagctgggtccgggagtatacgaagtaccatgaaagactgcttaccggactgaagggctcaaaacgcttggtgtttattgattgcccaggaaagcttgccgagcatatcgaacacgaacagcaaaagctgcccgctgcaaccctagccctggaagaggatcttaaggtgttccataatgctctcaaactggcacataaggatacaaaagtctcaattaaagtggggtcgaccgcagtccaggtgactagcgctgagaggactaaagttcttgggcaaagcgtgttcttaaatgacatctactacgccagtgagattgaggagatttgtttagtggatgagaaccagttcaccctaaccattgctaatcagggcacaccactgacattcatgcaccaggaatgcgaggcgatcgtccaatctatcattcacattagaacgcgatgggagttaagtcagccggactccatccctcaacacacaaagatcagaccaaaggacgtgcctgggaccctccttaatattgccctcctcaatctggggtctagtgacccatctttaaggtccgccgcttacaatctgttgtgcgctctgacgtgtacattcaatctgaagatcgaaggacagcttctcgaaactagcggactctgtatcccagccaataatacgttattcattgtgagcatttctaaaacattggccgcaaacgagcctcacttgaccctggagtttctcgaggagtgtatttctgggttctccaaaagttccatagaactgaaacacctctgcttggagtacatgactccctggctgtccaaccttgtgcggttttgcaaacataatgatgacgccaagcggcaacgcgtgacagctatccttgacaagcttatcacaatgactatcaacgaaaagcagatgtaccctagcatccaggccaaaatctggggtagcctggggcaaatcaccgacttacttgatgtagtccttgatagctttattaagacgtctgctacggggggattgggctccatcaaagctgaggtcatggcagatactgcagtagcactggctagtggcaacgtgaaattggtctcttcaaaggtgatcggcagaatgtgcaaaatcattgacaagacctgcctgtcgccgactccaacactggagcaacaccttatgtgggatgatattgctatcttggccagatatatgctgatgctctctttcaataatagtctcgacgttgcggctcatttgccatacctttttcacgtagttactttccttgttgctaccgggccattgtcattgagggctagcacacacggtctagtgattaacattatccatagcctttgcacctgctcacagcttcacttcagcgaggaaacgaaacaggttttacgacttagcttgactgagttttccctgcccaaattttatctgctcttcggcatcagtaaagtgaaatcagccgcagttatcgccttccggtccagttatcgggaccggtcgttctctcccggatcatacgagagagagacctttgctctgacgtcacttgagacggtcactgaggctctgctcgagatcatggaggcttgtatgcgggatatccctacttgcaaatggcttgaccagtggacagagctggcccagcgctttgcctttcagtacaatcctagcctgcagcccagagccctggtcgtgttcggctgcatctcgaaaagagtgagtcacggccagattaagcagatcatccgcatactgagtaaggcactggaatcgtgccttaaaggccctgatacttacaattcccaagttttaatcgaggccaccgtcatcgccctgacaaagttgcagcccctcctgaataaggattctccactccacaaggccctcttttgggtcgccgtggccgtcttgcaactcgatgaggtcaacctttattcggccggtaccgccttgctggagcagaacctccacactctggattcactcaggatttttaacgataaatcaccagaggaggtgttcatggccataaggaaccccctcgaatggcactgtaaacagatggatcatttcgttggcttaaacttcaattcaaattttaattttgctctggtggggcacctccttaaagggtacagacacccaagccccgcaattgtcgcaaggaccgtcaggatcttacataccttgctcaccctggttaacaagcaccgcaactgtgacaagtttgaagtgaatacacagtctgtggcctatttggccgcactcctgaccgtgagcgaggaggtgagaagtagatgctctctaaagcacaggaaaagcttgctgttaaccgatatcagcatggagaatgtgcccatggatacatatccaattcatcacggtgaccctagctatagaacccttaaggagactcaaccttggtccagtcctaaaggaagcgagggatacctggccgcaacttatcccaccgttggccagacctcaccgcgagctcggaaaagcatgagtctggacatggggcaacccagtcaggccaacacaaagaagctgctgggaaccagaaagtcctttgaccatttaatatctgatactaaggcacccaaaaggcaggagatggagagtgggataactacaccccctaagatgaggcgcgtcgcagaaactgattacgaaatggagactcagaggatttcctcaagccagcagcacccccatctgaggaaagtgagcgtgagcgaaagcaatgtcctgcttgacgaggaagtgttgaccgatccgaagatacaggcactcctgctcacagtactcgcaacactggttaagtatacaactgacgagttcgaccaacgcattttgtacgagtatctggcagaggcgagcgtcgtctttccaaaggtattcccagtggtgcacaatcttctggactccaaaatcaacacgttactgtctctctgtcaggatcctaacctcctgaatccgatccacggtatcgtgcagagcgttgtttaccacgaagaaagtccacctcagtaccagacatcctacctgcagagtttcggatttaacggtctgtggcgcttcgccggacctttcagcaagcaaacccagatacctgattatgcagaactaattgtcaaatttctcgacgccctgatcgatacctacctgcccggaatcgacgaagagaccagtgaggagtccttgctcaccccgacctctccctacccacccgctttgcagtcacagctgtccattactgcgaatttgaatttgtcaaacagcatgaccagcctcgcaactagccagcacagtccagggatagacaaagaaaatgttgagctcagccccacaacaggtcattgtaatagcggcaggaccagacacggatctgcttcacaggtccaaaagcagcgaagcgccggttcttttaaacggaatagtattaagaaaatcgtcta

SEQ ID NO: 29749 - DNA, 8519 bp, synthetic construct
  misc_feature 1..8519: note = Description of Artificial Sequence: Synthetic coding sequence
  source 1..8519: mol_type = other DNA
atggctgcccatcgccctgttgagtgggtgcaggccgtggtgagccgatttgacgaacagctgccaatcaaaactgggcagcagaacacccacacaaaagtgtccacagaacacaataaagagtgtctcatcaacatctcaaagtacaaattcagtctggtgatttctggactgaccaccattctgaagaacgtgaataatatgcgtatcttcggagaggccgcagagaaaaacttgtatttatcccagctgattatcctcgatacccttgaaaagtgtttagcaggacagccgaaggacactatgcggctggatgagacaatgttggtgaaacagcttctcccagaaatctgtcacttcctgcatacctgtcgcgagggcaaccagcacgcagctgaactgcgcaattctgcaagcggtgtactgttcagtttgtcctgcaataattttaacgcggttttctctcggataagcacccgccttcaagaactcacagtatgttctgaagacaacgtggatgtgcacgacatcgaactgctgcaatacatcaacgtggattgtgccaaactgaagagactcctaaaggaaacagcattcaaattcaaggccctaaagaaggtggcacagctggccgtgattaattctctggaaaaggccttctggaactgggtggaaaattacccagatgagtttacaaaactgtatcagattccgcagacagacatggctgaatgcgctgagaagctcttcgacctggtggatggcttcgctgaaagcactaagcggaaagcagctgtatggccactgcaaattattctgcttattctctgtccagagatcatccaggacataagcaaggacgttgtggatgaaaacaacatgaacaagaaactgttcctggactccctacgcaaagcactggctggtcacggcggaagcagacagctcacagaaagcgctgcaatcgcatgtgtgaagctctgcaaagcgtctacatacatcaactgggaggacaactcggtgatttttttgctcgtccagtcaatggtggtggacctcaagaatctgttgttcaatccatcgaaacctttttctagggggtcgcaacctgcggatgtggatctgatgatcgattgtctcgtcagctgctttcggattagcccccataataatcagcactttaaaatctgtctggcccagaactccccctccacctttcattatgtgctagtgaattctctgcaccggattataacaaatagcgcactggattggtggccaaagatcgacgcagtctactgtcacagtgtggaattgcggaatatgtttggagaaactttgcataaggctgtgcagggttgtggagcacacccagcaatccgtatggccccatcactgaccttcaaagagaaggtgacctcactgaagtttaaggagaagcccacagatttggagactaggtcttacaagtacttgctgctgtcaatggtgaagctcattcatgctgatcctaaactgctgctgtgtaatccaagaaagcaagggccagaaacccaaggctcaaccgcagaactgatcacagggctcgtgcagctagttcctcaatctcatatgccggagatcgcccaggaggcaatggaagccctgcttgtgctgcaccagctggacagtattgacctgtggaaccccgacgcccctgtggaaaccttctgggagatcagctcacagatgttgttctatatctgcaagaagctgacctcccatcagatgttatcatccactgagattctgaaatggttgagagaaatattgatttgccgtaacaaattccttctgaaaaataagcaagctgatcgctctagctgccacttccttctgttttacggagtgggatgtgacatcccgtcttctggaaatacttctcagatgtccatggatcacgaggaactgctgcggactccaggcgcttcactgcggaaaggcaaaggtaactcgagcatggattccgcggctggatgctccggcactcctccaatttgccggcaggctcagacaaagttggaagtggcactgtatatgttcctttggaaccctgataccgaggctgtcttagttgcgatgtcttgctttcgccacctgtgtgaggaggccgatatcagatgcggagttgatgaggtttccgtgcataacctgctgcctaactacaatacctttatggagttcgcaagtgtgtctaacatgatgagcaccgggagggccgctctgcaaaaaagggtgatggcccttcttcggcgtattgagcatccaacagcgggtaatacggaggcttgggaagatactcatgccaaatgggaacaggcgacgaagcttatcctgaactatccaaaggccaaaatggaagacgggcaggccgcagagagcctccacaagacgatagttaaaaggcgcatgtcccacgtcagcggcggaggctcaattgacctgagtgacacggatagccttcaggaatggatcaacatgaccggcttcctatgtgctttgggcggagtctgtcttcagcaacgaagtaattctggcctggccacctattcgcctccaatgggtccagtttccgagcgaaagggtagcatgatctcagtgatgtcctcagaaggaaacgctgatacccccgtgagcaaattcatggaccgccttctctcactgatggtttgcaatcatgagaaagttggcttgcaaatcaggacaaatgtgaaggatctggtcggcctggagctgtcgcccgcactgtatcctatgctatttaacaaattaaaaaacacaatctcaaagttctttgactcccaggggcaggtgttgcttactgacactaatacacaattcgtcgagcagaccatcgcgattatgaaaaacctcctcgataatcacaccgagggttcctccgagcatctgggacaggcctctattgaaactatgatgctcaatctcgtgcgatacgtccgagtgctggggaacatggttcatgctatccaaataaagactaaactttgtcagctggtggaagtgatgatggctcgccgagacgacttgagcttctgtcaggagatgaaattccggaataagatggtggagtatctcacagactgggtgatgggaaccagcaatcaggcggcagacgatgacgtgaaatgtctaacaagagacctggaccaggcttccatggaggcagtggtgtcgctgctcgctgggttgccgctccagcccgaagagggtgatggagtggagttaatggaggctaaatcacaactgttcctcaaatatttcacgctctttatgaacctgctcaacgactgcagcgaggtggaggatgagtcagcacaaacagggggtaggaaacgcggtatgtcaagacgactggctagtctccgccattgtactgtgcttgccatgagcaacttactcaatgcaaacgtggactctgggctcatgcatagtatcgggctgggatatcataaagatctgcagactcgtgcaacgttcatggaagtactgaccaaaatcctccagcagggaactgaatttgatacacttgctgaaacggtgctcgcagatcgctttgagcgcctggtcgagttggtgactatgatgggggaccagggcgaactgcctatcgctatggcccttgccaacgtggtgccctgctctcagtgggacgagttagcccgagtgctggtgaccttatttgacagtcgtcacttgctgtaccagcttctgtggaacatgttctccaaagaggtggaactcgccgattcaatgcagacattgtttcgagggaattcactggctagcaaaatcatgacgttctgttttaaggtgtatggggctacctatttgcagaaactgttggatcctttactgcggattgtcattaccagctcggattggcagcacgtgtcatttgaagtcgatccaacaaggctggaaccatccgagtctctggaggagaaccaacgtaatctgttacagatgactgagaagtttttccacgctattatttcctcttcctcggaattccctccccagctgcgatcggtgtgccactgtctgtatcaggcaacctgccattcccttttaaacaaagcaacggtaaaggagaaaaaggagaataaaaagagcgtggtttcacagagatttccccagaatagcattggcgctgtcgggtctgcaatgtttctaagattcattaatcccgcaattgtgtcaccatatgaggctggtatactcgacaagaagccgccaccgaggatcgagagagggctgaagttaatgagtaaaattttgcagagtattgccaaccacgttctgttcaccaaagaggagcacatgcggccattcaacgactttgtgaagagtaatttcgacgccgcacgcagattttttctggacatcgctagcgactgccccacctctgacgcagtgaaccattctctgagtttcatttcagacggtaacgtgcttgcacttcataggctcctgtggaataatcaggagaagatagggcaatatcttagctcgaaccgcgatcataaggcagtgggtcggcgtccgtttgacaagatggcaacactgcttgcttacctcggtcctccagagcacaagcctgtggccgacacccattggtcttccctcaatctcacatcaagtaaatttgaagagttcatgacaagacatcaggtacacgagaaggaggagtttaaggcactcaagactctcagcatcttttaccaggcaggaacatcaaaggcaggaaatcccatcttttattacgtggcaagaaggttcaagactgggcagatcaatggggacctgcttatctatcatgtgctcctgaccctgaagccttattatgctaaaccgtacgagattgtcgtggacttgacccatacaggcccttccaaccgcttcaaaacagactttctgagtaagtggttcgtggtgtttcccggtttcgcttacgacaatgtttcagcggtgtacatctacaattgtaatagctgggtgcgcgagtataccaagtatcatgagagactgctaacaggcctgaaagggtcgaaacggcttgtctttattgattgccccggaaagttagctgaacatattgaacacgagcagcagaagcttcctgcagctacgctcgcactggaggaggacctaaaggtgtttcacaacgcacttaagcttgcccacaaggacacgaaagttagtatcaaagtcggatctaccgctgtgcaggtgactagcgctgagcggactaaggtgctgggacaatcagtgttcctgaatgatatttattatgcgtcagaaatcgaagaaatctgtctggtggatgagaaccaatttactctcacaattgccaaccaaggcacgcccctaacattcatgcaccaggaatgtgaagcaatcgtgcaaagtataatacacatcaggacccggtgggaattgagccagccagactccattccccaacataccaagattcggccaaaggatgtgccgggaacgctgttgaatatagccctattgaatctaggaagttcagatccttctttgaggagcgccgcttataacctgctgtgcgcacttacctgcacttttaatctgaaaatcgaaggccaattactcgagacctcggggctctgcattccagctaacaacaccctgtttattgtatcgatcagtaaaacactggctgccaatgaaccccatctgaccctggagtttctggaagaatgcatatccggtttctcaaaaagcagcatcgagctaaagcacctgtgtcttgagtacatgactccgtggctctcgaatctagtacgcttctgcaagcataacgacgacgctaaacgtcaacgggtgacggccatcctggataagctgatcactatgaccataaatgaaaagcaaatgtatccttccatccaggccaaaatctggggcagcctcgggcagataaccgatctgctcgacgtggttcttgattccttcattaaaacaagtgccaccggcggactgggttcaatcaaggccgaggtgatggccgacacagccgttgcgctggcaagcggaaatgtgaaactagtttcctccaaggtcattggaaggatgtgcaagatcattgacaaaacatgcttatcccctaccccaaccctggagcagcatctgatgtgggacgatattgccattttagccaggtacatgctcatgctcagcttcaataacagcttggatgttgctgcacatttgccctatctgttccatgtggttactttcctcgtagccacagggccactgagcctgagagcttcaactcatggccttgtgatcaacatcatacacagcctatgtacctgctcccagctgcatttttccgaggagactaagcaggtcttaaggttaagcctgactgagttctctctgccaaagttttacctattattcgggatctctaaggtcaagagtgcggctgtgatagcttttcgctccagctaccgggatcggtccttctctccgggatcttacgaacgggagacattcgccttaacttctctagagacagtcaccgaagcactgcttgaaatcatggaagcttgtatgcgggacatccctacgtgcaagtggctcgatcagtggacagaactcgctcagcggttcgcttttcagtacaacccctcattgcagcccagggcccttgtggttttcggctgcatcagcaagagagttagccacgggcagattaaacagattattcgcatcctgtccaaagcactcgaatcatgtctgaagggccctgatacctacaattcacaagtgctcatcgaagcaaccgtgatcgcacttactaaacttcagccgctgcttaacaaggattctccgctgcacaaagctttgttctgggtagctgtcgcagtcctgcaacttgatgaggtgaatctttattcagcaggaaccgccctgctggaacagaacctgcacaccctggattcactgagaatattcaatgacaaatctcccgaggaagtttttatggccattcggaacccactggaatggcattgcaagcagatggaccactttgtggggctcaactttaattccaactttaattttgctcttgtgggccatcttctaaaaggttacaggcatcccagccccgctattgttgcccgtacggtgagaatcctccacacccttctgactctcgtgaataaacacaggaactgcgacaaatttgaggttaatacccaaagcgtagcctatctggccgctcttctgactgttagtgaggaggtaaggagcagatgttcattaaaacaccgaaagtccctgctgctcaccgacatcagcatggaaaacgtgcctatggacacgtatcccatccaccacggcgacccatcgtatcgcacattaaaggagactcagccctggtcttctcccaagggctccgagggctacttagctgcaacctacccaaccgtgggtcagacttccccccgtgctaggaagtccatgtcgctagacatgggccaacccagtcaggctaataccaagaaactcctgggcactagaaagagctttgaccatctgatctctgacactaaagctccaaagaggcaagagatggagagcggcataacaaccccccctaaaatgagacgggtggccgagacagattatgagatggaaacccagaggatttccagctcacagcagcacccacacctacggaaggtgtccgtgtctgagtcaaacgtcctactcgatgaagaagttttgacagatcccaagattcaggctctcctcctgacagtactcgccaccctggtcaagtacaccacagacgagttcgatcagcgcatcctatacgagtaccttgcagaggcctctgttgtgtttcctaaggtgttccctgtggtccacaatctccttgattcgaaaattaacaccctgctgtccctgtgtcaagaccctaatctgctgaatccaatccacggaatcgtgcagtccgtggtctaccatgaagaaagcccaccccaatatcagacaagctatttgcagtcctttggattcaacggtctttggagatttgctggcccttttagtaagcagactcagattcccgactacgcagaactcatagtgaaatttctggacgcactgatcgatacgtaccttcccggaattgacgaagagacctctgaggagagcctgctgactcctacatctccttaccctcctgcgctgcagagtcaactgagcatcactgccaacctaaacctttctaatagcatgacaagcctggccacttcgcagcacagccctggcatcgacaaagaaaacgtggagctctcccccacaaccgggcattgcaatagcggacgcacacggcatggttcagcttcacaggtacagaagcagagatctgctggctcttttaagaggaacagcatcaaaaagatcgtgta

SEQ ID NO: 29750 - DNA, 615 bp, synthetic construct
  misc_feature 1..615: note = Description of Artificial Sequence: Synthetic coding sequence
  source 1..615: mol_type = other DNA
atgcacgaacgatactcaaacgtccaggtagctggcccagtggatagaaccagctccaaggattctccactgcacaaggccctcttttgggtggccgtagccgtgctgcaactggacgaagtgaacctgtactccgccggaacagcactccttgagcagaatttgcatactctggacagtctcaggatttttaatgacaaatccccggaggaggtgtttatggctatacggaacccgctggagtggcactgtaagcaaatggaccatttcgtgggactcaatttcaattccaatttcaactttgctttagtcgggcatctccttaaaggataccgtcaccctagtccagcaattgtggccagaacggtgagaattcttcacaccctgctcactctcgttaacaaacacagaaattgtgataaattcgaggtgaacacgcagtctgtggcatatttagccgcactgctgacagtgagcgaggaggtgcgatcacggtgctccctgaagcatcgtaagtccctgctgctgacggacatcagcatggagaatgttccaatggacacataccctatccatcacggtgacccgtcttataggaataaagaaaaattttag

SEQ ID NO: 29751 - DNA, 1782 bp, synthetic construct
  misc_feature 1..1782: note = Description of Artificial Sequence: Synthetic coding sequence
  source 1..1782: mol_type = other DNA
atggccgctcaccgacccgttgagtgggtacaggcagtcgtctccaggttcgacgaacaacttcctattaaaaccggccagcagaacacacatacaaaagtgtccaccgaacacaacaaagaatgcctaataaacattagtaagtacaaattctccttggtgatcagcgggctcaccaccatcctcaaaaacgtgaacaatatgagaattttcggggaggccgctgaaaaaaacttatacctcagccagttgattatattagatactctggagaagtgtctcgctggacagccaaaagacacaatgagactcgatgagaccatgttagtgaaacagcttcttccagagatttgtcacttcctgcatacctgccgggaagggaatcagcatgccgctgagttaaggaatagtgcaagcggggtgctctttagcctgtcttgcaataatttcaacgctgtgttttcaagaatctcgactcgactgcaggagttgacagtgtgctcggaggacaatgtggacgtacatgacatcgaactgctccaatatattaatgttgattgtgctaagctgaaaagactcctgaaggagactgctttcaagttcaaagctctaaagaaggtggcgcagcttgcagtaattaactccctcgaaaaggctttttggaattgggttgagaactatcctgatgagtttactaagctctaccaaattccccagactgacatggcagagtgtgcggagaagctgtttgacctcgtcgacgggttcgcagaatcaaccaaaaggaaagcggcagtgtggccgctgcagataatcctgcttatcttatgtccagaaattattcaggacataagtaaggacgttgtcgacgagaacaatatgaacaaaaagttgtttctggattcccttagaaaagcgctggctgggcacggaggctcacgccagctgacagagagcgccgcaattgcttgcgtaaaactgtgtaaagcctcgacatacatcaactgggaggacaacagcgtaatcttcctgctggttcagtccatggtcgtcgacctgaagaacctcctcttcaaccctagtaaacctttcagtcggggttcgcaacctgctgatgtggacctgatgatcgactgcctcgtatcctgtttccggatcagtccacataacaatcagcactttaagatctgcctcgcacagaatagtccttcaactttccattacgtactggtgaattcactgcatcgcattatcaccaattcagcgttagattggtggcctaaaattgatgccgtctactgccattccgtggagctgcggaacatgttcggcgaaaccttgcacaaggctgtgcagggatgtggggctcatcctgcgatccgtatggccccttccctaacttttaaagaaaaggtcaccagtctgaaatttaaagagaagcctaccgacctggaaacacgatcctacaaatatcttctactaagcatggtgaagctcatccatgcagaccctaaactcctgctgtgcaacccccgaaagcagggaccggaaacccaggggtccactgccgaactgatcacgggattggtgcagcttgtgccacagagccacatgccagagattgcccaggaggctatggaggctctgctggtactgcaccaactagacagcatcgatctttggaacccggatgctcctgttgaaacattttgggaaattagatacatgtacttctacttcctgaacagtacatttaagttctacttcgtctttttaagttag

SEQ ID NO: 29752 - DNA, 1917 bp, synthetic construct
  misc_feature 1..1917: note = Description of Artificial Sequence: Synthetic coding sequence
  source 1..1917: mol_type = other DNA
atgcacgagcgatacagcaatgtgcaagtcgccggaccagtggaccgcacgtccagcaagttctgcgggtcattcaactgtcggtttgccttccagtataaccctagtctgcagccacgagctctggtggtcttcgggtgtatcagcaagcgggtctcccatggacaaatcaagcaaataatccgtatactcagcaaagccctcgaaagctgcctgaaagggcctgacacttataattcccaggtgctgatagaagcaacagtcatcgccctgacaaaactccaaccactcctgaacaaggacagtcctctccacaaagcattattttgggtggcagtcgccgtattgcagctggacgaagttaatttatactcggcgggtaccgccctgcttgaacagaacctacacaccctcgatagcctgcgtatttttaacgataagtcccctgaggaggtttttatggcaatccgcaatcctctggagtggcattgcaagcaaatggatcattttgtgggactgaattttaatagcaacttcaacttcgcactcgtaggacacctcctcaagggctatcgacatccttcccctgccattgttgcacgaacggtgcggattctccatactcttcttactctggtgaacaagcacagaaactgcgacaagttcgaggtgaacacgcagtctgtggcttatttagccgctcttttgacggtgagcgaggaggtccggagtaggtgcagcctgaaacataggaagtccctactgctgactgacataagcatggagaacgtgcccatggatacttaccccattcaccatggcgaccccagttatcgaaccctgaaagagactcagccttggtcatcccccaagggctccgagggctatctggcagccacataccctacagtcggccagactagtcctcgcgcacggaagagtatgtctctggacatgggccaaccttcacaggcgaatactaagaagcttctgggcactaggaagtctttcgaccacctgatatctgacaccaaggcaccaaagcgccaggagatggagtctgggattacgacacctccgaagatgagacgcgttgcagagaccgattacgagatggagacacaaaggatttcatccagccagcagcatccccacttgagaaaagtgagtgtttcggagtctaatgtgctgcttgatgaagaagtacttactgatccaaagattcaggccctgctgctgactgttcttgcgacactggtgaagtacaccacggatgagttcgaccagcgcatcctctacgagtatctagccgaagcttccgtcgtgtttccaaaagtgtttcctgtcgtacataaccttcttgatagtaagatcaacacactgctgtcactatgccaagatccgaatctgttaaacccaatccatgggattgtgcagtccgtggtgtaccatgaggaaagcccaccacaataccagacttcatacctgcaatcctttggtttcaacgggctttggcgatttgccggtccatttagcaaacagactcagattccagattatgccgagctgatcgtgaagttcttggatgctttaatcgacacatacctcccaggtatcgacgaagaaactagcgaagagtctctgctcactcctacaagcccataccctcctgccctccaaagtcagctctcaattaccgccaaccttaatcttagcaactcgatgacaagcctagctacctcacaacacagtcctgggattgataaggagaacgtggaattatcaccgacaaccggacattgtaatagcggcaggacccgccacggcagcgcttcacaggtgcaaaagcagcggagtgccggaagcttcaaactagcccttctgaatctgctgactgcgcatcagaactcattgtag

SEQ ID NO: 29753 - DNA, 7508 bp, synthetic construct
  misc_feature 1..7508: note = Description of Artificial Sequence: Synthetic coding sequence
  source 1..7508: mol_type = other DNA
aactgggaggacaactccgtcattttcctcctcgtgcaatctatggttgtggatctgaagaaccttctgtttaatccgagtaaacctttctcacgtgggagccaacccgcagacgtggatttaatgatagattgcctggtttcgtgcttccgaatcagccctcataacaatcaacatttcaagatctgtttggcgcagaacagcccctccacctttcattatgttcttgtgaacagtctccacaggattatcactaacagtgccttggactggtggcccaagattgatgctgtgtattgtcacagcgtcgagctgcggaacatgtttggagaaacattacacaaagccgtacagggttgcggcgcacatcctgctattcgaatggccccatcacttacattcaaagaaaaggtcaccagtctgaaattcaaagaaaagccaaccgacttggagacccgttcatacaagtatcttttactctctatggtgaaactaatccatgccgaccctaagcttctcctctgcaaccctaggaagcagggtcccgaaacccagggaagcaccgccgagctgattacgggcctggtgcagctagtgccccaatcccatatgccagaaattgcccaggaagcaatggaggccctgctggtacttcaccaacttgatagtatcgatctgtggaatccagatgctcccgttgaaactttttgggaaattagctcacagatgctcttttacatatgcaaaaagttaacctctcaccagatgctgtcctccactgaaatcctgaagtggctgcgagagatcctcatttgcagaaacaagtttctgttgaagaataaacaggctgacaggtcctcttgtcactttctgctgttctatggagtggggtgcgatatcccctccagcggcaatacatcccagatgtccatggaccacgaagagcttctccggacacccggtgcgagtctgcggaaaggtaagggaaattctagcatggatagtgccgctggctgtagtggcactccgcctatttgtaggcaggcacagaccaaactggaagttgctctatatatgttcctttggaacccggacactgaggcagttcttgtggctatgagttgtttccgtcacctatgtgaggaggcggacattagatgcggggtggacgaagtttccgtccataatctcctgcccaattacaacactttcatggaatttgcatctgtgtccaacatgatgtccacgggccgtgccgcactccagaaaagggtgatggctctgttgaggcgcatcgaacatcccacagctgggaacacagaagcctgggaagatacacacgccaagtgggaacaggcaaccaagctgatcctaaattacccaaaggcgaagatggaggacggccaggccgcagagtccctgcacaagacaatcgtaaaaaggagaatgagtcacgtttcagggggaggttccatcgacttgtcagacacagacagcctgcaggaatggataaatatgacgggcttcctgtgcgcccttgggggagtgtgcctgcaacagaggagtaactcaggtttggccacctactcccccccaatgggccctgtgagtgaaagaaaagggtcgatgatttccgttatgtcctccgaaggaaatgcagatacacccgtatctaagttcatggatcggctcctgtcccttatggtgtgtaaccacgagaaagtaggactgcagatccgcacgaatgtaaaggatttggtaggcctcgaactgtccccagcactataccccatgttattcaataagctcaagaatactatttctaaattctttgactctcagggccaagtgctgctgactgacaccaacactcagttcgtggagcagacaattgcaatcatgaagaatctgctagacaaccacactgaaggatcaagcgagcaccttggccaagcaagcattgaaactatgatgctaaacctagtgcgctatgttcgggtcctaggaaatatggtgcatgctatccagataaagaccaaactgtgccagttggttgaggtgatgatggccagaagagacgacttgagtttctgccaagaaatgaaattcagaaacaagatggtggagtatctgacagattgggtgatgggaacttcaaatcaggccgctgatgatgatgtgaagtgcctcacacgggacttggatcaagctagcatggaggctgtggtcagcctcctcgctggtctgcccctgcagcccgaagagggggacggcgtagagttaatggaagctaagtcccaactgtttctgaaatatttcaccctttttatgaacctgctgaacgattgcagcgaggtcgaagatgagtctgctcagacaggaggaagaaaaagaggcatgtcccggaggctggcctcactgaggcactgtactgtgctggcaatgtccaacttgctcaacgccaacgttgactccggcctcatgcattccatcggccttggataccataaagacctgcagactcgggcaacctttatggaggtgttgactaagattctgcagcaaggcaccgaatttgacacccttgccgagaccgttttggccgatagattcgaacgcctggttgagttggtgacaatgatgggagatcaaggtgaactgcccatagccatggcactggctaacgtggtcccgtgcagccaatgggacgagcttgcgcgtgtgctggttaccctctttgattcgagacatctgctttatcaactactttggaatatgttctctaaagaggtggagctggcggattctatgcaaacgttattccgagggaactccctggcctccaagatcatgacgttctgttttaaagtgtatggggcaacctacctgcagaaacttcttgacccccttctcaggatcgtgattactagctccgactggcagcatgtgtctttcgaggtggatccgacccgccttgagccttccgaatccctggaggagaatcagcggaaccttcttcagatgacagaaaagttttttcacgctattatttcctcatcctcagaattcccgcctcaactccggtcagtctgccactgcctttatcaagttgtttcgcagaggtttccacagaactcaattggcgcagttgggagtgccatgtttcttagattcatcaatcccgcaatcgtgtctccatacgaagctggaattctggacaagaagcccccacctaggatagagaggggcctcaaactgatgtccaaaatcctgcaatcaatcgccaaccacgtcctctttaccaaagaagaacacatgcgcccttttaacgattttgtaaaaagtaattttgacgccgctcggaggtttttcctggatatcgcctccgactgccccacgtccgacgcagtgaatcattccctaagcttcattagtgacgggaatgtactggccctccaccgcctcttgtggaataaccaggagaaaatcgggcagtacctgagttcaaatcgcgatcacaaagccgtcggcagacggccttttgataaaatggccactcttctcgcgtatctggggcctccggagcacaagcctgtagccgacacgcattggtcgagcctgaaccttacatccagtaaatttgaagagttcatgacaagacaccaggtccatgaaaaggaagagtttaaagcactcaagaccctgtccatcttttaccaggctggaacctctaaggcaggtaaccccatcttctattatgtggcgcgacgctttaaaaccggccagatcaacggcgatctgctgatctaccatgtactcctgactctcaagccttattatgcaaaaccctatgaaatcgttgtggacctaacacacactggacccagcaatcgctttaagacggactttctgagtaagtggtttgtcgtgttcccaggctttgcatatgataatgtatcagctgtttatatctacaactgtaattcctgggtgcgcgagtataccaagtatcacgagcggctgctcacgggcctgaagggatccaaacggttagtgttcatcgactgtcccggtaaactcgccgagcatattgagcacgaacaacagaagctgcccgcagcgacccttgctctcgaggaggacctcaaagtgttccacaacgctcttaagctcgcccataaggatactaaggtcagcattaaagtcggttccaccgcggtccaagtaacgtctgcagagcgaactaaagtcctgggacagagcgtgttcctgaacgacatttactacgcaagtgagatcgaagaaatctgtttggtggatgagaaccagtttaccctcaccatcgcgaaccagggaacacctttaacctttatgcatcaagagtgcgaagcgatcgtgcaatccatcattcacatacggacccgctgggagttaagccagcccgattccattcctcaacacaccaagataaggcctaaggatgtgcccggaacactgcttaacatcgccttactgaatctggggtcctctgatccctcattacgtagcgctgcatacaatttgctgtgtgccctcacttgcacttttaatctgaagatcgagggacagctgctagaaacttcagggctctgtatcccggctaataatacgctgtttattgtctccatctccaaaacactagccgcaaacgaaccgcatctgaccctggaatttttggaggagtgtatcagtggcttcagcaagtcttctatagaacttaagcacctttgtctagagtacatgaccccatggctgtccaacctagtacgattctgcaagcataatgacgacgcaaaacgccaaagagttacggccattcttgacaagctgataacaatgaccatcaacgaaaaacaaatgtacccctctatccaggccaaaatttggggctctctgggacaaatcacggacctcctcgatgtggtgcttgactcattcatcaaaacaagtgcgacgggaggccttggaagcattaaagccgaagtaatggcagataccgccgtcgcattagcctcaggaaacgttaagctggtaagctccaaagtgatcggacgaatgtgcaaaattattgataagacttgtttgagcccaacaccgaccctcgagcaacacttaatgtgggacgacatcgccatactggccaggtatatgcttatgttgtcattcaacaatagtctggacgtggctgcgcatttgccttacctttttcatgtggttactttcttggtagctacagggccactttctctgagagccagcacccacggcctggtgatcaatataatccactcactctgtacatgctcccagttgcatttctctgaggaaaccaagcaggtactgcgcctttctctaaccgaattctcactgcctaagttttacctactcttcggcatatccaaggtgaaatccgcggcagtaatcgcctttcggtcttcgtatagagataggagtttttcaccaggcagctacgagagggaaaccttcgccctaacatcacttgaaacagtgactgaagctctgcttgagatcatggaagcttgtatgcgggatattcccacttgtaagtggctcgaccagtggacggagctggcccagcgcttcgcatttcagtacaatcccagtcttcagccgcgagcccttgtggtcttcggttgtatctccaagagggtgagccacggccaaatcaaacagattatccgaattctgtccaaggcgctggaatcctgtctgaagggacccgacacctataatagccaagtgctgatcgaggcaactgtaatcgctcttactaagctacagcctctgctcaataaagactcccccctgcacaaagcgctcttctgggtggccgtggctgttctgcaactagacgaggtcaatctgtacagcgcgggtacagccctgctagagcaaaaccttcatacattagactcactgagaattttcaatgataagagtcctgaggaggtatttatggctattcggaatccactggaatggcattgcaaacagatggaccattttgtaggccttaatttcaactccaattttaatttcgcactggtgggccatctattgaagggttatcgccacccgagtcccgctatcgtcgccaggaccgtacgcattctgcacacgctcctcacgctggtcaacaagcataggaactgtgacaagtttgaagtgaatacccagtcagtagcatacttggccgctctgcttaccgtcagtgaggaggtgcggtcccgatgctctctgaagcataggaagagtctcctcctcacagatatctcaatggaaaacgtaccaatggatacataccccatccaccacggagatcccagttacagaacgcttaaggagactcaaccatggtcaagccccaagggctctgaaggctacttagccgcaacctatcccacagtgggtcaaacatcccctagggcgcgtaagagcatgtcccttgatatggggcaacccagccaggcgaatactaaaaaactcttgggcacccgtaaatccttcgaccacctcatcagtgacaccaaggccccaaaaaggcaggagatggagtctggtattactacccccccaaaaatgcggagggttgccgagaccgactacgaaatggaaactcagagaatctccagtagtcagcagcatccacacttgaggaaagttagcgttagcgaatccaatgtcctgctggacgaagaagtgctaaccgacccaaagatccaagccctcctcctgacggtcctggctactctggtaaagtatacgaccgacgagtttgatcagcgcatcctctacgagtatctggctgaggcatccgttgttttccccaaggtatttccagtggtgcacaacttactggatagtaaaatcaatactctcctttccctttgtcaggatcccaacctgctgaaccctattcacgggatagtccagtccgtagtttatcatgaggaatctccgcctcagtatcagactagctatcttcagtcctttggttttaacggactgtggcgattcgctggacccttcagtaagcagacccagattccggattacgctgagctgatcgttaagtttctggatgcgttaatagacacttacctgcccggaatcgatgaggaaaccagcgaggaatcccttcttacacccacatcaccctaccctcccgcactgcagtcacagctgtctattaccgccaatctcaatttgagcaatagtatgacatcccttgctacctcccaacacagtcccgctagtctcccctgtagtaagtcggccgtcttcatgcagttgtttccacatcagggcatcgacaaagagaatgtagagctctccccgacaacaggccattgcaattccgggcgaacccgccatggtagcgcatcccaagttcagaagcagcgatcagctggaagctttaagcgcaactctatcaagaaaatcgtgta

SEQ ID NO: 29754 - DNA, 1524 bp, synthetic construct
  misc_feature 1..1524: note = Description of Artificial Sequence: Synthetic coding sequence
  source 1..1524: mol_type = other DNA
atggcaggtgcaatcgcgagcagaatgtctttttccagcctgaaacgcaaacagcccaaaaccttcacagtgcggatagtgacgatggacgccgagatggagtttaattgcgaggtcaaaaaacagatcctcgatgaaaagatttattgcccccctgaggcaagcgtgttgctagcatcatacgcagtccaagcaaaatatggggattatgaccctagcgtgcacaagcgcggatttctggctcaggaagaacttctccctaagcgagtgatcaacctgtatcaaatgactcctgagatgtgggaagagagaatcacggcttggtacgctgaacaccgtgggagggcgagggacgaggcagaaatggagtacctgaagatcgcccaggacctagagatgtacggcgtcaactacttcgccattcgcaacaaaaagggcaccgaactgttacttggagtggatgccctggggttgcacatatatgaccctgagaatagactcacacctaagatttctttcccctggaacgaaatccgtaatattagctactctgacaaggaatttaccatcaagccgctggataaaaaaatcgacgtcttcaagtttaattcatccaagctacgcgtgaataaactcattctgcaactgtgtatagggaaccacgatctgtttatgcgccgacgcaaagccgactccttagaggtgcagcagatgaaggcccaggcaagggaggagaaggctcgcaaacagatggaaaggcagcggcttgcgagagaaaaacagatgcgcgaggaagcggagcggaccagagatgaactggaaagaagactcctacagatgaaagaggaggcgaccatggcgaatgaggccttaatgaggtcagaggaaacagctgacctgctggcagaaaaggctcagataaccgaagaggaagcaaagttactggcccagaaggctgccgaagccgagcaggaaatgcagaggattaaggcaactgcaatacggaccgaggaggagaagaggctgatggagcagaaggtgctagaggctgaggtgttggcccttaagatggcagaggagagtgaaaggcgggctaaagaggctgatcagcttaaacaggacttgcaggaggctcgcgaggctgaaaggcgcgctaagcagaagctcttggaaatcgccacaaaaccgacatacccaccgatgaacccaatccctgcaccgttacctccagacatcccctcatttaacctgatcggcgactcgttgtcatttgacttcaaagacaccgacatgaagagacttagcatggagatcgaaaaggaaaaggtggaatatatggagaagtctaagcacctccaggaacagttgaacgagctcaagacagagattgaagcgctgaaactcaaggagcgggaaaccgccctggacattctgcacaatgaaaatagtgaccgcggtggaagttccaagcacaatactattaagaaaccacaagcgcaagggcgtcggcctatctgtatttag

SEQ ID NO: 29755 - DNA, 1788 bp, synthetic construct
  misc_feature 1..1788: note = Description of Artificial Sequence: Synthetic coding sequence
  source 1..1788: mol_type = other DNA
atggccggagccattgcttcacgaatgtctttctcatctctgaagagaaagcagccaaaaacattcactgtcaggatcgttacaatggacgccgagatggaatttaactgcgagatgaagtggaagggcaaggacctgtttgatctggtgtgtcgcactctaggcttgcgcgaaacctggttcttcggtctccaatacaccatcaaagacacagtggcttggttaaagatggacaagaaagtactggatcacgacgtttcaaaagaggaacctgttacatttcacttcctggcaaagttctacccagaaaacgcagaagaagagctcgtccaagaaataacacagcatttgttttttttgcaagtgaaaaagcaaatcctagatgaaaagatctactgccccccagaggcgtcggtactcctggcttcatacgctgtccaggctaaatacggagactatgacccatctgtccataagcgagggttcctcgctcaggaagaactgttacctaagcgggttatcaacctatatcagatgacacccgaaatgtgggaagaacgaatcaccgcttggtatgccgaacaccgtgggagagcaagagacgaagctgagatggagtatctgaagattgcccaagacctggaaatgtacggagtgaactattttgccattcgtaacaagaaggggaccgagctgctactgggagtagatgcactgggcctccacatctacgatcccgagaaccgccttacgcctaagattagttttccttggaatgagataaggaacatttcttactccgacaaggaattcaccattaagcctttggataagaaaatcgatgtgttcaaattcaatagctccaaacttcgcgtgaacaaactgatcctccagctgtgtatcggcaatcacgatctgtttatgcggcgaaggaaagctgattcactggaggtgcagcaaatgaaggctcaggctcgggaagaaaaggccaggaaacagatggagcgccagcggcttgcgagagagaaacagatgcgcgaagaggcggagagaacccgtgatgaattggaacgcagactgctccagatgaaggaagaggccaccatggccaacgaagctctcatgaggtctgaagaaacggcggatttactggctgagaaagctcagatcacagaggaggaagctaagctgctggcgcaaaaagccgcagaagccgaacaggagatgcagcggattaaagcaaccgccataagaacagaagaagagaagcgccttatggagcagaaggtgcttgaagccgaggtgttggcactgaagatggccgaggagtccgagcgtcgggcaaaagaagcagaccagctgaaacaggatttacaggaagcaagagaggcagaaagacgggcaaaacaaaagctgttagagatagcaactaagccgacttaccccccaatgaaccctatcccagcacccctgccacccgacattccttcattcaaccttattggcgattccctttccttcgacttcaaagatacagacatgaagcgcctgagcatggaaatcgaaaaggaaaaggtcgagtacatggaaaaatccaagcatcttcaggaacagcttaatgagctaaaaacagaaattgaagcccttaagttgaaggagcgcgagactgctttagatatcctgcacaacgagaatagtgaccggggagggtccagtaaacacaacactataaagaaactgaccctccaaagcgcaaaatccagagtggccttttttgaagagctgtag

SEQ ID NO: 29756 - DNA, 663 bp, synthetic construct
  misc_feature 1..663: note = Description of Artificial Sequence: Synthetic coding sequence
  source 1..663: mol_type = other DNA
atggcgggagccatcgcttctcggatgagcttcagctcactgaaacggaagcaacccaagacattcacagtgagaatcgtgaccatggacgccgagatggagtttaactgcgaagtgaaaaaacagatcctagatgaaaagatctactgtccacccgaagccagtgtgctgctggcatcttatgctgtccaggctaaaaataagaaaggaaccgagcttctccttggggtggatgctctaggtctgcatatttacgaccctgagaacagactgacacccaaaatctcattcccatggaatgagatccggaacattagctattctgataaggagttcacaatcaagccactggataagaagatcgacgtcttcaaattcaattcgagcaaactcagagtcaataaattaatcctacagttgtgcatcggaaaccacgatctgtttatgcgacgcagaaaggcggattcactggaggtccaacagatgaaagctcaggcgcgagaagagaaggcgcgtaaacagggacagcggggacggtcggctgaggccggacctgccggttcaacccggggaggtgcgaagtcccaggctgaagcccctggcgattgccaccaggcccatgtgccggcacacgagcccaacagctcaacggtggcctcatag

SEQ ID NO: 29757 - DNA, 1524 bp, synthetic construct
  misc_feature 1..1524: note = Description of Artificial Sequence: Synthetic coding sequence
  source 1..1524: mol_type = other DNA
atggctggagccatagccagccggatgagcttctctagcttaaaacgaaagcaacctaaaacattcactgtaaggatagttacaatggatgccgagatggaattcaattgcgaggtgaagaagcagattctcgatgaaaaaatatattgtccgccagaagcatccgtgctcctggcaagctacgccgtgcaggcaaagtacggggactatgatccaagtgttcacaaaaggggttttttggctcaggaagagttactcccgaagcgtgtgataaacttgtaccagatgacgcctgagatgtgggaggagagaattacggcctggtacgcagagcatagaggaagggcacgggatgaggccgaaatggagtatctcaagatagctcaagaccttgagatgtatggagtgaattacttcgccatcaggaacaaaaagggcacagagctcttgctgggcgtggacgcactaggattgcacatctacgatcctgagaaccgcctgacgcccaagatatctttcccatggaacgagattcggaatatctcatattcagataaggaattcactatcaaacccctggataaaaaaatcgacgtgtttaagtttaacagttccaaactccgtgtgaacaaactgattctgcagctgtgcattggcaatcacgatctcttcatgagaagacgcaaagccgactctctggaggtccaacagatgaaggcccaagctcgagaagagaaagcgcgtaagcaaatggaaagacagcggctggctcgggaaaagcaaatgagagaggaggccgagcgaacccgcgacgagctggagaggaggctgctgcagatgaaagaggaggctaccatggccaacgaggcactaatgcgctctgaggagactgccgatttgctggcagagaaagctcagattaccgaagaagaggctaaacttctggcccaaaaagctgccgaggcagagcaggagatgcagagaattaaagctacggcgatacggactgaagaagaaaagcgccttatggagcagaaggtgctcgaagctgaggtcctcgcgttaaagatggctgaggagagcgagcgcagagcaaaggaagccgatcagctcaaacaagacctgcaggaagcaagagaagcagaacggagagcgaaacaaaaattgctggagatcgcaaccaaaccaacgtatcctccgatgaacccaatacccgcaccactgccgccagacatcccatccttcaacctcatcggtgacagcctgtctttcgacttcaaagacacagacatgaaacgcctcagcatggagatcgagaaagaaaaggtggagtacatggagaagtccaaacacctacaggagcagctgaatgagttaaagactgagattgaagccctcaaactaaaagaacgagagactgcactggatatcttgcataacgagaattcagatagaggcggttcgtcaaaacacaatacgatcaagaaaccacaggcccaggggaggagacccatctgtatttag

SEQ ID NO: 29758 - DNA, 1773 bp, synthetic construct
  misc_feature 1..1773: note = Description of Artificial Sequence: Synthetic coding sequence
  source 1..1773: mol_type = other DNA
atggccggagccatcgcctctaggatgtcctttagttccctaaaacgaaagcagcccaaaacattcaccgtgaggattgtgactatggatgcagagatggaattcaactgcgagatgaagtggaaaggcaaggatctcttcgacctggtgtgtcgaaccctgggcctgcgggagacatggttcttcgggttacaatacacgattaaagacaccgtcgcttggctgaagatggataagaaggttcttgatcatgatgtgtcaaaggaggaacccgtgacattccattttctggccaagttctacccggagaatgccgaggaggaactcgtgcaggaaatcacccagcacttgttctttttgcaggttaagaagcagattctggacgagaagatttattgccctcctgaagccagtgtcctgctggccagttacgccgtccaggccaaatatggcgattacgacccctccgtgcataagcggggttttctggcacaggaagaactgctcccgaaaagggtaatcaatctctaccagatgacacccgagatgtgggaagaacggatcactgcctggtacgccgaacaccgaggcagagcacgggatgaggccgagatggagtatctgaagatcgctcaggatttagaaatgtacggtgtgaactactttgctatcagaaataagaaaggcactgaactcctgctgggagtagacgctctgggcctgcatatttatgatccagagaatagactgactcctaagatctcatttccctggaacgagatccggaacatttcctattcagataaggaattcactattaaaccattggacaagaagatcgatgtgtttaaattcaattcctcaaagctgcgggtaaacaagcttattctccagctgtgtatcggtaatcatgacctcttcatgcggagacgcaaggcagattcccttgaggtgcaacagatgaaggcccaggccagagaagagaaagcacgcaaacagatggagcggcaaagattggcacgcgaaaagcaaatgagggaagaggctgagaggacgcgggatgagttggagcgtagattactgcagatgaaggaggaagccacgatggccaatgaggccctaatgagatcggaggagaccgctgatttgctagctgagaaagcccagataacagaagaggaagccaagctcctggcgcagaaggctgctgaagcagagcaagaaatgcaaagaatcaaggccaccgccatcaggacagaggaggagaaaagactgatggaacagaaagttcttgaggcggaagtgctggctctgaaaatggcagaggaatctgaaaggcgcgcaaaagaggcagaccagctgaaacaggatctccaggaggccagggaggccgagcgtagggcaaagcaaaagctactggagatagcgaccaagccaacctaccctccaatgaatccgattccagcccctcttccccctgacattccctcctttaatctcattggcgactctctgagcttcgattttaaggacaccgatatgaaacgtctcagcatggaaatcgaaaaagagaaggtggagtatatggagaaaagcaaacatttgcaagaacagctgaatgaacttaagaccgagattgaagccctgaaattaaaggaacgcgaaaccgccctggatatcctgcataatgagaactccgatagaggtggttcctccaagcataataccattaagaaaccccaggcccaggggagaagacctatctgcatctag

SEQ ID NO: 29759 - DNA, 1650 bp, synthetic construct
  misc_feature 1..1650: note = Description of Artificial Sequence: Synthetic coding sequence
  source 1..1650: mol_type = other DNA
atggccggagcaattgcatcgcgcatgtcgttctctagcctgaaaaggaaacagccaaagacattcaccgtccgaatcgtcactatggatgccgagatggaatttaactgtgaaatgaaatggaaagggaaagacctgtttgatctagtgtgcaggactctcgggttgagagagacatggttctttggactccagtacactataaaggatacggtggcttggctgaaaatggacaaaaaggttaaaaagcagatcctggacgagaagatttattgccccccagaagccagcgtcttgctggctagttacgccgtgcaggctaagtatggtgactatgacccaagtgtgcacaagcggggtttcctcgctcaggaggaactactgcctaagcgagtcatcaacctttatcaaatgaccccagagatgtgggaagagcgcatcactgcctggtatgcagaacatcgaggaagggccagagacgaagccgaaatggagtatctcaaaattgcgcaagacctggagatgtacggggtcaactactttgccatcaggaataagaaagggaccgaactgctgctaggcgtggacgcacttggattgcacatctatgatccagagaacagactgacaccgaaaatatccttcccatggaatgagatacgtaacattagctatagcgacaaagaattcacgattaaacccctggataagaaaattgatgtgtttaaattcaacagttcaaagttacgcgttaataaactgattcttcaactgtgcatcgggaaccatgacctgttcatgagaaggcgtaaggctgattcactggaggtgcagcagatgaaggctcaggctcgagaggaaaaagcccgtaagcaaatggaacggcaaaggctcgctcgggaaaagcaaatgagagaggaagccgaacggacacgtgatgagcttgaaagacgcctactgcaaatgaaagaggaggcgactatggctaatgaggcccttatgcggagtgaggagaccgctgacctgctggctgagaaggcacagatcacagaggaggaagccaagctgctggcccagaaggctgctgaagcagagcaagagatgcagcgcatcaaggccacagccattaggaccgaggaggaaaagaggctcatggaacaaaaggttctcgaagctgaggtgctggcactgaagatggctgaggagtcagagagacgcgcaaaggaggccgatcagctgaaacaggacttgcaggaggcacgcgaggcggagcgacgggctaagcaaaaactcctggagattgcgacaaagccaacctatcctccgatgaatcctatccccgctccgttgccacctgatatcccaagcttcaacctgattggtgactcgctgtcattcgatttcaaggacacggacatgaagcgattgtcaatggaaatcgagaaggaaaaagtggagtatatggaaaaatctaaacacttgcaggaacagctcaatgaactgaagaccgaaattgaggcactgaagttgaaagagcgggagactgcacttgatatcctgcataatgagaactcggacagggggggatcatcgaaacacaataccataaagaagcctcaggcccagggccgacgcccaatctgcatttag

SEQ ID NO: 29760 - DNA, 1647 bp, synthetic construct
  misc_feature 1..1647: note = Description of Artificial Sequence: Synthetic coding sequence
  source 1..1647: mol_type = other DNA
atggccggagcgatcgcttcccggatgtcattttcatcattaaagcgcaaacagcccaagaccttcacagtccgaatcgtcacgatggacgctgaaatggaattcaactgcgaggtgctggatcacgatgtcagtaaggaggagccagtgacctttcactttctggctaagttctatcctgagaacgcagaagaggaactcgtgcaggaaataacacaacaccttttctttctccaggtgaagaagcaaattctagatgagaaaatttattgtccaccggaggccagcgtgctactggccagctacgcagtacaagctaagtacggcgactacgatccatcagtccataaacgtgggttcctggcccaagaggaactgttacccaagcgggtcattaatttgtatcagatgacccctgaaatgtgggaggagaggataaccgcgtggtacgctgagcacagaggcagggccagggacgaagcagaaatggagtacctgaaaatcgcccaagacctggagatgtatggcgttaattatttcgccatcagaaataagaagggcacggagctgcttctgggtgtggatgccttgggactgcatatctacgaccccgagaaccgccttacacctaagatcagcttcccatggaatgagataaggaatattagctactcggacaaggaatttaccatcaaacccctcgataaaaagattgacgtgttcaaatttaactcaagcaaactgcgcgtgaataagctgatcctccagctctgcataggaaaccatgatctgtttatgagacggaggaaggccgactccctcgaagtgcagcagatgaaggcccaggctcgggaggaaaaggcccgaaaacagatggaacggcaaaggctggctcgagagaaacagatgagagaagaggccgagcgcacccgggatgagctggaaaggaggctgcttcagatgaaagaggaagcaacgatggccaacgaagctctcatgagatccgaggagaccgcggacctgctggccgagaaggcccagatcaccgaagaagaagccaaactcctcgcgcagaaagctgccgaagctgagcaagagatgcagcgaatcaaagctaccgccatccgcactgaggaagaaaaacgattgatggagcagaaggtgttggaagccgaagtccttgcactaaagatggcggaagaatccgagcggagagcaaaggaagctgaccaacttaagcaagatctgcaggaagcaagggaagccgagagacgggctaaacagaagcttctggagatagccaccaaaccgacttacccacctatgaaccccatccccgcaccccttcctccagacatccctagctttaatctgatcggggactctctctcttttgatttcaaggacactgacatgaaaagactgtcaatggagattgaaaaggaaaaggtggaatatatggagaaatcaaagcatttgcaagagcagcttaacgaactgaagaccgaaattgaggcgttgaaactgaaggagcgtgaaactgcactggacattctgcacaatgaaaatagcgatcggggaggctccagcaagcataataccatcaagaagcctcaggcgcaaggacgccgacccatttgtatttag

SEQ ID NO: 29761 - DNA, 1773 bp, synthetic construct
  misc_feature 1..1773: note = Description of Artificial Sequence: Synthetic coding sequence
  source 1..1773: mol_type = other DNA
atggcaggggcaatcgccagtcggatgtctttcagcagcctgaagaggaagcagcctaagacgttcaccgtccgtatcgtgacaatggacgccgaaatggagttcaattgtgaaatgaagtggaaggggaaagacctgtttgatctcgtatgtaggactctcggattgcgcgaaacctggttctttggtttacagtatactatcaaggacaccgtcgcttggctcaaaatggataagaaggttttggatcacgacgtgagtaaagaggagccagttaccttccattttctggcaaagttttatcccgagaatgcagaagaagaattggttcaggagattacacagcacctcttcttccttcaggtgaagaaacagatcctggacgaaaaaatttactgccctccggaggcatcggtgctgcttgcttcatacgctgtacaagccaagtatggggactatgacccttctgttcataagcgtgggtttctggcacaggaagagctgctgcctaagagggtcatcaacctctatcaaatgactcccgaaatgtgggaggagcgcatcacggcttggtatgccgagcacagaggtagggccagggacgaggcggaaatggagtacctcaaaattgcccaggacctggagatgtatggcgttaattatttcgcaatccgaaataagaaaggtaccgaacttctcttaggagttgatgccctgggcttgcacatatatgacccagagaataggctcaccccaaagatcagctttccttggaatgaaattcgcaatatatcttactccgataaggagttcaccatcaagcccctggacaaaaagatagatgtatttaaatttaacagcagcaagttgagggtgaacaagctaatcctgcagctctgcatcgggaaccacgatttgttcatgcgtcgacggaaagccgattcattagaggtacagcagatgaaagcccaagccagggaggaaaaagcaagaaagcagatggagagacaacggctcgctagagagaaacagatgcgtgaggaggcagaacgaactcgagacgagctcgaacgcaggttgctccagatgaaagaagaggccactatggcaaatgaggcattgatgcgcagtgaagaaaccgcggacctcctggctgaaaaggcccagatcacagaagaggaggcaaagctgctggcccagaaggccgctgaggccgagcaggaaatgcagcgcatcaaagccacagcgattcgaacagaggaggagaaaaggttaatggagcaaaaagtcctggaggccgaggtgctggcacttaaaatggctgaggagagcgaaaggcgcgctaaagaagccgatcagctcaagcaggacctgcaggaagccagagaggcggagcgaagagccaagcagaagctcctagagatcgccacaaagccgacatatccccctatgaatcccatcccagcccctctgccaccggatatcccatcattcaatctgataggggattcattgtcgtttgacttcaaggatacagacatgaagcgcttgtcgatggagatcgaaaaggagaaggtggaatacatggaaaagtccaaacatctccaggaacaactgaacgaattgaagacggaaatagaggcactcaagctgaaggagcgggaaactgccttagacattctgcacaatgagaactcagaccgaggcggaagtagcaaacacaataccattaagaaaccccaagcccagggaaggcgccctatttgtatttag

SEQ ID NO: 29762 - DNA, 1806 bp, synthetic construct
  misc_feature 1..1806: note = Description of Artificial Sequence: Synthetic coding sequence
  source 1..1806: mol_type = other DNA
atggccggagctatcgctagtagaatgtctttttcctcactgaaacgaaagcaaccgaaaactttcaccgtacgaatagttaccatggatgcagagatggagtttaactgtgaaatgaaatggaaggggaaggatctttttgaccttgtgtgtcgtactcttgggttacgtgaaacctggttttttggactacagtatacaatcaaggatactgtagcatggctgaaaatggacaagaaagtgctggaccacgacgtcagcaaggaggaaccagtcacgtttcattttctcgcgaaattttatcccgagaacgcagaggaagaattggtgcaggagatcacgcaacatctgttcttcctgcaggtgaagaagcagatcctcgatgaaaagatttattgccctcctgaggcttcggtgcttcttgcatcttacgccgtgcaagccaagtatggggactatgatcccagtgtgcacaagcgcggatttttggcccaggaagaactactgccaaagagggtcataaacctgtaccagatgacgcccgagatgtgggaagaacgtatcacggcatggtacgcagagcatagaggaagggcgcgagacgaggcggaaatggagtacctaaagatcgctcaggacctggagatgtatggcgtgaattattttgccatcagaaataagaaaggcacggaactgttactcggcgtagacgcattggggctacatatctacgaccctgaaaacaggctgacaccgaaaatctcttttccatggaatgagatccgaaacataagctatagtgataaagaatttaccatcaagccgctagataaaaaaattgatgttttcaagttcaatagcagcaaactcagggtgaataaactgatcctccagttatgcatcgggaatcatgacctcttcatgagacgaagaaaggcggactcattggaggtgcaacagatgaaggcccaggccagggaggagaaagcacggaagcagatggaacgccagcgtcttgctcgggagaagcagatgcgagaggaggcagaacgcacccgcgatgaacttgagcggaggctgctgcagatgaaggaggaagccacaatggccaatgaagccctgatgagaagcgaagaggccgaacaggaaatgcagcgtatcaaggcaactgccatcaggactgaagaagagaaaaggttgatggaacagaaggtacttgaggcagaggtccttgctctgaagatggccgaagagagtgaaaggagggccaaggaggccgaccaacttaagcaggatcttcaggaagccagggaagccgagagacgggcaaagcaaaagctccttgaaatcgctaccaagccgacatacccacccatgaatccaattccagcccctctgccccctgacatcccatcattcaacctgatcggggacagcttgtcattcgattttaaagacaccgatatgaagcgactctctatggagatcgagaaggagaaggtcgaatacatggagaaatcgaagcacttgcaagaacagctgaatgagttgaagaccgaaatcgaagcgctaaagctcaaagagagggagactgcccttgacattcttcataatgaaaatagtgaccgtggcggtagctcgaaacacaacactataaagaaaggtatgtttctcttcttcttcattctgttctgctggttttctctgaaaccaaaggcagaggacctgtcagcgtttgagcctagcaactctccatgtcgggctccgtcccctgagtggccgtccctcaagtccagctctaggtag

SEQ ID NO: 29763 - DNA, 1686 bp, synthetic construct
  misc_feature 1..1686: note = Description of Artificial Sequence: Synthetic coding sequence
  source 1..1686: mol_type = other DNA
atggccggtgccatcgcctcccggatgagtttcagctcattgaagcggaagcagcccaaaaccttcactgtgagaattgttaccatggacgcagagatggagttcaattgcgaaatgaaatggaagggcaaagacctttttgatttggtctgcaggactctgggccttcgagagacctggtttttcggtctgcagtataccataaaggatacagtggcctggctgaagatggacaagaaggtgctagaccatgacgtgagcaaggaggaaccagtgacctttcattttctcgcgaaattttacccggagaacgcagaggaggaactggtccaggaaattacgcaacatctcttctttctccaagtgaagaagcagatcttggacgagaaaatttattgccccccagaggctagcgttttgcttgcgtcctacgcggtccaagccaagtacggagattatgacccgagtgtacacaagcggggatttttggcgcaagaagaattgttgcccaagagggtgattaacctgtaccagatgacgcccgaaatgtgggaagagaggatcactgcatggtacgctgagcaccgcggtagggctcgggacgaggcagaaatggagtatctcaagatagcccaggacctggaaatgtatggagtgaactattttgctatcaggaataaaaaaggtactgaactgctgcttggggtcgatgccctcgggctgcacatttatgatccagagaataggctcactccaaagatctcatttccctggaacgaaattcggaatataagctactcagataaggagttcacgatcaaacctttagacaagaaaatagatgtcttcaaatttaacagctctaagttgagagtgaacaagttaatcctgcagctgtgtataggaaaccatgatctgtttatgagaaggcggaaagctgattctctcgaagtgcagcagatgaaagcccaggcacgcgaggagaaagccagaaagcaaatgaaagaagaagcaaccatggccaatgaggctcttatgcgcagtgaagagacagccgacctgctggcggaaaaagctcagatcactgaggaggaggccaaattgcttgcccagaaagcagctgaggccgaacaggagatgcaacgaataaaagccaccgccattcggacggaggaagagaaacgcctcatggaacagaaggtactggaggccgaggttctcgcactgaagatggctgaggagtccgaacgcagggcaaaggaggccgatcagttgaaacaggatctgcaggaggcgagagaagcagagcgtcgcgctaaacaaaagcttctggagattgccaccaagccgacatatccccctatgaatccgatccccgctccactgcctcccgacatcccatccttcaacctcatcggtgacagccttagctttgattttaaggacactgacatgaaacggctatctatggagatcgaaaaggagaaagtggaatacatggaaaaaagcaaacaccttcaggaacagcttaacgaactgaaaactgaaattgaggccctcaagttaaaggaacgcgaaactgccctggatatcttacataatgagaattccgaccggggaggatccagtaaacacaacactatcaagaagccacaggcccagggtagaaggcccatctgcatctag

SEQ ID NO: 29764 - DNA, 1773 bp, synthetic construct
  misc_feature 1..1773: note = Description of Artificial Sequence: Synthetic coding sequence
  source 1..1773: mol_type = other DNA
atggctggcgctattgcctcccggatgtccttctcatctctcaaacgtaagcaaccaaagacatttacagtgaggatcgtcacgatggacgcagaaatggagtttaactgcgaaatgaaatggaaggggaaggatctgttcgacttggtgtgtagaaccctaggactaagagagacttggttttttggccttcagtacacaataaaagatacggtggcctggctgaagatggacaagaaggtcctggaccatgatgtgagcaaagaagagccagtgacttttcattttctggctaaattctaccccgaaaacgcagaagaggagttggttcaggagatcacacaacacttgtttttcctccaggtgaagaagcagattctcgatgagaaaatttactgtccaccagaggccagtgtcttgctggccagctacgccgtccaggccaaatacggcgactacgacccaagcgtgcataagcgaggattcctagcccaggaagaactattaccaaagcgagttataaatctgtaccaaatgactccagaaatgtgggaagagcggattaccgcctggtacgccgagcatcgcggtcgcgcaagggacgaagcagagatggaatacttgaagatagcacaggatttggaaatgtatggcgtaaattacttcgcaatcaggaacaagaaaggcactgagctgctcctgggcgtggatgctctcgggttgcacatctacgaccctgagaatagactgacccccaaaatttcgtttccatggaacgaaatccgcaacattagctatagcgataaagagtttactatcaaacccctagacaaaaagatcgacgtcttcaagttcaattctagcaagctcagggtcaacaaactcatcttacagctatgcatcggaaatcacgatctgttcatgcggagaaggaaggctgactccttggaggtgcagcagatgaaggcccaggctcgcgaggaaaaagctcgtaaacagatggagcgtcagaggttggcaagagaaaaacagatgagggaggaggcggagcgtacaagggacgagttagagcggcgtctattgcagatgaaagaggaggcgaccatggcaaacgaggcactgatgcgatccgaggagaccgctgatctgctggccgaaaaagcacagattacagaggaggaggctaagttgttggcccagaaagcagccgaggcagagcaagagatgcagcgcattaaggccactgctataaggactgaagaggagaaaaggttgatggagcagaaagtacttgaagccgaggtgctggccctcaaaatggctgaggaatcagagcggagagccaaggaggccgaccaacttaagcaagatctgcaggaagcccgtgaggctgagcggcgtgccaaacagaagctattggagatcgctaccaagcccacttacccaccaatgaatcctattcctgccccacttccgcctgatataccatcatttaacctaatcggcgactctctgagctttgacttcaaggataccgacatgaagcgcctctccatggagattgagaaggagaaggtggaatatatggagaagtcaaagcatctgcaggagcagctcaatgagttgaagactgaaattgaggccctgaagctgaaggagcgggagaccgccctggacatcctccataacgaaaactctgatcgaggcggatcctctaaacataacaccatcaagaagccacaggcccagggccgaaggcccatttgcatttag

SEQ ID NO: 29765 - DNA, 498 bp, synthetic construct
  misc_feature 1..498: note = Description of Artificial Sequence: Synthetic coding sequence
  source 1..498: mol_type = other DNA
atggcaggcgctatcgccagccgcatgtctttctcatctctgaagaggaagcagccaaaaacattcaccgtgaggatcgtcactatggatgcggagatggagttcaactgtgaaatgaaatggaaagggaaggacctgttcgacctggtgtgtcgcacccttggtcttcgggaaacctggttctttggcctccagtatactatcaaagacacagtcgcatggcttaaaatggataaaaaggtcttagaccacgacgtatccaaggaggaaccagtgacttttcacttcctggccaagttttaccctgagaacgcggaagaggagctggtccaggaaatcactcagcacctttttttcttacaggtcaagaaacagatattggatgagaaaatttactgcccccctgaggcctcagtcctgttagcatcatatgccgtgcaagctaagttaaccctgcagtctgccaagtccagggtggcattcttcgaggaattatag

SEQ ID NO: 29766 - DNA, 663 bp, synthetic construct
  misc_feature 1..663: note = Description of Artificial Sequence: Synthetic coding sequence
  source 1..663: mol_type = other DNA
atggcaggggctatcgccagtcgaatgtccttctccagcttgaaacgaaagcagcccaagaccttcaccgtgcgaattgtgacaatggacgccgagatggaatttaactgcgaagtgaagaagcagattcttgacgaaaagatttactgtcccccagaggcttccgtgcttttggccagttatgctgttcaagccaagaataaaaaaggaacagaactgcttctcggtgtggatgccctcggactccatatttacgaccccgagaatagactcacacccaagatctcattcccctggaatgaaatccgaaatatatcatattctgataaagagttcaccatcaagcctcttgataagaagattgacgtgttcaagttcaactcgagcaagttgagggtcaataagctaatcttgcaattgtgcatcggcaatcacgatctcttcatgaggaggaggaaagcagactctctggaagtacagcaaatgaaggcccaggctagggaggagaaggcacgcaaacaggggcagcggggacgcagcgccgaggccggacccgcaggatccacgaggggcggagccaagtcacaagcagaggctccgggtgattgccaccaggcccacgtgcctgcgcacgagccgaatagcagcacggtagcatcctag

SEQ ID NO: 29767 - DNA, 2772 bp, synthetic construct
  misc_feature 1..2772: note = Description of Artificial Sequence: Synthetic coding sequence
  source 1..2772: mol_type = other DNA
atggagcgaggactgcccctactctgcgccgtgctcgctcttgtcctagcccctgccggagcctttcgcaatgacaaatgcggggacaccataaagattgagtctcccggatatttaaccagccctgggtacccacattcttaccacccaagcgaaaaatgtgaatggcttatccaggccccagatccatatcaacgcatcatgattaactttaatccacactttgacctagaagaccgggattgtaagtatgattatgtggaagtgttcgacggtgagaacgagaacggccatttcagagggaagttctgcgggaagattgccccacctcccgttgtgtcgtcgggcccattcttatttatcaagtttgttagtgattacgaaactcacggcgctggtttctcaattcgctacgaaatcttcaaacgcggaccagagtgttctcaaaattatacaacacctagcggtgtaatcaagagtcctggcttcccagagaagtatccaaactctctcgaatgcacatatatcgtgttcgtgccaaaaatgtctgaaatcatcttggaatttgagtcattcgatctggagcccgacagtaatccgcctgggggtatgttttgtaggtacgataggctagagatatgggacgggtttccggacgtcgggccacatatcggacgctattgcggtcagaaaacgccaggaaggatcaggtcatctagcggtattctgtccatggtattttatacagatagtgcaattgcgaaagaggggttctccgccaactactcggtgttgcagtcgagcgtctccgaagactttaagtgcatggaggctttagggatggaatccggagaaatccactctgatcagatcacagcctcatctcagtattccaccaattggtcagcagagcgcagtaggctaaattatcccgagaatggttggacgcccggtgaagactcatatagggaatggatccaagtggatctgggcctgctgcgattcgtaacagcagtcggcacccagggagctatttctaaagaaactaaaaagaagtattacgtgaagacctataagatcgacgtaagttctaacggggaggactggataacgattaaagaggggaataaacctgttttgttccaagggaacaccaacccgactgatgtggtagtcgcagtttttcctaaacccctgatcactagatttgtgcggatcaagcccgctacatgggagaccgggatctcaatgaggtttgaggtctatggctgcaagatcaccgattacccatgtagcggaatgcttggcatggtttccgggcttatttcagactcgcaaataacaagcagtaaccagggagacaggaactggatgcccgaaaatatccggttggtaaccagccggagcggatgggcactgccccctgcaccccactcctacattaatgagtggctgcagatcgatcttggcgaggaaaagatcgtaagaggtattataattcagggaggcaagcatcgagaaaataaggtgtttatgagaaagtttaagattggctactccaacaacgggagcgattggaagatgattatggacgactcaaagaggaaggccaaatccttcgagggcaacaacaactatgacacaccagaactgcggacttttccagccctgtctactcgattcattagaatatatcccgagagggccacccacgggggtctcggcctgcggatggaattgctcggatgtgaagtcgaagcacctactgctggcccaacaactcctaatgggaatcttgttgatgaatgtgatgacgatcaggccaattgtcattcgggcaccggcgatgatttccagctgaccggaggaacaaccgtccttgcaactgagaagcccaccgtgatcgactccactattcagagcgagttccccacctatggatttaactgcgaattcggatggggtagtcacaaaacattctgccactgggagcatgataatcatgttcaattgaaatggagcgtgcttaccagcaagacgggtcctatccaggaccatactggcgacggcaatttcatttattcacaagctgatgagaaccaaaaaggcaaagtggctagactcgtgtccccggtggtgtactctcagaatagtgctcattgcatgacattttggtatcacatgtctggtagtcacgtggggactctgagggtcaagctgagatatcagaagccagaggagtacgatcaattagtatggatggccattggccaccaaggcgaccattggaaggaaggaagagtgcttttgcataagtcactcaaactctaccaggtgatttttgagggtgagatcggcaagggaaacctggggggtattgctgtggatgatattagcatcaataaccacatttcacaggaagattgcgcaaaacctgcagaccttgacaaaaagaatccagagatcaaaatcgacgagacgggcagtacgcccggatacgagggagagggagagggggataaaaatatcagtcgcaagccaggaaacgtcctaaagactctcgatccaattctgattacgatcattgcaatgtcggccttgggcgtactcctcggggctgtctgcggtgtagtgctgtattgcgcctgttggcataatgggatgagcgaacgcaaccttagtgctctcgaaaactataacttcgagcttgtggacggtgtgaagctgaagaaggacaaacttaacacccagtccacctacagcgaagcctag

SEQ ID NO: 29768 - DNA, 420 bp, synthetic construct
  misc_feature 1..420: note = Description of Artificial Sequence: Synthetic coding sequence
  source 1..420: mol_type = other DNA
atggatgatagcaagcgtaaagctaaaagtttcgaggggaataataattatgatacaccagaacttcgtacctttcctgctctgtctactagattcattaggatctaccctgaacgcgcaacgcacggcggtctggggctgcggatggagctgcttgggtgtgaagtcgaagccccaactgccggtccaacgactcctaatgggaatctggtcgatgaatgtgacgacgaccaagccaactgtcattctggcaccggtgatgattttcaacttaccgggggaaccacagtattagcgactgagaagcccacagtgatcgacagtacaatccagagtggttccagattttttaagcaccatcacaaacagcagagcatgaggccgcagaatttgcaccacaattcaatactactgctctag

SEQ ID NO: 29769 - DNA, 1926 bp, synthetic construct
  misc_feature 1..1926: note = Description of Artificial Sequence: Synthetic coding sequence
  source 1..1926: mol_type = other DNA
atggaaagaggtctgccacttctgtgtgcagttctggcactggttctggctccagctggcgctttccggaacgacaaatgcggggatactatcaagattgaaagccctggctacctgacctctccaggatacccacactcataccatccatctgaaaagtgcgagtggttgattcaagcgccagacccctatcagcggatcatgataaatttcaatccacattttgatctagaggatagggactgtaagtatgactacgtggaagtttttgacggcgagaacgaaaacggccacttcagggggaaattttgtgggaaaatcgcccctccacccgtcgtgtccagcggcccttttttattcatcaagttcgtctctgactatgagacgcacggggctgggttctccattcgatacgaaatttttaagcgcggtccagaatgctctcagaattacacaacaccttccggcgttatcaaaagccctggtttcccagagaagtatcctaatagccttgagtgtacttatatagtgttcgtacccaagatgtcagaaatcatactggagttcgaatcatttgacctagagccagactcaaatcccccaggcggtatgttctgtcggtatgataggctggaaatatgggacggattcccagacgtgggacctcacatcggccgatattgtggacagaaaacccccggacgcataaggagctccagcggtatcctgagcatggtcttctacactgatagcgcgatcgccaaagaaggcttctctgcaaactactctgtactccagagctccgtaagtgaagatttcaagtgtatggaagccttgggtatggaaagcggggaaatccatagcgatcaaattacagcctccagtcagtatagcactaattggagtgctgaacggagcaggctgaattatccagaaaatggctggactcccggagaagatagttaccgcgagtggattcaggttgacctgggcctgttgagatttgtcacggccgtgggaactcagggcgctatatcgaaagaaacaaagaaaaaatattatgtaaagacctataagattgacgtctcgtctaacggcgaggattggattacgatcaaagagggtaataaacctgttctgttccagggtaacaccaaccctactgatgtcgtggtggcagtgttcccgaaacccctgattacaaggtttgtgagaatcaaaccggcaacctgggaaaccggcatttccatgcggtttgaagtttacgggtgcaaaatcacagactacccatgtagtggtatgctgggtatggtgtcagggttgatttctgacagtcaaatcacaagctctaaccagggggaccgaaactggatgcccgagaacatacgcctggtgacgagcagatctgggtgggcactccccccagccccacatagctatattaacgaatggctacagatcgacttaggggaggagaagatagttcgcggaatcattattcagggtggcaagcacagagagaataaggtattcatgcgcaagtttaaaattggatactctaataatggtagcgactggaagatgatcatggacgacagcaagcggaaagccaaatcttttgagggaaacaacaattacgacacacctgagctgagaaccttccccgcattgtctactagatttatccgtatctatcccgagagggccacgcacggtggcctgggtttgcggatggaattgcttggatgcgaagtggaaggcactattaatactgaccaagagtgcccatgcgcccgagctttggcaaaagacgctaagaaaaaaaagcgttgggctgattcaactcactgccgctgcgtgaggtcgattcatggcgagatgtggagtagtgggaagggcgtttgtagtctagatgccaacctttag

SEQ ID NO: 29770 - DNA, 567 bp, synthetic construct
  misc_feature 1..567: note = Description of Artificial Sequence: Synthetic coding sequence
  source 1..567: mol_type = other DNA
atgtctgagatcatactggaattcgaatcttttgatctcgagccagactctaacccacccggagggatgttctgtcgatatgaccggcttgagatctgggacggctttccagatgtcggaccacacatcggacgctattgtggccagaagactcctggtaggatcaggtcatcgagtgggatcctatccatggtgttttacaccgatagcgccatagccaaagagggctttagcgcaaattactcagttcttcagagtagtgtgagtgaagactttaaatgtatggaggcactcggcatggaatccggagagattcatagcgatcagatcaccgcctccagtcagtattccaccaactggagcgctgagcgctcacgactcaactaccccgaaaatggttggacccctggtgaggattcttaccgggagtggattcaggacgcaaagtatcggctaagagtgtcagtggttcggagcaagtcctctagttcaagtacatcactggaaccccgacctctgagctctttaaagctcagctttttttcatataaaatcaaaattacctag

SEQ ID NO: 29771 - DNA, 1830 bp, synthetic construct
  misc_feature 1..1830: note = Description of Artificial Sequence: Synthetic coding sequence
  source 1..1830: mol_type = other DNA
atggaaagggggttgccacttctgtgcgctgtgctggccctggtgctggcccctgcaggggcattccgaaatgataagtgcggtgatactatcaagatcgaaagcccaggctacttgacgtcgcccggatatccacactcctaccatccttccgagaaatgtgagtggctcattcaggcccctgacccctatcagagaatcatgatcaatttcaacccccatttcgacttggaggatcgggattgtaaatatgattatgtagaagtctttgatggcgagaacgaaaacgggcacttccggggaaagttctgcggaaagattgcgcctcccccagtggtttcaagcggcccttttctgttcatcaaattcgtgtcagactacgaaacacacggtgcagggtttagtatcagatacgagatctttaagcgaggaccagaatgttctcagaattataccacgccttctggcgttatcaaaagtcctggctttcctgaaaagtatcctaattccctcgagtgtacatacatcgttttcgtgccaaagatgtccgaaatcatccttgagtttgagtcattcgaccttgagcctgatagtaaccccccagggggaatgttctgtagatatgatcggttagagatctgggatggctttcccgacgtggggccacacatcggcagatactgcggacagaagactccgggtcggatcagaagctcctctggaatcctcagcatggtgttctataccgacagtgcaattgctaaggaaggcttctctgcgaattatagtgtgctccaaagttctgtctctgaagactttaaatgtatggaagccctgggtatggagtcgggggaaatccacagtgaccaaattacagcttccagtcagtattccacaaactggtcagcagagaggtcaaggttaaactatcccgaaaacggttggaccccaggcgaagactcttaccgcgaatggattcaagtggaccttggcttactgaggttcgtgacggcggtggggacacagggcgcaattagcaaagaaaccaagaaaaaatattacgtgaagacatacaaaatcgacgtgagcagtaacggcgaagattggattacgattaaagaaggcaataaacccgtgttgtttcagggcaataccaaccctaccgacgtagtggtggccgtttttccaaagcccctgattacacgtttcgtcaggataaaacccgctacgtgggaaacgggaatttccatgaggtttgaagtgtatgggtgtaagattacagactatccttgtagtggtatgcttggcatggtatcagggctgattagtgattcacagattacctccagcaatcagggagataggaactggatgccggagaacatcaggcttgttacttcccgcagcggctgggccctcccgccagcccctcactcctacattaatgaatggcttcaaatcgacctgggcgaagagaaaattgtgcggggaatcatcatacagggcggaaagcatcgggagaataaggtgtttatgcgaaagttcaagatcggctacagcaataatggcagcgattggaagatgattatggatgattctaagcgaaaggccaaatccttcgaggggaataacaattatgatactcccgagcttagaactttccccgcattgagcacacgcttcattcgcatttatcctgaaagagctacccatggtggtcttggcttgcgtatggaactgctcggatgcgaagtagagggcggaaccaccgtattagcaaccgagaagccaactgtaatagacagcaccatccagagtggtatcaagtag

SEQ ID NO: 29772 - DNA, 1935 bp, synthetic construct
  misc_feature 1..1935: note = Description of Artificial Sequence: Synthetic coding sequence
  source 1..1935: mol_type = other DNA
atggaaagagggctacctttactgtgcgctgtacttgctttagttctcgctccagccggtgcgtttcgaaatgacaaatgcggggacaccatcaagatcgaaagtccaggatacctgacgtctcccggatatccccactcttaccacccctctgagaaatgtgaatggttgattcaggccccagacccttatcagcggatcatgatcaacttcaacccccactttgatttggaggaccgcgattgcaagtatgactacgtcgaggtctttgacggtgaaaatgagaacggacactttaggggaaaattttgcggaaagatcgccccaccaccagtcgtgtctagtggcccatttctgttcatcaagtttgtctccgattacgagacgcatggtgctggcttcagcatcagatatgagatcttcaagcggggtcccgagtgcagtcaaaattacactacacccagcggggtcattaagagccctggctttccagagaagtaccctaacagcttggagtgcacctatatagtgtttgtccccaaaatgtcagaaataatcctagagttcgaaagttttgacttagaacccgactcgaatccgccaggtggaatgttctgtcgctacgaccggctggaaatctgggatggattccccgacgtgggccctcacatcgggcgttattgcgggcagaaaactccaggtcgcatccgctctagcagtggcatcctgagtatggtcttctataccgactccgctatcgctaaggagggcttcagcgccaactactcagtcttgcagagcagcgtgtccgaggacttcaaatgtatggaggcccttgggatggagtcaggcgaaattcactcggatcaaattaccgcatcaagccaatacagtacgaattggagcgctgagcgatctcggttaaattacccagagaacggctggaccccaggagaagacagctacagagagtggatacaggtcgatttaggcctgttgcgatttgttaccgctgtcgggactcaaggagctatctcgaaggaaacgaagaaaaagtattatgtgaaaacttacaagattgatgtctcttccaacggggaggactggatcaccattaaagagggcaataagccagtgttattccagggcaatactaatcccacggatgtcgtggtcgctgtcttccctaaaccacttataacccgatttgtacgaattaaacctgcaacgtgggagaccggcataagcatgcgcttcgaggtatacgggtgtaagatcaccgactacccatgctctggcatgcttggtatggtgtctggactaatcagtgattcccagatcacatcctccaaccagggggaccgtaactggatgcccgaaaatatcaggctggtgacttcaagatccggatgggcactccccccagctccgcattcttatataaacgagtggttacagatcgatcttggggaggaaaagattgtgcgcggaattattatacaggggggaaagcatagagagaataaagtgttcatgcgcaagtttaaaatagggtatagtaataacggtagtgattggaaaatgatcatggatgactctaagaggaaggccaagagttttgaagggaataataactacgatactcctgagctgaggactttccccgctctttcaacccggtttattcggatttacccagagagagccacccacggtggcctgggactcaggatggagttattgggttgtgaagtggaagctcctacagccggtcccacaacacctaacggaaatctcgtggacgagtgtgacgatgaccaggccaactgccattccggcactggcgacgattttcagctgacaggcggaacaacagtcctggccactgaaaaacccactgtgatcgatagcactatccagtcaggtatcaagtag

SEQ ID NO: 29773 - DNA, 2115 bp, synthetic construct
  misc_feature 1..2115: note = Description of Artificial Sequence: Synthetic coding sequence
  source 1..2115: mol_type = other DNA
atggagagaggactccctcttctgtgtgcagtattggctcttgtgctggcgcctgcaggagcctttagaaacgataagtgcggagacactataaaaatcgagtccccaggatatctgactagccctgggtatccacactcgtatcacccctcagaaaaatgcgagtggttgattcaagcccctgacccatatcagagaatcatgatcaacttcaacccacacttcgacctcgaggatagggactgtaagtacgactacgtcgaggtatttgatggagagaatgagaatggacatttccgtggaaagttctgcggcaagattgccccaccgcctgtcgtctccagcggccctttcttgtttatcaagtttgtttccgattatgagacacatggtgcgggattttcgatcaggtatgaaatcttcaagcggggaccagagtgtagccaaaattacactacaccctctggcgtgattaagtcccccggttttcctgaaaagtatcctaactccctggagtgtacgtatatcgtgtttgtgccaaagatgagcgagatcatacttgagtttgaatcttttgatctcgagcccgatagtaatcctccgggaggtatgttctgcaggtatgataggttggagatttgggatggcttcccagacgtgggaccacatattggtcgctattgcggacaaaagacccctggaaggattcggtcctcaagcggaattttgagcatggtgttttatactgatagcgcaatagccaaggaaggcttcagcgctaattatagcgttctccagtcctccgtcagcgaagactttaagtgcatggaagcactcggcatggaatccggagaaatacattccgaccaaataaccgcatctagccagtattcaaccaactggtcagcagagaggtcccggttgaactatcccgagaatggctggactcccggtgaggattcatatcgcgaatggattcaggtcgatctgggactcttgcgcttcgttaccgctgtagggacccaaggtgcaataagcaaagagacaaagaaaaaatactatgtgaaaacctacaagattgacgtgtcaagtaacggggaggactggattaccatcaaagaaggtaacaaacctgtactcttccaaggcaatacgaaccctaccgacgttgtcgtggctgtgttccccaaacctctgatcacgcggttcgtgaggattaagcccgctacctgggaaaccggcatctccatgcggttcgaagtctacggatgtaagataaccgactacccttgcagtgggatgttagggatggtttcagggttaatttccgactctcaaatcacgagctcgaatcaaggagatcgaaactggatgccagagaatatacggctggtcaccagtagaagcggatgggccttgccacctgcacctcattcttacattaacgagtggcttcagatcgacttgggtgaagaaaaaatagttcggggaatcattattcagggcggtaagcaccgggagaataaagtcttcatgaggaagtttaagattggctattcaaacaacggcagcgactggaagatgattatggacgattcaaagcggaaagcaaagagtttcgaaggcaataacaactacgatacacctgaactgagaacttttcccgcactgtctacaagattcattcgaatctaccccgagcgagctactcatggagggctgggattgcgaatggaacttttgggatgcgaggttgaggccccaacagccggacccaccacacccaatggcaatctagtggatgagtgcgatgacgaccaggctaattgtcattcggggactggcgatgactttcagctgaccggagccgagacaatctttatccccctactgtaccactttagttcttgcttgagctgggaccagctcactcctgtatgcgtgttagttacccctcatggacgggaactgcctagaaatcggtcctgcctcgcccgtacacgggcatcctccttccctcacgttatatggattgacgagttatttctgatagctacgaccatctgtaacaataacctgagccacttcgaatcccagcgattgggtttgtcttag

SEQ ID NO: 29774 - DNA, 261 bp, synthetic construct
  misc_feature 1..261: note = Description of Artificial Sequence: Synthetic coding sequence
  source 1..261: mol_type = other DNA
atggagctgctggggtgtgaggttgaagcacctactgctggccctaccactccaaatgggaacttggtagacgaatgtgacgatgatcaggcaaattgtcactctggaacaggcgatgatttccagttaactggtgggacgaccgttcttgctacggaaaaacctacggtaatcgatagcaccatacagtcagcgaggcttgaagtatctactctgaatctaagcctccacaaccctcctcagcagaaggccctaatttag

SEQ ID NO: 29775 - DNA, 2772 bp, synthetic construct
  misc_feature 1..2772: note = Description of Artificial Sequence: Synthetic coding sequence
  source 1..2772: mol_type = other DNA
atggaacgcggattgccacttctctgcgcagtcctggctctggtgttggcccctgctggggctttcagaaacgacaaatgtggggacacaattaaaatcgaatcccctggctacctcaccagcccgggataccctcactcctaccaccccagcgagaaatgcgagtggctgattcaggccccagacccttaccagaggatcatgattaatttcaacccccactttgatctggaggatcgcgattgcaagtacgactacgttgaagtttttgatggcgaaaacgaaaacggccacttcaggggcaagttctgtggcaagattgcacctccccctgtcgttagctcaggcccttttttgtttattaagttcgtctcagactacgagactcatggggctggttttagcattaggtacgagatcttcaaaagggggcctgagtgctctcagaactacaccacaccctccggagtcatcaaatccccaggttttcctgaaaagtatcccaattcgttagagtgtacatatatcgtgtttgtgccgaagatgagtgaaatcatcctggaattcgagtccttcgacctggagccagacagcaatcccccaggtggaatgttctgtcggtatgacagactggagatatgggacggattccccgacgttggaccgcatataggccgatactgtggccagaaaacaccgggtcggatccgatcttccagcggcattcttagtatggtgttctacaccgacagtgcgattgctaaagaggggttctctgctaactactccgtgcttcagagttccgtcagtgaggactttaagtgcatggaggccttaggaatggagagcggagagattcacagtgatcagatcaccgcttcgtcccagtacagcacaaattggagtgcggaaaggtctaggttaaattatccagagaacggatggacccccggagaagatagttatagggaatggatccaggtcgacctggggctgttgaggttcgtcacggctgtgggtactcagggggctatctcaaaggagacgaagaagaagtactatgttaaaacttataagatcgatgtctcctcaaatggtgaggattggatcacgattaaagagggcaataaaccagtgctttttcagggcaacacaaatccaaccgatgtcgtggtagccgtgttccctaagcccttgatcaccaggttcgtgcgcatcaaaccagcgacctgggagacaggcataagcatgcgatttgaagtgtacgggtgcaaaattaccgactacccctgttccgggatgctagggatggtgagcgggttgattagcgactcccagatcaccagcagtaaccagggtgatcgtaattggatgcctgaaaatataagattggtgacctccaggagcgggtgggcactgccacccgctccccattcgtacatcaacgaatggctacagattgacctgggcgaagaaaaaatcgtgcgcggaatcatcatccaggggggtaagcaccgggaaaataaggtattcatgcgcaaattcaaaatcgggtacagcaacaacgggagcgactggaagatgataatggatgacagcaagagaaaggccaagtcctttgaaggcaacaacaactatgatacccctgaattacggacattccctgctctatccacccgcttcattcgcatatacccagaaagggcgacacacggcggacttgggttgcgcatggaactgctcggatgtgaggtggaagctcctaccgctggcccaaccacaccgaatgggaacctggtcgacgaatgcgatgacgaccaagccaactgtcactccggcaccggcgacgactttcagttgaccgggggaaccacagtgctggctactgagaagccgaccgtgattgactccacaatacagagcgaattccccacgtatggttttaactgcgaatttggctggggcagccacaagacgttttgtcattgggaacatgacaaccatgtgcaacttaagtggtctgtgctcaccagcaagaccggcccaatccaggatcacaccggcgatggcaactttatatactcacaggccgacgaaaaccagaagggcaaagtggctagactggtgagccctgttgtgtactcacaaaatagcgcccactgcatgacattttggtatcacatgtccggtagtcacgtagggacactgagagtgaaactacgataccagaagcctgaggaatacgatcagctagtgtggatggcgattgggcaccagggggaccactggaaggagggcagggtgctgctgcataagtctctgaagctgtaccaagtgattttcgaaggtgaaataggcaaggggaaccttgggggaattgccgtggatgacatatcaattaacaaccatatatctcaggaagattgcgcaaaacctgctgacctcgataagaagaatcccgaaattaagatcgatgaaacagggtcaacccccggatatgagggggagggcgagggagataagaatatctctaggaagcccggtaacgttttgaagaccctggatccaattctgattaccattatcgccatgtcggcattgggggttctgctgggagctgtgtgcggggtggttctgtattgcgcctgctggcacaatgggatgtccgaacgaaacctttctgctctggagaattacaattttgaacttgttgacggtgtgaagctgaagaaagataaactgaatacccagagcacctacagcgaggcttag

SEQ ID NO: 29776 - DNA, 2208 bp, synthetic construct
  misc_feature 1..2208: note = Description of Artificial Sequence: Synthetic coding sequence
  source 1..2208: mol_type = other DNA
atgtccgaaatcattctggaattcgaatcatttgatctggagcctgactctaaccccccaggcggaatgttctgtcgatacgatagattagaaatctgggatggatttcccgacgtcgggcctcacattggcagatactgtggtcaaaagacccctgggagaataagatcaagtagtggcattctgagcatggttttctacactgattccgccatagctaaggagggcttctcagcgaactatagcgtgcttcagtcgagcgttagcgaagactttaagtgcatggaggccctcggcatggaatcgggcgagatccatagtgaccaaatcactgccagttctcagtacagcaccaactggtccgccgagcgttctaggctgaactacccggagaacggctggactccgggagaggactcttatagagagtggatacaagttgacttgggactcctgcgctttgttactgctgtgggaacacagggcgctataagcaaagaaactaagaaaaaatattatgtgaagacgtacaagatcgacgtatcatccaacggggaggactggatcacaatcaaggagggcaacaagcccgtcctctttcagggaaatacaaatcctaccgacgtagtggttgcagttttccccaagccgcttattaccagatttgtgagaattaaacctgcaacttgggagactggtatcagcatgcgctttgaagtttatggatgcaagatcacagactatccttgcagcggcatgcttggaatggtctccggactgatctccgatagccagatcacctcctcaaatcagggcgaccggaattggatgcccgaaaatatacggctggtgacaagcagatctggatgggcattgcccccagctcctcattcatatattaacgagtggctgcagatcgatctcggggaggaaaagatcgtgagagggattatcattcagggcggaaaacatagagagaacaaggtgtttatgaggaagttcaagattgggtacagtaacaatggtagtgactggaagatgataatggatgattccaagagaaaagccaagtcattcgagggcaacaataattatgatacacccgaactgcgaacttttcccgctttatcaacccgcttcatccggatctatccggagagggccacgcacggtggtttagggctccgcatggagctgctcggctgtgaagtcgaagcacctacagccggacccacaactccgaacggtaacctagtggacgaatgcgacgatgatcaagccaactgccacagcgggaccggcggtacaactgtgctcgcaactgagaagccaactgtaatcgacagcactattcaatccgagttcccaacctacggtttcaattgtgagttcggatggggcagccacaaaaccttctgtcattgggaacacgacaaccacgtacagctgaaatggagcgtgctcacttcaaaaacagggcctattcaggatcacacaggtgacggaaatttcatttacagtcaggccgacgagaaccagaaggggaaggttgctaggctggtgagtccagtggtctattctcagaattctgctcactgcatgacgttctggtatcacatgagcggcagccacgtcggtaccctgagagtgaaacttaggtaccagaagccagaggagtatgatcagttggtgtggatggctataggtcatcagggcgatcattggaaggaaggtcgagttttgcttcataaaagtttaaagctctaccaggtgatctttgagggagaaattgggaagggaaatctcgggggtatcgctgtggatgatatctccattaacaaccatatatcccaggaggactgcgccaaaccagcggatcttgacaagaaaaaccccgagatcaagattgacgaaactgggagtacaccgggatatgagggagaaggcgaaggagataaaaatattagccgcaaacccggaaatgtgttaaaaaccttagaccccatcttaatcaccattatcgccatgtccgcattaggcgtgcttctgggtgccgtttgcggagtagttctatattgcgcatgttggcataacggcatgtccgaacgtaatctgtctgccttagagaattataactttgagctggtggacggagtgaagctgaagaaagataagctcaatactcagagtacgtacagcgaggcctag

SEQ ID NO: 29777 - DNA, 2721 bp, synthetic construct
  misc_feature 1..2721: note = Description of Artificial Sequence: Synthetic coding sequence
  source 1..2721: mol_type = other DNA
atggagagaggtttaccgctgctgtgtgcggtcctggctctcgtgctggccccagcaggggcattccggaacgacaagtgcggggatacaattaaaattgagtcccctggttatctgactagtccaggctacccccactcttaccacccttcagagaagtgcgaatggcttattcaagctcccgacccataccaaagaattatgataaatttcaatccacactttgacctggaagatagagattgcaagtatgactatgtggaggtcttcgacggcgagaacgagaatggacacttcagaggcaagttctgtggtaagatcgctccacctcctgttgtcagcagcggccctttcctctttatcaagttcgtatccgactatgaaacccacggtgcgggattcagcatccggtacgaaattttcaagaggggacccgagtgcagccagaattatacaacaccgagcggtgtgataaaaagtccagggttcccggaaaagtatccgaacagtctggagtgcacctatatcgtcttcgtccccaaaatgtccgagatcatactcgagttcgaatcttttgacctcgagcccgattcgaacccgcctggcggaatgttctgtcgatatgatagattagaaatttgggatggtttccctgacgtgggaccgcatatcggcagatattgcggtcagaagacccctggtagaatacgctcctcctcgggaatcctgtcaatggttttctacactgatagcgccatcgctaaggaggggttttccgctaactactctgtcctgcagtcttctgtgtctgaggacttcaaatgcatggaagcgctcggaatggaaagcggcgaaatccatagtgatcaaattactgccagctctcaatactcaactaactggagcgccgagagaagccgactgaattatcccgagaatggatggactcctggagaagacagctatcgggagtggatacaagtggacctgggcctgctgagatttgtaaccgctgtaggaactcagggggctataagcaaagaaacaaaaaagaagtactacgtcaagacctacaagattgatgtctcttccaacggcgaagattggatcacaattaaggaagggaataagcccgtgctctttcagggcaacactaaccccactgacgttgttgtcgcagttttccccaaacctctgatcacccggttcgtcagaattaagccagctacctgggagacaggcatctcaatgagattcgaagtgtacggatgcaagattacagattacccttgctccggaatgttggggatggtaagcggacttataagtgattctcaaataacctctagcaatcagggagaccggaactggatgcccgagaacatccgtctggtgacttctcgcagcggatgggccttgcccccagctccccactcgtacatcaatgagtggttgcagatcgaccttggggaggagaagatcgtgaggggaataatcatacagggaggaaaacacagagagaacaaggtcttcatgcggaagtttaagattggctacagcaataatggctcggactggaagatgatcatggacgactcaaagcgcaaagccaaatcatttgaggggaataataattacgatacaccggagctccgcacatttccagcactcagcactcggtttatcagaatttacccggaaagggctacccacggagggctgggcctccgaatggaacttctgggctgtgaggtagaggcccctactgcagggccaaccacgcccaatggaaacctggtggacgaatgcgatgacgatcaggccaactgccacagtgggacaggagacgattttcagttgaccgggggaaccacagtactggccaccgaaaaacccacagtgatcgacagtacaattcagtctgagttcccaacttacgggttcaactgtgagtttggttggggcagtcacaaaactttctgtcactgggagcatgacaaccatgtacaattgaagtggagcgtcctgacatctaagacaggaccaattcaggatcacactggagacggcaattttatctatagtcaggccgacgagaatcagaaaggcaaggtagcacgcctggtgagtccagtggtctatagccagaattcagcccactgtatgactttttggtaccacatgagcggttcacacgtcgggaccctgcgcgttaaactgcgatatcagaaacccgaggagtacgaccaactagtgtggatggctattggacaccagggagatcattggaaggaaggcagggttctcctccataagtccctgaaattgtaccaggttatcttcgagggagaaattgggaagggaaatctgggtggcatcgccgttgacgatatctccatcaacaatcacatatctcaggaggattgcgcaaggagcaccccgggttacgagggagagggtgaaggggataaaaatatatccaggaaacctgggaacgtcctgaaaacacttgaccctatcctcattacgatcatcgctatgtcagcactcggagtcctgttgggagccgtctgcggtgtagtgctctattgtgcctgttggcataacggcatgtcagagagaaacctcagcgcacttgagaactacaatttcgagctggtggacggtgtgaagttgaagaaagataaactgaatactcagagtacctactcagaagcctag

SEQ ID NO: 29778 - DNA, 318 bp, synthetic construct
  misc_feature 1..318: note = Description of Artificial Sequence: Synthetic coding sequence
  source 1..318: mol_type = other DNA
aaccacatttcccaggaagattgcgcaaggtctacgccaggctacgaaggcgagggtgaaggggataaaaacatctctcggaagcccggaaatgtgctgaaaactctggacccaattttgattactattatcgctatgagcgccctcggcgtgctgctgggggcagtttgtggagtggtcctgtactgcgcctgctggcataatggcatgagtgaacgaaacctgagtgccctcgagaactacaatttcgaattggtggatggcgtgaaactcaaaaaagacaaactcaatacccagagtacgtactccgaggcctag

SEQ ID NO: 29779 - DNA, 234 bp, synthetic construct
  misc_feature 1..234: note = Description of Artificial Sequence: Synthetic coding sequence
  source 1..234: mol_type = other DNA
tagccaaccgctggtcctacgaccccaaacggcaacttggtagacgaatgcgacgatgaccaggccaattgccactccgggaccggcgatgacttccaattgaccggtggaaccaccgtgctagccaccgagaaaccaacagtaatagatagcactattcaatccgccagacttgaggtttcgactctgaacctgagtctccataacccaccccagcagaaagcgctcatctag

SEQ ID NO: 29780 - DNA, 303 bp, synthetic construct
  misc_feature 1..303: note = Description of Artificial Sequence: Synthetic coding sequence
  source 1..303: mol_type = other DNA
tgaacgcacgggggattgggccttcgcatggagttgctaggctgcgaggtggaggcccctactgctgggccaaccacgcctaacggtaacctagttgatgagtgcgatgatgatcaagccaactgtcattcgggcaccggggatgatttccaacttaccgggggtaccacagtcttggctaccgagaagccgactgtcatcgactccacaattcagtccgggtcaaggttctttaagcatcaccataaacagcaatccatgcgaccacagaaccttcaccacaatagcatacttttgctgtag

SEQ ID NO: 29781 - DNA, 711 bp, synthetic construct
  misc_feature 1..711: note = Description of Artificial Sequence: Synthetic coding sequence
  source 1..711: mol_type = other DNA
gtggacctcggtctactcaggtttgtgacagcggtgggcactcagggcgcaatcagcaaagaaacgaagaagaagtattacgtcaaaacgtataagattgacgtgtcatccaacggggaggactggatcacaatcaaggaggggaacaaaccagtgctcttccaggggaacactaaccccaccgacgtcgtggtcgccgtctttcctaagccattaatcacccggttcgtgaggatcaaaccggctacgtgggagactgggatcagcatgagattcgaagtctatgggtgtaaaatcaccgattacccctgttctgggatgctgggtatggtttcagggctcatatctgacagccaaatcacgtccagcaatcagggtgacaggaactggatgcccgagaatattcggcttgttacaagtcgctcaggatgggccctgcccccagctcctcactcttacattaatgagtggctgcaaatagacctgggcgaagaaaaaatcgttagaggaatcattatccagggaggcaagcatcgggagaataaggtatttatgagaaaattcaaaattgggtattccaataatggcagcgactggaaaatgataatggacgatagtaaaaggaaggccaaggtccgagccggagactgggaagaggtcatcccctatgtccttgacttcaaccaggggccattggcatttagtcgttag

SEQ ID NO: 29782 - DNA, 513 bp, synthetic construct
  misc_feature 1..513: note = Description of Artificial Sequence: Synthetic coding sequence
  source 1..513: mol_type = other DNA
tagcctggtggcatgttctgtcggtatgacagattggaaatctgggacggctttcccgatgtgggacctcatatcgggcgatattgtggacagaagactcccggtagaattagaagctcatcaggtatcctttcaatggtgttttacaccgactctgccattgccaaagagggtttctccgctaactattcggtgctgcagtcctcggtatccgaagattttaaatgcatggaagcattagggatggagtcaggtgagatccatagcgatcagatcactgcaagctcccagtacagcacaaattggagcgccgagaggagccgcctgaattatcctgagaacggctggactcccggtgaggattcttatcgtgaatggatccaggatgctaagtaccgtctgagagtgagcgtggtgcgcagcaaaagttcttcatcctcaacatccctggaaccgagacccctttcctccctcaagctctctttctttagttacaagattaaaatcacttag

SEQ ID NO: 29783 - DNA, 2721 bp, synthetic construct
  misc_feature 1..2721: note = Description of Artificial Sequence: Synthetic coding sequence
  source 1..2721: mol_type = other DNA
atggatatgttccctctcacttgggtattcttggcgctatacttctcccggcaccaggttaggggacagcctgaccctccttgcgggggacgtctgaactccaaagacgcgggatatataacatcgccaggctatccccaagactatccatcgcaccagaattgtgaatggattgtatacgcacctgaaccaaatcaaaaaatcgtgttgaatttcaatccccattttgagatcgaaaagcatgactgcaagtacgattttatcgagatccgggacggtgattctgaaagcgctgatctgctgggcaagcactgtggaaatattgctcctcccaccatcatctcttccgggtctatgctgtacatacggtttacctctgactacgctagacagggcgctgggttctctctgcgctacgagatctttaagaccggctctgaggattgcagcaagaattttacctctcccaacggcacaattgagtcgccaggctttcctgaaaaatatcctcataatctcgattgtacatttacaattctcgctaagcccaaaatggaaattatcctacagtttctcatcttcgatctggagcatgatcctttgcaagtgggcgagggcgactgtaagtatgactggctcgacatctgggacggtattccccacgttggaccactcatcggcaagtactgcggcacgaagaccccatccgaactgaggagcagtacaggcatcctctcactgactttccatacggatatggctgtggctaaagacggtttcagcgcccgttactacttggtccaccaggagccccttgagaattttcagtgcaatgtgccccttgggatggaatctggacgcatcgccaatgagcaaatttccgcaagttctacatattccgacgggaggtggactccccagcagtcaaggttacacggagatgacaatggctggaccccgaatctggatagcaataaggagtacctgcaggtggatctgaggttcttgacaatgttgactgcaattgcaacccagggcgctatcagccgtgagacccagaatgggtattacgtgaagtcatacaagcttgaagtctccacaaacggtgaggactggatggtgtacagacatgggaaaaaccacaaggtcttccaggcaaacaacgacgctactgaagtcgtcttaaataagctgcacgcccctctacttacccgattcgtgaggattagacctcaaacgtggcacagcgggatagcgttgcggctggagcttttcggatgtcgcgtgaccgatgccccatgtagtaatatgcttggcatgctgtccggactcatagccgattcccagattagcgcgagctctactcaagagtatctgtggtcccctagtgctgcccgactggtgagctcccggtccggctggttcccccgaattccccaagcccagccaggtgaagagtggctccaggtcgacctcggaacacccaagacagtcaaaggcgtgattatccagggcgcacggggaggggatagcatcacagctgtggaggccagggcattcgtccggaaattcaaggtctcttatagcctgaacggcaaagactgggagtatattcaggaccctagaacgcagcagccgaagctgtttgaggggaatatgcattacgacacacccgacatcagacgatttgaccctatacctgcgcaatacgttcgagtgtaccccgagagatggagtccagctggcatagggatgcggctggaagtgctggggtgcgattggaccgactccaaacccacagtagagacacttggccctacagtaaagtcagaagaaacaacgacaccataccccaccgaggaggaagccactgagtgcggagaaaactgttcttttgaggacgacaaagacttgcagctgccatctggatttaactgcaacttcgactttttggaggaaccatgcggttggatgtacgaccatgccaaatggttgcggaccacatgggctagttcttcatcacctaatgaccggacatttccggatgatcgcaattttctccgccttcagagcgattcgcaaagggaaggccagtacgccagattgatttctcctccagtacatttgcccagatctcccgtatgcatggagttccagtaccaggctaccggaggtcgtggcgtcgcactgcaggtggtaagagaagccagccaagagtctaagctgctctgggttattagagaagaccagggtggcgaatggaagcacgggcgtattattttgccgagctatgacatggagtaccagatcgtgtttgagggcgtgatcggaaaggggcgttccggagaaattgctatagacgacatccggatttcaacagatgtgcctttggagaattgtatggagcccatctccgcattcgccggtgaaaactttaagggtggtacgctgctgccgggtactgagccgacagttgacactgtaccaatgcagcccatacctgcttactggtactatgtgatggctgctggaggtgctgtcctggtgttagtgagtgtggcactggctctcgtactgcactaccataggtttaggtatgccgcaaagaagactgatcattccataacttacaagaccagtcattacacaaacggcgctccactggctgtcgagcctacactcaccatcaagctcgaacaagatagaggctcacattgctag

SEQ ID NO: 29784 - DNA, 300 bp, synthetic construct
  misc_feature 1..300: note = Description of Artificial Sequence: Synthetic coding sequence
  source 1..300: mol_type = other DNA
atggatatgttcccattgacgtgggtcttcctcgcgctgtacttctcaaggcatcaagtaagaggacagcctgatcctccctgcggagggaggctaaactcaaaagacgcaggctacatcacaagcccagggtacccccaggattatccatctcatcagaactgcgaatggatcgtgtatgcgcctgaacccaaccagaagattgtgcttaattttaacccacattttgagatcgagaaacacgactgcaacctgctgagcgcctggaagatcagcctcacttcacgctccttcgcctag

SEQ ID NO: 29785 - DNA, 1668 bp, synthetic construct
  misc_feature 1..1668: note = Description of Artificial Sequence: Synthetic coding sequence
  source 1..1668: mol_type = other DNA
atggacatgtttccgttaacgtgggtttttctggctctctacttctcgcgtcaccaggtacgaggacaaccagatccaccttgtggcggtcggctgaactcaaaagacgctgggtatattacgtcacccggttatccccaggactatcccagtcatcaaaactgtgaatggatcgtgtacgcccctgaaccaaatcagaaaatcgtgctgaatttcaatcctcactttgaaattgaaaaacacgactgtaaatatgacttcatcgagattcgagacggcgattccgagtccgctgatctcctgggaaagcactgtggcaatatcgctcctcccaccatcatcagtagcggcagcatgttgtacatccgctttacctccgactacgcacgtcagggagccggattttctctaaggtacgaaatcttcaaaactggcagcgaagattgctcgaaaaactttaccagccctaacgggactattgagtcacccggatttccagaaaaatacccccacaatctggactgcactttcaccattttggctaagcccaagatggagataatccttcaattcctcatcttcgatctggaacacgatccattacaagtcggcgaaggcgattgcaagtacgattggctggacatctgggatgggatcccacacgtggggcctctgattggaaagtactgcggaacgaagaccccgtcagaactgcggagtagtacagggatcctgagtctcacttttcacacagatatggccgtggctaaagacgggttctccgccagatattatttggtccaccaagaacccctagaaaacttccagtgtaatgtgcctcttggtatggagtctgggagaattgccaacgagcagatatcggcctctagtacttacagtgacggcaggtggactcctcaacagtctcggctgcatggagatgataacggttggactccaaatctcgatagtaacaaggagtacttacaggtcgatctacgctttttgactatgctcaccgccatcgctacacagggagctatcagcagggagacacaaaatggatactatgtgaagtcgtacaaactggaggttagcacgaacggcgaggattggatggtttaccggcatggcaagaatcacaaagtgtttcaagcaaataacgatgcaactgaagtggtactgaacaaactgcatgctcccttgttgacaaggtttgttagaattaggccccagacgtggcactcgggcatagcgctccggctcgagctcttcggctgtcgcgtcacggacgccccttgcagcaacatgcttggtatgctgagcgggctcatagccgattcacagataagcgcctcctccacgcaggagtacctgtggtctccttccgctgcacgcctggtgagctcaagaagtggctggtttcctcgcatacctcaagctcagccaggtgaagaatggctgcaagtggacctaggcacccctaaaaccgttaagggggtcatcattcagggcgcacggggaggggacagcattaccgctgttgaagctagagcctttgtccggaagtttaaggtgagctatagtttgaacggcaaggattgggaatacatccaggacccccgaactcaacagccaaaggtggggtgtagctggagaccattgtag

SEQ ID NO: 29786 - DNA, 2706 bp, synthetic construct
  misc_feature 1..2706: note = Description of Artificial Sequence: Synthetic coding sequence
  source 1..2706: mol_type = other DNA
atggacatgttccccctgacctgggtgttccttgccctgtacttcagtaggcatcaggtgcggggacagcctgaccctccctgcggcggtcggcttaactccaaggacgctggctacatcacctctcctgggtacccccaggattatccctcgcaccagaactgcgagtggatcgtctacgctccggagcctaaccagaaaatcgtactcaacttcaacccacacttcgagattgaaaaacacgattgcaaatatgatttcatagagatccgggacggggactctgagagtgctgaccttttagggaagcattgcggcaacatcgccccacccactattatatcgagcggtagcatgctgtacattaggttcactagtgattatgcaagacagggggcaggttttagcctgaggtacgagatttttaaaaccggttctgaagactgttctaagaatttcacgagccctaatgggaccatcgagagccccggttttccagaaaaatatccacataatttggactgcacctttactatcctggccaaaccgaagatggagatcatcttacagttcctgatcttcgatctggagcacgatcctcttcaggtgggagaaggggactgcaaatacgactggttggatatctgggacgggatccctcatgtaggtccattgattgggaagtattgtggcacgaaaacaccttcagaactccgctcctcaaccggcattctatctttaacttttcacacagatatggctgtcgccaaagatggtttctcagccagatactacctcgtgcaccaggaacctctcgaaaatttccagtgcaacgtgccgctgggtatggagtctggacgcattgcaaacgaacagatctctgcttcgtcgacctattcagacggtaggtggacaccccagcagagcagattgcatggcgacgacaatggctggacgcctaatctggattctaataaggagtatttacaggtggatctgcgctttctgacaatgctgactgccattgccacccagggagccattagcagggagacacaaaatggctactatgtgaagagctacaaattagaagttagtaccaacggtgaagactggatggtgtacagacatggcaaaaatcacaaggtcttccaggccaataatgacgccactgaagtggtgctgaacaagctgcacgctccgttgttgaccagatttgtccggattaggccccagacctggcactccggtatcgcactccgcctcgagctattcggatgcagggtgactgatgccccatgttctaatatgttgggcatgctctccggcttgatagccgattcccaaatcagtgcgtcttcaacccaggagtacttatggagcccgtctgcagctaggctcgtgagctccaggtcaggatggttcccacggatcccacaggcgcaaccaggagaagaatggctgcaggtcgatttaggcactcctaaaacggtaaagggagtgattatccagggcgctcgagggggagactcaattactgctgtagaagccagagctttcgttaggaagtttaaagtctcctacagtttgaatggcaaagattgggaatacatacaggatccgaggacacagcagccaaagctgttcgaaggaaacatgcactacgacaccccggatatacgtcgtttcgacccaatccctgctcagtatgtccgtgtatatcctgaaaggtggtcccccgctgggatcggaatgagactggaggtcctggggtgtgattggactgactcaaagcccaccgtggaaaccttagggccaacagtaaaaagcgaagagacgaccactccttatcctaccgaagaggaggcaaccgagtgcggtgaaaactgctctttcgaggacgacaaagacctccagctgcctagcggttttaactgcaactttgatttcctcgaagagccttgtggatggatgtacgaccacgctaaatggctgcggacaacttgggcaagctctagcagccctaacgaccggacgttcccggatgatcgcaacttcttgcgactgcaaagcgactctcagagggagggccagtatgctagactgattagccctcccgtgcacctgcccaggagccctgtctgtatggagttccagtatcaggccacaggcggtcgaggggtggccctccaggttgtgagggaagccagccaagaaagcaagttgctttgggtgattcgcgaggaccagggcggtgaatggaaacacgggagaattattctgccgagctacgacatggagtaccagattgtgttcgaaggcgtcatcggcaagggccgtagcggagaaattgccatcgacgatataagaatatccacagatgtgcccctggagaactgcatggagcctattagtgcctttgccggaggcactctgctgcctggcacagagcccaccgtggataccgtgccgatgcagccaattccagcctattggtattacgtgatggcagccggaggagccgtgctggtgttggtgagcgtggccctggccctcgtcctgcattatcaccgctttcggtacgctgcgaaaaagactgatcacagcatcacctacaaaacgagccactacacaaacggcgctcctctcgcggtagagcctaccctgactattaagctggagcaggatcgaggctcccattgctag

SEQ ID NO: 29787 - DNA, 2781 bp, synthetic construct
  misc_feature 1..2781: note = Description of Artificial Sequence: Synthetic coding sequence
  source 1..2781: mol_type = other DNA
atggacatgttcccgctaacctgggtgtttctcgcgttgtatttctctcgccaccaggtcagaggacaacccgaccccccttgtggcggaaggctgaactcaaaggacgctggatacatcaccagcccaggctaccctcaggactacccatcgcaccaaaactgtgaatggatcgtctatgccccagaacccaaccagaagattgttcttaactttaatcctcactttgaaatcgagaaacacgactgtaagtatgacttcattgagatccgcgatggcgattcagaaagcgcggatctcttgggtaagcactgcggcaatattgcaccccctacaatcatctccagcggcagtatgctgtatatccgtttcacatctgactacgccaggcagggcgctgggttctccttgagatatgagatatttaaaacaggcagcgaggactgttctaaaaatttcacctcacccaacgggaccattgaaagtccgggttttcccgagaaatacccgcacaacctcgattgtaccttcaccattctagccaagcctaaaatggaaataattctccaattcttgatttttgacctggaacatgatcctctgcaggtgggcgagggcgactgtaagtatgattggctggacatatgggatgggatacctcatgtaggaccgctaattgggaagtattgtggcacgaaaacaccctctgagctacgaagttctaccggaattctgagcctgacttttcatactgacatggcggtggctaaagatggattcagtgctagatactatctcgtccatcaggagcctttggagaattttcagtgcaatgtcccgctcggtatggagtcaggaagaatagccaacgaacagatctccgcatcatctacctattcagatggcaggtggactccacaacagagccgtttacacggagatgataacgggtggactcccaatctcgattctaataaggagtatttacaggtggacctgagatttctgaccatgctcactgccatcgccacgcagggcgctatctctcgggagactcagaatgggtattacgtgaaatcttataagctggaggtttccacgaacggggaagactggatggtctatcgccatgggaagaatcataaagtatttcaagccaacaatgacgcaacggaagtggtactgaacaaactgcacgcccctctactgacacgattcgttcggattcgtcctcagacctggcattcaggtatcgctcttcgactggagctcttcggatgccgcgtaacagatgcgccttgctccaatatgctcggcatgctgagcggcctcatagcagacagtcagatctccgccagctctactcaggaatacttgtggagccccagcgctgctaggctcgtgtccagtagaagtggctggtttccaagaattccccaggctcagccaggggaagagtggctgcaagttgatctgggcacccccaaaacggtgaagggagtgattatccagggggctcgcggaggcgactccataactgccgtagaggctcgcgcatttgtgagaaagttcaaggtgtcatattcactcaacggaaaagactgggagtacattcaggatccacgtacccagcaacccaagctcttcgagggcaacatgcactacgatacacccgacatacggcgattcgatccgattcctgcgcaatatgttcgcgtttatcccgagagatggtcacctgccggtattggcatgcggctggaagtgcttggatgcgattggacggattcaaagcctactgtcgagactctcggccctaccgttaaatcggaggaaacgacaacaccatatcccaccgaagaagaagccactgagtgtggtgaaaactgttcattcgaggatgataaagatcttcaattgccgtcagggtttaactgtaatttcgattttctagaggaaccttgtgggtggatgtacgaccacgccaaatggctccggacaacatgggcttccagcagtagccctaatgacaggactttccccgatgacagaaatttcctgaggctgcagagtgattcccaacgcgaggggcagtacgctcgccttatctcccctccggtgcacctcccacgcagcccagtgtgtatggaattccaatatcaagcaacagggggtcgcggtgtagccctgcaggtggtgcgcgaggcgtcacaagagtccaagctgctgtgggttattcgcgaagatcagggcggagagtggaagcatgggaggattatactgccgagttatgatatggaataccagatcgtgttcgagggagtgatcgggaaaggccgatccggagaaattgccatcgatgacataaggataagcaccgatgtcccactggagaactgcatggagcctatatcggcgttcgccgtggatatccccgagatacacgagcgggaaggatatgaagatgaaatcgatgatgagtacgaagtggattggtctaactcgagtagtgctaccagtggcagcggagcccctagcaccgacaaggaaaaatcctggctgtacacactggacccaatcctgattacaataatcgccatgagcagcttgggagtcctgttgggagccacatgcgccggattgctgctgtattgcacctgttcatactcaggtctgagcagtcgttcttgcacaacactggaaaactacaatttcgaattgtatgatggactaaagcacaaagtgaaaatgaatcaccagaagtgctgttccgaagcctag

SEQ ID NO: 29788 - DNA, 2796 bp, synthetic construct
  misc_feature 1..2796: note = Description of Artificial Sequence: Synthetic coding sequence
  source 1..2796: mol_type = other DNA
atggacatgttccctctgacatgggtctttctggctctgtacttctcccgacaccaggtccggggacagccagatcctccttgtggtgggagactgaactcgaaggacgccggatatatcacctccccaggatacccgcaggattaccccagtcaccaaaactgtgaatggattgtgtacgcgccagaacctaatcagaaaattgtccttaattttaatccgcattttgagatcgagaagcatgattgcaagtatgatttcatcgagattagagacggcgatagtgagtccgccgacctgctaggcaaacattgcggaaatatcgcacctccaactattatctctagcggctctatgctatacataaggttcacctcagactatgctaggcaaggagctggattcagcctacggtacgagatcttcaagacagggtccgaagattgttcgaagaattttacatctcctaacggcacaatcgaatcccctgggttcccagagaagtaccctcacaatctggattgtacgttcacaattctcgcgaagcccaaaatggagattatcctacagttcttgattttcgacctggaacacgatcccctgcaggtgggtgaaggcgactgcaaatacgattggttagacatctgggacggcattcctcacgtaggtcccctgatcggaaagtactgtggaacaaaaacgccctccgagttacgctcttctaccggcatcctatcactcacctttcacacggacatggctgtggctaaagatggcttctctgccaggtactatcttgtccatcaggagcctctcgaaaactttcagtgcaatgtaccgcttggcatggagtccggccgtattgctaacgagcagatatctgcctcttccacctacagcgacggcaggtggacaccacagcagtcccgcctgcacggtgatgacaatggctggacacctaacctggatagcaataaagagtaccttcaagtggatctcaggttcctcacaatgcttaccgcaatcgctactcagggtgctatctcacgtgaaacccagaatgggtattatgtcaaatcatacaaacttgaagtgtccaccaatggagaagactggatggtatacagacatgggaaaaaccacaaggtgtttcaggccaacaatgacgcaactgaagtggttctgaataaactgcacgcacccctactgacaaggttcgtccggattagaccccagacttggcacagtggtatagcacttcgcctcgaattgttcggttgcagggtcaccgatgcaccttgctcaaacatgttgggaatgttgtcaggacttattgccgatagtcagatatccgcttctagcacccaggaatatctgtggtccccttctgccgcaagattggtgtcttcaaggtcaggctggtttccgaggattcctcaggcccaacctggggaagagtggctgcaggtcgatctgggaacccccaagactgtaaagggggtgattattcagggagctcggggaggggacagtattactgctgtagaggcgagggcttttgtccggaagttcaaggtcagttactctctaaacgggaaagattgggaatacattcaggatccccgaactcagcagccgaagctgtttgaaggaaatatgcactatgacacgcccgatattcggcgtttcgaccccattccggcacagtacgtgcgcgtttaccccgaaaggtggagtcctgcagggataggcatgcgacttgaggtgctcgggtgtgactggacagactccaagccaactgtggagacactcggtcctaccgttaagtccgaggaaacaacaaccccataccctactgaggaagaagccacagagtgcggagaaaattgttctttcgaggacgacaaagacctccagctgccatctggctttaattgcaatttcgactttttggaggagccttgcggttggatgtatgaccatgccaagtggctgcggaccacatgggcaagcagtagctcccccaacgaccggacctttcccgatgacaggaatttcctgcggttgcaaagcgactctcagagagaagggcaatacgccaggcttatctcccccccagtgcacctgcccagatcgccagtgtgcatggagtttcagtatcaggccacagggggtcggggagtggccctgcaggttgtgagggaggcgtctcaggagtccaagctgctttgggtaatccgagaagatcagggtggcgagtggaaacatggaagaattatcctccctagttatgatatggagtaccaaatagtgtttgaaggcgtgattgggaagggcaggtccggcgaaattgcaattgacgacatccgtatatccactgacgtgccgctcgagaactgcatggaaccaataagcgcctttgccggagagaactttaaggtggacattccggagatacacgaaagggagggatacgaagacgaaattgacgacgagtacgaagtcgattggagcaattctagttccgcaacgagcgggtcgggtgccccatccactgacaaagagaaatcttggctctacacgctggaccctatactgattacaattattgccatgagtagcctgggggtcttactcggtgccacttgcgccggactgctcctgtattgcacgtgtagctacagcgggctgtcgtctcgatcgtgtacaaccctggagaactataatttcgaactctatgacggactgaaacataaggttaagatgaatcaccagaaatgctgttcagaggcgtag

SEQ ID NO: 29789 - DNA, 2730 bp, synthetic construct
  misc_feature 1..2730: note = Description of Artificial Sequence: Synthetic coding sequence
  source 1..2730: mol_type = other DNA
atggacatgtttcccctgacttgggtgtttctggccctgtacttcagcaggcatcaggtccgcggacagcctgatcccccttgcgggggaagattgaattcgaaagatgctggatacattacctcacccggatacccccaggattacccctctcaccagaactgcgagtggatcgtgtacgctcctgaacccaaccagaaaatcgtcctgaattttaacccacacttcgagattgagaagcatgactgcaagtatgatttcatcgaaataagggacggagacagtgagagtgctgatttactgggtaagcactgcggaaatatcgctcctccaactatcatcagcagcggatccatgctgtacattcggtttaccagtgactatgctagacagggggcaggtttcagtctgagatatgagatttttaagacagggagcgaggattgttctaagaactttacgtcccccaatggtacgatcgagtccccgggatttcccgagaaataccctcataatctggattgcacctttacaattcttgcaaaacccaagatggagattattctccagttcctgatcttcgacctggagcatgaccccctacaggtgggggagggagactgcaaatatgattggctcgacatttgggacgggattccacacgtcgggcctctgatcgggaagtactgtggtaccaaaacaccatccgaactgaggtccagcaccggcatcctgtccctaactttccacaccgacatggcagtcgcaaaggacggtttctccgcacgatactatttggtccaccaggagccactcgagaacttccagtgcaatgtgcccctggggatggaatctggacggatagccaatgaacagattagtgcttcctccacctactccgacggcagatggaccccacagcagtccagactgcatggagacgataacggatggacgcccaatttggacagtaacaaagagtatttacaggtggacctccgattcttgacgatgctgacggctatagcaacccagggtgccatcagccgggagacccaaaatggttactacgttaaatcctataaactggaggtgagtacaaacggggaggactggatggtctacaggcacgggaagaaccacaaggtcttccaagcgaacaacgatgctaccgaggtggttctgaacaaactgcacgcgccattattaactcggtttgtgcggatcaggccccagacctggcattcagggatcgccctcaggttggaactgttcggctgtagggtgaccgatgctccctgctcaaacatgctggggatgttatctggcctgattgcggattcgcagatcagcgcctctagtacccaagagtatctttggtctccctccgccgctcggctggtctcgtccaggtctggttggttccctaggataccccaggctcagccaggggaggagtggttgcaggtcgatcttggcacacctaaaaccgttaaaggggttattatccagggcgcacgtggaggtgatagcatcacagctgtggaagcaagggccttcgtacgcaaattcaaagtgagctacagtctaaacggaaaggactgggagtatatccaagatccacgcacacaacagcctaagcttttcgagggcaacatgcactatgacacccctgatatccgaagattcgatcctatccctgcacagtacgtccgggtgtaccctgagcggtggagccctgcaggcattggaatgcgcctcgaggtgctaggttgcgactggaccgactctaaaccaactgtggaaaccctgggtcccaccgtcaagtcagaggagaccacaaccccatatcctaccgaggaagaggccacagagtgtggtgagaattgttcatttgaggatgataaggatctgcaactcccaagcgggtttaactgtaactttgattttctcgaggagccctgcggctggatgtatgaccatgctaaatggttacgcaccacctgggcttccagctcctccccaaatgatagaactttcccggacgaccgtaacttcctccggctgcagtccgacagtcagagggaaggtcagtatgctcgcttgatctcaccaccagtccacctccctcgatctcctgtgtgtatggagtttcagtatcaggccactggaggacgtggagtggcactacaggttgtcagggaagcgtcacaggagagtaaactcctctgggttattagagaagaccaaggtggcgagtggaagcacggtaggatcatcctgccatcgtatgacatggagtaccagatcgtcttcgagggggtcattggaaaaggacggtctggggaaatcgccatagacgacatcaggatatccactgacgtacccctggaaaactgcatggagccaatctcagcatttgccgatgagtacgaggtcgactggtcaaatagttcttcggcgacatccggttcaggcgctccgtcaacagacaaggaaaagtcctggttgtacacacttgatccaatcctgatcacaattatagcaatgtcttccctgggcgtgctgctgggagccacttgcgcgggtctgctgctatattgcacctgttcatactctggcttaagttccaggtcctgtactaccctggagaattataactttgagctctacgatggcctgaagcacaaggtgaaaatgaatcatcagaaatgctgttccgaggcttag

SEQ ID NO: 29790 - DNA, 1668 bp, synthetic construct
  misc_feature 1..1668: note = Description of Artificial Sequence: Synthetic coding sequence
  source 1..1668: mol_type = other DNA
atggacatgttccccctcacatgggtgtttctcgccctatatttctcacgccaccaagtgcggggacaacccgacccaccttgtgggggaaggttgaactccaaagatgcgggttatattacttccccgggatatccgcaggattacccaagccatcagaactgtgaatggatcgtgtatgctccagaacccaatcagaagattgtgcttaatttcaacccccactttgaaatcgagaaacatgactgcaagtatgactttatcgaaattcgcgacggagattcagaaagtgcggatctgctcgggaaacactgtggtaacatcgccccacctacaattatcagcagcggatccatgctgtatattaggttcacctccgactatgctaggcagggtgccggattctctttgcggtacgagatcttcaagaccggcagcgaagattgctcaaagaacttcacaagccccaacggtacaattgaatcacctggattccccgagaagtacccacacaatctcgactgtactttcacgatactggcgaagcctaaaatggagatcattctgcagtttctgatatttgaccttgaacacgaccctctccaggtcggagagggggattgtaagtacgattggctggacatttgggacggtattccacacgtggggcctctgataggaaaatactgtggcacgaaaacaccttccgaactgcgatcaagcactggcattctttccctaacgttccacacggatatggccgtcgcaaaagatggattcagcgccaggtactacctagtacaccaagaaccactggagaactttcagtgcaacgtgcccctcggaatggaaagcgggaggatagccaatgagcagatcagcgcttcctccacatacagcgatgggaggtggacaccccaacagagcagactgcacggggatgataatgggtggacgccaaacctggacagtaacaaggaatatttgcaggtggatttgaggttcttgaccatgttgacagccattgctactcagggcgcaatttcaagggagacgcagaatggctactacgttaagtcctataaactagaggtgtccaccaatggagaggactggatggtataccggcacggtaaaaaccacaaagtgtttcaggcaaataatgacgctacggaggtggtgctcaacaaactacacgccccactgttgaccagatttgtccgtatccggcctcagacctggcactccgggattgcgctgaggttagagctgttcggatgcagggtgactgatgctccgtgctccaacatgttaggtatgctgagcggtcttatagccgacagccaaatatccgccagctctactcaggaatatctctggtccccatccgctgccaggctggtttcatctagatcgggttggtttccccgtatcccacaggcacagccaggcgaggaatggctgcaggtggatttgggaaccccaaagaccgtgaagggggtgatcattcagggcgctagagggggagacagtatcactgcagttgaggcacgggctttcgtgagaaaattcaaggtcagttattctttgaacggcaaggactgggagtacatccaggatcccaggacccagcaacctaaagtgggctgctcttggaggcctctgtag

SEQ ID NO: 29791 - DNA, 309 bp, synthetic construct
  misc_feature 1..309: note = Description of Artificial Sequence: Synthetic coding sequence
  source 1..309: mol_type = other DNA
atggatatgtttcccctgacttgggtgttcctggccctgtatttctcgcggcaccaggtgcggggtcagccagacccaccttgcggagggcgtctgaactccaaagacgccggttatattacatctccgggttatccccaggattacccgagccaccagaactgtgaatggattgtctatgcccctgagcccaaccagaagatcgtgctgaacttcaacccacactttgagatagagaaacacgactgcaagtacgattttatagagatccgagacggcgattctgagtcagccgacctccttgggtag

SEQ ID NO: 29792 - DNA, 2781 bp, synthetic construct
  misc_feature 1..2781: note = Description of Artificial Sequence: Synthetic coding sequence
  source 1..2781: mol_type = other DNA
atggatatgtttccactgacctgggtgtttctggcgctttacttttccagacatcaggttcgtgggcagcccgatcccccatgtgggggtaggctcaatagcaaagatgctggatacatcacatcccccggttacccacaggattatcccagccatcagaactgtgagtggattgtttatgccccagaaccaaaccagaagatcgtacttaatttcaatccccatttcgagattgagaagcatgactgtaagtacgactttattgagatccgggacggcgattcagagagcgctgatttactcgggaagcattgcgggaatatcgctcccccaacaatcattagttctggatcgatgctgtacataaggttcactagcgattacgctcgacaaggcgcaggattctctctgagatacgagattttcaaaacagggtctgaggactgtagtaaaaacttcacatcaccgaatggtacgattgaaagtcctgggtttccggaaaaatatccacataacctcgattgtaccttcaccatactggccaagccaaagatggagattatcctgcagttcttgatcttcgaccttgaacatgacccactccaggtgggagaaggcgactgcaagtacgattggttggatatctgggatggcatccctcacgtcgggccattgatcggtaaatactgcggaaccaagacaccaagcgaactgagatcctccacagggatattgtcactgaccttccacaccgacatggctgtggctaaggatggcttcagtgcgcgatactacctggtgcaccaggagcccttagagaacttccagtgcaatgtgcccctcgggatggagagcggtcgtatcgcgaacgagcagattagtgccagctcaacatattccgacgggaggtggacgccacagcaatcacgactccacggggacgacaacggctggactcccaatctggatagcaacaaggaatatttgcaggtcgacctccgatttcttacaatgctcaccgcgatcgcgacacagggcgctattagtcgggagactcagaacggctattatgtgaaaagctacaagctcgaagtctctactaatggggaggattggatggtttataggcacggtaaaaaccataaagtgttccaggccaacaatgacgccaccgaagttgtacttaacaaactgcatgcaccgttattgactaggtttgtgcgaatccgacctcagacttggcactccggcattgcactgagactggagctttttgggtgccgtgttacagatgctccatgttccaatatgctcggcatgctctcaggattaatagccgattcccaaatatccgcatcctcaacacaagaatacctgtggtccccaagcgcagcgaggctagttagcagccggtccggctggtttcccaggatacctcaggcccagcctggagaggagtggctccaggttgacttgggaactcctaaaaccgtgaagggtgtcatcatccagggggctcggggaggcgattcaataaccgcggttgaagccagagccttcgtgcgcaaatttaaggtctcatatagcctgaatggaaaggactgggaatacattcaagacccacgcacccagcagcccaaattgtttgaagggaatatgcattacgatacacctgatattagacggttcgatccaattccagcccagtacgttcgtgtgtaccctgagcgatggagtcctgctggaataggcatgagactggaagtgctgggctgtgactggacagatagtaagccaacggtggagactcttggtcccaccgtcaagtcggaggaaacaactacaccttatccgacagaagaggaggccaccgagtgtggggagaactgctcctttgaggacgataaggatctgcagctacctagcggatttaactgtaatttcgatttcttggaggagccatgtggctggatgtacgatcatgccaagtggctgagaaccacttgggctagctcctcatccccaaacgataggacgtttccagatgatcgaaatttcctgaggcttcagtctgattctcaaagggagggccagtacgccaggcttatttcccctcccgtgcatttgcccagatcccctgtatgtatggaattccaatatcaggcaaccggcggtcgaggggttgccctgcaggtggtgcgggaggccagccaggagagtaagctcctctgggtgatcagagaagatcagggcggagagtggaaacacggaaggataatcctgccttcctacgatatggagtaccagatagtgtttgaaggagtcatcggcaagggacgctccggagagatcgcaattgatgacattcgcatcagcacagatgtaccgttggaaaactgcatggctacagtttctgcaagtattgtggacatcccagaaatccacgagcgggagggatacgaagacgaaattgatgacgaatacgaggtggattggtcaaatagctcatccgccacatctggttctggagctcccagcaccgacaaagagaagagctggctgtatacattagaccccatcctcatcaccattatagccatgtcctccctaggggttcttcttggggcaacttgcgccggtctccttttgtactgtacttgcagctatagcggtctgagctcccgatcttgcactacactggagaattataactttgaattgtacgatggcctgaaacacaaagtcaaaatgaaccaccagaaatgttgcagcgaggcctag

SEQ ID NO: 29793 - DNA, 2730 bp, synthetic construct
  misc_feature 1..2730: note = Description of Artificial Sequence: Synthetic coding sequence
  source 1..2730: mol_type = other DNA
atggatatgtttccactgacctgggtgtttctggccctgtacttttctagacaccaagttcgtgggcaacccgatcctccctgtggcggtagattaaacagcaaggacgcgggatacatcacaagcccagggtatcctcaggactaccccagtcaccagaactgtgaatggatagtatatgccccagaaccaaatcagaaaattgtgctgaatttcaacccccattttgagatcgagaaacacgactgcaaatacgacttcatcgaaattcgcgacggcgactctgagagtgccgatcttctggggaagcactgtggcaatatcgcccctccaaccataatctcatcggggagcatgctttatatccggtttacttccgactacgcacggcagggagcaggatttagccttcgatatgagatctttaaaactgggagtgaggactgctctaagaacttcacaagccccaacggcaccatcgaatcgcccggtttccccgagaaatacccccataatctggactgtacattcactattttggctaagcccaagatggaaatcattctgcagtttcttatattcgatctcgaacacgaccctctgcaggttggcgagggtgactgcaaatacgattggctagatatttgggacggtatcccacatgtgggcccactgattggcaagtattgcggcaccaagacacctagtgaactgagatcctccaccggaatcctgagcctcacatttcacacagatatggcggtggctaaggatggttttagcgcccgttattacctggtccatcaggagcctctggaaaactttcagtgcaacgtgcccctggggatggagtccgggagaatcgccaacgagcaaatatctgcatcaagcacgtattctgatggccgatggacaccgcaacagagcagactccacggggatgacaacggctggactccaaatctagacagtaacaaagagtacctgcaggtggacctgaggtttctgacaatgctaacagcaatagctacacagggtgcaatttcacgcgagacccagaatggctactacgtaaagtcgtacaagctcgaggtgtccacaaacggcgaggattggatggtttacaggcacggaaaaaaccataaggtttttcaagcaaacaatgatgcaacagaagttgtgctgaacaagctccatgccccactcctcaccagattcgtcaggatccggccacagacatggcattccggaattgcgctccgcctggagttgttcgggtgtcgcgtgaccgacgctccgtgttcaaatatgctgggcatgttgtccggcctgatcgccgactcacaaatttctgcgtcctcaactcaggaatacctatggtcgcccagtgctgcaaggctggttagttccagatccgggtggtttcccagaatacctcaggcacagccgggagaggaatggctccaagttgatctgggcacacctaagacagtcaaaggagtgatcatccagggtgctagaggcggagactccatcactgctgtggaagctcgcgcttttgtccgcaaattcaaagtttcctatagtctgaacgggaaggactgggaatacattcaggaccccagaactcagcagcctaaacttttcgaaggcaacatgcattacgacacgcctgacatccgcaggtttgatcctatcccagcccaatacgtacgcgtgtatccggagcgttggtcccccgctggtattggtatgaggctggaggtgctgggctgtgactggacagactccaaacccaccgtggaaaccttaggaccgaccgtcaagagtgaagagactactacgccttaccccactgaggaggaggctacagaatgcggggagaactgttcctttgaagacgacaaggatttacagctgccttccggttttaactgcaacttcgatttccttgaggagccttgtggttggatgtacgatcacgccaagtggctgagaaccacatgggccagcagcagttcccctaatgaccgcacctttcctgatgaccgtaattttctcagactccaatcagactctcagcgcgagggtcagtacgccaggctgatctccccgccagtccatttgccgagatcacctgtatgtatggagttccagtaccaagcaacgggcggacggggtgtcgccttacaggttgtacgggaagcctcgcaagaatcgaaacttctctgggtcattcgggaagaccaaggcggtgagtggaagcacgggaggattattcttcccagttatgatatggaataccagatagttttcgaaggcgtgatcggcaaggggagaagcggggagatcgcaattgacgatattcgaatcagcaccgacgtcccccttgagaattgtatggggccaaaggcttgtatcgcggatgagtacgaagttgattggagcaactcttccagcgccacaagcggctctggggctcccagcactgataaggaaaagtcctggctctacaccctagatcctatcctcatcactatcatcgccatgagtagtctgggcgtgctcctgggcgcaacttgtgccggtctgctgctctactgcacttgttcctactctgggttatcctccaggagttgcactaccctcgaaaactacaatttcgagctgtacgacggcctcaaacacaaggtaaaaatgaaccaccagaagtgctgcagtgaggcctag

SEQ ID NO: 29794 - DNA, 462 bp, synthetic construct
  misc_feature 1..462: note = Description of Artificial Sequence: Synthetic coding sequence
  source 1..462: mol_type = other DNA
atgaccaaaatcaaggctgatcctgacggcccagaggcccaggctgaggcatgctccggcgaacggacataccaggagttgttggtcaatcagaatccaattgctcagcctttggcttcacggaggttgactagaaagctgtataagtgtatcaaaaaggccgtgaaacagaaacagatacgacgtggcgtgaaggaagtacagaaattcgtgaacaagggagagaaaggaatcatggtgttggcgggagataccttgccaattgaggtgtactgtcaccttccagtaatgtgcgaggaccggaacttaccctatgtatacataccttctaaaactgatctcggggcagccgcaggttctaagcggccaacttgcgtcatcatggtgaagccgcacgaagagtatcaagaagcctacgatgagtgtctggaggaggtccagtcgctgcctctgccgctctag

SEQ ID NO: 29795 - DNA, 273 bp, synthetic construct
  misc_feature 1..273: note = Description of Artificial Sequence: Synthetic coding sequence
  source 1..273: mol_type = other DNA
atgacaaaaattaaggctgaccccgacggaccagaagcccaggccgaagcttgttcaggagaacgcacataccaagagcttctcgtgaaccagaaccctatagcccaacctcttgcatcccgacgtttaacccggaagctatacaagtgtattaaaaaagcggtgaagcagaaacagatccgcagaggagtcaaggaagtccagaaattcgtgaataagggcgagaagggaacctgggtgcagccccaggctccttcagcgcctcccgtgtag

SEQ ID NO: 29796 - DNA, 2265 bp, synthetic construct
  misc_feature 1..2265: note = Description of Artificial Sequence: Synthetic coding sequence
  source 1..2265: mol_type = other DNA
atgtggaaattgttaccggcagccggaccagccggaggggagccctaccgcctgcttaccggtgttgaatacgtggtgggtcggaaaaactgcgcaatcctaattgagaatgatcagtctatctcccgaaaccatgcagtacttaccgcgaatttttccgtgacgaatctgtcacagaccgatgagatccccgttttgactttgaaggataactcgaaatacggcacttttgtcaacgaggagaaaatgcaaaatggcttcagtcgcaccttgaagtctggcgacggaatcacttttggcgttttcggctccaaattccgaatcgagtacgaaccactggtcgcttgctctagctgtcttgacgtgtcaggaaaaacagcactcaatcaggccattctacagctagggggatttacagtgaataactggactgaggagtgcactcatttagtgatggtgtctgtgaaagttacaatcaaaactatctgcgccctaatctgtggcaggcctattgtgaaaccagagtacttcacagagttcctgaaggccgtggagtcaaagaagcaaccccctcagatcgaaagcttctatccaccacttgatgagccttcgatcgggtccaagaacgtagacttgtcgggtcgacaggagcgaaagcagatttttaagggaaagaccttcatatttttgaatgcgaagcagcataagaaactgtcatctgccgtggtgtttggtggaggtgaagcaagacttataactgaggagaacgaagaggaacacaattttttccttgcacccggtacatgtgtcgttgataccgggattacaaatagccaaacactcattcccgattgtcagaaaaagtggatccagagcattatggacatgcttcagaggcagggtctgagacctatacctgaggctgagatcggacttgccgtcatctttatgaccaccaaaaactactgtgaccctcaagggcacccatcaacagggctcaagacgacaactccaggtccaagcctgagccagggagtgtctgtggacgagaaacttatgccaagtgctccagtgaatacgacgacttacgtagccgacactgaaagcgaacaggccgacacctgggacctgagcgaacggcctaaggagattaaggttagtaaaatggaacagaaattccgcatgcttagtcaggacgccccaaccgtgaaagagagttgtaagacctcgtccaacaataatagtatggtttctaacacccttgccaaaatgcgtattcctaactatcagttgtcccctactaagttgcccagtataaataagagcaaagatcgagcttctcaacagcagcagaccaattctataaggaattactttcagcctagcacaaagaagcgggagcgggacgaagagaaccaggaaatgtcaagctgcaaatccgctagaattgaaacttcatgttctctcctcgagcagacccagccagcgacgccgtctctgtggaagaataaagaacagcatttgtcagagaatgaacctgttgacaccaacagtgacaataatctcttcactgatacggatctcaaatccatcgttaagaactcggcaagcaagtcccatgcagctgagaagctgaggtctaataagaagagagaaatggacgatgtggctatcgaggacgaggtgctcgagcagcttttcaaagatacaaaacctgaacttgagattgatgtgaaggtgcaaaagcaggaggaggacgtgaacgtgcgcaagcgccctaggatggatatcgagaccaacgacacattctcggacgaggctgtacccgagtcatctaagatctcccaagagaacgagatcggcaagaaaagagaactcaaagaagactccctgtggagcgccaaggaaatctcaaataacgacaaattgcaagatgattccgaaatgctgcccaagaaattacttctgaccgagtttcgatcactggtgataaaaaatagcacatctaggaatccttcaggcattaatgatgattacggtcagttaaaaaattttaagaagttcaaaaaggtcacttacccaggcgcagggaagctgcctcacatcatcggcggttccgacctgatcgcccaccatgccagaaaaaacactgagctagaggagtggttaagacaggaaatggaggttcaaaaccaacatgccaaagaggaaagcttagctgatgatctttttaggtataacccttacctcaaaagaaggcgatag

SEQ ID NO: 29797 - DNA, 1437 bp, synthetic construct
  misc_feature 1..1437: note = Description of Artificial Sequence: Synthetic coding sequence
  source 1..1437: mol_type = other DNA
atgtggaaactcctcccagcagctggtcccgcaggaggcgaaccttaccggcttttgactggcgtggaatatgtcgtgggcaggaagaactgtgctatcctaattgagaacgatcagagcatttcaagaaaccacgccgtgctgaccgcgaacttctccgtgacaaacctctctcagacggacgagatcccagtgctgaccttaaaggataattctaagtatggcacatttgtgaatgaagagaagatgcagaatggcttttctcgcacactgaagtctggcgacgggattacatttggcgtgtttgggagcaagttcaggatcgaatatgagcccctggttgcttgctcctcgtgcctcgatgtatccggtaagacagctctgaatcaagcaatcctgcagctcgggggtttcactgttaataattggaccgaagagtgtacgcacctcgttatggtgtctgtaaaggtcaccattaagactatatgcgcgctgatttgtgggagacccatcgtgaaacctgagtattttacagagttccttaaagccgtggagagtaaaaaacagccccctcagatcgagtccttctacccgcctcttgatgagcctagcattgggtcaaaaaatgtggacctgagcgggagacaggaacggaagcagatttttaagggaaagacattcattttcctcaacgctaagcagcataagaagttgagctctgctgttgttttcgggggtggcgaggctagactgattaccgaagagaatgaagaagagcacaattttttcctggctccgggaacgtgcgtggtagataccggaataactaactcgcagaccctcattcccgattgtcagaagaaatggattcagagcatcatggatatgctgcaacggcaaggtttgcggccaatcccggaagcagagatagggttggcggtcatcttcatgaccaccaagaactactgtgacccacaggggcatcccagcaccggcttaaagacaacaacacccggacccagtctgtcccagggagtttccgtcgacgagaagctgatgccatctgctcccgtgaacaccacaacatatgtggccgacactgagagcgagcaggctgacacctgggatctgagcgaaaggccaaaggaaatcaaggtgtccaagatggagcagaaattcagaatgttgtcacaggatgccccaaccgtgaaggagtcgtgcaagaccagctcaaataacaacagtatggttagcaacaccctcgcgaaaatgaggattccaaactaccagctgagcccgaccaagctcccctctatcaacaagtccaaagatagggcctcccagcaacagcagactaacagtattaggaattattttcagccaagtacaaagaaaagggagcggctgcacctcaagaagaaaaaaaagaaaaagtag

SEQ ID NO: 29798 - DNA, 333 bp, synthetic construct
  misc_feature 1..333: note = Description of Artificial Sequence: Synthetic coding sequence
  source 1..333: mol_type = other DNA
atgggcgcatctggctcaaaggcccgaggcctgtggcctttcgcctccgccgcagggggaggcggatccgaggccgctggcgctgaacaggccctcgttaggcctcggggaagggcagtgcccccattcgtgtttacgcgacgcggatccatgttctacgacgaagacggcgaccttgctcacgaattctacgaggagactatcgtcactaaaaatggtcagaaacgagccaaactgagaagggtacacaagaaccttatcccacaagggatagtgaagttggaccatccccgtattcacgtggacttccccgtgattctttacgaggtgtag

SEQ ID NO: 29799 - DNA, 1206 bp, synthetic construct
  misc_feature 1..1206: note = Description of Artificial Sequence: Synthetic coding sequence
  source 1..1206: mol_type = other DNA
atgtggtcggggggttcgggtaaggcacggggttgggaggcagctgcgggagggcgatcttccccgggtcgccttagcagacggcgtatcatgtcaatgtccccaaagcatactacacctttctcagtgagcgacatcttgtctccactggaggaatcttataaaaaagtggggatggaagggggagggctgggcgctccgttagctgcgtacaggcaaggccaggctgctcctccgactgctgcaatgcaacagcacgctgttggacaccacggagctgttactgcagcttaccatatgacagctgctggcgtcccgcagctgtcacactctgccgtggggggttactgcaatggcaaccttggcaatatgtccgaactccctccatatcaggacactatgcgcaattctgcttctggccctggatggtatggcgctaacccagaccccaggttccctgcaatcagccggtttatgggcccagcctcggggatgaatatgtccggcatgggagggctgggttctttgggcgatgtttcaaagaacatggcccctttgccttccgcacccagacggaaacggagagtcctcttcagccaggcccaagtgtatgagctggaacggaggttcaagcaacaaaaatacctcagcgccccagagcgcgaacatctggcatctatgatccatctgacgcccacccaggtaaagatctggttccagaaccaccggtataagatgaagcgccaggccaaggacaaggccgcacagcagcaactccaacaggatagcggtggcggagggggaggcggtggcactgggtgtccccagcagcagcaggctcaacagcagtccccccgaagagtcgctgtccccgtgctggtgaaagatggtaagccttgccaagccggagcaccagccccaggagcagccagcctgcaggggcatgcacagcagcaggcccaacaccaggcacaggccgcacaagctgccgcagcagcgatcagcgtgggctctgggggagccggacttggtgctcatcccggacaccagccgggatcggcgggacaatcgcccgatctggcgcaccacgccgcaagcccggcagctctgcagggacaggtgtcatcgctttcacatttgaacagctcagggagtgattacggtaccatgtcatgcagcacgcttttgtatgggcgtacatggtag

SEQ ID NO: 29800 - DNA, 1116 bp, synthetic construct
  misc_feature 1..1116: note = Description of Artificial Sequence: Synthetic coding sequence
  source 1..1116: mol_type = other DNA
atgtccatgagcccaaaacatactacccctttttccgtgtcagacatactctcccccctagaagaatcctataagaaagtcggaatggagggaggtggtctgggggcaccgctggctgcctatcggcagggccaggcggctcctcccacagcggctatgcaacagcacgccgttggccaccatggggctgtgaccgcagcatatcatatgaccgctgccggagtcccacagctgtcccactccgccgtggggggttattgtaacggtaacctgggaaacatgagcgagcttccaccttaccaggacacgatgagaaactctgcttcgggtcccggatggtacggggctaacccggaccccagattccccgctatctcacggttcatgggtcccgcatccggaatgaacatgtctggcatggggggtttggggagcctgggggatgtttccaagaacatggcacctctgccctccgcaccccgaaggaaacggcgtgtgctcttttcacaggcccaggtttacgagctggaacgccgttttaaacagcagaaatatcttagtgcaccagagagagagcatctggcctcaatgatccatttgacacctacccaagttaaaatatggttccagaaccatcggtacaaaatgaaacggcaggctaaggataaagcggctcagcagcagttacagcaggactccgggggagggggaggagggggagggactgggtgtccacaacagcagcaggcgcagcagcaaagcccccgtagagtcgccgtgcctgtgctcgtgaaggacgggaagccctgccaggccggagcacctgcgcctggagcagcttcactgcaggggcatgcacaacaacaggcccagcaccaggctcaggcagctcaggcagctgcagctgcaatcagcgttggaagcgggggtgccggacttggggctcatcccggacatcaacctggttctgccggacagtcccctgatttggctcaccatgctgcatctcctgccgcactgcaagggcaggtaagcagtttaagccaccttaactcatccggttccgactacgggaccatgagttgtagtactctgctgtacggacgaacctggtag

SEQ ID NO: 29801 - DNA, 1116 bp, synthetic construct
  misc_feature 1..1116: note = Description of Artificial Sequence: Synthetic coding sequence
  source 1..1116: mol_type = other DNA
atgagtatgtcaccaaagcatactacccccttcagtgtgtccgatattctgtctccacttgaagagagttataaaaaggtgggaatggaaggaggcggactgggagcacctctggccgcttaccggcagggtcaggccgctcccccaactgcagccatgcagcagcatgcagttggccaccacggcgcagttactgccgcataccacatgactgccgctggggtcccccagctctcgcactccgcagtgggagggtattgtaacggcaaccttggcaacatgtccgaactgcctccctaccaggataccatgaggaattccgcatccggacccggttggtatggggctaaccctgatccaaggttccccgcaatttccagattcatggggccagctagcggcatgaatatgagcgggatggggggtcttggatcgctgggggacgtgtctaagaacatggcgcctctgccatcagccccacgacgtaagcgcagggtgctcttttctcaggcccaggtatacgagcttgagcgccgtttcaagcagcagaagtacctttcagcccctgaacgagagcacctggctagtatgatccacttgacaccaacccaagtgaagatttggttccagaaccaccgctacaaaatgaaacgccaggcaaaggataaggctgcgcaacagcaactgcagcaggactccggcggagggggtggagggggaggcaccggatgcccacaacaacagcaagcccagcaacagtccccaagaagggtggccgtgccagttctggtgaaggacgggaagccctgccaggcaggcgctccagcgccaggggctgccagtttacaggggcacgctcagcagcaggcccagcatcaggcccaggcggctcaggctgccgctgcggctatttccgtgggaagcgggggtgcagggctgggggcacatcctgggcatcagcctggcagcgctggccagtctcccgaccttgcccaccatgcagccagtccggcagccctgcaggggcaggtgagttcattgtcacacttgaactcctctgggtctgattatggcaccatgtcttgctcaaccctcctgtacggcagaacatggtag

SEQ ID NO: 29802 - DNA, 1116 bp, synthetic construct
  misc_feature 1..1116: note = Description of Artificial Sequence: Synthetic coding sequence
  source 1..1116: mol_type = other DNA
atgtctatgtccccaaagcatacaactccattctcagtcagcgacatcctttcgccactggaggaatcctacaaaaaagtcgggatggaggggggaggccttggtgcccctctagcagcctacagacagggccaggctgccccacctactgccgctatgcagcagcatgcagtcggccaccacggcgctgttaccgcggcataccacatgaccgccgcaggagtacctcagctctcccacagcgctgtgggcggatattgcaatggaaatctgggcaatatgtcagagctgcccccataccaggatactatgagaaatagcgctagcgggcctgggtggtacggtgctaatcccgaccctcgcttccctgcaatctcccggtttatggggccagcttccgggatgaatatgtccggaatgggaggcttgggatccctgggggacgtcagtaagaacatggcacccctccctagcgcaccaagaaggaaaaggcgggtgctgttttcccaggcacaggtgtatgagcttgaaaggcggttcaaacaacagaaatatctcagcgcccctgagagagagcacctggcttctatgattcatctgacccctacccaggttaaaatctggttccagaaccatagatacaaaatgaagaggcaggccaaagataaggcagcccagcaacagttgcagcaggactctgggggtggcggaggaggtggagggacgggttgccctcagcagcaacaagcacaacagcaatcaccccgaagagtagccgtacccgtcctcgtgaaagacggtaagccatgtcaggcaggtgccccagcaccgggtgctgccagtcttcagggccatgcccagcagcaagcccagcaccaggctcaggccgcacaagccgcagcagcggctatcagcgtcgggagcggaggagcgggacttggcgctcaccctggtcatcagcccggtagcgctggccagtcacccgatctggcccatcatgccgcttcccctgccgcactgcagggccaggtttcttctctcagccacttgaactcgagcggaagcgattatggcaccatgtcatgctccacactcctttacggcaggacatggtag

SEQ ID NO: 29803 - DNA, 105 bp, synthetic construct
  misc_feature 1..105: note = Description of Artificial Sequence: Synthetic coding sequence
  source 1..105: mol_type = other DNA
atgtggagcggagggtctggcaaggcacgaggctgggaggctgccgcaggaggacggagtagtccaggcagactgtctgcttatgctcccccactcgtggcgtag

SEQ ID NO: 29804 - DNA, 573 bp, synthetic construct
  misc_feature 1..573: note = Description of Artificial Sequence: Synthetic coding sequence
  source 1..573: mol_type = other DNA
atgttgagagtccctgagcctagaccgggtgaagcaaaagccgagggcgcagcgcctcctaccccatctaaacctctgacgagctttctaatacaggatattctgagagatggagctcccgaggaggctgagacgctcgcggagacagagccggagagacacctgggctcatatttactagattcagaaaatacttctggagctctgcctagactccctcaaacacccaagcaaccccagaagcgcagcagagccgctttctctcacacccaggtgattgagctggagaggaaattctcccaccaaaagtatctttctgcgcctgaaagggctcacctggcaaagaacctgaagttgaccgaaactcaggtaaaaatttggttccaaaaccggaggtacaaaactaagcgcaagcagctgagcagcgagctcggagacctcgaaaagcactccagcctccccgcacttaaagaggaggcttttagtagggcctccttagtgtctgtgtataacagttacccctattacccctatctgtattgcgtggggtcatggtcccctgctttctggtag

SEQ ID NO: 29805 - DNA, 705 bp, synthetic construct
  misc_feature 1..705: note = Description of Artificial Sequence: Synthetic coding sequence
  source 1..705: mol_type = other DNA
atgttgagagtacctgaacccaggcctggggaagccaaagctgagggtgcagctccacctacgcccagcaagccattaaccagcttcctgatccaggacatcctgagagacggcgctcagagacagggaggtcggacctcgtcacagcgccagcgcgatcctgaacctgaacctgaaccggagcccgagggcggtagatccagagcaggagcccagaatgaccagctttccacaggtccccgtgctgcccctgaggaggccgagactctggcagagacggaacccgaacgccatcttggctcttacctgcttgactccgagaacactagcggggcattgcctaggcttcctcagactccaaagcagcctcagaagcgctcacgggctgcttttagtcatacacaggtgattgagctggaaaggaaatttagccatcagaaatatctgtccgccccagagagagcccacctagcaaagaacctcaagctgacagaaacccaggtcaaaatatggtttcagaaccgtaggtacaagacaaaacggaagcaactaagctctgaactcggggacttggaaaagcactcatcactgcctgcgcttaaagaggaggcgttctcacgcgcatcactggtgtcagtgtacaacagttacccctattacccatatttatattgtgttggctcctggagccctgctttctggtag

SEQ ID NO: 29806 - DNA, 480 bp, synthetic construct
  misc_feature 1..480: note = Description of Artificial Sequence: Synthetic coding sequence
  source 1..480: mol_type = other DNA
atgctcagagtgccagaacccaggcccggagaagccgagacccttgctgagactgaacctgaacgccacctcggctcatacctgctcgattctgagaatacaagcggtgccctgcccaggctgcctcagacacccaaacagccccaaaagcggtccagggccgctttctcccatactcaggttatagagttggaacgcaagtttagccatcaaaagtacctgtccgctcccgaacgcgctcatctcgctaagaatctcaagctcacagaaacccaggtcaagatctggtttcaaaacaggcggtataaaactaaacgcaagcaactctcctcggaactgggcgacttggagaaacactcgtcccttcctgcgctcaaggaggaggctttctctcgtgccagcctcgtatctgtgtacaactcttatccatactatccttacttatactgcgttgggagctggtcccccgctttctggtag

SEQ ID NO: 29807 - DNA, 4212 bp, synthetic construct
  misc_feature 1..4212: note = Description of Artificial Sequence: Synthetic coding sequence
  source 1..4212: mol_type = other DNA
atggcaacccagcagaaagccagtgatgagagaatctcccagtttgatcataatttactacctgagctgtctgcactgttgggactggatgccgtgcagctggccaaggaattggaagaggaggagcagaaggaaagggcaaaaatgcaaaaaggatacaacagccaaatgcgttccgaagcaaagaggttgaagacttttgtgacctacgaaccttactcgagctggattcctcaggagatggctgctgcaggattttattttaccggtgtcaaatctggaattcagtgcttctgctgctctttaattctcttcggggcaggactgactcgcttgccaattgaggatcacaaaaggttccaccccgactgcggatttctcttgaacaaggacgttggtaatattgctaaatatgatatccgcgtgaaaaatctgaagtccaggctgagagggggtaagatgagataccaggaagaagaggctcgtctggccagctttcgcaattggcccttctacgtgcagggaatctccccctgtgtgctgtctgaggccggtttcgtgttcacaggcaagcaggacactgtgcagtgctttagctgcggaggctgccttgggaactgggaggagggtgacgacccctggaaggaacacgcgaaatggttcccaaaatgcgagttcctacgtagtaagaaatcgagtgaggaaataacccagtacatccagtcctataaggggtttgttgacattaccggagaacattttgttaatagctgggtccaaagggagctgcccatggcttctgcttactgcaacgatagtatcttcgcatatgaggagttacggctcgactcttttaaagattggcctcgcgagtctgcagtgggtgtggccgctctggctaaggcaggtctgttttacactggaatcaaagacatcgttcagtgttttagctgtgggggttgccttgaaaagtggcaagagggggatgaccctctggacgaccacacacggtgctttcctaactgcccatttctacagaacatgaaaagctctgctgaggtcacgcccgaccttcagtcacggggagaactgtgtgagcttttagagactacaagtgagagtaatctggaagactcaatcgccgtgggcccaatcgttcctgagatggctcagggagaggcacagtggtttcaggaagcaaagaacctgaatgagcagcttcgggctgcttacacgtccgcttctttccgacacatgagtctcttggacatatcttcagacctagcaactgaccacttgcttgggtgtgacctgagcatcgcgtctaaacacatctctaagccggttcaagaacccctcgttctgcccgaagtgtttggaaatctgaactcggtaatgtgcgtggaaggcgaagcagggtcagggaagacagttctgttgaaaaaaatcgcgttcctgtgggcctccggatgttgccctctgctgaaccgattccagctggttttctacctcagtctaagttcaaccagacccgacgagggcctagcctccatcatctgcgatcagctcctggaaaaggaggggagtgtgacagagatgtgtgttcggaatatcatacagcaactgaagaatcaggtgctgtttcttctagacgactataaagagatttgctccattcctcaagtcataggcaagttgattcagaagaaccacctctcacgaacatgtctccttatcgccgtgagaactaaccgcgcaagagacattagaagatatctggaaacgattttagagatcaaggctttcccgttctacaacacagtgtgcattttgcgcaagctgttctcccacaacatgacgcgactgcggaagtttatggtttattttggtaaaaaccaaagtttgcagaaaatacagaagactccgctgtttgtagccgcaatatgtgcacactggttccagtatcccttcgatccatcattcgacgatgtcgccgtgttcaagtcttatatggaacgtctctcactcaggaacaaagcaacagccgaaatcctaaaagccaccgtttcctcttgcggtgagttggcccttaaagggtttttttcctgttgctttgagtttaatgacgacgatttagcagaggcaggagtggatgaggatgaagaccttacgatgtgtctgatgagcaagtttacagctcagaggctgagacccttttaccgttttctgtccccggcatttcaggagttcctcgccggaatgaggctcattgagctgttagacagtgatcgtcaggagcaccaggaccttggcctctaccatctgaaacaaatcaattctccgatgatgacggtgagcgcgtataacaattttctgaactacgtgtccagcttgccttccacaaaggcgggtcctaaaattgtctcccacttgttgcatttagtcgataacaaagagtcacttgagaacatcagcgagaatgatgattacctgaaacaccagccagagatctcactgcagatgcagctactaagaggcctgtggcagatatgcccccaggcctatttctccatggtcagcgaacacctgctcgtactggccttgaagactgcctaccagtctaataccgtggccgcttgttcaccgttcgtgttgcaattcctccaggggaggacacttaccctgggcgctctgaatttacagtatttcttcgaccatccagaaagcctgtctctcctcaggagcattcattttccgatcagggggaacaaaactagtcctcgagcccacttttcggttctcgaaacgtgctttgacaagagccaggtgccaaccatcgaccaggactatgcatctgctttcgagcccatgaacgagtgggagagaaatttagctgagaaggaggataatgtcaaatcatacatggatatgcaaagaagggcctcgcccgatctgtcaacaggttactggaagctctctccaaagcaatacaaaattccctgtctggaagttgacgtaaatgacatcgacgtggtgggccaggacatgctggagattctaatgaccgtgttctccgcttctcagagaatagaactacacctgaaccactcacggggattcatagaatctattcggcctgccttggagctcagcaaagcctctgtgacaaagtgttcaatctccaaactcgagctgtcagccgcagagcaggaacttctgctaaccctgccatctttggagagtcttgaagtgagcggcacgattcaatcccaggatcagatatttcccaacctggacaagttcctgtgtctaaaggaattgagcgtcgacctggagggaaacattaacgtcttctccgtcattccggaggagtttcccaactttcatcacatggaaaagctcctcatccagattagcgcagaatacgatccctcaaaattggttaagttgatccaaaactcccctaacctgcacgtctttcacttgaaatgcaatttcttctccgatttcggatctttgatgaccatgttggtgtcttgtaagaagctaactgaaataaagttttccgacagttttttccaggcagtccccttcgtggccagccttcctaacttcatcagcttaaaaatcctgaatctggaaggtcagcaattccccgacgaagagacaagcgaaaagtttgcatatatacttggaagcttaagcaatttggaagaactgattctgcctaccggcgatggaatatatcgtgtggccaaactgatcatacagcagtgccaacagcttcactgcctgcgcgtgctgtcattttttaagacgctgaacgatgactcagttgtggagatcgcaaaggtagccatctcaggaggttttcagaagctcgaaaatctgaaactatcaataaaccataaaatcaccgaagaaggttatcggaactttttccaagctctagacaacatgcccaatctgcaggagctcgatattagccgacattttacagaatgtattaaagcccaggctacaaccgttaaatcactttctcagtgcgtgttaagactgccccgtctcatcaggctcaatatgttgagctggctgttagacgcagacgatatcgccctattgaatgtgatgaaggagaggcacccccagtcgaaatatctgacgattctgcagaagtggatcctgcctttctctccaatcatccagaagtag

SEQ ID NO: 29808 - DNA, 3726 bp, synthetic construct
  misc_feature 1..3726: note = Description of Artificial Sequence: Synthetic coding sequence
  source 1..3726: mol_type = other DNA
atgccgttacatataggcgacttcgtgtgggattccaaggtccactctttacagtcgagtctaaatatcttctctttactccctacaaaaggacgtactgaacacctattcttttcgcacatcctttcttttcattggcctgccttctcaagtattagactcgagctgtggattaacctccgttgcgagttcttgagatctaagaagagcagcgaagagataacacaatatatccagtcttacaagggttttgttgatattacaggcgaacatttcgttaactcatgggtacagcgcgaattgcctatggcctccgcctactgcaatgatagcatcttcgcttatgaagagctgcggcttgattcttttaaagattggcctagggagagtgcggtgggcgtggctgctctcgccaaggctgggttattctatacaggtatcaaggacattgtccagtgcttttcgtgtggcggatgtttagagaaatggcaggagggagacgatcccctggacgaccacacaagatgctttcccaactgccccttcctgcaaaatatgaaatcaagcgcagaagtgacccctgatctccagagtcggggagaattatgcgagctgctagagaccacctccgaatccaatctagaagattctattgcagtgggcccaattgtgcccgagatggctcaaggagaagcccagtggtttcaagaggctaaaaaccttaacgagcaactgcgcgctgcatacaccagcgcctcctttcggcacatgtcactcctggatatcagcagcgatctggccactgatcacttgttaggctgtgatctcagtattgcttctaagcatatttctaagccagtgcaggagcctctagtacttcccgaggtcttcgggaacttgaactccgttatgtgcgttgagggcgaggccggaagcggcaaaactgttctcctgaaaaagatagccttcctgtgggcaagcggctgctgccccttgctcaaccggtttcaactggttttttacctgtccctttcttcaacacggcctgacgaaggcctggccagtatcatatgtgatcagctgttggagaaggaaggatccgtgacagagatgtgtgttcggaacatcatccagcagcttaaaaatcaggtattatttctgctcgatgattacaaggaaatttgttccatcccgcaggtcatcggaaagctcatccagaagaaccacctgtcacggacttgcctgcttatagccgtgagaaccaatagggcacgtgacatcagacggtatctggaaaccattcttgagatcaaggcattccccttttataacactgtttgcattctgcggaagctctttagtcataatatgacacggctgagaaaatttatggtttacttcggcaaaaatcagtcactgcaaaaaatccaaaaaacccctctgtttgttgccgcaatatgcgcgcactggttccaatacccttttgatccgtcttttgacgacgttgccgtgtttaaaagttatatggaaaggctgagcttacgcaacaaggcaacagcggaaattcttaaggccaccgtgtcatcatgcggtgagttggccctgaaggggttcttttcttgttgctttgagtttaacgacgacgaccttgccgaggcaggcgtggatgaggatgaggatctgaccatgtgcctgatgagcaaatttacagcccagcgactgcggcctttctacaggtttctaagtcccgcttttcaagagttcctcgctggcatgcgcctcatagaattgctagactctgatagacaggaacaccaggacctggggctgtaccaccttaaacaaataaacagccccatgatgacagtgagcgcctataacaattttctaaattatgtttccagtctgccaagcacaaaggccggtccaaagattgtgtcccacctactgcacttagtcgacaacaaggagtccttggaaaatatcagcgagaacgatgattacctgaagcaccagccggaaatttcgcttcaaatgcagctccttaggggcctgtggcagatatgcccccaggcgtatttctcgatggttagcgagcacctgctcgtgctggcgcttaaaacggcttatcaatccaacacagtggccgcatgtagcccttttgtgctgcaattcctgcagggacgaactctcaccctcggagctctgaatcttcagtatttcttcgatcaccccgagtctctttcacttctgaggagcatccacttccccattcggggtaacaagaccagtccgagagcccactttagtgtgcttgagacatgcttcgacaagagtcaagtgccaaccatcgatcaagactatgcctccgcctttgaacctatgaacgagtgggagaggaacctggccgaaaaggaggacaatgtcaagtcttacatggacatgcagcgccgagcgtcccccgacctcagcacgggctactggaaattgagtcctaaacagtacaaaattccttgccttgaagtagatgtaaacgacatcgacgtagtcgggcaggatatgctggagatcctgatgacagtgttcagtgcctcgcagcgtattgaactgcacttgaatcatagcaggggctttatagagtccattaggcctgccctagagctttccaaggccagcgtcaccaaatgtagcatcagcaagctggagctgtcagccgcagaacaagagttactgttaactctgcccagcctggaatccctggaagtcagcgggactattcaatcacaggaccagatttttcccaacctagataaattcctgtgtttgaaggaactgagcgtagatttggagggaaatattaacgtattcagcgttatcccagaggagttccctaatttccatcatatggagaaattacttattcaaatctcagccgaatatgacccctccaaactggtgaagctgatccagaacagtcccaatcttcacgtgtttcacctaaagtgtaacttttttagcgactttggaagcctgatgaccatgttagtaagttgtaagaaactgaccgagattaaattttctgattcattcttccaggctgttcctttcgtggcttcgctgcccaactttatttccctgaagattttgaacctggagggtcagcagttccccgatgaggaaacctctgaaaaatttgcttacatcctcggttctctctccaaccttgaagaattaatactccctactggagacggaatttatagagtagctaaactcattatccagcagtgccagcaactccattgtctgcgggtgctatctttctttaagaccctcaacgatgattcagttgtcgagatcgccaaagtcgcgatcagcggcggattccagaaattggaaaaccttaagctgtccataaatcataagatcacggaggagggttaccgcaacttcttccaggccctcgacaatatgccaaatctccaagagctcgacataagcaggcacttcacggaatgcatcaaagcacaggctaccaccgtgaagtcactatcgcagtgtgtgctgcgcttgcctcgtctcattagactgaacatgttatcctggctgcttgatgctgatgatatcgccttgctgaacgtcatgaaggaacggcatccacagtccaagtatctcaccattctgcagaaatggatcctcccattcagccccattatccagaagtag

SEQ ID NO: 29809 - DNA, 4212 bp, synthetic construct
  misc_feature 1..4212: note = Description of Artificial Sequence: Synthetic coding sequence
  source 1..4212: mol_type = other DNA
atggctacgcaacagaaagcaagcgatgagagaatatcacagtttgaccataatctgctgcccgaactgtcggctctgctgggcctcgacgctgtgcaactagccaaagagctggaggaagaggagcagaaagagcgtgctaagatgcagaaaggctataatagtcagatgcgatcagaggccaagcggcttaagacctttgtgacttatgaaccctatagttcctggatcccccaggagatggcagccgcaggcttctattttacaggcgtgaaaagtggcatccagtgtttctgctgcagtctcattctgtttggcgcaggattaacgcgactgcccattgaagatcacaagcggttccaccctgactgcggcttcctgctcaacaaggatgtgggaaatatcgcaaagtacgacattagagttaaaaatctgaagagtcgcctgagaggcggaaagatgaggtatcaggaagaagaagcacgcctggcaagcttccgcaactggcctttttacgttcagggcatctctccatgcgtgttgagtgaagccggtttcgtgttcaccggaaagcaggacactgtccagtgtttttcatgtggtggctgtttaggcaattgggaggagggagacgatccgtggaaagaacacgcaaaatggttccccaaatgtgagttcctgagatccaagaagtcctccgaggagattactcaatacatccaatcatacaaaggtttcgtagatatcactggcgagcactttgtgaattcctgggtgcagagagagctgcctatggcgtctgcgtactgcaacgactctattttcgcctatgaggagctcaggctcgacagtttcaaagattggccccgagaatccgctgtgggcgtggcagcactagccaaagccggactgttctatacggggatcaaagacattgtgcaatgtttctcttgcggtggttgtctggagaaatggcaagaaggcgacgaccccctggacgatcacacacgctgctttcctaattgtccgtttcttcaaaacatgaaaagctctgccgaagtgacccctgatctgcagagcagaggggaactttgcgaattgttggaaacaacgagcgagtctaacctcgaggactccatagccgtgggccctatcgtgccagagatggctcagggggaagctcagtggtttcaggaggcgaagaatttgaacgagcagctgagagccgcttataccagcgcctctttccgccacatgtcactgttggacatttcatccgatctggccacagaccacctgttgggatgcgacctgtctatcgccagtaaacacatctctaaacctgtgcaggaacctctcgtgctgccagaggtgtttggaaatctgaattcagtgatgtgtgtcgaaggggaggcaggaagcgggaaaactgtgctgctgaagaaaattgccttcctttgggcctctggatgctgcccactgctcaacaggttccagctggtcttctacctatccctatctagcacacggccagacgaagggctggcatcaatcatttgcgaccagctgctcgagaaggaagggtcggtgaccgagatgtgtgttcgaaacattattcagcagctcaaaaatcaagtgttattccttttagatgactataaagagatctgcagcattccccaagtcattggaaaactcatccagaaaaaccacctgtctcgcacgtgtctgctgatcgctgtgagaaccaacagagcaagagacataaggcgctacttggaaaccatcctggagatcaaagcttttccgttttacaacaccgtttgcatccttcgaaagcttttttcacacaatatgaccaggctccggaaatttatggtctacttcggaaaaaatcagagcctgcagaaaatccagaagactcctctctttgtagctgcaatctgcgctcactggtttcagtatccctttgatccctcattcgatgatgtggccgtcttcaagtcctatatggagcggttatcactccgcaataaagccactgccgagattctgaaggccactgtatcctcatgtggggagctcgccctcaaggggtttttcagctgttgtttcgaatttaacgatgacgacttggccgaggcaggggtggatgaagacgaggatcttaccatgtgcctcatgtccaaattcaccgcacagcgactgcgccctttctaccggttcctgtcccctgcatttcaagaattcttagccggaatgcggctgatcgagttgctggacagtgatagacaagagcaccaggatctcggactgtatcacctgaagcagattaattcacctatgatgactgtctccgcctacaacaattttctcaactatgtgagttcacttccatcgaccaaggccggacccaaaatcgtaagtcatctgcttcatctggtcgataacaaggaaagcctggaaaatatttcagagaacgacgattacctgaaacaccagcctgagatttctctgcagatgcagttgctgcggggattgtggcaaatctgtcctcaggcttactttagtatggtgtccgagcacctgcttgtcctcgccctgaaaacagcttaccaaagcaatacagtggcggcatgttcacccttcgtgctgcaattcctgcagggacggactttgacactgggcgctctcaatctgcagtacttcttcgaccaccccgaaagcctgagccttctgcgctcaattcatttccccatccggggtaacaaaacatcaccgagggcacatttttcggtgttggagacgtgttttgataaatcgcaggtgcctaccatcgaccaggattacgcatccgcgttcgaacccatgaatgaatgggagaggaatctcgcagaaaaagaagacaacgtgaaatcttacatggacatgcagagaagagcgagcccagacttatctaccgggtactggaagttatctcccaaacaatacaaaataccttgcctggaggttgacgtcaacgacattgacgttgtcggccaggacatgctcgaaatactgatgaccgtgtttagtgcatcacagcggatagagctccatctgaaccattcacggggatttattgagtcaataaggccggcactcgagttatctaaggcttccgttaccaaatgtagcatatcaaagctagagctcagcgctgctgagcaggaacttctcctgacacttccttccttggagagcttggaggtgtccggcaccatacagagtcaggaccagatttttcccaaccttgataagttcctttgcttgaaggagttgagtgtggatctggaaggcaacattaatgtcttctccgtgattcctgaggagtttccaaatttccaccacatggaaaaactgctgattcagatctctgccgaatacgatccttctaaactcgtgaagttgatccagaatagcccaaacctgcacgtgtttcacctgaagtgtaactttttctctgattttggttcactgatgaccatgctggtgtcttgtaagaagctgaccgagatcaaattctcagattctttcttccaagctgtcccttttgtcgccagcctacccaacttcattagcctgaagatcctcaatctcgaagggcaacagtttccggacgaggagactagcgaaaaatttgcatacatcctggggagcctatctaatctagaggagctgattctgccaacaggcgatggaatatatagagtggccaaactgataatacagcaatgccagcagctccattgcctaagagtgttatcattcttcaaaactctgaatgatgattctgttgtggagatagcaaaagtggcaatcagtggcggattccagaaacttgagaatctcaaattatctatcaaccataagatcaccgaagaaggctataggaacttttttcaggcactggataacatgcctaatctccaggagctcgacatcagcaggcactttaccgaatgtatcaaggcacaggccacaactgttaaatccttgagccaatgcgtgctgcggctacctcggctgattcggctgaatatgctatcctggctgttggacgctgacgacatagccctgctgaatgtgatgaaagaacgacatccacagtctaaatacctgactattctccaaaaatggattttgccattttctcctattatccaaaagtag

SEQ ID NO: 29810 - DNA, 3726 bp, synthetic construct
  misc_feature 1..3726: note = Description of Artificial Sequence: Synthetic coding sequence
  source 1..3726: mol_type = other DNA
atgcctctgcatatcggtgatttcgtctgggactcaaaagttcactctctccagtcctctctcaatattttttcgctcctgcccaccaagggcaggacagaacacctttttttctcacacatcttatcgtttcactggcccgcatttagctccattagactcgagctgtggattaatcttaggtgcgaattcttgcgttcaaaaaagtcctccgaagagatcacacagtacatacagtcctacaagggattcgtcgacataaccggtgaacactttgtgaattcgtgggtacaacgcgagctgcccatggctagcgcttactgcaacgacagtattttcgcctatgaggagcttagattagactcttttaaagattggccacgggagtccgctgtgggagtcgccgcattagctaaagcaggcctcttctacactggaatcaaagatatcgtgcagtgctttagctgtgggggttgtctggagaagtggcaggaaggtgatgacccacttgacgaccacacaagatgcttcccaaattgcccgtttttacagaacatgaaatcttccgctgaagttacaccggatctacagagccgcggagagctgtgtgaattactggaaaccacaagcgaatccaacttggaagattccatcgccgtggggcctattgttccggagatggctcagggcgaggcacagtggttccaggaagccaagaatctgaatgaacagctgcgcgctgcttataccagtgcatccttcaggcatatgagcctcttggacatatcttctgatttggccaccgatcacctgcttggctgtgatttgtccattgcttcaaagcacatcagcaaaccagtgcaggaaccgctggttctgcctgaggtgtttggaaatctgaactcagtaatgtgtgttgaaggcgaggcgggttccggcaagactgtgttgttgaagaagatcgcctttctgtgggcttccggctgttgtcccctcctcaaccgcttccagctggtgttttacctctctctcagttcaacaagacccgatgagggtctggcatccataatatgcgaccagctacttgagaaagagggatcagtgactgagatgtgcgtccgtaacatcattcagcagctgaaaaaccaggtcctcttccttctggacgattacaaagagatatgcagcatacctcaggtaattggcaagctgatccagaagaaccacctgagccgtacatgcctgctcattgctgtgcggactaatagggccagggatatcagacgatacctagagacaatcctcgagataaaggccttcccgttctacaatacagtttgtatcctcaggaagcttttcagtcacaatatgacaaggctcaggaagtttatggtgtacttcggcaaaaaccaatcgctgcagaaaattcagaaaacccctctgtttgttgccgcaatttgtgctcactggttccagtacccattcgacccatcctttgatgacgttgcagtttttaagtcctacatggagagactgtctctacgaaacaaagcaaccgcagagatcctgaaggccaccgtctcaagttgtggcgaattggccctaaaggggtttttctcctgttgtttcgaattcaatgatgatgacttagcggaggccggtgtggatgaggacgaggatttgacaatgtgtctcatgtcaaagtttacagctcaacgcctgagacctttctataggtttctttcacccgcatttcaggaattcctggctggcatgaggctgatagaattgctcgatagcgaccgccaggaacatcaagacctcggcttgtaccacctcaagcagatcaatagtccaatgatgactgtcagtgcctacaataattttctcaactatgtttcctctttgcccagcactaaggccggacctaagatcgtctctcacttgctgcacctcgtagataacaaagaatcgctggaaaacatttctgaaaacgacgactatctgaagcatcagcctgagatatccttacagatgcaactgctcagagggctgtggcaaatttgcccacaggcttactttagcatggtgagtgagcatctgctggttctcgccttgaagaccgcctatcaatcaaatacggtcgcggcatgctcacccttcgtccttcaatttctgcagggcagaaccctgacacttggggctctcaatctgcaatatttcttcgatcaccccgagagcctcagcctgctgagatccatccatttcccaatcagggggaataagacctcccccagagctcacttttccgtcttggagacatgtttcgataagtcacaggtgccaacaatagatcaggactacgcgtccgcattcgaaccaatgaacgagtgggaacgcaatctggctgagaaggaggataacgtgaagtcctatatggacatgcagcggagggcctcccccgatctgtccactggttactggaagttatcccccaagcaatacaagattccctgcctggaagtagatgtaaatgacatcgatgtcgtcggacaggacatgctcgaaatcctaatgaccgtttttagcgcctcacaaaggattgagctgcaccttaatcattccagaggatttattgagtccatcagacccgcactcgagctcagcaaagcaagcgttacaaagtgtagcatatctaaattggagctttcagcagcggagcaggaactcctcctcacattgccaagcctggagtctttggaagtgagtggtactatccaaagtcaggaccaaatttttcccaatctggataagtttttgtgtcttaaggagctgagcgtggacttggagggtaatatcaatgtgttctctgtcatccccgaagaatttcccaactttcaccatatggagaagttgctgatccagatcagcgccgagtatgacccatcaaaactggtaaaacttatccaaaactcgccgaatttgcatgtgtttcacctgaaatgcaattttttctccgacttcggaagtctgatgacaatgctcgtgagctgcaagaaactgacagagattaaattctcagactcatttttccaggcagtcccttttgtagcttcactacccaattttatttctcttaaaatcctcaaccttgagggccaacagttcccagacgaggaaacgtcagagaaattcgcatacatcctgggcagtctgtcaaacctcgaagaacttattctacccaccggggatggcatatatcgagtggctaagctgattatccaacaatgccaacagctccattgtcttcgcgtgctgtcattttttaagacactgaacgatgattctgttgtggaaatcgccaaagtggccattagcggtggcttccaaaaacttgaaaacctgaaattatccatcaatcacaagataactgaagaaggttaccgcaactttttccaggcgctcgacaacatgcccaatttgcaggagctcgacattagcaggcacttcacggaatgcatcaaagcacaggccactactgtcaagtctctctctcagtgcgtcttgaggctgccacgccttatcagactgaatatgcttagctggctcttggacgcggatgatattgcgctattgaatgtgatgaaggagcgacacccccagtcaaagtacctgaccattctgcagaaatggatcctgcctttttcaccaatcattcagaagtag

SEQ ID NO: 29811 - DNA, 678 bp, synthetic construct
  misc_feature 1..678: note = Description of Artificial Sequence: Synthetic coding sequence
  source 1..678: mol_type = other DNA
atgctcgggctcgacgcttgtgaattgggggctcagctgctggaactgctgagactggcgttatgtgcccgagtgctgctggcagataaggaaggcggtcccccagccgtcgacgaggtgctggatgaggccgttccggagtaccgcgcaccgggtaggaaaagtctgctggagatcagacaacttgatcctgacgaccgcagcctggctaagtacaagagagttctgctgggcccattgccccctgctgtggacccttctctccccaacgttcaggtgactagactgactctgctgtctgaacaggctcccggtccagtggtgatggatctgactggtgacctcgcagtcctgaaggatcaggtctttgtcctcaaggaaggtgtagattatagggtgaagatcagtttcaaggttcacagggagatcgtctctggtctcaaatgcctgcaccacacatacaggcggggtctgagggtcgataagaccgtgtatatggttggctcttacggcccatccgcccaagagtacgaatttgtgactcctgtggaggaagctcccaggggagcattggtccggggtccctatctagtcgtctccctctttacagacgacgaccgcacacatcacctgtcatgggagtgggggttgtgtatatgtcaagactggaaagattag

SEQ ID NO: 29812 - DNA, 882 bp, synthetic construct
  misc_feature 1..882: note = Description of Artificial Sequence: Synthetic coding sequence
  source 1..882: mol_type = other DNA
atgcctgctagatctggcgcacagttctgccggaggatgggccagaagaagcagcgccctgccagggcagggcaaccgcattcatcaagcgacgccgctcaagcgcctgctgaacagcctcatagctcttccgatgccgcacaggctccttgccccagagaaagatgtttgggtccccctaccacccctggcccataccgctccatctactttagctctccaaaggggcatcttacacggctggggctggaatttttcgaccagcctgctgtgccgctggccagagcattcctgggtcaggtgctggtccgcagactgcctaatgggaccgagcttcggggacggatagtcgagacggaggcgtaccttggacctgaagacgaggccgcacactcacgtggaggtagacagacgccaaggaaccggggtatgtttatgaaacccggaaccctgtacgtttatatcatatacggcatgtatttctgtatgaatatttcaagccagggcgatggggcttgtgtgctgttacgcgcactcgaaccgctcgagggattagagactatgagacagctgcgctctactctgcgaaagggaacagcttccagggttctgaaggatcgtgagctgtgtagtggacccagcaagttgtgtcaggcgctcgccatcaacaagtcgttcgatcaacgtgatctcgcacaggatgaggccgtttggcttgaacgcggtccactcgaaccgagtgagccggctgtcgtggccgctgccagagtgggcgtcgggcacgcaggagagtgggcaagaaagccccttcgcttttacgtgcggggaagcccatgggtatccgtcgtagatagggtggccgaacaggacacgcaggcctag

SEQ ID NO: 29813 - DNA, 846 bp, synthetic construct
  misc_feature 1..846: note = Description of Artificial Sequence: Synthetic coding sequence
  source 1..846: mol_type = other DNA
atgggacagaaaaaacagcgacctgccagagcaggacagccccacagctcctccgatgcagcgcaggccccagctgagcagccacattcaagctctgacgcagctcaagcgccttgcccgagggagaggtgtctggggccaccaactaccccgggtccttataggagcatctacttttctagcccgaagggtcatctcacccggttaggcctggagtttttcgaccaaccagctgtgccactagcacgggctttccttggccaggtccttgtgcggaggctgcctaatggcactgagcttagagggcgaatcgtcgagacagaagcatatctggggcctgaggacgaggctgctcattcacggggaggcaggcaaacacctcggaatagaggcatgtttatgaagcctgggacattatacgtgtatataatctatggaatgtatttttgtatgaacattagctcacagggggacggtgcttgtgtcctcctccgtgccctcgaaccacttgaaggcctggagactatgcgccagctgagaagtaccctaaggaagggaacagcgtctcgtgtactaaaggatagggaactctgtagtggaccttccaaattgtgccaagcgctggccataaacaaaagttttgatcagagagacttggcgcaggacgaagccgtctggcttgagagaggacctttggagcccagcgagccagctgtggtagcggcagctagagtgggtgttggacacgccggagagtgggccagaaagcctctgaggttctacgttagaggatcaccctgggtctccgtcgtagacagagtggccgaacaggatacgcaggcatag

SEQ ID NO: 29814 - DNA, 756 bp, synthetic construct
  misc_feature 1..756: note = Description of Artificial Sequence: Synthetic coding sequence
  source 1..756: mol_type = other DNA
atgggccaaaagaaacagaggcccgcaagagctgggcagccccactcgagcagcgacgcagctcaggctcccgctgagcagccgcactcttccagcgacgcggctcaggcaccgtgcccccgtgagcggtgtctcggccctccaaccacccctggaccgtataggtccatctacttctccagcccaaagggccaccttactcgcttgggtctggagtttttcgatcaaccagctgtacctttagcacgcgcttttctgggccaagttctcgttagacgtctgcccaacggtaccgagctccgtggcagaatagttgaaacagaagcttacctcggtcccgaggatgaagcagcccacagccgtggcggacggcagactccaaggaaccgagggatgttcatgaagcctgggaccttgtatgtttatataatctacggaatgtatttttgcatgaacatttccagccagggcgatggggcatgtgtgcttttgcgtgctctcgaaccactagaagggctggagacaatgcgacagttgcgaagcaccttgcgtaagggtaccgccagcagagtccttaaggatagagaactgtgtagcggtccatcaaagctgtgccaggctcttgcgattaacaagtcatttgaccagagggatttggctcaggacgaggccgtctggttggaacgaggaccactcgaacccagcgaaccggcagttgtggccgcagcgagggtgggtgttggacatgccggatag

SEQ ID NO: 29815 - DNA, 1044 bp, synthetic construct
  misc_feature 1..1044: note = Description of Artificial Sequence: Synthetic coding sequence
  source 1..1044: mol_type = other DNA
atgcacgcccactgcctgcccttcctcctgcacgcttggtgggctttgctgcaagctggagctgccactgtggcaaccgccttactccggaccagagggcaaccgtcttcacccagtccactcgcctatatgctgagcctttatcgtgatccactgccccgtgccgatatcatacggagcctgcaggccgaagatgtagctgtggatgggcagaattggacgttcgccttcgatttctccttcctaagccagcaggaggaccttgcgtgggcggagctgaggctacagctgtcctctccagttgatttgcccaccgaaggctcactggccattgagattttccatcagccaaagccagacactgagcaggcaagtgattcttgcctggagaggtttcaaatggatctgtttaccgttactctgagtcaggtgacgttcagtctaggtagcatggttctagaggtcacgaggcccttgtctaaatggttgaaacaccctggcgcactggagaaacagatgtctcgcgtcgccggagagtgttggcctagaccccctacccctcccgcaaccaatgtcctgttgatgttatacagtaacctgagtcaagagcagagacagctgggcggaagtactctcttgtgggaggcggagtcttcctggcgtgctcaggaaggacagctttcctgggagtggggaaaaagacacagacgccaccatctccccgaccgaagtcagttgtgtaggaaagtgaaattccaggtggacttcaacttaattggatgggggagctggataatctaccctaagcagtacaatgcctacaggtgtgagggtgaatgccctaaccccgtcggtgaggagtttcaccctacaaaccatgcctacatccaaagccttctcaagcgttaccagccccatcgggtgccttccacctgttgtgccccagtaaaaactaaaccattgtccatgctttatgtggacaacggaagggtactgctggatcaccacaaagacatgatcgtggaagaatgtggctgcttgtag

SEQ ID NO: 29816 - DNA, 879 bp, synthetic construct
  misc_feature 1..879: note = Description of Artificial Sequence: Synthetic coding sequence
  source 1..879: mol_type = other DNA
gaccagcagctggggatccagacaaaggacgtcgccgtggacggccagaattggactttcgccttcgacttcagcttcctgtctcagcaggaagacctggcatgggcagaattgagactgcagctctcaagcccagtagacttgccgaccgagggttccctggctattgagatcttccaccagcccaagccagataccgagcaggcttcagattcctgtctggaacgattccagatggatttgtttacagtcacactcagtcaggtgaccttctccctggggagcatggtgttggaagtcactagacccctatccaaatggctcaaacatcctggcgctctcgagaagcagatgtcgagggtggcgggagagtgttggcctagacctccaaccccgccagcaaccaacgttctcctcatgctgtactctaatctcagccaggagcagaggcagcttggtgggagcaccctgctctgggaggctgagagcagctggcgcgcacaagagggacagctctcgtgggaatggggcaagaggcatcggagacatcatctgcctgaccggagccagctttgccgcaaagtcaaattccaggtggactttaatctgatcgggtggggctcttggattatctaccccaaacaatataacgcctatcgatgtgagggggaatgcccaaatccggtgggggaggaattccaccctaccaaccatgcctatattcagagcctgctgaagcgttaccaaccgcaccgggtgccaagcacctgttgtgccccagtgaagaccaagccactttccatgttatacgtggacaacggcagagttctcctcgatcaccacaaagacatgatcgtcgaggagtgcggctgtctgtag

SEQ ID NO: 29817 - DNA, 534 bp, synthetic construct
  misc_feature 1..534: note = Description of Artificial Sequence: Synthetic coding sequence
  source 1..534: mol_type = other DNA
atggtgctgctgtctaccctgggaattgtgtttcaaggcgaaggacctcctatctcatcctgtgacacaggcacgatggccaactgtgagcgcacttttatcgcaattaagccagacggggtacagcgcggactagtgggggagattattaaacgctttgagcaaaaagggttcagacttgtcggcctgaaatttatgcaggcttcggaggacctacttaaggagcactacgtcgacttgaaagatcggccttttttcgcaggactggttaagtacatgcactctggccctgtcgtcgcgatggtatgggaaggccttaacgtggtcaagacagggagggtgatgctgggagaaacaaacccagctgactccaaaccaggaactatcaggggcgatttctgtatccaggtgggcaggaacattattcatggatcggattccgttgaatccgctgaaaaagagatcggcctatggttccaccctgaagagttggtagactataccagttgcgcccagaactggatctacgagtag

SEQ ID NO: 29818 - DNA, 534 bp, synthetic construct
  misc_feature 1..534: note = Description of Artificial Sequence: Synthetic coding sequence
  source 1..534: mol_type = other DNA
atggtgctactttctactctcggcatagtcttccagggagaaggacctccgatttccagctgcgatactgggacaatggccaattgcgaaagaacgtttatcgccataaaacccgatggcgtgcagaggggcttggttggcgagatcattaagcgcttcgaacagaagggcttcaggcttgttggcctcaagtttatgcaggcaagtgaggatctgctgaaggagcactacgtcgaccttaaagatagacccttctttgctggcctggtaaaatatatgcactccggccctgtggtagctatggtgtgggagggtctaaacgtcgtaaagaccgggcgtgttatgctgggcgaaacaaatccagctgattcaaagcctggaacaatacgaggcgatttttgtattcaggtaggccgtaatatcatccatgggagcgactccgtggagtcggcggaaaaagagataggactgtggtttcatccagaggagctggtcgactacacttcgtgcgcccaaaactggatttatgaatag

SEQ ID NO: 29819 - DNA, 459 bp, synthetic construct
  misc_feature 1..459: note = Description of Artificial Sequence: Synthetic coding sequence
  source 1..459: mol_type = other DNA
atggcaaactgtgaaaggacttttatagcgatcaagccagatggagtgcagcggggactggtaggagagattattaaaagatttgaacagaaaggttttcgactggttgggctgaagttcatgcaggcctctgaagatctgctgaaggagcattatgttgacctgaaagatcgtccgtttttcgccggtttggtgaaatacatgcacagtggccctgtcgtggctatggtctgggagggtctcaacgtggttaagacggggagagtgatgctgggagagactaatccggctgattccaagcccggaacgatcagaggagacttctgtattcaggttgggagaaacatcatccatggttctgacagtgtagagagtgcggaaaaagaaattggtctctggtttcaccctgaagagctggttgactacacgtcgtgcgctcagaactggatctatgaatag

SEQ ID NO: 29820 - DNA, 183 bp, synthetic construct
  misc_feature 1..183: note = Description of Artificial Sequence: Synthetic coding sequence
  source 1..183: mol_type = other DNA
atggtcttgctcagcaccctcggaatcgtgttccagggcgagggcccacctatctcttcctgcgacacagggaccatggcgaactgtgaaaggacattcatcgctatcaaacccgacggagtccagagagggctggttggcgagatcattaagcggttcgaacagaaaggatttaggctgtag

SEQ ID NO: 29821 - DNA, 1443 bp, synthetic construct
  misc_feature 1..1443: note = Description of Artificial Sequence: Synthetic coding sequence
  source 1..1443: mol_type = other DNA
atggctacagtccccggtctccagccgctgcccaccctggaacaagatctcgaacaggaagagatccttatagtgaaagtcgaggaggatttctgtctggaagaggaaccaagcgtcgaaacagaggacccctctcccgagactttccgccagttgttccgcctcttctgttaccaggaggtggcaggccctcgcgaagccctgtcaagactgtgggagctgtgttgccgctggctcagacccgagctgagaacgaaagagcagatcttagagctgctggtgctggagcagttcctaacagttctccccggtgagatccaggcaagagtgcgggagcagcagcctgaatctggagaggaagccgttgtgctggtcgaaggactgcagcgcaaaccacggaaacatcggcagcggggaagcgagctgctgtcagacgacgaggtgcccttggggatcggtggccagttcctgaaacaccaggccgaagctcagccagaggacctgtctctggaagaggaggccaggttctctagccagcagcctccagcccagctgagtcatcgccctcagaggggcccactcctgtggccagaacggggtccacctgcacctcgccaccaggagatggcctccgccagccccttcctgtccgcatggtcccaggtccctgtcaacctggaagacgtcgccgtgtatttgagtggagaagaacccagatgcatggatcctgcccaaagggacgccccactcgaaaacgaaggccctggtatccagctggaggacggcggagatggccgagaggacgcgccactgagaatggagtggtatcgcgtcctcagtgctcgatgtcagggacccggacaccctttaccaggccagagacctgctcctgtgcggggactggtccgccctgaccaacccaggggtgggccaccccctggaaggagggccagtcatggggcagacaaaccctatacttgtcccgagtgtgggaagggtttttcaaagacttctcatctgaccaaacaccagcggactcatactggggagcggccttacaaatgtctcgtctgcggcaaagggttcagtgataggtccaacttttctacccaccagcgagtgcacacgggagagaagccgtatccatgcccggagtgtggaaagaggttctctcagtcctcttccctggtgatccaccgtaggactcactcaggtgagcgcccatacgcctgtacccaatgcggcaaaagattcaacaattccagccacttctccgcccacagacgaacacacaccggcgagaaaccctacacttgtcccgcatgtgggagagggttccggagaggcactgatctacacaagcaccagcgcacacatatgggcgctggctcactgcctactttgcaaccagtggctccgggaggcccaggcgcaaaggcctag

SEQ ID NO: 29822 - DNA, 588 bp, synthetic construct
  misc_feature 1..588: note = Description of Artificial Sequence: Synthetic coding sequence
  source 1..588: mol_type = other DNA
atgggaggcttgttctggcgtagtgcactacggggactgcgctgcggccctcgcgctcctggcccatctctcctggttaggcatggctccgggcttcccccatctgccttaaaacgagggccaagctggacaagagaaaggacccttgtggccgttaaaccggatggcgtgcaaaggcggctcgttggggatgtgatacaacggttcgagcgcagaggatttactcttgtgggaatgaaaatgttgcaagcgcctgagagcgttttagccgaacactatcaggatttacgcagaaagcctttttacccagcgctgattaggtacatgagttcaggtcccgtggtagccatggtctgggagggctataatgtcgtgcgggcatctagagccatgatcggccacaccgacagcgcagaggccgctccaggcaccattcggggagacttcagcgtccacattagcagaaacgtgattcatgcgagtgacagtgtggaaggcgcacaaagagagatacagctctggttccagtcttccgaacttgtgtcatgggcagacggtgggcagcacagctcaatccatcctgcttag

SEQ ID NO: 29823 - DNA, 354 bp, synthetic construct
  misc_feature 1..354: note = Description of Artificial Sequence: Synthetic coding sequence
  source 1..354: mol_type = other DNA
atgaaaatgctccaggccccagaatccgtgctggccgaacattaccaggacctgagacggaaacctttttacccagcactgatccggtatatgtctagtgggccagtggttgccatggtctgggaggggtataacgtggtgagagctagccgtgctatgatcggccatactgacagcgccgaggcagccccaggcacgatcagaggtgatttttccgtgcacatcagccgcaacgtgatccatgccagcgatagtgtggagggcgcacagagggaaattcaactctggtttcagtcaagtgagctcgtatcctgggcggatgggggacagcactcatcgatccatccagcctag

SEQ ID NO: 29824 - DNA, 510 bp, synthetic construct
  misc_feature 1..510: note = Description of Artificial Sequence: Synthetic coding sequence
  source 1..510: mol_type = other DNA
tagtggcgcagtgctctgcgcggactcaggtgtggcccacgagccccagggccaagtctattggtaagacatggctctggcggaccttcctggacacgcgagaggactctggtggctgtaaagcctgacggtgttcaaagacgactggtgggagatgtcatccaacgttttgagagacgcggatttactctcgtgggtatgaagatgctccaggcaccagagtctgtcctggctgagcattaccaggatttgcggaggaaacccttctatcctgcccttattcggtacatgtcatctgggcctgtggtagcaatggtgtgggagggctataatgtggtccgcgcatccagggccatgatcggccacaccgactcagctgaggcggcaccgggaaccatcaggggagacttttcagtgcacatatcctcgcaccgcttggctcccctcgaccggggtcagagggagcagcaaatggtccccggtataccacagggggcacacgaagcctag

SEQ ID NO: 29825 - DNA, 702 bp, synthetic construct
  misc_feature 1..702: note = Description of Artificial Sequence: Synthetic coding sequence
  source 1..702: mol_type = other DNA
atgggagggcttttctggcgctccgccctgcgcggtctccgatgtggaccaagagcaccgggtccctccctcctggtgcgccacggctccggcggaccttcctggacacgagagcgcaccttagtggccgtcaagcccgacggagtgcagaggcggctggtaggtgacgtgatccagaggttcgaacgcaggggattcacactggtcggcatgaaaatgctccaagcaccggagagcgtcctggcagagcattatcaggacctgagacggaaaccgttttatccagccctcatccgatatatgagctccggtcctgttgtggccatggtatgggaaggatacaacgtggttcgcgcatctagagctatgatcgggcataccgactccgctgaggctgcacccggaacaatcagaggtgactttagtgtccacatctcacgcaacgtcattcacgcatcggacagcgtggagggggctcagcgagagatccagctctggtttcagtcttcggagctaagccccactggcgctccctggccatctcggaggccaacgtggcgtggtaccaccgtatcaccacgcaccgccacttccagtgcccgtacatgctgtggtacaaaatggcccagttctcaagaggcagcactgggcctcggatccggacttctcagattctcttgcgggaccgcagcaatcagatag

SEQ ID NO: 29826 - DNA, 354 bp, synthetic construct
  misc_feature 1..354: note = Description of Artificial Sequence: Synthetic coding sequence
  source 1..354: mol_type = other DNA
atgaaaatgctgcaggctccggaaagtgtgttggccgaacactatcaggatcttagaaggaagccattttaccctgctctaattagatatatgtccagcggcccagtggtggcaatggtatgggagggttataacgtggttcgggctagccgagcaatgatcggccacaccgatagcgccgaggcagcacctggcactatacgcggtgacttttctgtgcacattagtcgcaacgtcatccacgcctctgacagcgtggagggagcccagcgcgaaatccagttatggttccagagctccgagctagtgtcctgggctgatggcggacagcatagttccattcaccccgcatag

SEQ ID NO: 29827 - DNA, 114 bp, synthetic construct
  misc_feature 1..114: note = Description of Artificial Sequence: Synthetic coding sequence
  source 1..114: mol_type = other DNA
atgaagatgctgcaggcccctgagtctgtgctggctgaacactaccaagatctgagaagaaaacctttttacccagccctgatccgctatatgtcctctggtcccgttgtgtag

SEQ ID NO: 29828 - DNA, 195 bp, synthetic construct
  misc_feature 1..195: note = Description of Artificial Sequence: Synthetic coding sequence
  source 1..195: mol_type = other DNA
atgttccttcagtattacctgaacgagcagggagaccgcgtgtacacccttaagaaatttgaccccatgggacagcaaacatgttccgcgcatcccgctcgtttttctcctgatgacaaatattcccgccaccggataacgataaagaagagatttaaggtgctgatgactcagcagccaaggcccgtactgtag

SEQ ID NO: 29829 - DNA, 7668 bp, synthetic construct
  misc_feature 1..7668: note = Description of Artificial Sequence: Synthetic coding sequence
  source 1..7668: mol_type = other DNA
atgccccctctgctggctcccctactgtgcctggctctcctccctgccctggccgctagaggccctcgctgttcacagcccggagagacctgcctgaacggcggtaagtgtgaggctgcaaatgggaccgaggcttgcgtgtgcggtggggcattcgtcggccctcgctgtcaagaccctaatccctgcctctcgacaccatgcaagaacgccggtacgtgtcacgtggtagatcgccgaggagtggccgattacgcctgcagctgtgcactaggcttctccggccctctctgccttacacctctagacaacgcctgcctgaccaacccctgtcggaacgggggaacttgtgaccttctgacattgactgaatacaagtgtagatgtcccccaggatggtctggcaaatcatgtcagcaggccgatccatgcgcctcgaacccctgcgccaacggaggtcagtgcttaccatttgaggcttcatacatatgccactgccccccaagcttccacggtcccacatgtagacaagacgtgaatgaatgcggacagaaaccagggctgtgtagacatggtgggacatgtcacaacgaggtaggcagctacaggtgcgtgtgtcgcgctacccacacaggcccaaactgcgagcggccttatgttccctgttctccttctccatgccagaacggaggtacctgccggccaacaggcgatgttacacacgagtgcgcctgtctccctgggttcaccgggcagaattgcgaagaaaatatcgatgattgtccgggaaataactgtaagaatggtggagcatgtgttgacggcgttaacacctataactgcaggtgtcccccagagtggaccgggcagtactgcactgaagacgtggatgaatgtcagttgatgcctaatgcatgccagaatggcggtacgtgtcacaatacacatggaggctataattgcgtatgcgtaaatggctggactggagaggactgcagcgagaacatcgatgattgcgcctctgctgcatgcttccacggcgctacgtgtcacgaccgcgttgcttctttctattgtgagtgccctcacggcaggaccgggttgctgtgtcatctgaacgatgcatgtatttctaacccgtgtaatgagggctccaactgtgacaccaatcctgtgaatggaaaggctatttgcacctgcccatcaggatatactggccctgcctgttcacaggacgtggacgagtgctcattgggagccaacccatgtgaacacgccggaaagtgcatcaataccttagggtcttttgagtgtcagtgcctgcaaggatatacaggcccacggtgtgaaatcgatgttaacgaatgcgtgagcaacccatgccaaaacgatgcgacttgcctggatcagattggagaattccagtgcatttgcatgcccggatacgagggagtgcattgtgaagtcaatacagacgagtgcgcatccagcccgtgcctgcataatggcagatgtctggataagataaacgagtttcagtgtgaatgccctactggcttcacaggacacctctgtcaatatgacgttgacgagtgtgcaagtaccccttgcaagaacggcgcaaaatgtttagatggaccaaatacctatacctgtgtttgtactgagggatatacaggcactcactgcgaagtggacatcgatgagtgcgatccagacccttgccactacggatcttgtaaggatggagtagctacttttacttgcctttgccggccaggctatacaggacatcattgcgagacaaatatcaacgaatgcagctcgcaaccctgccgccatggcggtacatgccaggaccgggataacgcctacctgtgcttctgtctgaaagggacgactggacccaattgcgaaattaacctagacgactgtgctagttcaccctgtgactctgggacctgcctcgataaaattgacgggtacgagtgtgcatgcgaacctggctatactggctccatgtgtaacataaatattgatgaatgtgcaggaaatccatgtcacaacggaggaacgtgcgaggacgggatcaacggcttcacatgcaggtgtcctgagggctatcatgatccgacttgcctgtccgaggttaacgagtgtaacagcaatccttgtgtgcacggggcttgtagagactcactgaacgggtacaaatgtgactgcgacccaggatggtccgggacaaattgtgacatcaacaataatgagtgcgaaagcaacccctgtgtcaacggcggaacctgcaaggatatgacctctggctacgtatgcacctgcagagagggattttcaggacccaactgtcagaccaacatcaacgagtgtgcctccaatccttgtctcaaccagggtacgtgtattgatgatgtggctgggtacaagtgcaactgccttctgccatatacgggggcaacctgtgaggtcgtgctggccccttgtgccccaagcccctgcaggaatggaggggagtgcagacagagtgaagattacgagagcttcagctgcgtctgtccaactggttggcagggccagacctgtgaagtcgacattaacgagtgcgtgctctctccgtgtaggcacggcgcatcttgtcaaaacacacatggcggatatcgttgccattgccaggccggatattctggtcgcaactgtgaaactgatatcgacgattgccggccaaatccctgccacaacggcggatcttgtacagatgggatcaacaccgcattctgcgactgcctgcccggattccgaggcacattctgtgaggaagacatcaatgaatgtgcctctgacccctgccgtaatggtgctaactgcacagactgcgtggattcctatacgtgcacatgtcccgcaggctttagcggtatacactgtgagaataatacaccagactgtaccgagagcagttgcttcaatggtggtacctgtgtcgatgggatcaattcattcacctgcctgtgcccgcctggattcacaggatcgtactgtcaacacgatgtgaacgagtgcgatagtcagccctgtctacatggcggtacttgccaggacggttgcgggagttaccggtgtacgtgtcctcagggttacaccggccctaactgtcagaatctggtgcattggtgcgattccagcccatgtaagaacggagggaagtgttggcaaacacacacccagtaccgctgtgagtgcccttcgggatggactggactttattgcgacgtcccatcggtcagttgcgaggttgctgcccagcggcagggagtcgatgtggctaggctttgtcagcacgggggactgtgtgtcgacgctgggaacactcaccactgcagatgtcaagcaggttacacagggtcttactgcgaagacttagtcgacgaatgctccccctcaccatgccagaatggggctacatgcactgactaccttgggggttactcttgtaaatgcgtggccggataccacggggttaactgctctgaagaaatagacgagtgtctgtcgcacccctgtcagaacggcggaacctgcttggacttgcctaatacatataaatgttcctgcccgcgagggacccaaggagtgcactgcgagatcaacgttgacgactgtaatcctccagtggatcccgtctcccgatctcctaagtgctttaacaacggtacttgcgttgaccaggttggagggtatagttgcacatgtcccccaggattcgttggtgagagatgcgagggcgatgtgaatgagtgtctgagcaacccatgcgatgcaagaggtacccagaattgtgtccagagagtgaacgacttccattgtgagtgccgagccggtcataccggtcgcaggtgcgaatctgtgatcaacggctgtaagggaaaaccatgtaaaaacggcggaacgtgtgctgtagcttccaacactgctcggggattcatctgtaagtgtccagcaggcttcgaaggagccacatgcgagaacgatgccagaacttgtggatcgttgagatgtttaaatggagggacatgtatatctggaccgagatctccgacctgtctatgcctagggccatttaccggccctgagtgtcaatttcccgcttcctcaccctgccttgggggaaatccctgttacaaccagggtacgtgtgagcctacctccgagtcaccattctaccgctgcttatgccctgcaaagtttaacggcctgttgtgtcacatcttggattactcttttggaggaggcgcaggacgggacatacctcccccactgatcgaagaggcctgtgagttacccgaatgtcaggaggacgctggtaacaaagtctgttcactgcagtgcaacaatcacgcctgcggctgggacggaggagattgctccctcaactttaacgacccatggaaaaattgcacccagtccctgcagtgttggaagtatttcagcgacggacactgcgattcgcagtgtaattcagcagggtgtctgttcgacggcttcgattgtcagagagctgagggtcagtgcaacccattatatgatcaatattgcaaggaccatttttctgacggtcattgcgaccaaggatgtaatagcgccgaatgcgagtgggatggattggattgcgcggaacatgtccctgaacgactggccgctggtactcttgtggttgtggtgctaatgccacctgagcagctgcgtaactcctcatttcattttctgcgagagcttagtagggttctacacacaaatgtcgtctttaagagggatgcccacggccagcagatgatattcccatattatggtcgagaagaagaactgaggaagcatcctatcaagcgggctgcggaggggtgggccgctcccgatgcccttttgggacaggttaaggccagcctgctgcctggcggatctgagggcggacgaagacggagggaactcgatcccatggacgtgagaggcagcatagtttatctggaaatcgacaataggcagtgtgtacaggcttcttctcagtgtttccagtccgcgactgacgttgccgcttttttaggcgctctagcaagtttgggctcattaaatattccctacaagatagaggccgttcagtcggagacagtggagccccctcctcctgctcaattacattttatgtacgtcgcagcagctgcttttgttctcctgttcttcgttggttgtggggttctgctgtcccgcaaaaggagacgacagcacggtcaactctggttcccagagggctttaaagtgtccgaggcctctaaaaaaaaacgtcgcgaaccgttgggagaggacagcgttggcctgaagcccctcaagaacgcctctgatggagccctgatggacgacaatcaaaatgagtggggggatgaagacctggagaccaagaaattcaggttcgaggaaccggtggtcctgcctgatctggatgaccagacagaccatcggcagtggacccagcagcacttggacgcagcggaccttaggatgagcgccatggcccctactccccctcagggtgaggtggacgcagactgcatggacgtaaacgtgaggggccctgacggcttcaccccactcatgatagcgagttgtagcggaggcggactggagaccgggaatagtgaagaggaggaagacgcacccgctgttattagcgatttcatatatcaaggcgcatctctgcacaatcaaacagatagaacaggagagaccgccctgcacctggccgcaagatactctcgctccgacgcggctaaacgcttgcttgaggccagtgccgatgcaaacattcaggataatatgggacgaacacctctgcacgcagctgttagtgccgatgcccagggcgtcttccagattttaattcgcaaccgagccactgatctggacgctcgcatgcacgatgggaccacccctctgattctggccgctcgtctcgcagtcgaaggtatgctagaggacctcattaactcccacgctgacgtaaacgcggtggatgatttgggcaagtctgccctgcactgggctgccgcagtcaataatgttgatgctgcggtagtgctgctcaaaaacggcgctaacaaggatatgcaaaacaaccgggaagaaactccattgtttttagcagcaagggagggctcctatgaaactgcaaaagtcctattagatcactttgcaaatagggatatcaccgatcacatggataggcttccgagggatatcgcccaggagaggatgcaccacgacatcgtgcgcctgttagacgagtacaacttggtgcgcagccctcagttgcacggcgctccactgggcggaactcctaccctctcgccacctctgtgcagccctaatggctatctggggtctctcaagccaggcgtgcagggcaagaaggtgcgaaagccttcttccaagggactggcttgcggaagtaaggaagctaaggacctaaaggcccgacgcaagaagagccaggatggcaaaggatgtttgctggattcctcgggaatgctgagtcctgtggactcacttgagtctccacatggatacctgtcggatgtggcaagccccccactgctcccttcaccatttcagcagtctccaagtgttcctctgaatcatttgcccggtatgcccgacacacatttgggcatcggacatctgaatgtggcagccaaacccgaaatggccgcactcggcggtggaggacggctcgcgttcgaaaccgggcctcctaggctctcacatctgccagtggcaagtggaaccagcacagtactgggatcaagtagcggcggagccttgaattttacagtgggaggtagtaccagccttaacgggcagtgcgaatggctgtctcggttgcagtcaggtatggtccctaaccagtacaaccctctgcgaggttctgtggcaccaggacctctgagtacccaggcgccatccttgcagcatggcatggttggtcctctccattcttccctggcggcatctgccctgagccaaatgatgtcttatcaggggctgccaagcacaaggctagcaacacagccacacctagtgcaaacacaacaggtgcagcctcagaacttgcagatgcagcaacaaaatctgcagccagccaacatacagcaacagcaatctctgcagcctcccccacccccaccacagccccacctgggtgtctcctcagccgcatccggacacctgggacggtcatttctttccggtgaaccatcccaggcggatgtccagccgctcggaccctcctcactggctgtccacactatcttaccacaggagtcccccgcactcccgacttcattgccgtctagcttggtgccgcctgtaactgccgctcagttcctcactccccctagccagcattcctattcctcccctgtggacaacacacccagtcaccagctgcaggtccctgagcacccgttcctgacaccatcccccgaaagccccgaccagtggagctcttcgtcaccgcacagtaatgttagcgactggagcgagggagtcagtagtccgcctacgtctatgcaatcacagattgccagaatccccgaagcttttaagtac

SEQ ID NO: 29830 - DNA, 6011 bp, synthetic construct
  misc_feature 1..6011: note = Description of Artificial Sequence: Synthetic coding sequence
  source 1..6011: mol_type = other DNA
atgcagccaccctctctgctgcttttgctcctgctgctacttctactttgcgtcagcgtcgtgaggcctagaggactcctttgtgggtctttccctgaaccttgtgccaacgggggtacctgcctgagcttatccctgggccagggcacttgccagtgcgcacccggattcctaggggaaacctgccagtttccggacccatgtcagaacgctcagctatgccagaatgggggaagctgtcaggccctcctgccagccccactaggccttccctcttctccctccccactgactccttccttcctgtgcacctgcctacccggttttacaggagagcgctgccaggcgaagttagaggacccgtgccccccttctttctgtagcaagagaggcaggtgtcacatccaggcatctggccgacctcagtgctcatgcatgccaggatggaccggagagcagtgccaacttcgcgatttctgcagcgcaaacccctgtgtgaacgggggagtgtgcttagcaacttaccctcagattcagtgtcattgcccccctggtttcgagggtcacgcatgtgagcgtgatgtaaatgagtgtttccaggatccaggcccttgcccgaagggtacaagctgccacaacacacttggcagctttcaatgtttgtgtcccgtggggcaggaaggccctcgctgcgaattgcgagctggaccatgcccaccaaggggctgctccaacggtgggacatgccagctgatgcctgaaaaagactccacctttcatctctgcctgtgtccccctggattcatagggcctgattgtgaagtaaatccagataactgcgtcagtcatcagtgtcagaacggaggcacatgccaggatggcctggacacttacacctgcctgtgccctgagacctggactggatgggattgcagtgaagatgtcgacgagtgtgaaacacaaggccctcctcactgtcgaaatggcggtacttgccagaactctgccggatctttccactgtgtctgcgtgtctggctggggcggtacatcctgcgaggagaatctcgatgactgtattgctgcaacatgcgccccaggtagtacgtgcatcgatcgagtgggctcctttagttgtctttgccctccgggaaggacaggcctgttgtgtcatctggaggacatgtgtcttagccagccatgccatggcgatgctcagtgctcgaccaacccactgacaggcagcacgctgtgcttgtgtcaacctggatacagcggcccaacatgccatcaggatctggatgagtgcctgatggcgcagcagggaccatctccttgtgaacacggcggatcctgcttaaacacgccaggatcctttaactgcctttgccctcctgggtacactggaagtcgatgcgaggctgatcacaatgagtgtctgtcacagccatgccatcctggctcgacatgcctcgacctactggccacgtttcactgcctatgccctcctgggcttgagggtcagctgtgtgaggtggagacaaatgaatgcgcaagcgccccttgtttgaatcacgctgattgccacgatctgttgaatggctttcaatgcatttgcctgcccggattttccggtacccggtgcgaggaagatatcgatgaatgccggtcaagcccctgcgcaaacggtggccagtgccaagatcagccgggagcctttcactgcaagtgcctgccgggatttgaaggccctcggtgtcagaccgaagtggatgagtgcctgtcagacccctgtcccgtcggcgcatcatgcttagatctgcccggtgcctttttttgcctgtgtcccagtgggttcactggacagctttgtgaagtccctctatgtgcccctaacttgtgtcagccgaaacagatttgtaaggaccagaaggacaaggccaattgcttatgtccggacggctcaccgggttgcgccccacctgaggacaactgcacatgtcaccacggccattgccagcgtagctcttgcgtctgtgatgttgggtggacagggccagagtgcgaagcggagctgggaggctgtatctccgccccatgtgcacacggcggtacctgctatcctcaaccttccggctacaattgcacttgccctactggctatacaggccctacatgctctgaggagatgaccgcctgccacagcggcccttgccttaacggcggttcgtgtaatccgagccctggagggtactattgcacatgcccaccctcgcacaccggaccgcagtgccaaacaagcactgactactgtgtgtcagcaccatgcttcaatggcggtacttgtgtgaaccgcccaggcacattctcatgcctgtgcgcaatgggcttccaggggcctcggtgcgaaggcaagctgcggccaagctgcgctgactcaccatgtaggaaccgggctacctgccaggattcaccacagggtccacggtgcttgtgccctacagtgtacaccgggggaagttgccaaactctgatggacctctgcgctcagaagccgtgcccacgaaatagtcactgcctgcaaacaggacctagtttccattgcttgtgcctgcaaggttggactggaccactgtgcaatcttccactgagttcctgccagaaggctgctctatcacagggcatagacgtgagcagtctgtgccataatggcggtttgtgcgtggacagtgggccttcatatttttgccattgccccccaggttttcagggatccctgtgtcaggaccatgtgaatccttgtgagagcaggccttgccagaacggtgcaacctgcatggctcagccttccggatacctatgccaatgtgcaccgggttatgacggccagaattgttcaaaggagttggatgcttgtcagtcccagccatgtcataatcacggcacctgcacacctaaacccggagggtttcactgcgcctgcccccctgggttcgtgggcctgcggtgtgagggagatgtggacgaatgccttgatcagccttgccatcccaccggaacggcagcatgccactccttagccaacgccttctattgccagtgcctgccaggtcacacgggccagtggtgcgaggtggagatcgatccgtgtcattctcagccttgctttcatggcggtacttgcgaggcaactgccggttccccactaggattcatctgtcactgccccaaaggcttcgagggcccaacgtgctctcacagagcaccaagctgcggcttccaccactgtcatcatggaggtctgtgcctgccctctcccaagcctggatttccaccacggtgcgcatgcttatcgggctacgggggaccggactgcctgacacctccagcgccaaaaggatgcggccctccttctccttgcttgtataatggctcttgctctgagaccactgggttgggcggtcctgggttcaggtgtagctgtcctcacagttcacctgggcctaggtgtcaaaagccaggcgcaaagggctgcgaaggacggtcaggtgacggtgcctgtgatgccggatgttcaggacctggcggaaattgggacggcggagattgcagtcttggggtcccagatccttggaagggctgcccatcccactctcggtgttggctactgtttcgggatggccagtgccacccacagtgcgattcagaggaatgtctgttcgacggatatgattgtgagacccctccagcctgcaccccagcttacgatcaatattgccatgaccattttcataacggacattgtgagaaaggatgcaacacagccgaatgcggctgggatggcggagattgccgcccagaggacggggaccctgagtgggggccttcgctggctctcctggtcgtcctttcaccccctgccctcgatcagcagctgtttgccctcgctagggtcttatcgctaactctcagagttgggctatgggtgcgcaaggatagggatggacgtgatatggtgtacccatatcccggagccagagccgaagagaaactggggggaacacgcgaccccacataccaggaacgcgcagctcctcagacacaaccattggggaaggaaacagatagcctatctgcagggtttgtggtcgtgatgggcgtcgatcttagcaggtgcgggcctgaccaccccgcaagcaggtgcccctgggaccccggactcctgctccggttcctcgcagctatggccgcagtgggtgctcttgaacctctgctcccgggtccattgctcgctgttcaccctcacgccggaactgctcccccagccaaccagctgccctggcccgtgctttgctctcctgtggccggagttattctgctggctctgggcgcactgcttgtcctacagctgatcaggcggcgtagacgcgagcacggggcactgtggctgcctccaggcttcacccggaggcccagaactcaatcagcccctcataggcgacgcccacctcttggggaggattcaatcggactaaaagccttgaaacccaaagcagaagtggacgaggacggtgttgttatgtgtagtggcccagaagagggcgaggaagtgggccaggccgaagagacaggcccaccatccacctgccagctatggagcctgagtggcggatgtggtgccctcccccaagcagctatgcttaccccccctcaagagtcagagatggaagcacctgatctggatacgagaggccctgatggtgttactcccctgatgtccgcggtctgttgcggtgaagtgcagtccggaacattccagggggcatggctgggctgccctgaaccatgggaacctctacttgatgggggagcctgccctcaggcccataccgtgggaaccggagagacccctctgcacctggcagcgagattttctcgacctaccgccgcaagaagactgctggaagcgggagccaaccctaatcagcctgaccgggctggtcgcacccctctgcacgcagcagtagccgctgatgcccgtgaggtgtgccagttattattaaggtcacggcagaccgccgtggacgccagaactgaagatggcaccactcccctaatgctggccgctcgactcgctgttgaagacctagtcgaggagctgattgctgcccaagccgatgtgggcgctagagataagtggggaaagaccgccctgcattgggctgccgctgtgaataacgcaagagcggcacgctccctactgcaggcgggtgcagacaaggacgctcaggacaaccgcgagcagacacctctgtttctagccgctcgggaaggcgctgtagaagtggcgcaattgctcttgggcctgggtgctgcccgtgaattgcgggaccaggcgggtcttgcccctgccgacgtggcccatcagaggaatcattgggatcttctaactcttctggagggcgcaggacctcccgaagcacggcataaagccactcctggcagggaggccggacctttccccagggctagaaccgtgtcggtctccgtcccacctcatggcggaggcgctctgcctcgctgtagaaccctgtccgcaggagccggaccccgaggaggtggtgcctgtctgcaggccaggacatggtcagtagatttagctgctcgagggggaggagcgtactctcattgtcggtctctgagcggtgtaggcgcaggaggcggacccactcctcgcggtaggagattttcagccggtatgagggggcctaggccaaatccagccattatgagaggccgatacggcgtcgctgcaggtcgtgggggtagagtgtcgaccgacgattggccctgcgactgggtcgccctgggagcgtgtggatcagcgtctaacatccccatccctcctccatgcctgactccatcccccgaaaggggatcccctcagcttgactgcgggcctcctgcactgcaggaaatgccaatcaatcaaggaggcgaaggcaagaaata

SEQ ID NO: 29831 - DNA, 561 bp, synthetic construct
  misc_feature 1..561: note = Description of Artificial Sequence: Synthetic coding sequence
  source 1..561: mol_type = other DNA
atgagcgccgtatgctgtggggaagtgcaatccggaacctttcagggggcatggctgggatgccctgaaccctgggagccattgctggacggcggagcctgtccacaagcccatacagtaggtacaggggaaacaccattgcacttagccgcacggttctctcggccaactgcggcacggcgtctgctggaggccggagccaaccccaaccagccagatagagctgggagaacgcctctgcacgcagctgtggccgcagacgctcgggaggtctgccagttgctactaaggagcaggcagactgctgtagatgcgagaaccgaagatggtacaacgcccttgatgttggctgccagactcgccgtagaagacctggtggaggagcttatagccgctcaggcagatgtgggcgcacgcgacaaatggggagccgatgcggctatcccaggaggcgcaggccgaagtggaggatctagtccggcaaccgccggagccggtggcagcccccgtgctgctggacccggatgggcaagcgctggagggagaaggagtccaacatag

SEQ ID NO: 29832 - DNA, 1734 bp, synthetic construct
  misc_feature 1..1734: note = Description of Artificial Sequence: Synthetic coding sequence
  source 1..1734: mol_type = other DNA
atgcactggctgagaaaggtccaagggctctgcactctgtggggtactcaaatgtcctcgagaactctgtatatcaattctagacaattggtatcgctccagtggggacaccaggaggtccccgcaaaattcaattttgcctcagatgtgcttgatcactgggccgacatggagaaggcgggaaaacgactgcccagtcctgccctctggtgggtaaatggcaagggtaaggaactgatgtggaatttcagggagttaagcgaaaacagccagcaggccgcaaacgttctgtcaggggcttgtggactccagcgcggtgacagagtggcagtggtcttgcctcgcgtaccagagtggtggcttgttatcttgggctgcattagggccggactaattttcatgccgggaacaattcagatgaaatctactgacattctttacagattgcagatgtccaaagcaaaggcgattgtggcaggggatgaagtaatacaagaggtagatacagtcgcctcagagtgcccgagtctcaggataaagcttctagtttctgagaagtcatgtgacgggtggcttaatttcaaaaagctgctcaatgaagctagtaccactcatcactgtgtggagaccggaagccaggaggcctctgcgatatacttcacctctgggacttcagggctcccgaaaatggcagagcatagttactctagcctcgggcttaaggcgaagatggacgccggttggacgggtttgcaggccagcgatattatgtggaccattagcgacacgggatggatcctaaatatcctctgcagtctgatggagccatgggctctcggggcttgcaccttcgtccacctgctcccaaaatttgacccattggttattctaaagactctcagcagctacccaataaaatcaatgatgggcgcaccaattgtttatcgaatgctccttcagcaggatctgtcctcatacaagttccctcatcttcagaactgcgtaactgtcggggagagtctgctgcctgagacccttgaaaattggcgagctcagactggcctcgacatccgggagtcctacggccagacggaaaccggacttacatgtatggtgtctaagacgatgaagattaagcctggttacatgggaacagccgctagctgctatgatgtgcagatcatcgacgataaagggaacgtcctgccgcctggcacagaaggcgacataggtatcagggtgaagcccattcggccaataggtatcttctctggatacgtggataatcctgataaaaccgcggcaaatatacgaggtgatttttggctcctgggtgacaggggaataaaggatgaagatggatattttcaattcatgggtcgcgcaaacgacatcattaactcgtcaggataccgcattggaccttcagaggtcgaaaacgccctgatggagcatcctgcagtcgtcgagaccgccgtgatcagcagtccagatcccgtacgcggagaagtcgtgaaagccttcgttgtactcgcatcacagtttttgtcccacgatcccgaacaattgactaaagaactgcaacagcatgtcaaatccgtgactgccccatacaagtatcccaggaagattgagttcgttttgaaccttccaaaaacagtgaccggaaaaatccagagagctaaactgcgggataaggaatggaaaatgagtggcaaggccagggcccagtag

SEQ ID NO: 29833 - DNA, 4368 bp, synthetic construct
  misc_feature 1..4368: note = Description of Artificial Sequence: Synthetic coding sequence
  source 1..4368: mol_type = other DNA
atgggcggtgcctgtagcagctttacaacatcttcttcccccacaatttatagtacttcggtcacggatagtaaggcaatgcaggtcgaatcctgcagctcggccgttggagtgtccaaccggggagtgagtgaaaaacagttgacatctaacacagttcagcaacacccgagcaccccaaagcggcatacggtgctctatatctccccccctccagaggatcttctcgacaactctcgaatgtcttgccaggatgagggctgcggcctagaatcggagcagtcatgtagcatgtggatggaagactcaccatctaacttctcaaacatgtcaacatcgagctataatgataacaccgaagttcctagaaagagccgcaaacggaacccaaaacagagacccggtgtaaagcgaagggattgcgaggaatctaatatggatatctttgatgcagatagcgccaaagcgccacactacgtgctgtctcagctgactaccgataacaaaggcaacagcaaggcagggaatggcactctcgagaaccaaaagggcaccggagtgaagaaatcgcctatgctgtgtggacagtaccctgtgaaatccgaaggcaaggagctgaaaatcgttgtccagcccgagacacagcatagggcaagatatctcacagagggatctcgtggttccgttaaagaccgtacccaacagggctttcccacagtcaaactcgagggacacaatgaacccgtggtcctgcaggtgttcgtagggaatgattccggccgtgtaaaacctcacggtttctaccaagcttgcagagtgacgggcaggaacaccactccctgcaaggaagtcgatatcgagggcactacagtgatcgaggtggggctggacccatcaaataatatgacgttggcagtagattgcgttggcatcctcaagctgcgcaatgccgacgtggaggccagaatcggcatagccggtagcaaaaagaaaagtaccagagcacgcctggtcttccgagtgaatataatgcgtaaagatgggagtactttaacccttcagaccccaagcagtcccattttatgtacacagcccgctggcgtgcccgagattttaaaaaaatcccttcattcatgctcggtcaaaggtgaggaagaagtctttctgatcggtaagaattttctaaagggaactaaggtgatttttcaagaaaatgttagcgatgaaaactcctggaaatccgaggctgagatcgatatggaactgttccaccagaatcatctgattgttaaagtgcccccataccacgatcagcacataacccttccagtgagtgttggcatatacgttgtgacgaacgctggcaggagccacgatgtccagccctttacctatactcccgaccccgcagctgccggtgctcttaacgtcaatgtcaagaaagagatcagctcgccagctcgtccttgtagctttgaggaagcaatgaaagcaatgaaaacgaccggttgtaacctagacaaggtcaacattattcctaatgccttaatgacacccctgatcccctctagcatgatcaagagtgaggacgtaacgccaatggaggtgacagccgaaaaaaggtcaagcactattttcaagactacaaaaagtgtcggaagtactcaacagacacttgaaaatatttcaaatatcgcaggcaacggcagctttagctcccccagtagtagtcatctgcccagtgagaatgagaagcaacagcagattcaacccaaagcttataaccccgaaaccctgaccacgattcagactcaagatatcagtcagcccggaaccttcccagctgtttccgccagcagccagttgcctaactcggacgctttacttcagcaagctactcagtttcaaactcgcgaaacccagtctagggaaatcttgcagtcggatgggactgtggtaaatctgagccagcttacagaggcttctcagcagcagcaacaatctcctcttcaggaacaggcccagactttacagcagcaaataagtagcaacatctttcctagtcccaactctgtgtcacagctgcagaacacgattcagcagctgcaagcaggatctttcaccggaagcactgctagcggcagctccggtagcgtggacctggtgcagcaggttttagaggcccagcagcaactgagctccgtgctgtttagcgcacctgatggaaatgagaatgtacaagaacagctttcggccgacatcttccagcaggtctcgcagattcaaagcggggtctcacctggaatgttcagctcaacggagcctactgtgcacacccggccagacaacttactgcctgggagggcagagtcagtccatccccagtccgaaaataccctttccaaccagcagcagcagcagcaacagcagcaacaggttatggagagctcagccgcaatggtgatggagatgcaacaatctatatgtcaggcagcagcccagattcagagcgaactatttccctccacggccagcgctaatgggaacctgcagcagagtccggtgtatcagcagacaagccatatgatgtcggccctttccaccaatgaagacatgcagatgcagtgcgagctgttctcaagtccacccgctgtaagcggaaacgagacatccactactactacccagcaggtcgccactcccggaacaaccatgttccagacctcctcttctggtgatggagaggaaactggaacccaggccaaacagattcagaacagcgtcttccagactatggtgcagatgcagcactccggcgacaaccagccccaggtcaacttgttctctagcactaagagtatgatgtcggtgcagaattcagggacgcagcagcagggtaacggcctgttccagcagggaaatgagatgatgtccctgcagtccggcaattttcttcagcaatctagtcatagccaggcacagctgtttcatccacagaatcctattgctgacgcacagaatctttcacaagagactcaaggtagtctgttccactcacctaatccaatcgtacactcccagacctctactaccagttccgagcagatgcagcctcccatgttccattcccagagcacgatcgccgttctccaggggagctcagttcctcaggatcagcagtctacaaatatatttctttcccaaagtcctatgaataacctgcagacaaacacagtcgcacaggaagcattcttcgcggcacccaactccatttcccccctacagagtacatcaaatagtgagcagcaagcagctttccagcagcaggcccctatttctcatatccagacacctatgctgtcacaagagcaggctcagccccctcagcaagggctgtttcagccacaggtggcattggggtctctcccaccgaaccctatgccccaatctcagcagggaacaatgttccaatctcagcactctatagtggctatgcagagcaattctccctcacaggagcagcagcagcagcagcagcagcaacagcaacagcagcaacagcaacagcaatccatactgttcagcaaccagaacacgatggccaccatggccagtccgaagcagccacctcctaatatgatttttaaccccaatcagaatcctatggcgaaccaggagcagcagaaccagagtatatttcaccagcaatcaaacatggcacccatgaatcaggagcagcaaccgatgcagtttcagtctcagagcaccgtttcatccctccaaaaccccggacctacccagagtgagagctctcagacccctctcttccactcctcacctcaaatccagttggttcagggtagcccgagcagtcaggagcagcaagtgaccctgttcctgagtccagcatccatgtctgctctgcagacgtctatcaatcagcaggacatgcagcagagtcctttgtatagcccgcagaataatatgccaggtatccagggagctacgtcctccccacagccccaagccactctctttcacaacactgccggtgggaccatgaatcagctgcagaatagccctggttcatcacagcagaccagcggaatgttcctgtttgggatccagaataattgcagccagctactaacaagcgggccagctacgctgccagaccaactcatggctatctcacagccaggacagccacagaacgagggacagccgcctgtgactactctcctcagccagcagatgcctgagaattcacccctcgcaagcagcattaatacaaatcagaacatcgaaaaaatcgatctgctggtgtcactgcagaatcagggaaacaatctcacaggctctttctag

SEQ ID NO: 29834 - DNA, 4647 bp, synthetic construct
  misc_feature 1..4647: note = Description of Artificial Sequence: Synthetic coding sequence
  source 1..4647: mol_type = other DNA
atgccgtccgattttatctcattactatccgccgatctggacctggagagtccgaagagcctgtacagccgggactccctcaagctgcatccttcccagaactttcatcgcgctggcctgctggaggaaagtgtgtacgacctgctccccaaagagctacagttgcccccatccagggagacatcagttgccagtatgtctcaaacttccggaggcgaggctgggtcacctcctcctgccgttgtggcagcggatgcgtctagtgctccgtcaagctccagcatgggtggagcctgttctagctttaccacaagtagttcacctacgatttattctacaagtgtgaccgattccaaggcaatgcaagtggagagctgtagcagcgccgttggtgtctcgaacaggggggtctccgagaagcagctgacaagcaatactgtccaacaacatcccagcactcctaagaggcatacagtcctatatatttctccgccaccagaggacctgctcgacaattcccggatgtcgtgccaagacgagggatgcggccttgagagtgagcagtcttgcagtatgtggatggaagattctcctagtaatttttcaaacatgtcaacatccagctataatgataacactgaagtccctagaaagtctagaaagcggaaccccaagcagagacccggagtgaagcgccgagattgtgaagaatctaatatggacatctttgacgccgactcagctaaggcacctcactacgtgctgtctcagctgacaactgacaacaaaggcaacagcaaggcaggtaatggaactctggagaatcaaaagggcacaggggtgaaaaaatcgccgatgctgtgtgggcagtaccccgtcaagtctgagggcaaggaactgaaaatcgtggtgcagccggagacccagcaccgggctcggtacttaactgaggggtctcgtggatcagtcaaagaccggacgcagcaaggctttcccacagtgaaactggagggccacaatgaaccagttgtgttgcaggtatttgtaggtaatgattctggcagagtgaaacctcacggattttatcaggcgtgccgggtgacggggaggaacactacgccatgtaaagaggtcgacattgaggggaccacagtaattgaggttgggttagatccctcaaataatatgaccctggctgttgattgcgtgggcatccttaaactccggaacgcggacgtcgaagcaaggattggtatcgctggatctaaaaagaaatctacccgggcacgcttggtatttagggtgaacataatgaggaaggacggatcaactttaaccctgcagacacccagctctcccattctgtgtacacaaccagcaggtgtcccagagatactgaagaagagcttgcattcctgctcggtgaagggtgaagaagaggtgttcctgatcggaaagaacttcctcaaggggaccaaagtaatcttccaggagaacgtgtccgatgaaaattcctggaagagcgaggcagagatcgacatggagctctttcaccaaaatcaccttatcgttaaggtgccaccctatcatgatcagcatattaccctacccgtgtcggtgggcatctatgtggtcacgaacgcagggagaagccatgacgtacagcctttcacatataccccagacccagccgcaggcgctcttaacgtgaacgttaaaaaagaaattagcagtcctgccaggccttgttcctttgaggaggcgatgaaggcaatgaaaacgactggatgcaatcttgacaaggtgaacattatccctaacgcattgatgacacccttgatccctagtagcatgatcaagagtgaagatgtgacaccgatggaggtgacagcagagaagagaagttctaccatcttcaagacgactaaatctgttggcagcacccagcagactctggagaatattagtaacattgccggtaacggttctttctctagtccctcgtcaagccatctcccttctgagaacgaaaagcagcagcagatccagcccaaggcctacaaccctgagacactgaccacgatccagactcaggatatctcgcaacccggaaccttccccgctgtcagtgcctcctcgcagctgccgaactcggacgccttgttgcaacaggctacacagtttcagacccgagagacccagtctcgcgagatcttacagtctgacggtactgtggtgaatctgtcccagctcacggaggcctcccagcagcagcagcagtccccactacaggagcaggcacagaccctgcagcagcagattagctccaatatctttccaagtcccaacagcgtttctcaactgcagaatacaatccagcagctccaggcgggatctttcaccggatccacggcaagcgggagttccgggagtgtggaccttgtgcaacaggtcctcgaggcacagcagcagctctcatcggttctcttcagtgcccctgacggtaatgagaacgtgcaggaacagctgagtgccgacatcttccagcaagtgtctcagatccaatccggggtcagtccagggatgtttagctcaacagaacccactgtgcacacccggcctgacaacctgctgcctggtcgtgctgagagcgtccaccctcagtccgagaacactctatccaatcagcagcagcagcagcaacaacagcagcaggtgatggagtccagtgctgccatggtgatggagatgcaacagagtatctgtcaggctgcagcccagattcaaagtgagctgttcccttccaccgcgtctgccaacgggaacttacagcagtccccagtgtatcagcagaccagccatatgatgagtgctttaagtaccaacgaggatatgcagatgcagtgcgaactgttctccagccctcctgctgtttctggaaacgagacttcaacaaccacaactcaacaggtcgcaactcccggaactactatgtttcaaacaagctcaagcggggacggcgaggaaactggcacccaggcgaaacagatccagaattcagtgttccagacgatggtgcagatgcagcactccggcgacaatcagccacaggtgaatctgttctcttctactaaatccatgatgagtgtgcaaaattctggaactcaacagcagggcaatgggttattccagcagggcaacgaaatgatgagtctgcagtccgggaattttctgcaacaatccagccattctcaagcccagttgtttcaccctcaaaacccgatcgccgatgctcaaaacctcagccaggaaacacagggttcgctctttcacagcccgaaccccatcgtccacagccagacttcaaccacaagctccgaacagatgcaacctccaatgttccatagtcagtcaacgatcgccgtgctgcaggggagcagcgttccgcaggaccagcaatccactaacatcttcctctcgcagtcaccgatgaacaatctgcagacaaatactgtcgcacaggaagcgtttttcgccgcacccaactccatatcacctcttcagtcaactagtaattctgagcagcaggcagcatttcaacagcaagccccaatatcgcatattcagacacctatgcttagccaggagcaggcacagccgcctcagcaagggttattccagcctcaggtcgccctgggctccctgccacccaatcccatgccccagtcccaacagggaaccatgtttcaatcacaacacagcattgtagccatgcagtcaaatagcccgagccaagagcagcagcagcagcagcagcagcaacaacaacagcagcagcaacagcagcagagcatcctcttttcgaaccagaataccatggccaccatggcaagcccaaaacagcctccgcctaacatgatcttcaacccaaatcagaaccctatggcaaaccaggagcagcagaaccaaagtatctttcaccagcagtccaatatggctcctatgaatcaggagcaacagccaatgcagttccagtcccaaagcactgtgtcgtctctgcagaatcccggtccaacacagtccgagagttcacagacacccttgtttcactcgtctccccagattcaactagtgcagggctccccttcatcccaggaacaacaggttaccctgtttttgtccccagcctcgatgagcgctctgcagacatcaattaaccagcaggatatgcagcagtcacccctgtattctccccagaacaacatgccgggaatccagggtgcaacaagcagcccacagccgcaggccactctctttcataacaccgccggagggactatgaatcagctgcagaatagtcccggttcatctcagcaaacttccggaatgtttctctttggcatacagaacaattgtagccagctgctgacatccggaccagctacactccctgaccagcttatggctatttcccagcccggacagccacagaacgagggccagccgcctgtgaccacgcttttatcccagcagatgcccgagaatagccctcttgcatctagcatcaatactaaccagaacatagaaaagatcgatttgctggtgagcctgcagaatcaggggaataacttgaccggatctttttag

SEQ ID NO: 29835 - DNA, 4367 bp, synthetic construct
  misc_feature 1..4367: note = Description of Artificial Sequence: Synthetic coding sequence
  source 1..4367: mol_type = other DNA
atggggggagcctgcagcagctttactacatctagtagtcctaccatatactctactagcgttacggatagtaaggcaatgcaagtcgaatcttgtagtagcgctgtgggcgtcagtaacagaggcgtcagcgagaaacagctgacaagtaataccgtgcagcagcacccttcaacccctaagaggcacactgtcctttacattagcccacccccagaagacctgctagacaacagtaggatgagttgccaggacgaagggtgcggcctggaaagcgagcaatcatgctctatgtggatggaagactccccaagcaactttagcaatatgtccacttcatcgtataatgacaatactgaggtccccaggaagtcacgtaagcggaaccccaaacagcggccaggagttaaacgcagggactgcgaagaatctaacatggacatatttgatgcagacagcgcaaaagccccacactacgtgctgtcacaactgacaactgacaataaaggaaatagtaaggccggtaatggtacactggaaaatcagaagggtaccggagtcaagaagagtcctatgctctgcggacagtaccctgtcaagtcagaaggaaaggagttaaaaattgtggtccagccagaaacacagcacagagcccgatatttgactgaaggcagcagaggcagtgtgaaagacaggacacagcagggctttccaaccgtgaagctggaagggcataacgagccagtagtgttacaggtatttgtcgggaatgattctggtcgtgtgaaacctcacggcttttaccaggcttgccgtgtcaccggcagaaacacaacaccttgcaaagaagttgatatcgaaggaaccactgttattgaggtcggactagacccttccaacaacatgaccctcgctgtagattgcgtcggcatcttgaagttgaggaacgcggatgtcgaagcgcgaatcggcatcgccggtagcaaaaagaagtctacccgtgctagactggtatttcgagtgaacattatgcgcaaggacggatcaacactgaccctgcagactcctagctcaccgatcctctgcacccaacccgctggggtgcctgagatcctgaagaaatctctgcacagctgcagcgtgaaaggtgaggaggaagtatttcttattgggaagaactttctgaagggcactaaagtgattttccaggagaacgtttctgatgaaaattcttggaaaagcgaagccgagatagatatggaactgttccatcagaatcacctcatcgtgaaagtacccccttatcatgaccagcatattaccttaccggtttccgtggggatttatgttgtgaccaacgctggccgttcgcacgatgtacagcccttcacgtatacacctgaccctgctgccgctggggctctgaacgtgaacgtgaaaaaagagatatcaagccccgctaggccctgctcgttcgaggaagcaatgaaagcaatgaagaccaccggttgtaacttggataaggtgaacattattcctaatgcactcatgactcctctgatacccagctctatgatcaagtcagaggacgtcacacctatggaggtaaccgcagagaaaagatcttccacgatttttaagaccaccaagtctgtcggatcaacacaacagactttagagaacatcagcaatattgccggaaacggtagcttttcctctccctcgagtagccatctaccaagcgaaaacgagaagcagcaacagattcagccaaaagcctacaatccagagacactcacaactatccagacccaggacatcagtcagcccggtacctttcctgcagttagtgctagcagccaactacctaactcagatgcccttctccagcaggcaacccaatttcagacaagagagacacagtcccgcgagattctgcaatctgatggaacagtggtcaacctgtcccagctgacagaggcgagtcagcagcaacagcagagccctctgcaagagcaggctcaaactctgcagcagcaaatttcttctaatatctttccttcgccaaactctgtgagtcaactacaaaacaccatccagcagctccaggcaggctccttcacgggttccacagcatcaggaagctctggctccgtggatctggttcaacaggttctggaggcccagcagcagctgtcctccgtcctgttctcggcacctgacgggaacgaaaacgtacaggagcaactgagcgctgacatctttcagcaggtatcacagattcagtctggtgtgagtcccggaatgttctcttctacagaacccaccgtgcatactcgcccagacaatctgcttcccggtagggcagagtctgtacacccccagtctgaaaacactcttagcaaccagcagcagcagcaacagcaacagcaacaggtgatggaaagcagcgccgctatggttatggaaatgcagcagtcaatctgtcaggctgccgctcagatccagtccgaactcttcccatccactgctagcgctaacggaaacctacagcagtctccagtgtaccagcagacctcgcacatgatgagcgctctttcaacaaacgaagacatgcagatgcaatgtgaactcttctccagcccccctgcagtcagcggaaatgaaacaagcacgaccactacccagcaggtagccacacctggcaccacaatgtttcagacatcttcaagcggggatggggaggagaccggcactcaggccaaacagatacaaaattccgtgttccagacgatggtccaaatgcaacactcgggcgacaatcagccccaggtgaatctctttagctccacaaaatccatgatgagcgtacaaaacagtggtacacagcagcagggcaacggcctgtttcagcaaggtaacgaaatgatgagcctgcagtcaggtaatttcctgcaacagtcttctcattcacaggctcaacttttccatccccagaatcctatagccgatgctcagaacctgtcgcaagaaacacagggcagtctgtttcacagccccaacccgattgttcactcacagacctctaccacaagtagcgagcagatgcagccaccgatgttccattcccaaagcactatcgctgtcttgcagggaagcagcgtcccgcaggaccaacagtcaacaaatatcttcttgagccaatcgcccatgaacaaccttcagaccaacactgtggctcaggaggcattctttgcggctccaaactccatttcccctctgcaatctaccagcaacagcgaacagcaggctgcgtttcagcagcaggcccctatcagccacattcaaacacctatgctgtctcaagagcaggcacagcctccacaacagggcctcttccagccccaggtagccctcgggtccttgcctcccaaccctatgccacagtcccagcagggaaccatgtttcagagccagcattccatcgtagccatgcagagcaacagtccttcccaagagcaacaacagcaacagcaacaacagcaacaacagcagcaacaacaacagcagtcgatcttattctctaaccagaacaccatggcaacaatggcttctcccaaacaaccccctcctaatatgatctttaatccaaatcagaaccctatggcaaatcaggagcagcagaatcagtctattttccatcagcaaagtaacatggcacctatgaatcaggaacagcagcctatgcagttccagtctcaaagcaccgtgtctagcttacagaaccctggacccacgcaaagtgaatcctcccaaacgccgctctttcacagcagcccgcagattcagttagtccaaggcagtcctagcagccaagaacagcaagtgacattgttcctctcgccagcttccatgtctgcgctgcaaacatccatcaatcagcaagacatgcagcagtcgccattatacagtcctcagaataacatgccagggatccaaggcgcaacttctagcccacaaccgcaggccactctgtttcataatacagcaggtggcactatgaatcagcttcaaaactcccctggcagttctcagcagaccagcgggatgtttctgttcgggatccagaacaactgcagtcaactgttgacctccgggccagccactctgcccgatcagctcatggctatttcacagcccggacagcctcaaaatgagggtcaacccccagtgacaactttgttaagccagcagatgcccgaaaatagcccattagcaagctcaattaacactaaccagaatattgagaagatcgacctgttagtgtccctgcaaaaccaagggaataaccttaccggcagcttcta

SEQ ID NO: 29836 - DNA, 4595 bp, synthetic construct
  misc_feature 1..4595: note = Description of Artificial Sequence: Synthetic coding sequence
  source 1..4595: mol_type = other DNA
atgccatctgactttatctctctgctctccgccgacttggatctcgagagcccgaagtcgttatattccagggagtctgtgtatgacctcctaccaaaggagcttcagcttcctccttcacgcgagacgagcgttgcttcaatgtcacagacttccgggggagaagcgggaagcccacccccagctgtggtggctgctgatgcttcatccgccccaagctcttcctctatgggaggcgcttgctcgagtttcacaacttccagttcccctaccatatacagcaccagcgtcactgatagtaaggctatgcaggtggagagctgcagcagtgctgtcggtgtcagtaataggggggtgtcagaaaaacagcttacctctaataccgtgcaacagcaccctagcacacccaaacggcacaccgtcttgtacatcagcccaccccctgaggatctgctggacaatagcagaatgtcctgccaagatgaggggtgtggcctcgaaagcgagcagtcatgcagcatgtggatggaagacagcccgtctaactttagcaatatgtccacttcatcatacaacgataacactgaagtgcccagaaagtcgcgcaagagaaaccctaaacagagacccggagtgaaacgcagagattgcgaagagtcaaatatggacatcttcgacgccgattccgcgaaggctccacactacgtcttgtctcagcttacgactgataataagggcaacagcaaagcaggtaatgggacacttgagaaccagaagggtacaggcgtgaagaaaagccccatgctctgcggacagtatccagtcaagagtgagggcaaggaactcaagattgttgtgcagccagagacccagcacagggcgcgatacctgacagaaggcagtaggggcagcgtgaaagaccgaacacagcaggggttcccgaccgtcaagctggaagggcataatgaacccgtagtcttgcaggtgttcgtgggaaatgactcgggcagagtgaagccccacggattctatcaagcatgcagggtgaccgggaggaacacaaccccctgtaaagaggtggacatagagggcacaacagtgatcgaagtgggactcgacccaagtaacaacatgacactggcggttgactgcgtgggaatactcaaactgcggaacgctgacgtcgaagcacgaatcggaatagctggcagtaagaaaaaaagcaccagagccaggctggtctttcgggtcaacatcatgaggaaggatgggtccacccttacgcttcagacccctagctcccctatcctgtgcacgcagccggcaggagtgcctgaaattctaaagaaaagcctccatagctgcagcgtgaagggcgaggaagaggtcttcttaataggcaagaacttcttgaagggcaccaaggtcattttccaggaaaacgtatctgacgagaactcctggaaaagtgaagctgaaattgacatggaattgttccatcagaaccacctgatcgtgaaggttcctccttatcatgatcagcatatcacactgcccgtgagcgttggcatttatgtcgtcactaatgccggacgctctcacgatgtgcagccctttacctacacaccagatcctgccgctgctggtgcgttgaacgttaacgtgaaaaaggagattagctcccctgccaggccatgcagtttcgaggaggcaatgaaagccatgaaaactactggatgtaatttggacaaggttaatataatccccaatgccctgatgacaccccttatcccctcctcaatgataaaaagtgaggatgttactccaatggaggtcaccgcagaaaaacgaagttcaaccatttttaaaactaccaaatccgttggttctacccagcagactctggagaatatcagcaatatcgcaggaaacggctcattctcgtctccatcttcttctcatctgccatcagaaaatgagaagcagcagcagattcagcccaaagcatataaccctgaaaccctgaccacgattcagacccaggacatctcacagccaggaacatttcccgctgtgagtgccagctcgcagctccctaacagtgatgctcttttacaacaggccacacaattccagactagagagacccagagtcgcgagatactccaatccgatggcacggtggtgaacttgagtcagctcacagaagcgtcacaacaacagcagcagagtcccctccaggagcaagcccagaccctgcagcagcagatttcctcaaatatctttccatcccccaacagtgtcagtcagttacagaatactatccagcaattacaggctggttctttcaccgggtcaactgctagcggtagtagcggaagcgtcgatctcgtgcagcaagttttagaagcccagcagcagttgtcatcagtcctgttctccgcacccgatggaaacgagaacgtccaagaacagctgtctgccgacatatttcaacaggtgtcacagatccagtccggcgtttcccccggtatgtttagtagcactgagcctacggtccacaccaggccggataatctgttaccgggtagagccgagtcggtccaccctcaaagtgaaaacactcttagtaaccaacagcaacagcagcaacaacagcagcaggttatggagtcaagcgccgctatggtaatggaaatgcagcagagtatttgccaggccgctgcccagattcagtcagaactctttcctagcactgctagtgccaatggcaacttgcaacagagtccagtgtaccaacagacctctcacatgatgtccgcactctcgactaacgaggatatgcagatgcagtgtgagctgttctccagtccaccggcagtgtctggcaatgaaacctccactactaccacccaacaggtggccacccccggaacaacgatgttccaaacaagctcttctggggacggtgaagagacggggactcaagctaaacagattcagaatagcgtttttcagaccatggttcagatgcaacattcaggagacaatcagcctcaagtgaacctcttttctagcacgaagtcaatgatgtcggtgcagaatagtgggacccagcaacagggcaacggactgtttcagcaggggaacgagatgatgtcactgcagagtgggaacttcctccagcaatctagccactctcaggcacagctctttcaccctcaaaatcccatagccgacgcacagaatctttcacaggagactcagggctcattattccactcccccaaccctattgtgcactcgcagacgagcaccaccagtagtgagcaaatgcagcctcctatgtttcacagccagtccactatcgcggttctacaagggagctctgttcctcaggatcaacagtccacaaatatctttttgtcccagagtcctatgaacaatttacagacaaatactgtcgcacaggaggctttctttgcagcccctaatagcattagtcctctgcagtctacttcaaattctgagcaacaggctgcatttcagcagcaggctcccatctctcacattcagacaccgatgctctcacaagagcaggcccagccccctcaacagggcctcttccaaccacaggtcgcgctcggatctctcccccctaaccccatgccacagtcacagcaggggaccatgttccaaagccaacatagtatcgtggcgatgcagagcaacagcccttctcaggagcagcaacagcagcagcagcagcagcaacagcagcagcagcagcagcagcagtcaatcttattttcaaaccagaacaccatggccacaatggcttcccctaagcagccacctccaaatatgatctttaatccaaatcaaaacccaatggcgaatcaggaacagcaaaatcagtcaatttttcatcagcagagcaacatggccccaatgaaccaggagcaacagcctatgcagttccagtcccagtcaacggtgagtagtctccagaatcctgggccaactcagtctgagtcttctcagacacccctatttcactcatccccgcagatccagttagtacagggctcccctagttcccaagaacagcaagtgaccttattcctgtcccccgcttccatgtcagccctgcagacctcaatcaatcaacaggacatgcagcagtctcctttgtattcccctcagaacaacatgcctgggatccagggcgctacttcctcccctcagcctcaggccacactgtttcataacaccgccggtggaaccatgaaccaactgcagaactcgcccggtagctcacagcagacttcagggatgttcctatttgggattcaaaacaactgtagccaacttttgacttctggaccagccacactaccggaccagctgatggccataagccaacccggacagccccagaacgaggggcaaccccctgtgaccacgttgctgtcccagcagatgccagaaaactcccctctggcatcatctatcaacactaatcagaacattgagaagatcgatctgctggtgtctctacaaaaccagggcaacaacctaaccggcagttttta

SEQ ID NO: 29837 - DNA, 4367 bp, synthetic construct
  misc_feature 1..4367: note = Description of Artificial Sequence: Synthetic coding sequence
  source 1..4367: mol_type = other DNA
atgggtggtgcctgtagctcgttcactaccagtagctctccgaccatttacagcacctccgtgaccgactccaaagccatgcaagtggagtcgtgctctagtgcagtgggagtatcaaacagaggggtctccgagaagcagctgacgtcaaatacagtacagcaacatccttcaacacctaagcggcacaccgtactttacatctcaccaccccctgaggacctccttgacaacagtcgcatgagttgccaggatgaaggttgcgggctcgaaagtgaacaaagctgctctatgtggatggaggattccccttcaaacttctccaatatgtctaccagctcctacaatgataacacagaggtcccgagaaagtctcgtaagaggaacccaaagcagcgccctggagtgaaaagaagagattgcgaagagagcaacatggacattttcgacgccgatagcgctaaagctccccactacgtgctgtctcagttgaccaccgataacaaaggcaactctaaagcaggaaatgggaccctggagaatcaaaagggcactggggttaaaaaaagccccatgctctgtgggcagtacccagttaaatctgaggggaaagagctaaaaattgtggtgcagcccgagacacagcatcgtgccagatacctgactgagggttcccggggttcagtgaaggatagaacccagcagggattccccacagtgaaactggaaggacataacgaacccgtcgtgctccaggtgtttgtgggcaatgacagcggacgcgtcaagccacatggtttctaccaggcatgtcgagtaactggtcgaaataccacgccttgcaaggaggtggatatagaggggacaaccgtgattgaggtgggtttagacccttcaaataacatgacactcgccgtggattgcgtcggcatattgaagctgcggaacgccgacgttgaggcccgaatcggcatcgcaggaagtaagaaaaaatctactcgtgcccgtctggtgttcagggtgaacatcatgcgaaaagatggaagtaccttgacactgcaaacaccatcgtctcccattctgtgtactcagcccgctggtgtcccggaaattctgaaaaagtcactgcattcctgttcagtaaaaggagaagaggaggtcttcttaattggcaagaactttctgaaaggtaccaaagtcatctttcaggaaaatgtgtccgatgagaactcctggaagagtgaagccgagatcgacatggaattgttccaccagaaccaccttatcgtgaaagtccccccttaccacgaccagcatattaccctccccgtttccgtgggtatttatgttgttaccaacgccggtcgtagtcacgacgtccagccatttacatataccccggatccagctgccgcaggggcacttaacgttaatgtaaagaaggaaatctcgtcccccgcacggccttgcagcttcgaagaggctatgaaggcaatgaagacgacagggtgcaacctcgacaaggtgaacatcatccccaatgctttaatgactcctctgataccaagtagcatgatcaaatctgaagatgtcactccaatggaagtaactgcagagaaacggtctagcaccatttttaaaacaactaaatcagtaggatccacgcagcagactttagagaatatttcgaacatagcgggaaacgggtctttcagctctccatcaagtagccatctgccttcggaaaacgagaaacagcaacagattcagccaaaggcgtacaatccagagactctgactaccattcagacccaggacatctcccaacccggaactttcccggctgttagcgcatccagccagctcccaaacagcgatgccctgctccagcaggctacacaatttcagacccgcgagacccagagccgggagatcctccaatccgacggaaccgtcgtcaacctgtcacagcttacggaagccagccagcagcagcagcagtcgcccctgcaggaacaggcgcagacgctgcaacagcagattagctcaaatattttccctagtcctaatagcgtgtctcagttacagaatactatccagcagctgcaggccggaagctttacagggtcaactgcaagcgggtcctcgggatccgtagacctggtccagcaagtcctcgaggcccagcagcagctctcctctgttcttttttcagctcctgatggcaacgagaacgtgcaggaacaactaagcgctgatatcttccaacaagtttcgcagattcagtctggcgtgtcaccagggatgttctctagcaccgagccaaccgttcataccagacccgacaacctcctgccaggacgggctgagtctgtacacccccagtctgagaatactctgtcaaatcaacagcagcagcagcagcagcagcagcaggtgatggaatcttctgccgcaatggttatggagatgcaacaatctatctgtcaagccgcagcccagattcagtccgagctattcccatcgactgcttccgccaatggcaacctgcagcagtctccagtctaccagcaaacctctcacatgatgtccgcgctgagcaccaacgaggatatgcagatgcagtgtgaattgttctctagccctcccgcagtgagtggaaatgagacaagtacaacaacaacacagcaagtagcaacacccggtaccaccatgttccaaacttcctccagcggcgatggggaagagactggaacccaagctaaacagatccagaactccgtctttcaaaccatggtacagatgcaacatagcggcgacaaccagccgcaggtgaatctcttctcctcaaccaaaagcatgatgtctgtgcaaaactctggcacccagcagcaagggaatggactgttccaacaaggtaacgagatgatgtctttgcaatcagggaattttctccagcaatcatcacactctcaggctcaactcttccacccacagaaccccatagcagacgcccagaatctgtctcaagagacacagggcagcctgttccacagcccaaatcctattgtacattcccagacaagcacaacttcttctgaacagatgcaaccacctatgtttcactcccagtccacgatcgctgtgctccaggggtccagcgttccccaggatcagcagtctacaaatatcttcctgtcccagtcgccgatgaacaacctgcagactaatacggtggcccaagaggctttctttgccgctccgaattccattagcccactccagtccacatccaacagtgaacaacaggcagcgtttcaacaacaggcccctataagccatatccagacgccgatgctgagccaagagcaagcacagcccccacagcagggcctgttccagcctcaggtcgccttaggcagtttgccacctaacccaatgccacagtcccagcagggcacaatgtttcagtcccaacactccattgttgcgatgcagagcaactcacccagtcaggaacagcaacagcagcagcagcagcaacagcagcagcagcaacagcagcagcagtcaatactgttttctaaccaaaataccatggccacaatggcgtctcccaagcaaccaccccctaacatgatcttcaatccaaatcagaatcctatggcaaaccaagaacaacagaaccagagcattttccatcagcagtccaatatggctccaatgaatcaggagcagcagccaatgcagttccagtctcagtcaacggtgtctagcctccagaaccccggacccacccaaagtgagagcagccagacgcccttgttccactcttcacctcaaattcaactcgttcagggatccccgagctctcaagagcagcaagtcactctatttctttctcccgcatccatgtccgcccttcaaacgtctatcaatcagcaagacatgcaacaatcgcccttatactccccacagaacaacatgcccggtatacagggagcgacttctagtccccaacctcaagcaacgcttttccataataccgccggaggtaccatgaatcagctccagaactcaccagggagcagtcaacagacctcaggtatgttcctttttgggatacagaataattgttcacagttactcacatcgggcccagccactctacctgatcagctgatggccatttctcaacctgggcagcctcagaacgaaggacagccgcctgtgacaacacttctcagccagcagatgccagaaaactcacctctggcctcttcgataaacacgaaccagaacatagaaaagattgatcttctggtatccctgcagaaccaggggaacaacctcacaggttcttttta

SEQ ID NO: 29838 - DNA, 4646 bp, synthetic construct
  misc_feature 1..4646: note = Description of Artificial Sequence: Synthetic coding sequence
  source 1..4646: mol_type = other DNA
atgcccagcgatttcatctctctcttatctgcggatctggacctagagagcccgaaaagcctgtactccagggacagcctgaagctacacccaagtcagaactttcaccgggcagggctgctcgaagaatccgtgtatgatctgcttcccaaggagctgcagttacctccaagccgggagacatctgtggccagcatgtcccaaacctccgggggtgaagccggttccccaccccctgcagtcgtagcagcggatgcctccagtgccccaagcagctctagcatggggggtgcatgctcgtcatttacaaccagtagcagccccaccatatacagcacaagtgtgaccgactccaaagccatgcaggtggagtcctgttcttcagccgtgggcgtatccaatcgtggggttagcgagaagcagctgacgtctaacacagtccagcagcatcccagcacacctaaaaggcacactgtgctctacatttcccctcccccagaggacttgctcgacaattcaagaatgtcctgtcaggacgagggctgcggactggaaagcgaacagtcatgctccatgtggatggaggatagtccgtcgaatttctcgaacatgagcactagtagctataatgataatactgaagtcccacgtaaatccaggaagagaaacccaaaacaacgcccaggagtgaaacgtcgcgactgcgaggagagcaacatggacatcttcgatgcagacagtgcaaaggctcctcattatgtgctcagccagctgacaacagacaataaagggaacagcaaggccggtaacggaaccttggaaaaccagaaggggacgggcgtaaaaaagtctcctatgttgtgcggccagtacccagtgaagtccgaaggcaaagaattaaagatcgtcgtacaacccgagacccagcacagggcacgttatctgactgaggggtccagagggtctgtgaaagaccggacgcagcagggctttccgaccgtgaaactcgagggacacaacgagccagtggtcctccaggtcttcgttggtaacgattctggcagagtgaaaccacacggcttctatcaggcttgcagagtcacaggcaggaacaccactccctgcaaagaagttgacattgaggggactacagttatcgaggtgggcttggacccttctaacaacatgactctcgccgtcgattgtgtcggtatcctaaagttgcggaacgcagatgttgaagctcgaatcggaattgcaggctctaagaagaaatcaacacgcgcacgcctcgtcttccgcgtgaatataatgcgcaaggatggaagtactctcacattgcagaccccttcatcccccatattgtgcacgcagcccgcaggcgttccggagatcctcaagaagtcattacattcttgttcagtgaagggagaagaggaggtgttcctgattggaaaaaacttccttaagggcaccaaagtcatttttcaagagaacgtgagtgatgaaaattcgtggaagagcgaggccgaaatcgatatggaattattccaccagaaccatctgattgtgaaagtccctccctaccacgaccagcacatcactctgccagtttctgtaggcatctacgtcgtcaccaacgccggtcgctcccacgacgtgcagccctttacctacacccccgatccagccgctggcgctctgaacgtaaatgttaagaaggagatctcctctccggctcggccatgtagcttcgaagaggcgatgaaggctatgaaaactaccggctgtaatctcgacaaagttaacatcatcccgaatgctttaatgactcctctgatcccctcttctatgattaagtctgaggacgttactcctatggaggtgacagccgaaaagagatctagcactattttcaaaacgacaaagagcgtggggtccacgcagcagacactcgagaatatttctaacatagccggaaatgggtcctttagcagtccctcatcttctcatctacctagcgagaacgaaaaacagcaacagatccagccgaaagcatacaacccagaaacactgacaactattcagacacaagatatcagccagccaggaactttcccagccgtcagcgcctctagccaactgcccaattcagatgccctcctgcaacaggccactcagttccagacacgcgagacccagagccgggagatactccagtcagatggaacagtggtcaacttgtctcagctgactgaagccagccagcagcagcaacagtctcccctgcaagaacaggcgcaaacgctgcagcaacagatttcaagtaatatcttcccaagccctaactctgtgagtcagctgcagaacacaattcagcagttgcaggcaggttcatttactggcagcaccgcgagcggctcctccggcagcgtggatctcgtgcagcaggtgttggaggcccagcaacagctgtcatcagtgttattttccgccccagacggaaacgagaacgtacaagaacagcttagcgccgacattttccagcaagttagtcagattcagagtggtgtatccccgggaatgttcagctctaccgagcccacagttcatacccggccagacaacctgctgccaggtcgtgccgaatcagtgcacccccagtctgaaaacactcttagtaaccaacaacagcagcagcaacagcagcagcaggttatggagtcctctgctgccatggtgatggagatgcagcagagtatttgccaggccgctgctcagatccagagtgagctttttcccagcacagcaagcgctaacgggaatctgcaacaatcaccagtgtatcagcaaaccagccacatgatgagcgcgctgtctacaaatgaagatatgcagatgcaatgcgagctattctcatctcctcctgccgtgagcgggaatgagacctccaccacaaccacccagcaggtcgcgacccctggtactactatgtttcagacatcttccagcggtgacggcgaagaaaccggcacacaggctaagcagatccagaattctgtgtttcaaactatggtccaaatgcaacactctggcgacaaccagccccaggtgaaccttttctcaagtacgaaaagcatgatgtctgtgcaaaacagtggcactcaacagcaagggaatggcctgtttcagcagggcaacgaaatgatgagtctacagagcggcaatttcctgcagcagagctctcattcccaggcccagttattccatcctcaaaatcctatagccgacgcccaaaacctgtcccaggagacgcaaggaagtctttttcatagccctaatcccattgtacactctcagacctccaccacttcatctgagcagatgcaaccgcctatgttccatagccagtccactattgcggtgctccagggtagctctgtgccccaggaccagcaatccaccaatatcttcctcagtcagagtcccatgaacaacctacagaccaatacagtggcacaggaagccttctttgccgcacccaattcaatctcccccctgcaaagtacaagcaacagcgagcagcaggctgcctttcagcagcaggctccaatcagccacatccagacaccgatgctgtctcaagaacaagcccagccaccccagcaaggcctgtttcagccccaggtggcactggggtctttgccacctaatccaatgcctcaatcacagcagggcacaatgtttcagagccagcatagtatagtcgcaatgcagagcaattcacctagccaggagcagcagcagcagcaacagcagcagcagcagcaacaacagcaacagcagcagtcaattctcttttctaatcagaacacaatggctactatggcctccccgaaacagccacccccaaatatgatttttaatcctaaccagaatcctatggccaaccaggagcagcagaaccagtcaatctttcatcagcagagcaacatggcccctatgaatcaggaacagcagcccatgcagttccaatcgcagtcaacagtgagctctctgcaaaaccctgggcctacccagtcagagtcaagccagacacctctgtttcatagttctccccagatccagctggttcaaggatctccatcatcccaggagcaacaggttaccttgttcttgagccctgcctcaatgagcgcgctccagaccagtattaatcaacaagacatgcagcaatcccctctatactccccccagaacaatatgccgggaatccagggtgcaacttccagtccccaaccccaggccactttattccataacacggcgggtggtactatgaaccagttacaaaacagtcccggaagtagccagcaaacctctgggatgttcttgtttggcatccaaaacaactgctcacagctgctgacgtcgggccctgccactctgccagatcaattgatggctattagtcagccgggacagcctcaaaatgagggccagccgccagtgactacgctgctttcacagcagatgcccgaaaattcccctttagcaagctctatcaatactaaccaaaacattgagaagatcgatcttttagtgtcattgcagaaccaggggaataaccttaccggctccttcta

SEQ ID NO: 29839 - DNA, 4649 bp, synthetic construct
  misc_feature 1..4649: note = Description of Artificial Sequence: Synthetic coding sequence
  source 1..4649: mol_type = other DNA
atgccaagtgatttcatctctctgttatctgccgacctggacctggagagccccaagtcgttgtactccagagattctcttaagctgcatccttcgcaaaacttccacagggccggactattggaggagagtgtgtacgacttacttccaaaagagcttcaactgcccccatcacgggagacatctgtggcaagtatgagccagacctcgggcggagaggcaggaagcccccctcccgctgttgtagcagccgacgcctcttccgcaccttcctcctcgtccatggggggtgcgtgctcatccttcaccacctctagctcgccgacaatctactcaacgtccgtcacagactcaaaggcaatgcaggttgaatcctgtagtagtgcagtaggggttagcaatagaggtgtctctgaaaagcagttaaccagtaacacagtacagcagcatcctagcactcccaagaggcacacggtactgtacatctccccaccgcctgaggacttgctcgataattcgcggatgtcctgccaagatgagggctgtggactggagtcggagcaaagctgttcaatgtggatggaggattccccctcgaattttagtaacatgtcgactagttcatacaacgacaataccgaggtgccacggaagagtagaaagagaaatcccaaacagcgaccaggtgtgaagagacgagactgtgaggaatcaaacatggacatctttgacgccgattctgctaaagcgcctcattatgtcctttcacaactgactacggataataaaggaaattcaaaggccggaaatgggaccctcgaaaaccaaaaaggcacgggcgtcaaaaaatcacccatgttatgtggccaatacccggtgaagagcgaaggcaaagagctcaagatagttgtgcagcccgagacacagcatagggcacggtatctgaccgaaggcagccggggatctgttaaagatagaactcagcaaggctttcccactgtcaagcttgaggggcacaacgagcccgttgtgttacaggtattcgtcggcaacgactctggaagagttaaaccccatgggttttaccaggcttgccgtgtgaccggccgtaataccactccttgcaaagaagtggacatagagggaactacggtgattgaggtggggctggacccttctaataacatgacactcgcagtggattgcgtcgggattctgaaactgcgcaacgctgatgtggaggctcgcataggcattgctggttcaaaaaagaagtctacccgagcgcgactggttttccgtgttaacattatgagaaaagatggttccaccctaaccctccaaacaccatcatcccctatattatgtacccagcctgctggtgtgccagaaattctgaagaaatccttgcactcctgctccgtgaaaggagaggaggaagtcttcctgattggtaaaaatttcctgaagggaaccaaggtgatatttcaggagaatgtaagcgacgagaattcgtggaagagtgaggcagaaatcgacatggagttattccaccagaatcatttaattgtgaaagtgccgccttatcacgatcagcatataactctgccggtaagcgtgggaatctacgtcgtaacgaacgccggacgctcgcatgatgtccaaccatttacatacacacccgatccggctgcggcaggagccctcaacgtgaacgtgaagaaagagatctcatcccccgcaaggccgtgttcattcgaagaggccatgaaggccatgaaaacaactgggtgcaacttagacaaggtgaacatcatcccgaacgcactgatgacaccactgattccttccagcatgattaaatctgaggatgtcacgccaatggaagtgactgctgagaagcgttcctccacaatctttaaaaccacgaaatctgtgggcagtacgcaacagactctagagaacatttccaatatcgcagggaatggatctttttcctcgccttcatcgagccatctgccttccgaaaacgaaaaacagcagcagatccaacctaaagcttataatccagaaacgcttactacaattcagacccaggacatttcgcagcccggaaccttccccgctgtgagtgcctcaagccagcttcccaatagcgatgcgttacttcagcaggctactcagttccagactagagaaacacagagtagggaaattctccagtcagatggaacggtcgtcaacctcagccagttgacagaggcatcgcagcaacagcagcagtctcccctccaagagcaggcgcagaccctgcaacagcagataagctccaatatatttccctctcctaactctgtttcgcagctccaaaatactatccagcagttgcaagccggaagcttcacagggagcaccgcctctggctcaagtggcagtgtggacctagttcagcaggttcttgaggcccagcagcagctcagcagtgtgctgttctcagccccagatgggaacgagaacgtgcaggagcagctctctgccgatatcttccaacaagtctctcagatacagagcggtgtgtcgccaggcatgttctcttccaccgaacccacggtgcatacccggcctgataatcttctgcctgggcgagccgaatcagtgcaccctcaatcagagaataccctgtccaatcagcagcagcagcagcagcagcaacaacaggtcatggagagttccgctgccatggtgatggagatgcagcagtcaatttgtcaggctgctgcccagatccagtcggaactgttcccctcaacagccagtgcaaatggtaatctgcagcagtctcctgtgtatcaacagactagccatatgatgtctgcactctctacaaacgaggacatgcagatgcagtgcgaactattctctagcccaccagccgtttcgggaaatgaaacatcaacaaccaccacacagcaagtggcaacgcctggcaccacaatgttccagacaagctcatccggggacggcgaagagacaggcacgcaggcaaaacagatccagaatagtgttttccagactatggtgcagatgcagcattcaggagataatcaaccgcaggtgaatctcttttcgagcaccaaatccatgatgtcagttcagaatagcggcacgcaacagcaaggaaacggccttttccagcagggcaacgaaatgatgtctctccagtccggaaacttcctgcagcagtcgtcacatagccaggcacagcttttccacccccagaaccctatcgccgacgcccagaacttgtcccaggagactcaaggatctctgttccacagccccaacccaatagtacatagtcagactagcaccacctctagtgaacagatgcagccacctatgttccattcacaaagtactattgcagtcttgcagggatccagcgtcccacaagaccaacaatcaaccaacatcttcctctctcagtcccccatgaacaacctgcagacaaataccgtggcgcaggaggcatttttcgctgctccaaattccatttcaccactacagtctaccagcaactcagagcagcaggcagccttccagcagcaagccccaatcagccacatccagacgccgatgctgtcacaggagcaggcgcagcctccacagcaaggattattccagccccaggtcgcactggggagcctgccacctaacccgatgccgcagagccagcaggggactatgtttcaaagccagcatagcatcgttgctatgcagtccaattcacccagtcaagagcagcagcagcagcaacagcaacaacagcagcagcagcagcagcagcagcagagcatcctcttctctaaccagaacacgatggctacaatggcctctcccaagcaacctccccctaacatgatctttaaccccaaccagaatccaatggccaaccaggagcagcagaaccagagcatttttcatcagcaaagcaatatggcgcctatgaatcaggagcagcaaccaatgcagtttcagtcgcagtcaacggtgtcctctctgcaaaacccgggacccactcaatcagagtcctcccagaccccactgttccatagctctccacagatacaacttgtccaggggagtccgtccagccaagagcaacaggttaccctcttcctgagccccgcaagtatgagtgcccttcagactagtattaatcagcaggatatgcagcagtcacctctatattccccccagaacaatatgcctgggatccagggagcaacaagctccccccagccacaggctactttgtttcataacacagcgggaggcactatgaatcagctccagaacagccccggttcatcccaacagacaagcggcatgttcctcttcggcattcagaacaactgtagccagctgctcacgtccggtccggcaacattgccagaccagctgatggcgatctctcagcccggacagccccaaaatgaagggcaacctccagttacgacactgctgagtcagcagatgcctgagaattccccactggcgagttcaatcaacaccaaccaaaacatcgagaaaatcgacttgctggtgtcgcttcagaaccagggcaataatcttaccggaagttttta

SEQ ID NO: 29840 - DNA, 2151 bp, synthetic construct
  misc_feature 1..2151: note = Description of Artificial Sequence: Synthetic coding sequence
  source 1..2151: mol_type = other DNA
atgccttctacatcctttccggtgccatctaagttcccccttgggcctgctgcagccgtcttcggccgaggcgaaactctgggccctgcgcctagagctgggggaaccatgaagtcagccgaggaggaacactatggttatgcctcgtcaaacgtcagcccagccctgcctttaccaacagctcactcaacgttgccagccccttgccataatctccagacttctacacctggtataatccctcccgcagaccacccatcaggttacggagccgctctcgacggcggaccagcagggtactttctgtcctctggccatacccgacctgacggcgctcctgctcttgaatctccgagaattgagattacatcatgtctgggactctaccacaacaacaaccaattcttccatgacgtggaggttgaagacgtgcttccctctagcaaacgtagtccctccacagccacacttagcctaccatccctcgaggcctaccgcgacccgtcctgtctgtcccccgcaagctcactctccagccgaagctgcaactcagaggcctctagctacgagtctaattattcttacccctacgcgtcccctcagactagcccctggcaatctccttgcgtatctccaaaaaccaccgatcctgaggagggtttcccaagaggactgggtgcttgtacactcctgggttccccccgtcatagcccctctaccagccctcgcgcttcagtgacggaagagtcctggctcggggcacggtccagcagacctgccagcccctgtaacaagcggaaatacagcctcaacgggagacaacctccatactcgccacaccactcaccaactccttctccacatggcagcccccgtgtgtcagtgactgacgatagttggttaggcaatacaactcagtatacgagctccgctattgtcgccgcaatcaacgcattaactaccgattccagcctcgaccttggagacggtgtgcccgtgaaatctaggaaaaccacactggaacagccccctagcgtagctttgaaggttgaaccagtgggtgaagacctaggttcgcccccaccacctgccgactttgctcctgaggactactctagtttccaacacatccggaaggggggattctgtgatcaatacctagctgtgcctcaacatccctaccaatgggccaagcccaaaccactcagcccaacaagttacatgagccccactcttcctgcactggactggcagctgccctcgcactccggcccatacgagctccgcatcgaagtccagcccaaaagtcaccatcgagctcactatgagacagagggttctagaggcgctgtgaaggcaagtgcaggtggtcatccgattgtacagttgcacggttatctcgagaacgaaccgcttatgctgcagctgttcatcggcactgcagatgacagactgctaagaccacacgcattttaccaggtgcatcggataacggggaagaccgtctccactacatcccatgaagcgatcctgtctaacaccaaggtgctcgagatccctttactccccgaaaatagtatgcgggctgtaatcgattgcgctggaatactgaagctccgcaatagtgatattgaactacgtaaaggggagaccgacatcgggagaaagaacacccgtgtgcgcctggtgttccgggtgcatgtgcctcagcccagtggccgtacattatctctccaggttgcttccaaccctattgaatgctctcagagaagtgcccaggagctccctctcgttgagaagcagtcaaccgactcttaccctgttgtgggaggcaaaaagatggtgctttccgggcataacttcctacaggactccaaagtgattttcgtggaaaaagctcctgacgggcaccacgtgtgggaaatggaagccaaaaccgatcgagacctgtgcaaaccaaacagtttggtcgttgagatcccccctttccgcaaccagcgcattacatctcccgtccacgtgagcttttatgtgtgtaatggcaaaagaaaaagatcccagtatcagcggtttacttacctcccagccaatggtaacgccatttttctcaccgtgtcgagggagcacgaacgtgtcggatgctttttctag

SEQ ID NO: 29841 - DNA, 2478 bp, synthetic construct
  misc_feature 1..2478: note = Description of Artificial Sequence: Synthetic coding sequence
  source 1..2478: mol_type = other DNA
atgccttccaccagctttccagttccctctaagttccctcttggacctgccgctgctgtcttcgggcgtggcgaaacgctggggcctgccccacgggcaggcggtactatgaagtcggccgaagaggaacactacggctatgcttcttccaatgtctcacctgctctgccattgcccaccgcccattccactcttcccgctccttgccacaacctgcagacatccacaccaggcatcattcctcccgctgaccacccttcggggtacggcgctgccttagacggagggcctgcgggttacttcctctccagcgggcatacccggccagacggtgcaccagccctggaaagtcctaggatcgaaattactagctgcctgggtctttaccacaataacaaccagttctttcatgatgttgaagtggaagacgtgctaccatcatccaaaaggtctccctccacggccaccctaagccttccatccctagaggcttatcgggacccttcttgtctcagccccgcaagcagtcttagctctaggagttgtaatagcgaagcgtcttcttacgaaagcaattattcgtacccttacgcctcaccccagacttctccctggcagagcccttgcgtgagtcccaagacaaccgaccctgaagagggcttccctagaggtttaggtgcatgcactctcctgggatctccccgacactctccctctacatcacctcgggcttcagtaacggaggaaagctggctgggcgctagatctagcagacccgcaagcccctgtaacaaacgtaagtattcgctcaatggccgtcagcctccgtactccccgcaccatagtccgacaccttcaccgcacgggagccccagggtgtcggtcacagatgactcctggctgggaaacactacacaatatacttcctctgccatcgtagctgctattaacgccctgacgacagatagctcgttggatctcggagatggagtcccagtcaaatcccgcaagacgaccctggaacagccaccctctgtcgccctgaaggtggaacctgtaggcgaggatttgggaagcccccctccacccgcagattttgcaccagaagactattcctcatttcagcacattaggaaagggggtttttgtgaccaatatctggcagtgcctcaacacccctaccagtgggcaaagcccaagcctctgtctccaacctcatatatgtctccgactctccccgctctggactggcagttgcccagccattctggcccatatgagctcagaatcgaagtccagcccaagtcgcaccatagggcccactacgaaaccgagggttcgcggggagccgtgaaagcaagcgccggtggccaccctatcgtgcagctgcatggttacctcgagaatgaacccctgatgctccagcttttcatcggaactgcagatgacaggcttctgagacctcacgcattctatcaggtccatcgaatcactggaaaaactgtcagcacaacctcccacgaagcgatcctatctaacaccaaagtcctggaaatccccctgcttccggagaatagtatgagggctgtgatagattgtgctgggattctaaagctgaggaacagcgacattgagcttcgaaagggagagacagatatcgggaggaagaacacacgtgtgagactggtgttccgcgttcatgtaccccaaccaagcggccgaacgctaagcttgcaggtggcatcaaatcctatcgagtgcagtcaaagatctgcacaggaactcccactcgtcgaaaaacagtctactgactcataccctgttgtggggggtaagaagatggttctgagtggacacaactttctccaggatagtaaggtgattttcgtggagaaggctcctgatgggcatcacgtttgggaaatggaggccaaaacggaccgggacttgtgcaaacccaattctctggtggtggagatccccccatttaggaaccagcgaattacatcaccagtccatgtctcattctatgtttgcaacggaaagagaaagcgctctcagtaccagcggttcacatatctgccagctaatgtaccaataatcaagactgagccaaccgatgattatgaaccggcaccgacatgcggaccagtcagtcagggactgtcccctctgcccagaccgtactattcgcagcagctggccatgccgcctgatccaagttcctgcctggtcgcagggttccccccttgtccccagcgatcaacgctgatgccggctgcccctggagttagtcctaagctccatgacctgagccctgccgcttatactaagggtgttgcctcacctggccattgccacctgggcctgccacaaccagcaggcgaggcaccggctgtgcaggatgttcccaggcctgtcgccacgcacccaggctccccgggacagccacctcccgctctgctgccccagcagtag

SEQ ID NO: 29842 - DNA, 2832 bp, synthetic construct
  misc_feature 1..2832: note = Description of Artificial Sequence: Synthetic coding sequence
  source 1..2832: mol_type = other DNA
atgcctagcacttctttccctgtgccttccaaattccccctcggccctgctgctgccgtgttcgggagaggggaaaccctgggacccgcacccagagctgggggtactatgaagagcgcagaagaggaacactacggttatgcaagcagtaatgtaagcccagctttgcccctgcctactgcccactccacgctccccgcaccttgtcacaaccttcaaacttccacccccggtatcattccgcctgccgatcatccctccggctatggcgctgcactggatgggggacccgcaggatatttcttgtcaagtggacacaccaggcctgacggagcccctgcattggaaagcccaagaattgagatcacgtcttgcctcgggctctaccacaacaacaatcaattcttccatgacgtggaggttgaggatgtccttccgtcctccaagcggtctcctagtacggccaccctcagcctgccatccctcgaggcatatcgagatccgagctgcctatcacctgcgtcctccctttcaagcaggagttgcaatagcgaggcctcttcttatgaatctaattatagttatccctatgcctctccgcagaccagcccctggcaatctccctgtgtgagtcccaaaaccaccgatccagaagagggtttccctagagggttaggggcttgtaccctcttagggagccctcgacactctccatccacctctcctcgtgcctccgtgaccgaggagtcctggctgggtgccagatccagcaggcccgcaagcccttgcaacaagcgtaagtacagcctgaatgggaggcagcccccttacagcccgcatcatagtcctactccctcaccccacggaagtcctcgagtctcagttactgacgacagctggctgggcaacacaacccagtacacaagctcagcaatcgttgccgcaattaacgccctgacaactgactcaagcctggatctgggcgacggcgtccctgtcaagagcagaaagaccactctcgagcaaccgccatcggtcgctcttaaagtagagccagtgggcgaggatttgggctcaccccctccaccagcggactttgcccctgaagactatagcagcttccagcacatccgcaaaggaggtttctgtgaccagtatctggccgtgccccagcacccttatcagtgggcaaagccgaagccactcagtccaacctcttacatgtctcctactctgccagctctggattggcagctgccctcgcactccggtccttatgagcttcgcatcgaagtccaaccgaagtctcatcatcgtgctcattacgagacagaggggtcgcgaggggctgtcaaagccagtgctggtggccatccaatagtgcagctgcatggctaccttgagaacgaacctttgatgctccagctgtttattggcacagcagatgataggctgctgcgtccccatgccttttaccaggtccataggattactggcaaaactgtgagtactacctctcatgaggccattttgagtaacacaaaggtgctggagattcctctgcttcccgaaaactcaatgcgtgctgtcattgattgcgccggaattctaaaactgagaaattctgatattgaattgaggaagggtgagaccgatatcgggagaaagaacacacgggttaggcttgtgtttcgggtgcatgtgcctcagccctcaggacgcactctctcattacaggtggcttctaaccccatcgagtgttctcaaagatctgctcaggaattgcccctagtcgagaagcagtccaccgactcctatcctgtggtgggtggtaagaagatggtattgtcaggacataacttcctccaagattccaaggtgatcttcgtggaaaaggctcccgatgggcatcacgtctgggaaatggaagctaaaacagatagagacctctgtaagccaaactcactggttgtagagatccctcctttcagaaatcagcgcataacaagccccgtgcacgtctccttctacgtgtgcaatggcaagcgtaagcgcagccagtaccagcggtttacttacctcccagcaaatgttccaataatcaagaccgaaccaacagacgactacgagcccgctcctacttgcggacctgtgtcccaagggctaagccccctgcccaggccctactactctcagcagctggctatgcctcctgatccttcttcttgcctggtggctggcttccccccatgtcctcagagaagtaccttgatgccagcagcccctggggtttcccccaagctacacgacctttctcccgcagcctacacgaagggcgtggcctccccaggacactgtcacctagggttgcctcaacctgctggggaagctcccgctgtgcaggacgttcccaggcccgtcgcaacgcaccctgggagtcccggtcagcccccacccgcacttctgccccagcaggtgtccgctcccccatccagcagctgtccgccaggactcgaacactctctgtgcccgtccagcccatcccctccactgccccctgccacacaggagcctacctgcctgcagccttgttcacctgcatgccctcctgctaccgggaggcctcagcatctccctagcacggttcgcagagacgagtcacccacggcaggccctagactgttgcccgaggttcacgaagacggcagcccaaatcttgcccctatccctgtaacagtgaaaagagaaccagaagagctcgaccagctctatctggatgatgtcaatgagatcatcaggaacgatctttcctcgacctctacccatagctag

SEQ ID NO: 29843 - DNA, 2793 bp, synthetic construct
  misc_feature 1..2793: note = Description of Artificial Sequence: Synthetic coding sequence
  source 1..2793: mol_type = other DNA
atgaccgggctggaggatcaggaatttgatttcgagtttctgttcgaattcaaccagcgcgacgaaggcgctgcagcagcagcccctgagcactacggttacgccagctccaacgtgtcccccgctctgccactgccaacagcccatagcacattgcctgctccatgtcacaacctacaaacatcaacgcctggtatcatccccccagctgatcatcctagtggctatggggctgcactggatggcggtcctgcgggttatttcctcagctctgggcacacgcggcctgacggagccccagccctcgaaagcccgcgtattgagattacaagttgcctgggactttaccataataacaaccagttttttcacgatgtggaagtcgaggacgtgctgccgtcatccaagaggagcccatccaccgctacgttatcccttccctccctggaggcctatagggacccctcatgtctgtcgcccgctagtagcctgagcagtagatcatgcaattctgaggcctcatcctatgagagcaactacagttacccctacgcgtcaccgcagacatcgccctggcagtcaccatgtgtctcccctaagactactgaccccgaggaaggcttcccgcgaggccttggtgcgtgcacattgctgggaagtcccagacactccccatcgacctctcctagagccagcgttactgaggagtcttggctcggcgcacgctcctcccggcctgcctccccgtgtaataagcgaaaatattccctgaatggtcggcagcccccttacagccctcatcacagccctactcctagccctcatggcagccctagagtctccgtcactgacgatagctggctcggtaacaccactcagtacacctctagcgctattgtggcggctatcaacgctttaaccactgattcttctctggacctcggcgatggagtgcccgtgaagagccgcaagacgaccctggagcagcctccttcggttgctctgaaagtggagccagtgggagaggatcttgggtcgccaccacctcctgcggatttcgcgccagaagactactcctcattccaacacatacgaaagggtggtttctgcgaccaatacctcgcggtaccacagcatccctaccagtgggcaaaaccaaagcccttgtctccaaccagctatatgtctcccaccttacccgcactggactggcagcttccctcacactcgggcccatacgagctccgcatcgaagtgcagcctaaaagtcaccacagagctcattacgagactgagggatcacgcggagcagtgaaggcctccgcagggggacaccctattgtgcagttgcacggatatctcgagaacgaacccttaatgctccagctttttatcggcaccgccgacgataggcttctgcgacctcacgccttttaccaagtgcatagaatcactggcaagaccgtcagcactacttcccacgaggctatactcagcaatacgaaggttctcgaaattcctctgcttcctgagaattcaatgagagccgttattgactgtgcagggattcttaaactgagaaattctgatattgagctcaggaagggcgagacggatatcggcaggaagaacaccagggtccgtctagttttcagggttcatgtcccccaaccatctggacggactctctcactgcaggtcgcctccaaccctatagagtgtagtcaacggagcgctcaggagctgcctctggtggagaagcaatctacggattcttaccctgtcgtgggaggcaagaaaatggtgttgtctggccacaactttctgcaggacagcaaggtgatcttcgtcgagaaggccccagacggccaccacgtttgggagatggaagctaaaaccgatagggacctctgcaaaccaaactccctggtcgtcgaaatccctccttttagaaaccagcggatcactagccccgttcacgtgtcattctacgtctgcaacggaaaaagaaagcgatcccagtaccaaagatttacctatctccctgccaacgtgcctatcatcaaaaccgagcctactgacgattatgagcctgccccaacctgcggaccggtgtcacaggggctctcaccattacctcggccttattattcccaacaattggctatgcctccagacccgtcaagctgcctggtggccggttttcccccttgtccacagagaagtacgcttatgccagctgcgcctggggtgtcccctaaactgcacgatctgtctcctgcagcctataccaagggcgtggcctctccgggacactgccacctgggtctccctcagcccgcaggcgaggcgccagccgtacaggacgtgccccgaccagtggctacccaccctggctcaccagggcaaccccctcctgctttgctgccccagcaagtctctgccccacccagcagcagctgtcctccagggctcgaacatagtctgtgcccctcatcaccgagtcccccattgccacctgccacgcaggagcccacctgtttgcagccttgttccccagcctgtcccccagcgaccggcaggcctcaacatttaccttcaacagtgaggcgcgacgagtctcctactgctggccctcgcctgctccccgaagttcatgaggatggctctccgaatctggcccctatccctgttaccgtgaagcgggaacctgaggagctagatcagctttacctggacgacgtgaacgaaatcataagaaatgacctgtcgtcgaccagcacccatagctag

SEQ ID NO: 29844 - DNA, 1062 bp, synthetic construct
  misc_feature 1..1062: note = Description of Artificial Sequence: Synthetic coding sequence
  source 1..1062: mol_type = other DNA
atgctgcagctgttcattggtaccgccgacgaccggctccttaggcctcatgccttctaccaggttcatcggattaccgggaaaactgtcagtaccacatcccatgaggcaatcttgtctaacacgaaggtacttgaaatcccactgctgccagaaaacagcatgagagctgtgatcgattgcgccggaatcctgaagctgcgaaactcagacatagagctgcggaaaggcgagacggacatagggagaaagaatactagagtgcggcttgtgttccgcgtccacgttccccagcccagtggcagaaccttgagtctccaagtcgccagtaatcccatcgagtgctctcaacgaagcgcccaggagttgccccttgtggaaaagcagtcaacagacagctaccctgtggtcggcggtaaaaaaatggtcctgagtgggcacaattttctccaggacagcaaggtgatatttgtggagaaagcccctgacgggcaccatgtgtgggagatggaagctaaaactgatcgcgacctatgtaagcccaacagcctggttgtggaaattcctccattccgcaaccagagaattacgtcacccgtgcacgtctccttttacgtttgtaatggcaagcgaaagcggtctcaataccaacgattcacatatcttcctgccaatgtgccaattattaaaaccgagcccacagatgattatgaacccgctcccacatgcggccctgtgagtcagggcctctcaccgctgccaaggccctattacagccaacaacttgccatgcctccagatccaagctcctgtctggttgcgggatttcccccatgccctcagcgaagcacacttatgcccgcagcacccggtgtgagccccaaattgcatgacctgagtcccgctgcctacaccaagggtgtggcctcccctggacactgccacctgggactgccacagccagccggagaagcacctgcagtgcaggacgtgcccaggcctgtcgctacccacccgggtagcccaggacagcctcccccagccttgctgccgcagcagtag

SEQ ID NO: 29845 - DNA, 2724 bp, synthetic construct
  misc_feature 1..2724: note = Description of Artificial Sequence: Synthetic coding sequence
  source 1..2724: mol_type = other DNA
atgaagagcgggactctggagcactacggatatgcatcaagcaacgtgagccctgcactccccctccccaccgcacacagcactctccccgcaccttgccacaatcttcagacaagtacacccggaataatcccccctgccgaccacccatctggttatggcgctgccctggacggcggtcctgccggatactttttaagctctggccataccagaccagatggggctcccgcattggagtctccacgcatcgaaatcacaagctgcctggggctttatcataacaataatcagttctttcatgacgttgaggttgaagacgtgcttccctccagtaagcgatcaccatcaacagcaacacttagcctaccctccctggaggcctatcgcgatccctcctgtctgtcccctgccagctcactatcttctcggtcatgtaactctgaagctagcagttacgagtccaactatagctacccctacgccagccctcagacaagtccctggcagtcaccctgtgtatctcctaaaaccactgacccagaggaggggttccctagagggctaggggcttgcactcttctgggcagccccagacattccccgtcaacatcccccagagccagtgtgactgaggaatcttggcttggtgcacggtccagcagaccagcttccccctgcaataaaaggaagtatagtctcaacggcaggcagcctccttactcccctcaccacagtcctaccccaagcccccatggatcccctcgcgtgtcagtgacagacgatagttggctcggtaacaccacacagtatacatctagtgccatcgtcgcagcaatcaacgctttgactaccgacagtagtctggatctcggggacggtgtgcccgtgaaatctcgcaagacgactctggagcagcctccctccgtggcccttaaagtcgagcctgtaggtgaggacctcggaagccccccacctcctgccgactttgcgcctgaggattattccagtttccagcacatacgcaagggtggcttctgtgaccagtaccttgcggttcctcagcacccctaccagtgggcaaagccaaaacccttgagccccactagctacatgagccccactttaccagctcttgattggcagctgccctcccacagcggaccctacgagctccgcattgaggttcagccaaagagccaccacagggcccattacgaaacagaaggcagtcgaggcgctgtcaaagcgtctgctggcggtcatcccattgtgcagctgcacgggtacctggagaacgagcccttgatgctgcagctctttattggcacggccgatgataggctcctccgccctcacgcgttttatcaggtgcaccggatcaccggcaagaccgtaagtaccacttcacatgaagccattctcagcaacacaaaagtattggagatccccctgctgcctgagaatagcatgcgggcagtgattgattgcgcgggaatactcaaactgaggaattccgacatcgaactgcggaagggcgagactgatattggaaggaagaatacaagagtgaggcttgtgttccgagtccatgtaccccagccgagcggaaggaccctcagcctacaagtagcatccaaccccatcgagtgctcgcaacggtctgctcaggaactcccgctagtagaaaaacagagcactgactcatatcctgtggtgggcggaaagaaaatggtgctgtccggccacaacttcctgcaagactccaaggtgatcttcgtggaaaaggcaccagacggccatcacgtctgggagatggaggcaaagactgatagagacctgtgcaaaccaaatagtcttgtagttgagattccacccttccgcaaccagaggataacatctccagtgcatgtatcgttttatgtctgcaatgggaaacgtaagagaagccaatatcagcgattcacctacttgcctgcgaacgtgcctattattaaaaccgagcccaccgacgattacgaacctgcccctacatgcggccctgtctctcagggcctgagtcccttgccccgaccatactacagtcaacagctggctatgcctcccgaccccagctcttgtctggtagctggcttcccaccgtgtccccagaggtccactctcatgccagccgctcctggagtttctccaaaattacatgatctgtcacctgccgcatacactaagggagttgcctcccctggtcactgccacttgggactgccgcagccggcaggggaggctcctgccgtgcaggatgtgcctcgcccagtagcaacgcacccgggttctccaggacagcctccaccagcactgcttcctcagcaggtctcagcacccccttcttccagctgtcctccgggacttgagcacagcctatgtccaagcagcccatcacctccactgcccccagcaacccaagaacccacttgcctccagccatgtagtcctgcctgtcccccagctacaggcagacctcagcatctcccctctaccgtcaggagggatgagtctcccacagccggtccgaggctgctgccagaagtgcatgaagacggctcaccaaacttggcacccattcctgtgactgtgaaaagagagccggaggaactcgatcagctgtatctcgatgacgtgaatgagataatacgtaatgatctgagcagtaccagtacacattcatag

SEQ ID NO: 29846 - DNA, 2745 bp, synthetic construct
  misc_feature 1..2745: note = Description of Artificial Sequence: Synthetic coding sequence
  source 1..2745: mol_type = other DNA
atgaccgggctggaggaccaggagttcgattttgagtttctgtttgagtttaaccagagagacgaaggtgctgccgctgctgcgccagagcactatgggtacgcctctagcaacgtgagccccgctctgcccttgccaactgcccattctacactgcctgcgccatgccacaacctgcaaacatccacgcctggcatcattcctcctgccgatcatccatcaggatatggagctgctctggacgggggacctgctggttactttctgtccagtgggcacactcggccagatggggctcccgctctggagagtcctcgaatcgaaatcacttcatgtctgggcctgtaccataataataaccaattcttccacgatgtcgaggtggaagacgtgcttcctagtagcaagaggtcccccagtacagctacactgtccctgcctagcctcgaggcctacagggacccctcatgtttatccccagcttctagtctgagctcacgctcttgcaacagtgaagcaagctcctacgagagcaattatagctacccctacgcatctccccagacatccccatggcaatctccatgcgtgtccccaaagacaaccgatcccgaagaggggtttccaagggggctgggagcctgcaccttgctggggagtcccaggcatagccctagcacatcccctagggccagtgttacagaggaatcttggctgggcgctagaagcagccggccagcttctccgtgcaataaacgtaaatactcgctgaacggcagacaaccgccatattccccccatcattctcccacaccctctccccacgggagtccacgggtgagtgtgactgatgacagttggttgggcaatacaacccagtatacaagttcggcaattgtggcagctattaacgccctgacaacagattcgtctttggatctcggagacggggtacccgtgaaatctagaaaaacgactcttgagcaaccgccatccgtagctctcaaggtggaaccagttggcgaggaccttgggtccccccctcctccagccgattttgctccagaagactatagcagttttcagcatatccgtaaaggcggattctgtgaccagtacctggccgtgccacagcatccttatcaatgggctaagccaaagcctcttagccctacctcttacatgagccccacactgccagcgctggactggcagttgccatcgcactccggtccatacgaactgcggattgaggtgcagccgaagagccaccacagagctcactatgaaaccgagggtagtaggggtgccgtcaaggcttctgcaggcggtcacccaatcgtgcaacttcacggctacctggaaaacgagccccttatgctacagctcttcattggaaccgctgatgaccgccttctccgcccacacgctttctatcaggtccatagaattacagggaaaacagtgagtactaccagccatgaagctatcctatccaatactaaggtactggaaattccccttctgcccgagaatagcatgcgtgcagtcattgattgcgcaggcattctgaagctcaggaatagcgatatcgagctgcgcaaaggcgagactgatatcggtagaaagaatacccgggtcagattagtcttccgagtacacgtgcctcagccaagcggcagaacgctgtcacttcaggtcgctagtaatcctattgagtgctcccagagatctgcacaggagttgcctcttgtggagaagcagtccaccgattcatacccagtagtgggtggcaagaaaatggtcctctctggccacaactttttgcaggacagtaaagtgattttcgtcgagaaagccccagacgggcatcacgtctgggagatggaagccaaaactgatcgggacctgtgcaaacccaattcgctggtggtggagattcctcccttcagaaatcagcggatcacttcaccggtgcacgtgagtttttacgtctgcaatggtaaacgcaaacgttcacagtatcagcgttttacctacctgccagctaatgtccctattataaaaactgagcccaccgatgattatgagcccgctcccacatgcggcccagtctcacagggattgtcacctttaccccgaccctactacagtcagcaacttgcgatgccccctgacccgtcaagctgtcttgtcgccggtttccctccctgccctcagcggtctactctgatgcctgcagcgccaggagtgagtccaaagctgcatgatctcagccctgccgcatacacgaaaggagtggcatctcctgggcactgccacctcggattgccacaaccagcaggcgaagccccagccgtgcaggatgtgcctcgcccagtggctacacatcccggatcgcctggtcagccgccaccagccctgctgccacagcaggtctccgcgcctccaagtagcagttgcccacctggcctggaacactcattgtgtcccagttctccatcaccacccctgcctcctgcaacccaggagcccacatgcctgcagccgtgctcccccgcatgccctcccgctacggggaggccccagcatctgccgtcaactgttcggagagatgaaagcccgaccgccggacctcgcctgctccccgaggtgcatgaggatgggtctcctaacctggcaccaatacccgtaaccgttaaaagagagcctgaggagctcgaccaactgtatttggacgactag

SEQ ID NO: 29847 - DNA, 2142 bp, synthetic construct
  misc_feature 1..2142: note = Description of Artificial Sequence: Synthetic coding sequence
  source 1..2142: mol_type = other DNA
atgccgtctacatccttccctgtgccaagtaaatttcctctgggcccagccgctgctgtgtttgggagaggtgagacgttgggacccgcacctagggccggaggcactatgaagtcagctgaggaagaacactatggctacgcttcctctaacgtgtctcccgctctccctctgccaaccgctcattctactctgccagccccatgccacaacctgcaaacttccacgccaggaatcattcctcctgctgaccatccatcaggatacggagcagcccttgacggaggcccagccggatacttcctgagctccggtcatacccgacctgacggtgcacctgcgctcgaaagtcctcgaattgagattacctcatgtctgggcttgtaccataacaataaccagttctttcacgatgtagaagtggaagatgtgctgcccagctctaagcggagtccctcaacggctaccttgtcactgccatccctagaggcctaccgagatcccagctgtctgtctccagcttcatcgctgtccagccgctcatgtaattcagaggcaagttcctacgagtcaaattactcttatccgtacgcaagtcctcagacatccccctggcagtcaccatgtgtgtctccaaagacaactgatcctgaggagggttttccacggggactgggggcttgcaccctgcttgggtcccccagacatagcccatcgaccagcccccgagcttcagttacggaagaatcttggctcggagcgcgaagttcccggcctgcctccccctgtaacaagagaaaatacagcctgaatggaaggcagcctccgtactcaccgcaccacagccctaccccgtccccgcatggctctccccgtgtgtcagtgacagatgattcctggttaggaaacaccacccaatatacaagtagcgccatcgtggcggcaataaatgccttgacgaccgactcttcattggacctgggcgacggagtgcccgtcaaatcaaggaagacgaccctggagcagccaccttctgttgcactgaaagttgaaccagtaggcgaagatctggggtccccgccaccacctgccgacttcgctcctgaagattattccagtttccagcatataaggaaaggcggattttgcgaccagtaccttgctgtcccacagcatccatatcagtgggcgaagccaaagccattgtcccccacttcgtacatgtctcctaccctacccgcactggactggcaactgcccagccattcaggtccatatgagctgcgtatcgaggtccagcctaaatctcaccacagagcccactatgagactgaaggttccaggggcgcagttaaggcctcggccggtggacaccccattgtgcagcttcatgggtacttagaaaatgagcccctgatgctgcagttgtttatcggaaccgccgacgatcgtttactgcggccacatgctttttatcaggtccacagaattactggtaaaactgtgtccacgacctcccacgaggccatactttccaacaccaaggttcttgaaatcccactgctgccagagaactctatgcgcgctgtaatcgactgtgccggtattctaaagctgcgaaactccgacattgagctcagaaagggggagactgacatcgggaggaaaaacacaagggtgcgcctggtgtttcgagtacatgttccacagccctccgggagaacgttgagcttacaggtggcctcaaacccaatcgagtgctcacagaggtcggcccaagaacttcctttggtggaaaagcagtcaaccgactcatatcccgtggtcggcggtaagaagatggtgctgtcagggcacaactttttgcaggacagcaaagtgatttttgtggagaaggctcctgacggccaccacgtatgggagatggaagcaaagactgaccgggacctatgtaagcccaactccttggtcgtggagatccctccgttccgaaaccaacgcatcactagtcctgtgcacgtgtccttctatgtctgcaacggcaagcgcaagcgtagccaataccagcggttcacttacctccccgcaaacgtaaacgagataatccgcaacgatctttcctccacgagtacacatagctag

SEQ ID NO: 29848 - DNA, 1416 bp, synthetic construct
  misc_feature 1..1416: note = Description of Artificial Sequence: Synthetic coding sequence
  source 1..1416: mol_type = other DNA
atgctgcagttgttcatcggaactgctgatgacagacttcttaggccacacgcattctaccaggtacacagaattaccggtaaaacagtgtccactacatcacacgaagcgattttgtccaatacgaaagtattagagattccactcttacccgagaattccatgcgggctgtgatcgattgcgctgggatcttaaagctgcgaaattctgacatcgagctccgtaaaggcgagacagacatcgggaggaagaatactagagtgagacttgtgtttcgggtgcatgtcccccagcctagcggcagaacactgtccctgcaagtcgcttcaaaccccatcgagtgctctcaacggtcggcccaggaactgcccctggtcgagaagcaatccactgattcttatcctgtagtgggtggcaaaaaaatggtccttagcggccacaactttcttcaagatagtaaagtcatatttgtagagaaagctccagacgggcatcatgtgtgggagatggaagcgaagactgatagggacctgtgcaagcccaactcgttggtcgtagaaattcccccttttcggaatcagagaatcaccagtccagtgcatgtttccttctacgtctgtaacgggaagcgcaagaggtctcagtatcagcgattcacttacctgccagccaatgtccccattatcaagacagaacccaccgatgactatgagccagccccaacgtgcgggccagtctcacagggactgtcccctttaccgcgtccgtattactctcagcaattggcaatgcccccagatccgagttcttgcttggtcgcaggctttccgccttgtccacagcgctcgaccctgatgcccgctgccccaggcgttagcccaaagttgcatgacctttcgccggcagcctacaccaagggcgtagcgtccccaggccattgtcacctgggactaccccaacccgctggggaagcccctgccgttcaggacgtgcccaggcccgttgctacccatcctggaagtcccggtcagccacctccagctttgctgccccagcaagtcagtgcccctccctcaagcagctgtcctcctgggttggagcacagcttgtgtccaagcagcccttcgccacctctgcctccagcaacccaggagccgacctgtttgcagccttgcagcccagcatgccctccggcaacagggcgtccgcagcacctgccaagtactgtacgcagagacgagagcccaacggccggtcccagactgctcccagaggtacatgaagacggctcccccaatctggctcccataccagtgacagtgaagcgggagccggaggagctggatcagttatacctggacgacgtgaacgaaatcatcagaaatgacctgtctagcaccagtacccattcatag

SEQ ID NO: 29849 - DNA, 2766 bp, synthetic construct
  misc_feature 1..2766: note = Description of Artificial Sequence: Synthetic coding sequence
  source 1..2766: mol_type = other DNA
atgaacgccccagaacgtcagccgcagccagatgggggtgacgctccagggcatgaaccaggaggcagtcctcaggatgagctggacttttcaattctgttcgactatgaatatcttaaccccaatgaagaagaaccgaatgctcacaaagtggctagcccgccaagcggtcccgcttatcccgacgacgtgctcgactatggacttaaaccctactctcccctggcttccctttcaggcgaacccccaggccgattcggggagccagaccgtgtgggcccacagaaatttctgtcggccgctaagcctgccggagcctctggtctgtccccacgtatcgagatcaccccatctcatgagttaattcaggccgttggcccactgaggatgcgggacgctggacttctagtggagcagccccctttagcaggcgtagcagcatctccaaggttcactctccccgtccctggatttgaggggtaccgtgagcccctctgtcttagtcctgccagctcgggatcctctgcatcttttatttctgatacattttccccgtacactagcccgtgcgtgtcccctaacaacgggggtccagacgacctgtgtccgcagttccaaaatatccctgcccattactctccaaggacctcccccattatgtcaccacgtacaagcctagctgaagactcttgcctgggcaggcactccccggtcccacgccctgcatcccggagctcaagtcctggtgctaaaagaagacatagctgtgctgaggctcttgtcgctctcccacccggagcatcaccacagaggtccagatcaccaagtcctcagccctcttcccatgtggcacctcaggaccatggaagtcccgctggataccctcctgtcgccggttctgcggttattatggatgctctaaatagtctagctaccgattccccatgcggcattccacctaagatgtggaagacctcccccgacccgtcacctgtctccgccgcaccatcaaaagccggactgccaagacatatctaccctgcagtcgaatttttgggcccatgcgaacagggagaaaggcgtaacagcgcgccagagtcgatcctgctcgttccccctacctggcccaaaccattggtgcccgctataccgatctgtagcattccggtgaccgcttcactccccccactggaatggccattgtctagccagagcggaagttacgagcttaggatcgaagtgcagcctaaacctcaccatcgtgcacactacgagacggaaggatcacgaggagctgtgaaggccccaaccggagggcatccagtagtgcaactgcacggatatatggaaaataaacccctgggattgcagatcttcatcggcaccgccgacgagaggatcttaaagccacatgctttttaccaggtacaccgcatcaccggtaaaactgtcaccactacaagctatgaaaagatcgtgggtaatactaaagtcctggagataccgctcgaacccaagaacaatatgcgggcaaccatcgactgcgccggaatcctgaagttgcgcaatgcagatatagagttgaggaagggagagactgatatcggcagaaagaatacacgggtcagacttgttttccgagtgcacatccccgagtcatcaggccgaatagtaagccttcaaactgcatccaaccccatcgagtgctcccaacggtcggcccacgagctgcctatggtggagaggcaagacactgactcgtgtctcgtgtacgggggtcagcagatgatacttaccggccagaattttacgagtgagtctaaagtcgtgttcacagaaaagactacggatggacaacagatctgggagatggaggcaactgtcgataaggacaaatcccaacccaatatgctgttcgttgaaatcccagagtatcgcaataagcatattcggacaccagtcaaggtcaatttctatgtgatcaatgggaaaagaaagcgcagccaacctcagcacttcacctatcaccctgtccccgctattaaaacagagcctacagatgaatacgaccccacacttatttgcagtcctacgcatggaggcctcggatcacagccctattacccacagcacccaatggtcgcggagtctccttcctgcctggttgcaaccatggcaccctgccagcagtttagaaccggcctctccagccccgacgccagataccagcagcagaaccccgctgccgtcctgtaccagcgcagcaagagtctgtctccatccctgttggggtatcagcagcctgccctcatggccgcacccctttccttggcagatgctcaccggagcgttcttgttcatgctggatcccagggccagagcagcgctttactgcaccctagtcctactaatcagcaggcctcacctgtcatacactactcaccaaccaaccagcagctaagatgtgggagtcaccaggagtttcagcacatcatgtactgcgagaacttcgctccaggaacaactcgccctgggccaccacccgtgtcacagggtcagcgactgtctccgggatcgtaccccacagtgatccaacagcaaaatgccaccagtcagcgcgctgcaaaaaatgggccaccagttagcgatcaaaaagaagtcttgcccgctggcgtcaccattaagcaagaacagaacctggaccagacctacctcgatgatgaactgatcgatacccacctctcatggattcaaaacatcctatag

SEQ ID NO: 29850 - DNA, 978 bp, synthetic construct
  misc_feature 1..978: note = Description of Artificial Sequence: Synthetic coding sequence
  source 1..978: mol_type = other DNA
atgagtccgagaacgagcctggccgaggattcttgccttggccgacattcccctgtccctagacccgcaagccggagcagcagcccaggagctaagcgtaggcacagctgtgcagaggccctcgtcgctttgccacctggcgcatccccccagcgctccagatctccctcaccccagcctagtagccacgtggccccacaggaccacggatcaccagccggatatcctcccgtggcagggagcgccgtgataatggacgctcttaatagcctcgctaccgacagcccatgcggcatccctcccaaaatgtggaagacctcaccagacccatctcccgtgtccgcagcaccctcaaaagcgggactgccacggcacatttacccggcagtggaatttctcgggccatgtgagcagggagaaagacgtaactcggctcccgaaagcattctgttagttccacctacgtggccaaagccactcgttccagcgatcccgatctgttccatccccgtcacagcatccctgccccctttagagtggcccctgagcagccagtcaggcagctacgagctgcggatagaagtacagcctaagccccaccatagagcccactatgaaacggaaggctctcgtggggctgtcaaggctccaaccggaggtcatcctgtcgtgcagctgcatggatatatggaaaataaacccttgggcctgcaaatctttatcggaacggccgacgaacggatattgaagccacatgccttttatcaggtccatcgcatcacgggcaaaacagttacaaccacttcttatgagaagattgtggggaataccaaagttcttgaaattcctctggaaccctcgacggcaccacacctgctcagcccttttatgtttattagtcagcctggggtgcatactaggatcaacgtgtgggcactgtctggcctgagtctgaaggaactggctaccagtctctag

SEQ ID NO: 29851 - DNA, 2778 bp, synthetic construct
  misc_feature 1..2778: note = Description of Artificial Sequence: Synthetic coding sequence
  source 1..2778: mol_type = other DNA
atgaacgcccctgaaaggcagccccagccagacggtggtgatgcccctgggcacgagcctggaggatccccccaagatgagctggacttttctatcctctttgattatgagtatctgaaccccaatgaggaagagcccaacgctcacaaggtggcgagcccaccaagcgggcctgcttacccggatgatgtgcttgactacggtctgaaaccttactcacccctcgctagcctgtctggtgaaccacccggtaggttcggtgagcctgatagagtgggaccccagaagttcctctcagcagccaagcccgcaggcgcttcggggctgtcccctcggattgagattaccccatctcatgaactgatccaggcagttgggcctctgaggatgcgagacgccggacttttggtcgagcagccgccattagccggtgtggccgcaagtccaagatttacgttgcccgtgccgggatttgagggttatcgggaacccctgtgtctctctccggcatctagcggatccagcgcatccttcatttccgacaccttctctccatacacatcaccctgcgtgagcccaaataatggcggacctgatgacctgtgtccacaattccagaatatccctgcccactacagccccagaacatcccctataatgagcccacggacctcattagccgaggatagttgtctggggaggcatagtcctgtcccacggcctgcatcccgatcctcctcccctggggcaaagaggcgccattcatgtgccgaagcattagtagccttacccccaggagcctctccccaaaggtcacggagcccgtctccccagccatcaagtcacgtggctccccaggatcacggaagtccagcgggatacccacctgtcgctgggtccgcagtcatcatggacgccctgaatagcctggctacagattcgccctgtgggatcccccctaaaatgtggaaaacgagcccagaccctagcccggtgtctgccgcacccagcaaagcaggtctccccagacacatataccccgcagtcgagttcttgggtccctgcgagcagggtgaaagacgaaatagtgcgccagaatccattttgctggttcctcctacgtggccaaagcctttggtacctgcaatcccgatatgctctatccccgtgactgcctccctcccccctctggagtggcctctaagttcccaatccggcagttacgaattgaggatcgaagtccagccaaagccgcaccatagggcccactatgaaaccgagggctcaaggggagcagtaaaggcccctaccgggggacaccccgtggtgcagctacacggctacatggaaaataagccactggggcttcaaatatttattggaaccgccgacgagagaattctgaagccccatgccttttaccaggttcatcgcatcactggcaagacagtgacaacaacgtcctatgaaaagatcgtcggcaacacgaaagttctggagatcccgttagagccaaaaaacaacatgcgagcaaccattgattgtgctggaatcctgaagcttcgcaacgctgacattgagctgcgcaagggcgagactgatatcggccgaaagaacacccgggttcgcctggtgttcagagtgcatatccccgagtcttctggcagaatcgtgagcctacagactgcttccaaccctatcgagtgtagccagcgctctgcgcacgaactgcccatggtagaaagacaggacaccgactcttgcctggtttacggaggccagcaaatgatcctaacgggtcaaaacttcacaagcgagagtaaggtcgtgttcacagagaaaacaacagacggccagcagatctgggagatggaggcaacagtcgacaaggacaaatcccaaccaaacatgctgttcgtggaaattcccgagtatagaaacaagcacattaggactcccgtcaaggtgaacttctacgtcatcaatggcaagagaaagcgttcgcaaccccagcacttcacataccatccagtgcccgctattaagactgagcccacggatgaatacgatcctacccttatttgcagtccaactcacggcggtcttggcagccagccttattatccacaacatcctatggtggctgagtccccaagctgcctggtagcaaccatggccccatgtcagcaatttcggacgggcctctcatcacctgatgccaggtatcaacaacaaaatcccgcagctgtcctgtaccagaggtctaagtcgctcagtccgtctctcttaggctaccagcaaccagctcttatggcagcgcctctcagtctggccgacgcgcacagatccgtacttgtccatgctggatcccaaggccagagcagcgccctgctgcacccaagcccaaccaatcagcaggcatctccagttatccattattcacctaccaaccagcagttgcgctgtggatcgcaccaagaattccaacacatcatgtattgcgagaacttcgcccctggtactacaagaccgggaccgccacctgtctctcaagggcagcgattgtcaccgggatcctacccaaccgtgattcagcagcaaaacgcaacttctcagcgggctgccaagaacggaccacctgtaagtgatcagaaggaggtgctcccagctggggtgaccattaagcaggagcagaatctagatcagacgtatcttgacgatgtaaacgaaataataaggaaggagttttccgggcctccggcaaggaaccagacatag

SEQ ID NO: 29852 - DNA, 2706 bp, synthetic construct
  misc_feature 1..2706: note = Description of Artificial Sequence: Synthetic coding sequence
  source 1..2706: mol_type = other DNA
atgcaaagagaggctgcatttcgcctcgggcattgccacccactccgcattatgggatctgtggaccaagaagagcctaatgcacataaggtggctagccctccctccggccctgcatatcctgatgatgtactagactacggtctgaagccttattccccactagcgagtcttagcggagagccgccaggcagatttggagagcctgatcgggtggggccacagaaattcctcagcgccgcaaaacctgccggagctagcggattgtcacccagaatagagattacccctagccacgaactgattcaagccgttggccctcttaggatgagggatgccggactgcttgtggagcagccccctttagctggagtggctgcctccccgaggtttaccttgcctgtgcccggattcgaaggctatcgtgaacctctctgcctgtctccagccagctccggctcttccgcctccttcatttccgatacttttagcccctataccagtccctgtgtcagccccaataatgggggacccgatgatctgtgtcctcaattccaaaacatccctgctcactattctccaaggacgagccctattatgtccccaaggacctccttggcagaggactcatgtctggggaggcacagtccagtgcccaggccggcaagccgctctagcagccctggggctaagagaaggcatagctgcgccgaggctctcgtggcgctacccccaggagcttcacctcagagaagtagatcccctagcccgcagccttccagccacgtcgcccctcaagatcacggatcccccgcaggttaccccccagtggcaggttccgcagtgatcatggatgcactgaatagcctggcaacagactccccatgcggaattcccccaaaaatgtggaagacctcccctgacccgagccccgtgtcagctgcaccctccaaagccggattgcccagacacatttaccctgcagttgagttcttggggccttgtgagcagggagaacggaggaactcggcacctgaatcaattctgttggtgccaccaacatggcctaaacctctggttccagccattcccatctgtagcattcctgtgacagccagcctacctcccttggaatggccccttagcagccagtcgggatcctatgaactacggattgaggtgcagccgaaaccgcatcaccgggcacattacgaaactgagggatccagaggcgcagtcaaggcaccaactggtggccaccctgtggttcaattgcatggctacatggagaataaacctttaggcttgcaaattttcatcggaacagccgatgagagaatactcaagcctcacgcattttatcaggtccacagaattactgggaaaaccgtcactaccaccagctacgaaaagatcgtgggcaacactaaggtgctggaaattccactggagcccaaaaacaatatgcgagctactattgactgtgccggaatacttaaactgcgtaatgctgacatcgagctgaggaaaggagagacagacatcggaagaaaaaacacccgcgtgcggctcgtcttcagggtgcacattccagagtcctcgggacgaattgtatccctccaaaccgcctccaatcctatagaatgttcccagaggtcagcccatgagctccccatggtggagcggcaggatacggattcctgcctggtttatggaggacagcagatgattcttacagggcaaaactttacgtctgaatccaaggttgtgtttactgaaaagactaccgatggtcaacagatctgggagatggaagctactgttgacaaggataagtcccagcctaatatgttgttcgtggagattcctgagtacaggaacaaacacattcggacacccgtgaaggttaatttctatgtgattaatggaaagcggaagcgctctcagccccaacatttcacttaccatcctgttcctgccattaaaactgaacccacagacgaatacgatcccaccctgatctgcagccccactcacggcggtctcgggtcccagccgtattatcctcagcatccaatggtggcagaatccccaagctgtctggtcgctacgatggccccatgccaacagtttaggacgggcctgtcctcaccggacgcgagataccagcagcaaaatcccgcagccgtgctatatcaacgctctaaaagtctgagccccagcttactggggtatcaacagccagcgcttatggctgccccactctctctcgccgatgctcatcggtccgtactggtgcacgccggaagccaaggacagtcatctgcactactccatcccagtcctacgaatcaacaggcatcaccagtgatacactattctccaaccaaccaacagcttcgatgcggatcgcaccaggagtttcagcatattatgtattgtgagaactttgcacctggaactacccgtcctggacccccacccgtgtcccagggccagaggttgtccccagggagctacccgacggtgatacagcagcagaacgctacatcacagagagctgccaagaatggtccaccagtgagcgatcagaaggaggttttgcctgctggcgtgaccattaagcaggaacagaatctggaccagacctacctcgatgatgaactgattgatacacacctcagttggatccaaaatattctctag

SEQ ID NO: 29853 - DNA, 3207 bp, synthetic construct
  misc_feature 1..3207: note = Description of Artificial Sequence: Synthetic coding sequence
  source 1..3207: mol_type = other DNA
atgacgaccgctaactgtggtgcccacgatgaattagattttaagctggttttcggcgaagatggcgcacccgcaccccctcctccaggtagccgccctgcagatctggagcccgacgattgtgcaagcatatacattttcaacgtggacccccctccatctactttgacaactcccctgtgtctgccccaccacggactcccgtcccattcctccgtcttatcgccaagtttccagctccaatcacacaagaattatgagggcacatgcgagataccagagagcaaatactccccacttggagggccaaagccattcgagtgcccgagcattcagatcacgagcatcagtcccaattgtcaccaggagttggacgcgcatgaagacgacctgcaaatcaatgaccctgagagagaatttctggagagacccagccgcgatcacctctatttaccactagagccttcctacagagagtctagcctctctccctcacctgcatcatctatatcttcgcgtagctggttttccgacgcatcttcatgcgagtctttgtctcacatctacgatgacgtcgactccgagctgaacgaggctgcagcaaggtttacactgggatcaccactcacctctccaggcggttcccctggcggttgccctggagaagagacctggcaccagcagtacggactcggccactccttatcccctaggcaatccccctgccacagtcctcgcagtagtgttacagacgaaaactggctctcccccaggcccgcatcaggtccttcttcccgtccaactagcccgtgtggcaaaaggcgccatagtagcgccgaggtgtgctacgccggttctctcagtccccaccactcccccgtgcccagccccggtcacagtcccagggggtctgtgaccgaagatacttggttgaacgcaagcgttcatgggggatcagggttaggcccagcagtgtttccttttcagtattgtgtggaaactgatatccccttgaagacacgtaaaacctccgaagatcaagccgctattctccccggaaagctagaactgtgctcagacgaccagggcagtttatcccctgcccgagaaacttctatcgacgacggcttgggatctcaatatccgctgaagaaggattcgtgcggggatcagttcctatctgtgccaagtcctttcacctggagcaaacctaagccgggtcacacgcctattttccgtaccagctccctacctccccttgattggccccttccagctcactttgggcagtgtgagctgaagatcgaggtgcagcccaaaacccaccacagagcccactatgagaccgaggggtcccggggtgctgtgaaggcatcaaccgggggtcatcccgtagtgaagctgctgggctacaacgagaagcccatcaacctgcagatgtttattggaacggcggacgatcgctatttgagacctcatgctttctatcaggtgcaccgcattacgggcaaaacagtcgctacagcaagccaggagattataattgcttctaccaaggtgctggagatccccttgctgccggagaataatatgtcagccagcatcgattgcgccggaattctcaaactgcgaaatagtgatatagaactgcgcaagggggagacagatattggaaggaagaatactcgtgttcgcttggtgtttcgggtccatataccgcaaccctcaggcaaagtgttgagtctccagatcgctagcatccctgttgaatgtagccaaagatctgcacaggagctgccccacatcgaaaagtactccattaactcttgctccgtgaacgggggtcacgagatggtggtcacaggctcaaacttcctgcccgagtcgaagataatattcctcgagaagggccaggacggacgaccgcaatgggaggtggagggcaaaatcatcagggagaagtgtcagggtgcacacatcgtgctggaagtgcccccatatcacaaccccgctgttaccgccgctgtccaggtacatttttacctgtgtaatggcaaaaggaagaagagtcagtcacaaagatttacatacaccccagtgttaatgaagcaagagcaccgtgaggagatagatctctcctctgtccccagcctgcctgttccccatcctgctcaaacacagcggccatcaagcgacagtggttgctctcacgactcagtcttatcaggccagaggtcgttaatatgtagtattccacagacctatgccagcatggtgacctcatcccacctaccccagctgcaatgcagagacgagagcgtaagcaaggagcaacacatgatcccaagcccaatcgtccatcagccattccaggtcacacccacaccccctgtaggatccagctaccaacctatgcagacgaacgtggtgtacaacggtccgacatgcctgccaataaacgctgcctcctcacaggagtttgactcggtacttttccagcaagacgcgactcttagtggcctggtcaatctgggctgccagcccttatctagcatcccctttcattcctccaattccggcagcactggacacctgctcgctcatacaccacattctgttcacaccctcccgcatttgcagagcatgggatatcactgttccaatacgggtcagcggagtctttcttcaccagttgccgaccagattacagggcaaccctcttcccaactgcaaccaattacctacgggccatcccacagcggcagtgctaccacagcgagtcccgcagcttctcacccacttgcttcatctccactgtctggccctcccagcccacagctacagcccatgccgtaccagtcaccgtcctccgggactgcctctagcccgtctccagccacacgtatgcatagcgggcagcacagcacccaggcacagagtacaggacaagggggactctccgctcctagctcactgatctgtcacagtttgtgcgacccagccagtttcccacccgatggcgctacagtgagcattaaaccagagccagaggaccgagagccaaattttgcaactataggattgcaggatatcacactggatgatgatcaatttataagtgaccttgagcatcaacccagcggtagcgctgagaagtggcccaatcacagcgttctttcctgtcccgctcctttttggaggatatag

SEQ ID NO: 29854 - DNA, 3228 bp, synthetic construct
  misc_feature 1..3228: note = Description of Artificial Sequence: Synthetic coding sequence
  source 1..3228: mol_type = other DNA
atgacgaccgccaactgcggcgctcacgacgagctcgacttcaaactggtttttggtgaggacggcgctcccgcacctccacctcctggcagtcggcctgcggacctagaaccagacgactgtgccagtatatacattttcaacgtggatccacctccctccaccctcacaacacccctttgtctgcctcaccatggactgccatctcatagtagtgtccttagcccctcctttcaactgcagtcgcacaagaactacgagggtacctgcgagatcccagaaagtaagtatagcccactcggaggtccgaaacccttcgagtgtccgagtattcagataacatcaataagccctaactgtcaccaggaactagacgcacacgaagacgacctgcagattaatgacccagagcgcgaatttctcgagcgaccttcccgagaccacctgtaccttccactggaacccagttatcgggagtcttcactgagccctagccctgccagtagcatatccagccggagctggttttccgacgccagctcctgtgaatcactgtctcatatttatgacgacgtcgattcagaactaaacgaagccgctgcacggtttacccttgggtcccccttgacctcccccggaggatctccaggcggatgccccggtgaggagacctggcaccagcagtatggccttgggcacagccttagtcccaggcagagcccatgccatagtccaaggtccagcgtcactgatgaaaactggctgtctccgagacctgcatccggcccatcctctaggccaaccagcccttgcggcaaaaggagacattcctcagcagaggtgtgctatgccggaagcctgtcaccacatcactcacccgtcccgtcccccggacacagccccagaggaagtgtgaccgaggacacctggttaaacgcttctgtccacggcggtagtggcttaggtcccgcagtctttccattccagtattgtgttgagacggacatcccccttaagacaagaaaaacaagcgaggaccaggccgcaatcctaccaggtaagctagagctatgttctgatgatcaaggaagtttgagtcccgctagagagaccagcatagacgatggactgggctcccagtatcccctaaagaaagatagttgcggcgatcagtttttgtctgttccaagcccgttcacctggtcaaagcccaagccaggacacaccccaatcttcagaacaagctcgttaccccctctggattggccacttccagctcactttgggcagtgcgagctcaagattgaggtccagcctaagactcaccatcgcgctcactacgagactgaagggtcccgcggtgctgttaaggccagtactgggggacacccagtggtaaagttgctgggctataatgaaaagccaataaatttacagatgtttatcgggacagcagatgaccggtacctgaggccccatgccttttaccaggtgcaccggattacgggaaagaccgtcgccacagcctcacaggaaattataatagcatccacaaaggttctggaaattcctctgctgccagagaacaatatgtccgcttccatcgattgcgctggaatcctcaagctgcgcaactccgatattgaactgcggaaaggtgaaacagacatcgggaggaagaacacaagggtgcgactagtgttccgggtccacatacctcaacctagcggtaaagttttgagtctgcaaattgcctccattcccgttgaatgtagccagagatccgcccaagaactgcctcatatcgaaaagtacagcatcaattcctgctctgtaaacggtggccatgagatggtggtcacaggcagcaactttctgcctgaatccaagataatcttcctagagaaggggcaggacggaaggccccagtgggaggtcgaggggaaaattattcgggaaaagtgtcagggcgctcacatagtcctggaggtgccgccttatcacaatcccgctgttacagccgcagtccaggtacacttctacctttgcaacggcaaacggaagaagagccagtcacagcggttcacatacacccccgtgctcatgaaacaggaacaccgagaagagatcgacctcagcagtgtgccatcattgcccgtgcctcatcctgcccagacacagagacccagctctgactccgggtgttcccatgactcagtcctgagtggacaacgcagtctcatttgctccataccccaaacatatgcgtcaatggtaacctcatcgcatctaccccaattgcagtgtagagacgagtccgtgtccaaagaacagcacatgataccctctcccatcgttcatcaacccttccaggtgacaccgaccccacccgtcgggtctagttatcagcccatgcagacgaatgtggtctataacgggccaacctgccttcccattaatgccgcatcctcacaggagttcgacagtgtgctcttccagcaggatgctaccttgtcaggccttgttaacctcggttgccagcctctgtccagcatcccatttcacagttccaattctggcagtaccggacatctgctcgcccatactccccattcagttcataccttaccccacctacagagtatgggttatcattgcagcaataccggacagcggtctctgtcttcgccagtagcggatcagattaccggccagcccagctcacaactgcaacctattacttatggtccctctcattctggatccgcaaccaccgcgtcgcctgcggcttctcaccccctggcttctagtcctctgtctggtccgccttccccacagctgcagccaatgccctatcaatccccaagctctggaacggcatcttctccgtcacccgcaacgcggatgcattcaggtcaacactcaacacaggcccagtctaccggacaaggagggcttagtgccccaagctcactgatctgccactccctctgtgatccagccagttttcctcctgacggggctactgtgagcatcaaacccgagcctgaggatcgcgagccaaacttcgcaactatcggactgcaagacattaccctcgacgacgttaatgagattatcggtcgtgatatgtcccagatttctgtgagtcaaggcgcaggagtaagcaggcaggctccattgccatccccagagtcactggacctcgggcgatcggacggcctgtag

SEQ ID NO: 29855 - DNA, 3198 bp, synthetic construct
  misc_feature 1..3198: note = Description of Artificial Sequence: Synthetic coding sequence
  source 1..3198: mol_type = other DNA
atgaccactgcaaactgcggagctcatgacgaactggactttaaactggtgttcggagaagacggagcacccgcaccccctcccccaggcagcaggcctgcggatttggaacccgatgactgcgctagcatctacatcttcaacgtggacccccctccttccacattgactactcccttatgtctgccccaccatgggctcccaagtcacagctccgttctttcaccgtcattccagttgcaaagccacaagaactatgaagggacctgcgagattccagagtccaagtactcccctctgggcggtcctaagccatttgaatgtccatctattcagattacctccattagtcccaattgccatcaggagttagacgctcacgaagatgacctgcagatcaacgaccccgaacgagaattccttgaacggcctagccgcgaccacctctatctgcccttagaaccaagctatagggaatcttcgctgtccccttcaccagcatccagtatcagtagcagatcttggtttagcgacgcctcctcatgtgagtccctgtcacacatttatgacgatgtggactcagagctgaacgaggccgcagccaggtttaccctgggaagccctctgacgtccccaggcggaagccctggaggatgtccaggggaagagacatggcaccaacagtatggcttgggccattctctgtctccgaggcagtccccatgccattccccacgcagttcagttaccgacgagaactggcttagccctaggcccgcatccggaccatcaagtcggcctacgagtccatgcgggaagagacgccattcgtctgctgaggtgtgttatgcaggctccctctctcctcaccactctcctgtgccaagccccggacactcacccagaggcagtgtgacagaagatacatggctcaacgcaagcgtgcatgggggtagtggcttgggaccagctgtgtttccatttcaatactgcgtagagaccgatataccactgaagaccagaaaaaccagcgaagaccaggccgctatcctgcccggaaagctagagctgtgttccgacgaccaaggttctctgtcacccgctagagaaactagcattgacgacgggttgggcagccagtacccactaaagaaggacagttgcggtgatcagttcctctccgtcccctctccttttacctggtctaaacccaagcccggacacacccctatctttcgaacttcgtccctgccaccactggactggccactgcctgcccacttcggccagtgcgaattaaaaatagaagtgcagcctaaaacccaccatcgggctcactatgagactgagggatctcggggtgccgtgaaggccagcactgggggacaccccgtcgtgaagctgctcggttataatgagaagcccattaacctacagatgttcatcggcacagccgacgatagatatctgcgccctcatgcgttctaccaggttcatcgtattaccggcaagacagtcgccaccgcctcacaggaaataattattgcctcaacgaaggttcttgagatcccattgctgcccgaaaataacatgagtgcgtccattgactgcgctggaattctgaagctccgaaatagcgatattgaactgcgaaaaggggagaccgatatcggccgtaaaaacactcgagtgagactcgtctttcgcgtacacataccacagccgtccggcaaagttctgtctcttcagatcgcctctattcccgtcgagtgtagtcagaggagcgcccaggagctcccacatatcgagaagtacagcattaattcatgttcagtgaatgggggtcacgaaatggtggtaaccggctccaactttcttcctgagtccaaaatcatatttctggaaaaaggtcaggacgggagacctcagtgggaagtggagggtaagataatccgggaaaaatgccagggcgctcacatagtgctggaggtcccaccttatcataaccctgccgtgactgccgctgtccaggtacacttctacctctgcaatggtaagcgcaaaaagtctcagagccagcgcttcacctacactcccgtgctgatgaagcaggagcacagagaggagattgatctgtcttccgtcccgtcccttccagtccctcacccagcgcagacacaacgcccttctagtgactctggctgctctcatgactcggtcctctcaggtcagcggagtcttatctgttcaataccacaaacttacgcctcaatggtgacatcttcccatcttcctcaactgcagtgtagggatgaatcagtttcaaaggaacagcacatgattccgtccccgatcgtgcaccaacctttccaggttactcccaccccaccagtgggatcctcttaccagccaatgcaaactaacgtggtttataatgggccaacctgcctgccaattaacgcggctagttcacaagagttcgactcagtgctgttccaacaagacgcgacgttgagtggacttgtaaatttgggctgtcagccactatcttctattcctttccatagctccaactctggtagcaccgggcacctactcgcccataccccccactcagttcacactttgccacatctacagtccatgggctaccattgcagcaacaccgggcagcgcagcctgagtagtcctgtggccgatcagataacaggacagccttctagccagctgcaaccaataacatatggtccatcccactctggcagcgctactaccgcttccccagccgcaagtcatcccctcgcaagtagcccactgagtggcccaccaagtccgcagcttcagccaatgccttaccagtcccccagttctggaactgcatcctcccctagtcccgcaacccggatgcatagtgggcaacatagcacgcaggcccagtctaccggccagggcggtctgtctgcccctagctccctgatctgtcattccctttgcgaccccgcttcttttccgccagacggtgctacagtctctatcaagccagaacccgaagatagggaacccaattttgctacaattgggctgcaagacatcaccctggatgatgacctattcacctcaaataacttcgatctccttcagttgcgacccaccttctggcctgtgcccgctggtagatatctgaggaacctggagtag

SEQ ID NO: 29856 - DNA, 1770 bp, synthetic construct
  misc_feature 1..1770: note = Description of Artificial Sequence: Synthetic coding sequence
  source 1..1770: mol_type = other DNA
atgtttattggcaccgctgacgatagatatctgcgcccacacgccttttaccaagtacacaggatcaccggcaagactgtggcaaccgccagtcaggagattatcatagcgtctaccaaagtgttggagattcctctccttccagaaaacaatatgagtgcgagcattgactgtgctgggatactgaagctgaggaacagcgacattgagctgcgcaagggggaaactgatatcggcaggaagaacacaagggtacggctggtgtttcgggtgcacatcccccaaccttcaggaaaggtgttgtcactgcaaatcgcatctattcctgtggaatgctctcagaggtcggcccaggaactgcctcacatagaaaagtacagcataaacagttgcagcgtcaatgggggtcatgaaatggtggtaactggatccaatttcttgccagagtccaaaataatcttcctggagaagggacaggatgggcgtccccagtgggaagtggagggaaagattatccgcgagaagtgtcaaggagctcacattgtgctggaggtgcctccatatcataaccctgcagtgacagctgctgtgcaggtgcatttctatttatgcaacggcaagagaaagaaatcacagagccagcggttcacttacaccccagtactgatgaagcaagagcacagggaggagattgatctttcatcagttccctcgctgcccgtgccccaccccgctcagacgcaacggccatcttctgactccggctgctcacacgacagtgtcttgagtggccagcgctcactgatctgcagcatccctcaaacctacgcatcaatggtgacatctagtcatttaccacaactgcagtgtcgggacgagtccgttagtaaagaacaacacatgatcccatcaccaatagtgcatcagccctttcaagtaacaccaacgccacccgtggggtctagttaccagcccatgcagactaatgttgtatataacggtcctacctgtttaccgatcaacgcagccagcagccaagaattcgactcagtactgttccagcaagacgctacactcagtggcctggtgaatcttggatgccagcctctgagcagtataccattccattcttcaaatagcggatcaaccggtcacttactggcacacactccgcactccgttcacacccttccccacctccaatccatggggtatcactgcagcaataccggccagcggagtctcagctctccagtggccgatcaaatcactggccagccttcctcccagctgcagcctattacatacggtcccagccatagcggctccgctactacggcaagccccgctgcttctcatcccctagcgagctcgccactgagcggccctccatcaccccagcttcagccaatgccttaccagtccccgtccagcgggacggccagctcccccagtcccgcaacgcgtatgcacagtgggcaacattctacccaagcccaatccacaggccaggggggactgagcgccccatcctcgttaatttgtcatagcttgtgtgatccagcaagttttccccctgatggagccactgtgagcatcaaaccagaacccgaagaccgcgagcccaactttgccacaatcggcttacaggatattactctggacgacgatcagttcatttctgatctggaacatcagccgtccggctcggctgagaagtggcccaaccatagcgtactttcctgccctgccccattctggcgaatttag

SEQ ID NO: 29857 - DNA, 2709 bp, synthetic construct
  misc_feature 1..2709: note = Description of Artificial Sequence: Synthetic coding sequence
  source 1..2709: mol_type = other DNA
atgggcgcagcctcctgcgaagatgaggaactggagttcaagctcgttttcggagaagagaaggaagccccaccactcggcgcaggcggactgggagaagagctggatagcgaagacgctccgccttgttgccgcctcgccctgggggaacctccaccttacggtgccgcaccgataggaatcccaaggccacctccaccaagaccagggatgcattctcctccgccaagaccagctcccagcccaggcacatgggagtctcagccagccaggtctgtgaggcttggtggccctggcggaggggctggcggtgctggaggagggagggtcctcgagtgcccttcgattcggataacaagcatatctcctacccctgagccacctgctgcactggaagataatcctgacgcctggggtgatggctcccccagggattaccctccacctgaaggcttcggcggttaccgggaagccggtggccagggcggaggcgcatttttctctcccagtcccggtagctcttccctgtcttcttggtcttttttttcagacgccagcgatgaggccgctttgtatgcagcatgtgacgaggttgaaagcgagctcaacgaagcggcatctcgcttcgggctcggctcgcccctaccctccccaagggcatccccacggccttggacccccgaggacccatggtcattatacggtccctccccgggtggcagggggccagaagactcatggttgttactgtccgcacctggcccaacaccggcaagccctagaccagcctctccttgcgggaagaggaggtatagcagctctgggaccccgtcttccgccagcccggctttgagccggagaggctccctgggcgaggagggaagtgaacctcctcccccacccccattacctttggctcgggatccaggcagtcccggaccctttgattacgtaggtgctccccctgcggaaagtatcccacagaaaacccgacggaccagcagtgagcaagcagtggcactgccaagaagtgaagaacccgcaagttgcaacggaaagttacccttgggcgctgaagaaagtgtcgcaccacctggtggcagccggaaagaggtggcaggcatggattatctggcggtgccgtctcctttggcatggtcgaaagccagaattggaggccactcacccatcttcaggacttcagccttgccccctctggactggcccctgccctctcagtatgagcagctggagctgcggattgaagttcagcctagggcgcaccatcgagcccattacgaaacggagggctcacgaggagctgtcaaagccgcacccggaggccacccagtggtgaaactgctgggatatagtgagaagccactcactctgcaaatgtttattggtactgctgacgagcgtaatttaaggcctcacgccttctatcaggtacatagaattacaggaaagatggtggctacggcctcgtacgaggccgtagtgtccggaactaaagtcctggagatgaccctgctgcccgaaaacaacatggcagccaacatagactgcgcgggtattttgaaacttaggaattctgatatcgagttaagaaaaggcgagacagacattggcaggaaaaacacccgtgtccggctggtctttagagtgcacgttcctcagggaggaggcaaggttgttagtgttcaagccgcaagtgtgccaatcgaatgtagccagcgctccgctcaggaactgccccaggtggaggcctactccccgtcagcttgctcagtgcggggaggcgaggaactggtgcttactgggtccaacttcctcccggactcaaaggtggtttttatcgagcgcggaccagacggcaaattgcagtgggaagaggaagcgacagttaacagactccaatctaatgaagttacactgacccttacagtccctgagtactcaaacaagagggtctcacgcccagtgcaggtgtatttttatgtgtccaatggacgacgcaagcggagcccaactcagtctttcaggtttctgcctgtcatctgcaaagaagaacccttgcccgattcttccctcagaggctttcctagtgcctctgctacccctttcggtaccgatatggacttttcgcccccacggccaccttatccttcttatccccacgaggatcctgcctgcgagaccccatacctctcagaggggttcgggtacgggatgccgcctctgtacccgcagacagggccaccaccgtcttaccgccctggattgcgaatgtttccagagactcgcggaacaaccggctgtgcccaacctcccgcagtgtcctttctcccaagaccattcccctccgacccttatggcggtcggggaagctccttctctttgggccttccctttagcccacctgcgccttttcgcccaccccctctacctgcaagcccccctctggaagggccttttcccagccagtctgatgtgcatcccctgcccgcagaaggctataataaggtcggccctggctatggtcctggcgagggcgcaccggagcaagagaaatctaggggtggatattccagcggctttcgggatagtgtccctattcagggtatcacattagaggaggtatccgagataatcggcagagatctttctggtttccccgctcctccgggtgaggaacctccagcctag

SEQ ID NO: 29858 - DNA, 2895 bp, synthetic construct
  misc_feature 1..2895: note = Description of Artificial Sequence: Synthetic coding sequence
  source 1..2895: mol_type = other DNA
atgattactaccctccccagcctcttacccgcatccttggcttcaatcagccatagagtgactaacctgccatcaaacagcttgtcccataacccaggacttagtaagcctgattttcccggaaactctagccctgggcttccctccagtagctcacccggaagggacttaggagcacctgctggcagcatgggggcagcatcgtgcgaggatgaggagcttgaattcaaactggtcttcggagaagagaaagaagcccctccgctgggtgcaggaggtctaggagaagagctggacagtgaggacgccccaccatgctgtcgtctggctctaggcgaaccgccaccatacggagcggcacccatcgggatacccaggccgcctcccccaaggcctggcatgcactctccacccccaaggcctgctccaagtcctgggacctgggagagtcagcccgctcgctcagtacgcttaggcggacccggaggcggtgccggtggcgcaggtgggggacgggtgctggaatgcccctccatccggattacaagtatttcaccaactcctgagccccctgcagctctggaggataacccggatgcttggggggacgggtctccaagagattacccccctcccgaggggttcggaggttatcgggaggccggtggtcaaggtggaggcgcttttttcagtccaagcccgggaagctcatctctgtcctcttggtctttcttcagcgacgcttcagatgaagccgctttgtacgccgcatgcgatgaagtcgaatccgagttgaacgaggctgccagccggttcggcctcggttcgcccttgcccagcccgcgagccagccccaggccatggacacccgaggatccgtggtcactgtatggacccagccctgggggtcgagggcctgaagacagctggctgctgctgagtgcacccggaccaactcccgcatcgccaagacccgcttccccatgcggcaagagacggtacagtagctccgggaccccttctagcgctagcccagcgctgagtcgcagggggagtttaggcgaggaaggttctgagccacctccccctccgcctctcccgctcgctagggaccctggatcaccaggacccttcgactacgtgggcgctcccccagctgagtccattccacagaagactaggagaacatctagtgagcaagcggtggcactcccgaggtccgaggagccagctagttgcaacggcaagctgccactgggtgccgaggagtcggtcgcccctcctggtggctcaaggaaagaagttgccggaatggattacttggcggtccccagtcctctcgcttggagtaaggccaggattggtggacatagcccaatatttagaacttcagcccttcctcctcttgattggccgctgccaagccagtatgagcagctagaattaagaatcgaggtgcaaccaagggcacatcacagggctcactacgaaactgaagggagcaggggggctgtgaaagcagcacccggtggacatccagtggtgaaactgctcggctattccgagaaacccctcaccctgcaaatgttcatcgggacagccgacgagcggaatttgcgcccacacgctttttaccaggttcataggatcaccggcaaaatggtagccacagcctcctatgaagcagtggtgtccggcacgaaagtgttggagatgactctccttccggagaacaacatggccgctaacatcgactgcgccggaattcttaagcttcgaaacagcgacattgagctgagaaagggtgaaaccgatatcggacgcaagaataccagagtgagacttgtattccgcgtccatgttcctcagggcggaggcaaggtggtaagtgttcaggccgcatccgtgcccatcgagtgtagtcagcggagcgcacaggaattgccccaggtggaagcctattccccatctgcatgcagcgtaagagggggagaagaattagtactcaccggcagcaacttcctgccagattcgaaggtcgtgtttatcgagcgcggtcccgacggaaaattgcagtgggaggaggaggctacggtgaaccggctgcagtctaacgaagtgacgctcaccctgacagtgcccgaatattccaacaagcgtgtgtctcggccagtgcaagtgtacttctacgtctccaatggtcggagaaaaagatcaccgacacagtctttcaggttcctcccggtgatttgcaaggaagagccattgccagactcatctctgagaggcttcccctcagcttcagccacgccctttggtaccgatatggatttctccccacctaggccaccctacccttcctatccacacgaggaccccgcttgcgagacaccctatcttagcgagggattcggctacggaatgcctccgttataccctcaaaccggcccacctccttcctacagacccggactgagaatgttccccgagactaggggtacgaccggctgcgcccagcctccagccgtgtccttcctccctcggcctttcccctctgacccgtacggagggaggggatcctcattttcccttggcctacccttctcccctcctgccccattccgccctccgccacttccagcctccccacctcttgagggaccctttccttcccagagtgatgtgcatcccctcccagctgaaggctataataaggtaggcccaggatacggtccgggagaaggcgctccagagcaagagaaatctcggggagggtatagtagcggctttagagatagtgtgcccatccaagggatcacgctggaggagggcggttgcggtacgggaggctgcgagtgtgagtgcgtgcaggagattgcgctccacgtctgctag

SEQ ID NO: 29859 - DNA, 2670 bp, synthetic construct
  misc_feature 1..2670: note = Description of Artificial Sequence: Synthetic coding sequence
  source 1..2670: mol_type = other DNA
atgccagcctcaatctccagtatctttcctggccctactctgctcctgagttgcgggtccgaggagctggacagcgaagatgcccctccatgctgcagattggccctgggcgagcctcctccatatggcgctgcccctattggtattccaaggcctccaccacctaggcctggaatgcattcccccccaccgagacccgctcctagccctggaacttgggagtcccaacctgctaggagcgtgagattggggggaccgggtggcggagccggtggagccggtggtgggcgagtgctggaatgtcctagcatacgcatcacctcaatctcccccacgccagagccgcctgccgctttggaggacaaccccgatgcctggggcgatggttcgccaagagactacccacccccagaaggcttcggtggctatagagaggccggtggacaggggggtggggctttcttttctccatcacctggcagcagcagtctaagcagttggagctttttcagtgacgcctctgacgaggcagcactgtacgccgcttgcgacgaagttgaatcagagctgaacgaggccgcttcaaggtttgggctgggtagccctctcccatctcccagggcttccccaagaccgtggactcccgaagacccttggagcctgtatgggccttctcctggaggcagggggcctgaagatagctggctgctgctcagtgctcctggaccgactcccgctagccccaggcccgcatccccctgtgggaagcggaggtacagtagctctggaacacccagttcagcatccccagccctgtcccgcagagggtctttgggagaagagggatctgagccgcctccaccccctcctctgccccttgcacgcgatcccggatcacccggacccttcgattatgtgggagcccctcctgccgagagcatccctcagaaaacacgccgtacatctagcgagcaggcagtcgccttacctcgctccgaagagcccgctagctgtaacgggaaactacctcttggggctgaagaaagcgtggcccctcccggaggttctcggaaggaggtggccggaatggactacctagcagtgccttcaccactggcttggtctaaggccagaattgggggtcattcgcccatcttcaggacatccgctctgccaccgctggactggccgctgccatcacagtatgagcagctggaactacgaatcgaggttcagccacgagcccatcacagggctcattacgaaacggaaggctcgcgcggtgccgtcaaagcagcgcctggcggtcaccccgtggttaagcttcttggttactccgagaagcccttaaccctccaaatgtttattgggacagctgacgaacgcaatctcagaccccatgcattctatcaggttcaccgtatcacaggcaagatggtcgctaccgctagctatgaggccgtggtctcaggaactaaagtactggaaatgacccttctgccggagaataacatggccgcaaatattgactgtgccggaattctgaagcttcggaatagcgatattgagttgaggaagggtgagacagacataggacgtaagaacactagggtgcgtctggtgtttcgggtgcatgtgcctcaggggggaggcaaagtcgttagcgtgcaggctgcctctgtgccaattgagtgctcgcaaagaagtgcccaggagctgcctcaagtggaagcttatagccccagtgcctgctcagtgagggggggagaagagctggtcctgaccggttccaatttcctgcctgattccaaggtcgtcttcatcgaacgcggtcccgatggtaagcttcaatgggaagaagaggcaaccgtgaaccgtcttcaaagtaatgaggtgacactcaccttgacagttcctgagtacagcaataagcgcgtctctcgtcctgtgcaggtctacttctacgtgtctaatggccgtcggaagaggtcccctacacagagttttcgatttttgccagtgatttgcaaggaagagcccttaccagacagcagtctgcgcggattcccttccgctagcgctacgccgttcgggactgacatggatttctcgccacccagacccccttatccaagttaccctcacgaggatccagcgtgtgagacgccgtacttgtccgagggcttcggttacggtatgccacccttgtatccacagaccgggccacccccatcctaccgccctggtcttcggatgtttcctgagactcgcggaactacaggttgcgctcaaccacccgctgtgagcttcttgcctcggccatttccaagtgacccatacggaggtcgcggatcctccttctctctcggactacctttcagtcccccagcccctttcagaccacctccgctccccgcatctcctcccttagagggaccctttcctagtcagagcgacgtgcaccccctcccagccgagggctataacaaagtgggtccagggtacgggcctggcgagggcgcaccagagcaggagaagtctcggggagggtattctagcggctttcgtgacagtgtcccaatacaaggaattacccttgaggagggcggttgtggaacaggcggttgtgagtgcgaatgcgttcaggagatcgccctgcatgtgtgttag

SEQ ID NO: 29860 - DNA, 2745 bp, synthetic construct
  misc_feature 1..2745: note = Description of Artificial Sequence: Synthetic coding sequence
  source 1..2745: mol_type = other DNA
atgcttagcggacgagaccttggcgctccggctggaagcatgggagccgctagttgtgaggacgaagagttggagttcaaactggtgtttggagaggagaaagaagcaccgcctctgggagccggaggcctcggtgaggagctcgactcggaagacgctccgccttgctgtcgcctcgctctgggagaaccacctccttacggcgctgctccaatcgggatccccaggccaccccctcccaggcctggtatgcactcccctcctcccagaccggctccaagtcctgggacatgggagagccagcccgctcggagcgtccggctgggaggacccggagggggtgccggaggtgctgggggagggcgagtgctggaatgtccctcaattcggatcacttcaatcagtccaaccccagagccacccgctgctttagaagacaatcctgatgcatggggagatggttcaccacgcgactacccccctcctgaaggcttcggcggataccgggaagcagggggtcaaggcggaggagccttcttcagcccatctccaggatcttcaagtctatcgagctggtcatttttttcagatgccagcgatgaggccgctctctacgcggcttgtgatgaggtagagagcgaactgaatgaagccgctagtagatttggactgggcagccctctgcccagccctcgggcttctcctcggccatggacccccgaggatccctggtcactgtacggtccatctccgggtggaagaggcccagaggacagctggctacttctatctgctcccggaccgactcctgcaagtcctagaccagcttcaccatgtgggaaaagacggtattcctcctcaggcactccatcttctgccagccctgctctatcccgcaggggcagcctgggcgaggagggctctgaaccccctcccccacctccacttcccttagcgcgtgacccaggtagcccaggtccctttgactacgtgggagcaccccctgccgagagtatcccacagaagaccaggcggacgagcagtgagcaagctgtggccttgcctaggtccgaagagccagcttcgtgcaacggaaagcttccactcggagccgaggaatccgtggccccacccggtgggagcagaaaggaggtagctggcatggactacctcgcagttccctccccgctggcatggtctaaggcaaggatcggcggtcattcaccgatttttcgcaccagtgccctgccaccactggactggcctctgccttcacaatatgaacaattagagctgcgaatcgaagttcagcctcgggctcatcaccgtgcccactatgagacagagggctcccgaggggctgtgaaggccgctcccggtggccatcccgtggtcaaactcttgggctactccgagaagcctctcactctacagatgttcataggcaccgctgacgaaaggaacctgcggccacatgcattttaccaagttcataggatcaccgggaaaatggtggccactgcctcctacgaggcagtggtgtccggcacgaaggtattggaaatgacactattaccagagaacaatatggcagccaacattgactgtgcaggcatcttgaagctccgtaattccgacatagagctaagaaagggtgaaactgatatagggagaaaaaacacaagggtgagattagtatttcgggtgcatgttccccagggaggcggtaaggtggtgagtgtgcaagcagccagcgtcccaattgaatgttcccagagaagtgcgcaagagctcccacaggtggaagcttatagtccctcagcgtgcagcgtccggggtggtgaggagctggtgctgaccgggtccaacttcctacccgattcaaaagtcgtgttcattgagcggggacctgatggcaaattgcaatgggaagaagaagccactgtaaacagactacaatccaacgaagtcacacttactttaaccgtgcccgagtactccaataaacgggtgtcgcgcccagtccaggtgtacttctatgtgtctaatggcagacgtaaacggagccccacccagagcttcagatttctcccagttatttgcaaagaagagccactgccggactcctccttgcggggattccccagtgcctcagctacaccatttggtacggatatggacttttctcctcccaggcctccgtatccatcttatcctcacgaggacccagcctgcgagacgccttacctgagtgaaggcttcggttatgggatgcccccactgtatccgcagacagggccaccaccgtcctatcgccctgggcttcgaatgttccccgagacgcggggtaccactggatgcgcccagcctccagccgtatcgttcctaccacgtccattccctagcgacccttacggaggccgtggcagctcttttagtctgggccttccattttcacctcctgcaccattccgccctccccctctgcctgcctccccaccactggagggaccctttcctagccagagtgacgtgcatcccctcccagccgaggggtataataaggtgggcccaggatacggacccggagagggcgctccagagcaagagaagtcacgtggcggatactcctccggttttcgagacagtgtgcctattcaaggtattactctggaggagggtgggtgcgggacaggcggttgtgagtgtgagtgtgtgcaggaaattgccctgcatgtctgctag

SEQ ID NO: 29861 - DNA, 2802 bp, synthetic construct
  misc_feature 1..2802: note = Description of Artificial Sequence: Synthetic coding sequence
  source 1..2802: mol_type = other DNA
atggccgatggcggtgcagatagtgccgctcagaggctccctgaaggtccaggacgcgttgctcctgggagggatttgggcgctcccgcaggcagtatgggggcagcctcttgcgaagacgaagagctagagtttaagctagtgttcggcgaagaaaaggaggctcctccgcttggagccggaggcctgggcgaagagctcgatagcgaagatgcccctccgtgctgtcgactggctttgggcgagccacccccttacggcgctgccccaatagggataccccgaccgccaccccctcgacctggtatgcactccccacctcctcggccagctcccagtcccggaacctgggagtcccagcccgctcgctctgtaagacttgggggacccggtggtggcgcaggcggagccggaggaggccgagtgctagaatgcccgtctattagaataactagcatttctcccacaccggagccgccagccgctctggaagataatccggacgcctggggagatggaagccctagagattaccctccacctgagggattcggaggttatcgagaagccggagggcagggtggcggtgcctttttttccccttccccaggtagtagttcgttgagcagctggtcttttttttctgacgcctctgacgaggcagccctgtatgccgcttgcgacgaggtcgaatccgaactgaatgaagcggcatcgaggtttgggctggggagcccactcccatcaccccgagcgtcaccccgaccatggacacccgaagacccatggagcctgtacggacctagccccggaggaagggggccagaggacagttggctactgttatccgcccctggcccaacacctgcctcccccagaccggcttcaccttgcgggaagagacgctattccagcagcggcacaccctcttccgccagtcccgctctctccagaaggggtagcctcggagaggaaggctctgaacctccccctcctccacccttaccactcgccagagaccctggatctcccggaccctttgactatgtgggggctccgccagcagaatcaattccgcagaaaacaaggcgcaccagtagcgagcaggcagttgccctccctagatctgaggagcccgcaagttgtaatggcaagctaccgctaggggctgaggagtcagtggcgccacccggaggttcccgcaaagaagtggcaggtatggattacctcgccgtgccatctccgctcgcttggtctaaagccagaatcggaggacactctcctattttccgaacttctgctcttccgccattggactggcctctgcccagccaatatgagcaactcgagctgagaatagaagttcagcctagggctcaccatagggcccactatgaaactgaagggtctagaggcgctgttaaagccgcacccggagggcacccagtcgttaagctgcttgggtactcagaaaagcccctaacgttgcaaatgttcatcggcacggcagatgaaaggaacctgaggccccacgctttttatcaggtgcatcgcatcactgggaagatggtcgccaccgcatcatatgaagccgtcgtcagtggaaccaaagttttagagatgaccctgttgccagagaacaatatggcggcaaacattgattgcgcaggcatacttaagctccgcaacagtgacattgagctgaggaagggggagactgacatcggccgaaagaacaccagagtgagattggtttttcgcgtgcacgttccacaggggggaggaaaagtggtcagcgtgcaggcggcttctgtgccaatcgaatgcagccagagatccgcacaggagcttccacaggtagaggcatattcaccatccgcatgtagtgtgaggggaggagaggaactagttctgacaggtagtaacttcttgcctgactcaaaggtcgtgtttattgagcggggacccgatgggaaactgcagtgggaagaggaagccacggtgaaccgcctgcaatccaatgaagtgaccctaactttgacagttccagagtattccaacaaacgcgtgagcaggcccgttcaagtgtatttttacgtgtccaacggcagaaggaaacgtagccctacacagtccttcaggtttcttcccgtgatatgcaaagaggagccactcccagatagctccctccggggtttccccagcgctagcgcaacccccttcggtactgacatggatttctctccaccacgccctccctatcccagctatccccatgaggatcctgcttgtgagacaccttacctgtcagagggattcggatatgggatgcctcctttataccctcagacaggacctccaccatcatacaggccgggtctgagaatgtttccagagactcggggtacaaccgggtgtgctcaaccacccgctgtttcgttcctgccacgaccttttcccagcgacccgtatggcggaagaggatcaagcttctccctgggcttaccattctcacctcccgcaccttttagaccccctcccctgccagcatcccctccgctcgagggtccctttcctagtcagagtgatgttcacccacttcctgctgaggggtataacaaggttggcccaggatatggtcctggagaaggagcccctgagcaggaaaaatcccggggagggtactccagtggcttcagagattctgtgccaattcaaggaataactttggaggagggcggatgtggtactggaggctgcgaatgcgaatgcgtgcaggaaatagctctgcacgtatgctag

SEQ ID NO: 29862 - DNA, 2481 bp, synthetic construct
  misc_feature 1..2481: note = Description of Artificial Sequence: Synthetic coding sequence
  source 1..2481: mol_type = other DNA
atggcagacggcggtgccgacagcgcggctcaacgcctgcccgaaggtccaggccgagtcgcaccagggcgtgatcttggcgctcccgcaggcagcatgggagccgcatcctgtgaagacgaagaacttgagttcaaactggtgtttggagaggaaaaagaagcccctccattaggagcgggaggccttggtgaggagttggattcggaggacgctccaccatgctgtagactcgccttgggggagcccccaccctacggggcagccccaattggaattcctcgtcctcctccccctagacctggaatgcattctccccctcctcgtcccgctcccagcccagggacttgggagagccagccagctcggtcagttcgcctcggaggccctggcggtggggcaggtggtgccggtggcggtagagtgcttgagtgtcccagtataagaatcacaagtatcagtcccactccagaaccacctgcagcactcgaagataatcccgatgcatggggagacggcagcccaagggattaccccccacccgagggttttggcggttacagagaagcgggagggcaaggcggaggagccttcttttcaccaagccccggtagctcttctttgagcagctggagctttttctcggatgcatccgacgaggcagcactttacgcagcctgcgacgaagtagagagtgaactcaatgaggctgcttcacgctttggcttgggtagtcctctcccctccccccgagcttcccccaggccatggactcccgaggacccctggtctctgtatgggccaagtccgggtggacgaggtcctgaggatagctggctgctgctctctgcgcctggtcctacacccgcaagcccccgtccagcttccccctgtgggaaaagaaggtactccagctctggcaccccttcctcagctagccccgctctttctcggaggggctctttaggcgaagagggatctgagcccccaccacctcccccattgccactggcgcgtgacccagggtcccccggtcccttcgattacgtcggtgccccacctgccgagagcatccctcagaagacaaggaggacctcaagcgagcaggccgtagcacttcctcggtccgaggaacctgcttcctgcaacggaaagttaccccttggagcagaggaaagtgttgccccaccaggcggatccagaaaggaggtggcaggcatggattatctggcagtccctagtccactggcatggagcaaagcgagaatcggagggcactctcccatcttccggacgtctgctctgcctcctctagattggcctctcccttctcagtatgaacagcttgaactgcggatcgaggtccagcccagagcacaccacagggcccattacgaaaccgaaggttcaagaggggctgttaaagctgccccagggggtcatcccgtggttaaactcctcggttactcagagaagcctctcacccttcagatgtttattgggacagcagacgaaaggaacctgagaccacacgccttctatcaggttcacaggatcacaggcaagatggtggctactgcctcatacgaggcggtggtgtcaggaactaaagtgttggaaatgaccctgttgcctgaaaacaatatggctgccaatattgactgtgctggcatactcaaattgcgaaatagcgacattgagctgcgcaaaggggaaaccgacatcggacgtaaaaatacccgcgtgcgcttagtattcagggtgcatgtgccgcagggagggggtaaggtggtatcagtccaggctgctagcgtgcctatagagtgtagccagaggtctgcgcaggagctgccgcaagtggaggcatactccccctcagcctgctccgtcagaggtggggaggagctggtgctgactggatcaaatttccttcccgacagcaaggttgtgttcatcgagcgtgggcctgatggtaaactgcagtgggaggaggaagctacagtcaatagactgcaaagcaatgaagtaacactaaccctgacggtgcccgagtatagcaacaaacgtgtttctcgtccggtgcaagtttacttctatgtcagtaacggcaggaggaagaggtcacctacgcagtcatttcggttcctgccagtgatctgtaaagaggagccactgccagatagttctctcagggggtttcccagtgcttcagccacaccctttgggacagacatggacttttcaccacctcgcccaccttatccatcctacccccatgaggatcccgcttgcgagacaccttaccttagcgagggttttggatatggaatgcctccgctttatcctcaaaccgggccacctccgtcatatcgccctggattgagaatgttccctgagacacggggaaccacagtgagcgaaatcattggccgagatctgtcgggctttccagcccctcccggagaagagccgcctgcctag

SEQ ID NO: 29863 - DNA, 2706 bp, synthetic construct
  misc_feature 1..2706: note = Description of Artificial Sequence: Synthetic coding sequence
  source 1..2706: mol_type = other DNA
atgggtgctgcttcctgcgaagatgaggagctggaattcaagctcgtgtttggcgaggagaaagaggcaccccctctgggagctggcggattaggtgaggagttggacagtgaggacgctccaccttgttgtaggctggccctgggggaacctcccccatatggggcagctcccattggaatccctagaccacctccccctcgtcccggaatgcactctcctccccctcgccctgccccttctccagggacttgggagagtcagcctgccaggagcgtgcggctcggcggacctggcggtggagccggtggggctgggggaggcagggtactggaatgtccttccattcgaataacttcgatctctcccaccccagaaccccctgcagcattggaggacaacccagacgcgtggggtgacggcagcccccgtgattaccctcctcccgaagggtttgggggatatcgggaggccggagggcaagggggaggggcattcttttccccgtccccaggctcttcttcactgtcgtcttggagcttcttttccgatgcaagcgacgaggcagccttatatgccgcttgcgacgaggttgaatctgaacttaatgaggccgcatcgagattcggactggggtccccattgccatctccacgggctagcccacgtccttggaccccggaggacccttggtccttgtacggacctagcccagggggtcggggaccagaggactcctggctccttctgagtgctcccggacctacccctgcttcacctcgaccagcaagtccctgcgggaaaaggaggtacagtagttctggcaccccatccagcgcttctccagcccttagccgccgaggctccctcggggaggagggatcagaaccaccccctcctccgccactgccactagccagggaccctggaagccccggtccattcgattacgtgggtgctcctccagcagagtctattcctcagaagacacgcaggactagctctgagcaggctgtcgcattacccaggtctgaggaacctgcctcctgcaacggtaagctgccattaggtgctgaagagtctgttgctcccccagggggaagccgaaaggaagttgccggaatggactatctcgctgtccccagcccgctggcctggtccaaggccaggattggagggcactctcccattttccggacctccgcactccctcccctggattggcctttgccatctcagtatgaacagctggaactgcgtatcgaggtacagcccagagcccatcacagggcccattacgaaacagaggggtcccgcggagctgtgaaggcagctcctggagggcatcccgtggtgaaactgcttggatatagtgaaaagccgctgactctacagatgttcataggaactgccgatgaaagaaatctccgacctcatgcgttttatcaggtccatagaatcaccggaaagatggttgcaacggctagctacgaagctgtggtctccggtacaaaagtgttggaaatgaccttactccctgagaacaacatggcggctaacattgactgtgccggaattctgaagctcagaaacagcgacatagagttaagaaagggtgagaccgatataggccgtaagaacaccagagtgcgactggtgttccgtgttcacgtgccacagggtggcggaaaggtggtgagcgtgcaggccgcttccgtgccaatagaatgcagccagcggtccgcacaagaactccctcaggttgaggcctattccccctctgcctgcagtgtccggggtggagaagagttggtattaacaggttcaaatttcctgccggactctaaggtcgtatttatcgaaaggggaccagacgggaaactccagtgggaggaggaggccacagtcaacagactgcagtccaatgaggtgaccctgacgctcaccgtgcccgagtattcgaacaaaagagtctcccgtccggtgcaagtatatttttatgtttcgaacgggaggagaaagaggtcacctacacagtcgtttagattcctccctgttatttgtaaagaggaaccactgcctgacagtagcttgcgaggctttcccagcgcatctgctaccccatttgggactgatatggacttttcccctccacgcccaccgtacccatcctaccctcacgaggatcctgcatgcgaaaccccttatttatctgaaggcttcgggtacgggatgccgccattatacccccaaaccgggcctcccccaagttacagaccaggcctcaggatgtttcctgaaacaagaggaactacaggatgcgcacagccacctgctgttagcttcttgcctaggccattcccttctgatccctatggcggacgtggatcgtcttttagcctcggcctcccattttcaccaccagcaccttttaggccccctccgctacccgcttccccgcctctggaaggaccttttccatcacagtcagacgttcatcccctaccagccgaggggtacaataaggtgggccctggttacggccctggagagggggcacccgagcaggagaagagccgcggaggttatagctcgggattccgggactctgttcccatccaggggattacccttgaggagggtggctgcggcactggtggctgcgaatgcgagtgtgtccaagagatcgctctacatgtgtgctag

SEQ ID NO: 29864 - DNA, 2499 bp, synthetic construct
  misc_feature 1..2499: note = Description of Artificial Sequence: Synthetic coding sequence
  source 1..2499: mol_type = other DNA
atgcattctccgcctcctcgccctgctccctccccaggtacgtgggaatctcagccagctagatcagtaaggctaggaggcccaggtgggggagctggaggcgctggaggcggaagagtccttgagtgccctagcatccgaattacaagcatctctccaacacctgaaccccctgccgctttagaagacaaccccgacgcctggggtgacgggtcacctcgtgattaccccccacctgaaggctttggcggatatagggaagcgggagggcagggcggaggcgctttcttctctccctcaccaggctcttccagtctgtctagctggtctttctttagtgatgcctcagacgaggccgctctctacgccgcatgcgacgaggtggagagcgagctgaacgaagcagcgtcccgattcggccttggttctcctcttccatctcctcgcgctagcccgcgtccttggacaccagaggatccctggagtctgtatggaccatcccccggaggccgaggtccagaggatagttggctgctcctgtcagctcccggtccaactcccgcatccccacggccagctagcccttgcggcaaaaggagatacagtagttctggaaccccatcgagcgcttcccccgcattgtctaggcgtggatccttgggcgaagaaggctctgagccaccacctccgccacctcttcccctcgccagagaccctggaagtcccggtcccttcgactatgtcggggctcctcccgctgagtctattccccagaaaactcgcagaacctcctctgagcaggcagtcgctctcccccgatccgaagaacccgcaagctgcaatgggaagttacctttgggagcagaggagtcggtcgcgccacctggtggctcccggaaggaggttgcaggcatggactaccttgccgtgccatcgccccttgcgtggtcgaaagctaggatcggtgggcactccccaatttttcggacatccgcattgccgccattggattggcccctgccatcacaatacgaacagcttgagctgagaatagaagtccagccgagggcacaccaccgcgcacactatgagaccgaaggaagcaggggggctgtgaaagcagccccaggtggccacccggttgtgaaactgctggggtactctgagaagcccctcaccctgcagatgttcattggcaccgctgacgagcgcaacctgcgtccgcatgccttttaccaggttcatagaatcacaggcaagatggtcgctacggcctcttacgaggcagtagtgtccgggacaaaggtactcgaaatgacgctgttgcctgaaaacaatatggcggctaatatagactgcgccggaatcctgaaactccgcaactccgacattgaactccgcaagggtgaaacggatatcggaaggaagaacacacgcgttcggctcgtgttccgtgtccacgttcctcagggtggcggtaaggtagttagtgtacaggccgctagcgtccctatcgaatgttcacagcgttctgcgcaggagctcccacaagtcgaagcctactcaccgagtgcctgtagcgtcaggggcggtgaggaactggtgttaaccggctccaactttctgcccgactccaaggttgtctttatagagcgcggacccgatggaaagctgcaatgggaggaggaagcaacagttaaccggttgcagtcaaatgaggtgactctgaccctgacagtccccgaatactccaataaaagagtgtctaggcctgtgcaagtctatttctatgtgtctaatggcaggcggaagaggagtccaacccagtccttccgcttcttacctgttatctgcaaggaagagccgctcccagattctagcctcagaggattccctagcgctagcgcaacaccttttggcactgacatggatttttctccaccgagacctccttatcctagttatcctcatgaggacccagcttgtgaaacaccctaccttagcgaaggattcggttatggcatgcctcccctgtacccacagactggcccacctcccagctaccgcccaggactgagaatgtttcctgaaacaagaggtacaaccggatgtgctcagccaccagccgtcagcttcctgcctcgcccattcccgagtgatccctatggaggacgaggttcttctttctctctcggactgccattctcccctcctgcaccttttaggccgcctcctctgccagcatccccgccattagagggcccatttccctcccagtctgatgtgcacccgctacctgccgagggatacaacaaggtggggccagggtacgggcctggcgaaggggcacctgaacaagagaagagccgtgggggatactccagtgggttcagagacagtgtaccgatccagggcatcaccttggaagaagtcagcgaaattatcgggagggacttgtccggattccctgctccaccaggcgaggagccccctgcgtag

SEQ ID NO: 29865 - DNA, 2385 bp, synthetic construct
  misc_feature 1..2385: note = Description of Artificial Sequence: Synthetic coding sequence
  source 1..2385: mol_type = other DNA
atgggagcggcatcatgtgaggacgaggaattggagtttaagctggtttttggcgaggagaaggaagccccacctctgggtgcaggtggcctgggcgaggagctcgactcggaagatgctccgccatgctgtcggctggctctgggcgagcctcccccttacggtgcggcacctattggtatacctagacccccaccaccaaggcccggtatgcattcaccccctccgagacctgctccatcacccggtacttgggagtctcagccggctcggagcgttcgcctgggtggcccaggaggcggagccggaggggctggtggtggcagggtcctcgagtgtccttccatccggatcacctctatttcccctacccctgagccaccagccgcattagaagacaatcctgacgcttggggagatggctcccccagagattacccccctccggagggattcggtggctatagggaggcgggtggacaggggggaggtgccttcttctccccgagccccggatcatcttctctcagtagctggagttttttttcagacgcatctgacgaagccgctttgtacgccgcatgtgatgaggttgaaagcgaacttaatgaggccgctagtcgcttcggattaggctccccgctgccatcgcccagggcaagcccaaggccctggacccctgaggacccatggtccctttacggcccatcacctggtggcagggggccagaggattcctggcttctactgagtgctcctggtcccactcctgcaagccccagacccgctagcccctgcggtaaacggaggtatagctcatcaggaacgccctcatctgcatcaccagccctgtccaggagggggtctctcggcgaggagggctccgaacccccaccgccaccaccactccccctggcaagagatccgggtagcccgggtcccttcgactatgttggggcaccacccgctgaatccattccccagaagacccggagaacctcgagtgagcaggctgtggcattaccccgttcagaggaacctgcgtcatgtaacggaaagctgccactgggagcggaggagagcgtggcccctcccggagggtcaaggaaggaggttgctgggatggattatctggccgtcccctccccgctggcctggtctaaggccaggatcggtgggcattcacccatcttccgaacaagcgcattgcctcctctggactggccacttccaagtcagtacgaacagctggagctgaggatcgaagtgcaaccgcgtgctcaccaccgagcacattacgagacagagggatctcgcggagccgttaaagctgctccaggcggacaccccgtggtcaaactgttgggttacagtgagaaacccctgaccctgcagatgtttatcggcactgcagacgagagaaacctgcgcccacatgctttctaccaggtacataggatcactgggaagatggtggccacagcgtcttatgaggccgtcgtgagcgggaccaaagtgttggaaatgacccttcttcctgagaacaatatggctgccaatatagactgtgccggtatcttgaagctgagaaattcagatatcgaactacggaaaggagaaacagacatcgggaggaaaaacacgagagtgaggctggtttttcgagtacacgtgccccaaggtggcggaaaggtggtgagtgtccaggccgcttcggtgcctatagaatgtagccagcgcagtgcccaagaacttccccaggtggaggcatattctcccagtgcatgctcagtacgcggaggcgaggagctggtgttgaccgggagcaattttctccccgactcaaaggttgtatttattgagcgtggtcccgatggcaagctgcagtgggaggaggaggcgacagttaataggctgcagtctaacgaagtcacactgacccttactgtgccagaatattctaataaaagggtgtctaggcccgttcaggtttacttctatgtgagtaacggtcggagaaaaaggagccccacgcagtcttttcgctttcttccagtaatttgcaaagaagagccattaccggacagctctctgcgcggttttccctcagcatccgccacaccctttggaacagacatggattttagtccacctcggccaccgtacccttcctaccctcacgaggacccggcatgcgagacaccatatctgtctgagggatttggctacggcatgccccctctgtacccccagactggccctcccccttcctatcgccctggcctcaggatgtttcctgaaaccaggggaactacagtgtctgaaataattggacgcgacctgagcgggttcccagccccacccggtgaggaacctcctgcatag

SEQ ID NO: 29866 - DNA, 2499 bp, synthetic construct
  misc_feature 1..2499: note = Description of Artificial Sequence: Synthetic coding sequence
  source 1..2499: mol_type = other DNA
atgcattcaccgcctccaaggcctgctccgtccccaggcacttgggagagtcagcccgcacggtctgtgcgcctgggcggacccggtgggggagccggaggcgctggtggcggaagggtactggagtgcccttcaattcgtattacatccatcagtcccacacccgagcctcctgctgcactggaggacaatcccgatgcctggggggacggaagcccccgagactaccctcctccagagggcttcgggggttaccgcgaggcaggtggccaggggggaggcgcattcttttccccatcccccggatcctcaagcttaagcagctggagtttcttcagcgacgccagcgacgaagccgcactctacgcagcctgtgatgaagtggaatcagagctcaatgaggctgcttccaggttcgggttagggagtccccttccttcgcccagagccagtccccgtccttggaccccggaggacccctggtcactctatggcccaagcccgggtggacgtggcccagaagatagttggctgctgctgtccgccccaggcccaaccccggcatctcctaggcctgcatccccgtgcggaaagagacggtactctagctccggcactccctcttctgcgagccccgctctgtcgcggagagggagcttaggggaagaggggtctgaacctccccctccacccccacttcctctggctagggacccaggctccccgggacctttcgactacgtgggtgcacccccagctgagagtattccacagaaaacacgtcggacaagctccgagcaagcggtggccctacccagatcggaggaacccgcttcttgcaacggaaaattgcctctcggagctgaagaatctgtggcccctcccggaggttcgcgcaaggaagtggcaggcatggattacctcgccgtgccgagtcctctcgcctggtccaaggctcgcatcggaggccactcccctatcttcagaacaagtgcactgccacccctcgattggccactgccatcgcagtatgaacagcttgaactgaggattgaggtgcagccccgagcacaccatcgcgcacactatgaaaccgaagggtcaaggggcgcagtgaaggctgcacccggtggacatcctgtggtgaaactacttggctacagtgaaaagcctctgaccctccagatgtttataggaacagcagacgagagaaacttgagacctcatgctttctaccaggtgcaccgaattactggaaaaatggtcgccacagccagctacgaggccgttgtgtctggcacgaaggtgctcgagatgaccctgttgccggaaaacaatatggccgctaatattgattgcgcaggaatactgaaacttcgcaactccgacatagagctgaggaagggggaaactgacatcgggcgtaaaaatactcgtgtgcgactggtcttcagggtacacgtcccgcagggagggggtaaggttgtctccgtgcaggccgcttctgtaccaatcgagtgctcacagcgcagcgcccaagaacttcctcaggttgaggcttactctccaagtgcatgttccgttcgcggaggcgaagaacttgtcctgacaggtagcaatttcctgccagactctaaagttgttttcattgagagggggcctgacgggaaacttcagtgggaggaagaggccacagtgaaccgcttacagtcaaatgaggttacactaactttaacagtgccagagtactcaaataagagagtgagcagacccgtgcaggtctatttttatgttagcaacgggcgacgtaaacgaagccccacccagagcttccgatttctgccagtcatttgcaaagaagagccgttacctgatagctccctgcgcggattcccttcggcatccgccacgcccttcggcactgatatggatttttccccccctagaccaccgtatccgtcatacccccacgaagatccagcatgtgagacaccgtatctttccgagggttttggctatggaatgccaccattgtacccgcagaccggcccacctccatcctaccgaccagggctgaggatgttccccgagaccagaggtactactggatgcgctcagcctccagcggtgtcattcctgccaagaccattccccagcgatccttacggcggaagaggcagctcgttttcgctgggtctgccattctcccctccagccccatttcggccacctcctctccccgcatccccaccgcttgaagggccatttccctcgcagtctgatgttcaccccctacccgctgagggctacaacaaagtgggtccaggatatgggccaggcgagggggcaccagaacaggaaaaatcgcggggaggttattcatcaggtttccgggacagcgtccctattcaggggattactctcgaagaggtcagtgaaattattggacgggatttgtctggtttccccgctcctccgggtgaagagccgcctgcatag

SEQ ID NO: 29867 - DNA, 990 bp, synthetic construct
  misc_feature 1..990: note = Description of Artificial Sequence: Synthetic coding sequence
  source 1..990: mol_type = other DNA
atgtttatcgggactgctgacgaacggaatctcaggccccacgccttctatcaggtgcatcgcatcaccgggaagatggtggcaacagcaagctatgaggcggtggtgtcggggaccaaggtgctcgagatgaccctattgccagagaataatatggcagctaatatcgattgcgcaggaattctcaagctccgcaactccgatattgagctccgcaaaggggagactgatataggaagaaaaaacacacgcgtgcgcctggtcttcagggtccatgttccacagggcggaggcaaggtggtgtcagttcaagctgcatctgtacctatcgaatgctcacagagatcagcccaagaactgcctcaggttgaagcttactctccttcggcgtgctccgtcagaggaggggaggaactcgtgctcaccggatctaactttctgccggactccaaggtggtgttcatcgagcgcggtccggacggcaaattgcaatgggaggaggaagccacagttaaccgtctccagtcaaatgaggtgactctgacactgacggtgccagaatactctaacaaaagggtgagcaggcctgtccaagtatatttttatgtcagcaatggcagaagaaaaagatcccccacacaatccttcagatttttgcctgtgatctgtaaggaagaaccgctccccgatagctcactcagaggctttccgtccgctagcgctactccattcgggaccgacatggacttcagcccgcctcgtccaccatacccaagctatccccacgaggaccctgcatgcgaaaccccatatttgagcgagggcttcggatacggaatgccacctctctatccccaaaccggtccccctccttcatatcgtcctgggttgcgcatgtttcccgagactcgtggcaccacagtgagtgaaattatcgggagagacctctcgggttttccagccccaccaggcgaggagccgcctgcctag

SEQ ID NO: 29868 - DNA, 2574 bp, synthetic construct
  misc_feature 1..2574: note = Description of Artificial Sequence: Synthetic coding sequence
  source 1..2574: mol_type = other DNA
atgatcacaactttgccctccttattaccagccagcctggctagtatttcacaccgcgtgactaacctccctagcaactccttgtctcacaatccaggactaagcaaaccagatttccctgggaattcctctcctggactgccctcaagctccagtcccggacgggaccttggcgcacctgccggttccatgggagccgcttcatgcgaagacgaagaactcgagttcaagttagtgtttggagaggagaaagaggctcccccactgggtgcgggaggcctcggggaggagctggactccgaagatgctcctccttgctgccgtctagcactgggcgaacctcccccttatggagcagccccaatcgggatccccagacctccgccacccaggcctgggatgcatagtccccctcccagaccggcacctagtcccggaacgtgggaaagtcagcctgccaggagtgtgcgcctgggcggaccgggtggaggggctggtggcgctggcggaggcagggtactggaatgcccatccattaggatcaccagcatttcaccgacacctgaaccccctgccgcactcgaggataatccagacgcctggggggacgggtccccacgggactacccccctccagagggcttcggtggctaccgggaggccggaggacaggggggtggagcttttttcagcccctcacctgggagttcttcattgagctcgtggtcttttttttctgatgcaagtgatgaagcggcactgtatgccgcttgcgatgaggtcgaatccgagctcaacgaggccgcatctagatttggcctcgggtccccattacctagtcctagagctagcccaaggccatggactccagaagatccatggagtctgtacggaccctctcccggtggtcgtgggccagaggactcctggctcctactgtccgcaccaggacctactcccgctagcccaaggcctgcttctccctgtggaaagcgccgttatagtagttctggaacaccatcctcagcctcacccgctctttctcgcaggggtagcctgggtgaggagggtagcgagcccccaccccctccccctttaccactagcaagagatcctggatccccagggccttttgattacgtgggcgcaccgcctgcagagagtatccctcagaagacccgccgaacctcttcagaacaggctgtggcactccccaggtctgaagaacctgcttcctgcaacggaaagctcccgctcggcgcagaggagagtgtggctcctccgggaggcagtagaaaagaagtggcaggcatggactatctggcagtcccttcaccactggcttggagcaaggccagaatcggcggtcattcccctatttttcgcacctctgctttgccaccattagactggccgctgccttcgcagtacgagcagctcgaactgcgtatagaggtccagccccgtgctcaccatcgcgcacattacgagactgagggctcacgcggagccgtcaaggctgctcccggtggtcatcctgttgtaaagctcctcgggtactctgaaaaacccctaacactgcaaatgtttattgggacggcagacgaaaggaacctcaggccgcatgccttctatcaggtgcaccggatcaccggcaagatggtggctactgcatcctatgaggccgttgtgagcggaaccaaagtccttgagatgaccctgcttcccgagaacaacatggccgcaaatatcgactgtgccggtattctgaagctcaggaacagtgacattgagctgagaaagggagaaactgacattggcaggaaaaatactcgggtgcgactagtatttcgtgtacacgtgccacaaggaggaggcaaagtggtgtctgtgcaggccgcaagtgtgccaatcgaatgttctcagagatccgcacaagaactcccccaagtggaggcctattccccctccgcttgctcagttagggggggtgaagagctggtactgacaggttcaaatttcctgcccgattccaaagttgtgtttatcgagcggggacccgatggtaagctgcagtgggaagaagaagcaactgtgaacaggctacaaagcaatgaagtgacccttacactcactgtgccggagtacagcaataaacgggtgagtaggcccgtacaggtgtatttttacgtcagtaatgggagacgtaaaaggagtcccacccaatcattccgctttctgcccgtgatatgcaaggaggaaccccttcctgattcttctttaagaggatttccatccgctagcgctacaccgttcggcactgacatggacttctcaccccctcggccaccctatccatcttaccctcacgaggaccctgcttgtgaaaccccctacttgagtgaggggttcgggtacggtatgccccctctgtatcctcaaaccggtcctcctccgtcctatcggcctggactacggatgttccctgaaactagaggcacgaccgtgagcgagatcatcgggagagatctttcaggctttcctgcgcctccaggagaagaaccacctgcctag

SEQ ID NO: 29869 - DNA, 2175 bp, synthetic construct
  misc_feature 1..2175: note = Description of Artificial Sequence: Synthetic coding sequence
  source 1..2175: mol_type = other DNA
atgcactcaccacccccacggcctgcacccagcccgggaacttgggaatctcagccagctcgtagcgtgcgcctcggtggcccagggggtggcgctgggggagccggagggggacgggtgcttgagtgtccgtccatccggattacgtccatctcacctactcctgagccccctgcagccttagaagataatcctgacgcatggggtgacggaagccctcgcgattatcccccacctgaagggttcgggggataccgggaggccggagggcagggcggtggagcattcttctctccttctccaggctcctcatccctgagtagctggtctttttttagcgacgcctccgatgaggcagcactttatgccgcttgtgacgaggtggagagtgagctgaatgaggctgcgtctcgattcggattaggcagcccgctacccagtccccgtgcctcaccacgtccctggacgcccgaggatccctggtcactgtacgggccatctccagggggacgcggacccgaagacagttggctcctgctttccgcaccaggccctactccggcttcacccagacctgctagcccctgcggcaagcggaggtattcttcttccggcaccccttctagcgctagccctgcgctgagccggaggggctccctcggagaagagggaagtgagccacccccacccccacctctacctctggcaagagacccgggaagtcctggcccatttgattatgtgggggctcctccagccgaatccatcccccagaagactagaaggacctcgagcgaacaggccgtcgccctgcctcgatcagaagaaccagcgtcctgtaatggtaagctacctctgggggctgaagaatcggtggcccctccaggcggaagcagaaaggaagtcgctggtatggactacctggccgtcccgtctccgctcgcttggtctaaggcgagaattgggggtcattccccaatttttcgcacatctgcgctgcctcctctggattggcctttgcctagccagtacgaacaactggaactgagaattgaggtacaaccccgagcacaccatagagcacactacgagacggaggggtcacgcggtgccgttaaagccgctccaggtggccaccctgtggtcaagttactgggctactcggagaagccattaactttgcagatgtttatcgggacagctgacgaacggaatttgcgcccacacgctttttatcaggtccaccgcatcaccggcaaaatggtcgcgactgccagttatgaggcggttgtgtcaggcactaaggtcctggagatgaccctcctcccggagaataatatggccgcaaacattgactgtgcagggattttaaaactgcgcaactccgacatcgagctgcgcaaaggagagacggatattggacgtaaaaacacaagggtacgactagtgttccgtgtgcatgtgccccaaggcggagggaaggtggtgtccgttcaggcagcttctgttcccatagagtgtagccagcggtcagctcaagaactcccccaggtagaggcatacagcccgagcgcatgctccgtgcgcggtggtgaggaattagttctcaccgggagcaatttcttgccagattccaaggtcgtgtttatcgaaaggggaccagacgggaagctccagtgggaggaagaagccaccgttaatcgcctgcaaagtaatgaagtgacgcttacactgactgttcccgagtactctaacaaacgcgtgtccagacccgtgcaggtgtatttctatgtgagcaacggcaggaggaagcgaagccccactcagtctttccgctttctccccgttatctgcaaagaggagcctctgcctgattcctcccttcgagggttcccatccgcttccgccacgccgtttggaactgacatggatttcagccctcccagacccccatatcccagctatccccacgaggacccagcctgtgagacaccgtatctgtccgaggggtttggttatggtatgccacccctttatccacagacggggccacctccgtcttaccggccaggattaaggatgttccccgagactcgtggcacaacggtatcagagatcataggaagagacttatccggatttccagcacccccaggcgaggagccacctgcttag

SEQ ID NO: 29870 - DNA, 432 bp, synthetic construct
  misc_feature 1..432: note = Description of Artificial Sequence: Synthetic coding sequence
  source 1..432: mol_type = other DNA
atgggagccgcttcctgtgaggacgaggagctggagttcaagttggtctttggggaagaaaaagaggctccacctctgggcgctggaggcttgggtgaagagctggacagtgaggatgctcccccatgttgtaggctagccctgggagaaccacctccatacggggcagcccctattgggattccaaggcctccaccccctcgtcccggaatgcactctcctcctccaaggcccgctcctagccctggtacctgggagagtcagccagcgaggtccgtgagacttgggggtcccggtggcggtgccggtggtgcgggaggcggtcgggttctcgagtgcccctccattaggattactagtattagccctactccagagccaccagctgccttggaggataaccctgatgcctggggcgatggttctccctag

SEQ ID NO: 29871 - DNA, 2424 bp, synthetic construct
  misc_feature 1..2424: note = Description of Artificial Sequence: Synthetic coding sequence
  source 1..2424: mol_type = other DNA
atgttgtctgggagggacctgggggctccagcaggatcaatgggggctgccagttgcgaagatgaagaactggagttcaaactcgtattcggagaagaaaaagaggctccacccctcggagcgggtggcctaggggaagaattggactccgaagatgcacctccctgttgcagactggccctgggggaacctcccccttacggggctgcgccaattgggatcccccgacccccaccccctcgcccaggtatgcattcgccacctcctagaccagcccctagtccgggaacttgggagagccaacctgcacgtagcgtcaggctcggcggacccggaggcggagctggaggagctgggggaggccgagtgctcgagtgccccagtatccggataacttccatctcacctacgcccgaacccccagccgcactcgaggacaatcctgacgcctggggtgacgggtccccacgggactacccgccacccgagggctttggcggttacagggaggccggaggacaaggcggaggcgctttcttctccccatcaccgggttcttcttccttgtcatcttggtcattctttagtgacgcttcagatgaggcagccctttacgcggcatgcgatgaagtagaaagtgagctgaatgaggccgctagccggttcgggcttggtagcccattaccatcgcctcgggcaagcccacgtccctggactcccgaggacccctggtctttgtacggcccaagtccaggcggaagaggaccagaggactcctggctactcctgagcgcacccggacctacacccgcaagccctcgacccgcatcaccctgcggtaaaagacggtacagtagctcaggcaccccctcaagcgcctctcccgcactttctcggaggggttcactgggcgaagagggaagcgagccaccaccgcctccgcctctccctctggcccgagatcctgggagcccaggcccatttgactatgtcggcgctcctcccgctgagtcgatcccccagaaaactaggaggacaagcagcgaacaagcagtagcccttcctcgcagcgaggaacccgcatcctgtaatggcaagttacccctgggcgctgaggaaagtgttgctccccctgggggaagccgcaaggaagtcgcgggaatggactatctggccgtccccagccccctggcttggtcaaaagctcggattggcggacattctcccattttcaggaccagcgctctgccacctctcgattggcccctccctagtcaatacgagcagctggagctcaggatcgaggtgcagccacgggcacatcacagagctcattacgagactgaaggttccagaggggctgtcaaggccgctcccggtggacacccggtcgttaagttgttgggctattcggagaagcctctcacgcttcagatgtttatcggcaccgccgacgagaggaacctgcggcctcatgcattttaccaggtgcaccgcatcacgggaaaaatggtcgctacagcgagttacgaggccgtcgtttccggcaccaaggtgttggaaatgactctgctccccgagaataacatggctgctaatatcgattgcgccggtatcctcaagctgagaaacagtgacattgagcttcgaaagggtgaaacagacatcggaagaaagaatacgcgggtgagactcgtctttcgtgttcacgtgccacaagggggagggaaagtggttagtgtccaggccgcaagcgttccaatcgagtgttcgcagagatcagcgcaagagctgccacaagtcgaagcctatagcccctctgcttgttcagtccgcggtggagaggagctggtgctcacaggctccaatttcctacctgattctaaggttgtattcatcgagaggggccctgacggcaagttacaatgggaggaggaggccacggtaaatcggctgcagtccaatgaggtgacattaaccctgaccgtgcccgagtatagcaataagcgggtttctcggccagttcaagtttacttttacgtgtctaatggcagaaggaagagatcccctacgcagtcttttcgttttcttcctgtgatttgtaaagaagagccactgccggattcatctctccgaggatttcccagcgcaagcgcaacgccctttgggacggacatggacttttctcccccacgcccaccctaccccagttatcctcacgaagatcctgcgtgcgaaacaccatatctgtctgaaggattcggctacggaatgcctccgctgtaccctcagaccggaccaccaccaagttaccgtcccggactgagaatgtttcccgaaacaagagggacaactgtgagcgaaattatcggcagggatctgtccggctttcccgctcccccaggtgaagaacccccagcctag

SEQ ID NO: 29872 - DNA, 1311 bp, synthetic construct
  misc_feature 1..1311: note = Description of Artificial Sequence: Synthetic coding sequence
  source 1..1311: mol_type = other DNA
atgttcattgggacagctgacgagaggaatctccgaccacatgcattctaccaagttcataggatcacgggaaagatggtggcaactgctagctacgaagctgtggtgagtggtacgaaggttctagaaatgactttgctccccgaaaacaacatggcagccaatatagactgtgcaggcatccttaagttacgcaactcagacattgaactcaggaagggcgagactgatatcggcaggaaaaatactcgcgtgaggttagtgtttcgcgtccatgtgcctcagggcggtggcaaagtggtctctgtgcaggctgcatccgtgcccattgagtgctctcagcggtcagcacaggagctgccgcaggtcgaagcatactcgccttcggcctgctcagtccgcggtggcgaagaactggtgctgacgggaagcaattttctccctgacagcaaggttgtctttattgaaaggggccctgacggaaaactgcagtgggaagaggaagccacagtcaaccgtctgcaatctaatgaagtgactctgacactgaccgtgccggaatactctaataaacgggtttcaagacccgtccaggtgtacttctatgtgtctaatggaaggaggaagagatcaccaacccagagcttccgattcctccccgtgatctgcaaggaagaaccccttcccgactcctcattgagggggtttccaagtgcaagtgcaacaccattcggaaccgacatggacttctcacctccacgaccaccttacccttcttacccccatgaggaccccgcatgcgaaaccccatacctgagcgaaggctttggatacgggatgccaccgctgtacccacagaccggccctccaccgagttatcggcctggcctgaggatgtttcctgaaactagagggacaacaggctgtgctcaacccccagcagttagctttctgccgaggccctttccatccgatccctatggcggtagggggagtagcttctccctagggctgcccttcagcccgcctgcgcctttccggcctccaccacttccagcctcacccccattggagggacccttcccttcccagagcgacgtgcacccactgccggcagaaggctacaacaaggtgggaccaggatatggccctggcgaaggcgctccagaacaggagaagtccaggggcggttactcatcaggcttccgggattcggtgccaatccaggggatcacactggaagaaggagggtgcgggactggagggtgcgaatgcgagtgtgtccaggaaatcgcgctgcacgtgtgttag

SEQ ID NO: 29873 - DNA, 570 bp, synthetic construct
  misc_feature 1..570: note = Description of Artificial Sequence: Synthetic coding sequence
  source 1..570: mol_type = other DNA
atggatttttctcccccaaggccgccatatccctcatatccccatgaggatcccgcttgcgaaaccccctatctgtccgaaggtttcggatatggtatgccacctctctaccctcagacaggtccaccgccaagctataggcccggtctgcgcatgtttcccgagactaggggtacaaccgggtgcgcacagccacctgcagttagcttcctgcccagaccatttccgtctgatccctatgggggtcggggtagctctttcagcctcggtctcccattctcccctcccgcacccttcaggcctcctcccctgcctgccagtcctcctctagagggacccttcccaagccagtccgacgttcacccactcccagccgagggatataacaaggtgggccctggttacggaccaggcgagggtgccccagagcaggaaaaatcaagaggcggatattcttcaggcttccgggatagtgtccccatccaggggatcacactggaggagggtggatgtggaactgggggatgcgaatgtgagtgcgtacaagaaattgccttgcatgtctgctag

SEQ ID NO: 29874 - DNA, 2673 bp, synthetic construct
  misc_feature 1..2673: note = Description of Artificial Sequence: Synthetic coding sequence
  source 1..2673: mol_type = other DNA
atgcctgcatctatcagtagtatatttccaggcccaactctgctgttatcttgcggctcagaggaattggattccgaggatgctccaccatgctgtcgcctggcgcttggtgaacctccaccctatggcgctgcaccgattggcatacctagaccccctccccctagacccggaatgcattcccccccaccaagacctgccccaagtccaggcacatgggaatctcagcccgcacgcagcgtccggctggggggtccaggcggaggtgccggtggcgcagggggaggcagagtgttagagtgtccctccattcgcataacatctatctcccccacaccagagccacctgcagcactggaggataatcccgacgcgtggggagacgggagcccccgagactaccccccaccagagggtttcgggggataccgggaggccggaggccagggcggaggcgcattcttttccccttctcccggatccagttccctgtcgagctggtcatttttttcggacgcatccgacgaggctgccctttacgccgcttgtgacgaggtggaatcggagctgaacgaagctgcttcccggtttggacttggttcccctcttccatcgccaagagcttctccaagaccctggacgcccgaagatccatggtccctttacggcccatcccccggtggccgtgggcctgaagattcttggctcctgctgtccgcaccaggaccgacacccgcatctccgagaccagcatccccatgtggaaaacgaagatactcaagtagtgggaccccttcttctgcgtcacccgcacttagtaggcgcggaagcctgggagaagaaggctccgaacctcctcccccacctcccctgcctctggcacgggacccaggcagtcctggtccttttgactatgtcggtgcaccccctgccgagtccatccctcagaagacaaggagaacaagctctgagcaagccgttgcactgccaagatccgaggagcccgcatcctgcaatggcaaattaccacttggagccgaggaatctgtcgctccacctggcggttctcgcaaggaagtcgctggcatggactatctcgccgtgccctcccccctcgcatggtccaaggccagaataggaggacattctccaatcttccgaaccagcgccctcccacccctggactggcctctcccttcgcagtatgaacaacttgaacttagaattgaagttcagccaagggcccatcaccgtgcccattatgagacagagggcagtcgcggagccgtgaaagcagctcccggtggccacccagtcgtcaagcttctggggtattccgaaaaacctttgactctccagatgttcattgggactgcagatgaaaggaacctgcggccacatgctttttatcaggtgcatcgtatcactggcaagatggttgctaccgcttcttatgaggccgtggtgtcaggtacaaaggtgttagagatgaccctgcttccagaaaataacatggccgcaaatatagattgtgctggtatccttaaactgcgcaactccgacatcgagcttaggaagggcgagacagacattggaaggaagaatacgcgggtcagactggtgtttcgagttcacgtaccgcaggggggtggcaaggtcgtgagcgtacaggctgcgtctgttcctatagaatgcagtcaacggagcgcacaggagctgcctcaagtggaagcatactcccccagcgcctgtagtgtgcgcggtggagaggagctcgtcctgactggatctaattttctgcctgactctaaagtagtctttatagagagagggcctgatgggaagctgcaatgggaggaagaagcgaccgtcaatcgtctccagtcaaacgaggttacactgaccctcactgtcccagaatactctaacaaaagagtgagtcggccagtgcaggtctatttctacgtttctaacggtaggcgcaagaggtctcctacacagtctttccggtttttacccgttatctgtaaggaggaacctttaccagacagcagtttacgaggatttccgtctgcgagcgcaactccctttggaacggacatggatttcagtcctcctagacccccttatccatcctacccacatgaagatccagcgtgtgagacgccttatctctcggaagggttcggctacggaatgccgcctctgtatccccaaacgggaccgcctccgagttaccgaccgggactgaggatgtttcccgaaactcgagggactaccggatgcgcacaacccccagctgtgtccttccttccgaggccgtttcccagcgatccatatggtggtcgagggtctagcttcagcttaggcctccctttcagtcccccagctccctttcgcccaccaccactccccgcatcgcctccattggaaggcccttttccaagtcagagtgacgttcatcctctgcctgcagaagggtacaacaaagtggggccaggatatggccctggcgagggcgctccagagcaggagaaatcaagaggcggttactcctccggctttcgtgatagcgtccccattcaggggatcactctggaagaggtgtctgaaatcattggacgggacctgtcaggcttccccgctccccctggcgaagagcccccagcgtag

SEQ ID NO: 29875 - DNA, 2748 bp, synthetic construct
  misc_feature 1..2748: note = Description of Artificial Sequence: Synthetic coding sequence
  source 1..2748: mol_type = other DNA
atgctgtctggcagggacttaggcgcaccagctgggagcatgggcgcagcatcttgtgaggacgaagagctggaatttaagttggtctttggcgaagagaaggaagcgcctcccctaggggcaggcggactcggggaggaactggacagcgaggacgcacccccatgctgcagactggctctgggtgaaccaccaccatacggggctgcaccgatcggcatccctaggccccctcccccacgcccaggcatgcacagtcccccaccacgcccagccccttctcccggaacatgggagagtcaacccgcaagatcggtgaggctgggcggaccagggggaggggctgggggagcagggggagggcgtgtgttagagtgcccttccatccgcataaccagtatctctccgacccctgagccaccagcagcgttggaagataacccagatgcatggggagacggaagcccgagggattacccccctcccgagggatttggtggctatcgtgaggccggtggtcaaggcggaggggcatttttcagtccctcccctggttcttcttcactgtcatcatggtcattcttctctgacgcttccgacgaggccgctctttacgccgcatgtgacgaagtggaatctgagctcaatgaagctgcgagtcggttcggtctgggttctcctctgccatctccaagagcttctccgagaccttggacccccgaagatccttggtctctgtatggcccttcacctggcggacgaggcccagaggatagctggttgctattgtcagctcccggtcctacacccgctagcccacgccctgcctcgccctgtggcaaaaggaggtactcatcatctggcacaccgtccagcgcatcacccgcattgtctaggagagggtccctgggcgaggaagggagcgagccgcctccgccacctcctctgccactggcccgagatccgggatctcccggaccttttgattatgtgggagctcctccggctgaatcaattcctcagaaaaccagacgcactagctctgaacaagccgtggccctccctagatctgaggagccagcatcctgtaacggtaagttacctctgggcgcagaggagtcggtagccccacctggcggatcccgcaaagaggtggcaggcatggactacctggccgtcccttcgccactggcctggtctaaggccaggatcgggggacactctcctatattccgaacctccgctttacctcccctagactggcccttgccttcccagtacgaacagcttgagctccgcattgaagtgcaacctcgcgctcaccaccgcgcacattacgagactgaggggtcacgcggtgcggttaaagccgctcccggagggcatccagtcgtgaaactgctcgggtattcagagaagccactgaccctgcagatgttcatcggtaccgccgacgagcgaaatctccgcccacatgctttttaccaggtgcaccgcatcaccggcaaaatggtggctactgcctcctacgaggcagtggtatctgggaccaaggtattggaaatgactttactccctgaaaataacatggccgctaatatcgactgtgccggtattctgaagttgagaaacagcgacatcgaactgcgtaagggcgagactgacattgggagaaagaatacacgtgtgcgactggttttccgcgtgcatgtcccccagggtggtggcaaagtggtcagtgtgcaggccgcaagcgtaccaatcgaatgcagccagcgaagtgcccaggagctgcctcaggtcgaggcctactccccctccgcttgcagtgtgcgaggcggagaggaactggttctgactgggtccaactttttacctgactctaaagtcgtgtttattgagcgcggacctgatgggaagctacagtgggaagaagaagccactgttaatcggcttcagtctaacgaggtgacactcacactgaccgtgccagaatacagcaacaagagagtctctagacctgtgcaggtgtacttctatgtaagcaatggacgtcggaagaggtctcctacccagagctttcggtttctcccagtgatatgtaaagaggagcccttaccagactcatccctgcggggatttccctcagctagcgccacaccatttgggactgatatggacttcagcccgcctcgccctccttatcccagttaccctcatgaggatcctgcctgtgagaccccgtacctttcggagggcttcggatatggcatgcctcccctgtatccccagactggcccaccgccatcataccgcccaggccttagaatgttccccgaaacccggggaaccacaggatgcgcacagcccccagccgtctcctttctaccacggcctttcccatccgacccgtacggcggacggggatccagcttctcgctggggttacccttctcacctcccgctccgttcaggcctcctcccctacctgcaagcccacccctcgagggaccgttcccttcacaatccgatgttcaccctctgcccgcagaggggtacaataaggtaggacctggttatgggccaggggagggagcccctgagcaggaaaaaagtcgagggggatacagtagtggatttagagactccgttccaattcagggcatcaccctggaggaagtctccgagatcatagggcgtgatttatccggattccccgcacccccaggcgaggagccccctgcttag

SEQ ID NO: 29876 - DNA, 573 bp, synthetic construct
  misc_feature 1..573: note = Description of Artificial Sequence: Synthetic coding sequence
  source 1..573: mol_type = other DNA
atggatttcagtccgcctcgccctccataccctagttacccccacgaagaccccgcttgtgagaccccctacctgtcagaaggttttggatacggtatgcccccattatatccccagacgggcccacctccttcctaccggccagggctgaggatgtttcccgaaacccggggtacaacaggctgtgcgcagccccctgccgtgtcattcctccctaggcctttcccgagcgatccatatggaggcagggggagctccttcagcctggggctgccattttccccaccagccccttttcgaccccctccgctgcccgcatccccacccctggagggcccttttccctcacaatctgatgtgcatccattgccagctgagggatacaataaggttggacctggctatgggcctggcgagggcgctccagaacaggagaaatcccgcggaggttattcctctggattccgcgactcggtacctattcaggggattactcttgaggaggtgtccgagatcatcgggcgagatctctctggttttccggctcctcccggagaggaacccccagcttag

SEQ ID NO: 29877 - DNA, 2349 bp, synthetic construct
  misc_feature 1..2349: note = Description of Artificial Sequence: Synthetic coding sequence
  source 1..2349: mol_type = other DNA
atgcctgctagtattagctcaatctttcctggaccaacgctacttctgagctgcggatcagaagagctggattctgaagatgcccctccctgttgccgtctggctcttggagaacctccaccttacggcgcagctccaatcggcatccccaggccacctcccccaaggcctggcatgcactcgccaccgccacgacctgctccgtctccaggaacctgggaatcccagccagcacggtcggtgagactgggagggccaggcggtggcgcaggaggagctggagggggaagagtgcttgaatgccccagcatacgcatcacctcgatcagtccaacgcctgaaccacccgcagccctggaagacaaccccgatgcatggggggatggaagtccgagagattacccgccacctgagggtttcggtggctacagagaagctgggggacagggaggaggagcctttttctccccaagtcccggatcttcttctctttcgtcatggagcttcttcagtgacgctagcgacgaggccgcactctatgccgcatgcgacgaggttgagagcgagctcaacgaagcggctagtcgctttgggctcggttctcccctgccttctccacgcgcatcgccgaggccttggacccccgaggatccttggagtctctatggtccgagccctggcggacggggaccggaggacagctggctgcttctgagcgcgcctgggccaacacctgcttctcccaggcctgcaagcccatgtggaaagcgtaggtacagttcctctgggaccccatcatctgcatcacctgcactgtctcggcgtggctcactcggcgaagagggatcagagccccctccaccgccaccgttacccctggcgcgtgacccaggaagtcctggcccatttgactacgtgggggctcctcctgctgaaagtataccacaaaagaccaggcgtacatcaagtgaacaggccgtggctctaccacgttctgaggaacccgcaagttgcaatgggaagcttccactaggcgcagaagaatcggtggccccaccaggcggttctcgcaaggaagtggccggaatggattacctggccgttccctctccgctagcctggagtaaggccagaataggcggtcactcccctatcttccgcacatcagccttgccgccactggattggccactgccttcccagtatgagcagttggagcttcgcatcgaggtgcaaccacgggcacaccatagggctcactacgagaccgagggatcaagaggggctgttaaggcagctccaggcggacacccggtggtaaaactgctgggatattccgagaaacctctgacattacaaatgttcataggaaccgccgatgagcgcaacctgaggcctcatgctttctaccaagttcaccgcatcacagggaagatggtggcaacggcttcctacgaggctgttgtgagcggtactaaagttctggagatgacactgctgcctgagaataatatggccgcaaacatcgactgtgcaggcatcctcaaacttcggaattcagacatcgagctgagaaagggggaaactgacataggaaggaaaaatacacgcgtgcgacttgtcttccgcgtgcacgtgccacaggggggaggaaaggtggtatcagtgcaggcagcgtccgtccctattgaatgtagccagagatccgcccaagagctgccacaggtggaggcttactctcctagtgcctgtagcgtcaggggtggggaagagttggtgctcactggcagtaactttctacccgactccaaggtggtgttcatcgaaagaggtccagacggtaagttgcagtgggaggaggaggccactgtgaacagactgcaatccaacgaagtaactctgacgcttaccgtgcctgagtacagcaacaagcgcgtaagtcgtcctgtccaggtatacttctacgttagtaacgggcgtaggaaacgctcccctacacagtcgttccgcttcctgcccgtaatttgtaaagaggaaccccttcccgattcctcgcttagaggttttccatccgcaagcgccacaccttttgggacagatatggacttttccccaccgagaccaccatatccgagttacccgcacgaggacccggcttgcgaaactccttacctgtcagaggggtttggatatggcatgcctcctttgtacccccagaccggtcccccaccaagctacaggcccggactccgcatgtttccagaaacaagaggaaccactgtgagtgaaattattggcagggacctgagtggcttccccgctccccctggcgaggagcccccagcttag

SEQ ID NO: 29878 - DNA, 2805 bp, synthetic construct
  misc_feature 1..2805: note = Description of Artificial Sequence: Synthetic coding sequence
  source 1..2805: mol_type = other DNA
atggctgatggaggcgcagacagtgcggcacagaggctgcctgagggtcccggaagagtggctcccggacgggacctgggtgcacccgctggatccatgggtgctgcttcatgtgaggatgaagaacttgagttcaagttggtctttggcgaggaaaaggaagctcctccgcttggggcaggagggctgggggaggaactggacagcgaggacgcacctccatgctgccgcctggccctgggcgagccccctccctatggagctgcccctattggaattcccaggccaccccctcccagaccaggtatgcactcccctcccccaaggcccgcaccatctccaggcacatgggagagccagccggcaaggtctgtgcgactgggagggccaggtggcggagccggtggggcaggagggggaagggtgctggagtgcccttctatccggataacctccatttcacccaccccagagcccccagctgctctcgaagataaccccgacgcatggggcgacggatcccccagagactacccaccgccagaaggattcggcggttatcgcgaagccggtggacagggcggtggcgcttttttctcaccctccccgggatcttcatcactgtcctcttggagcttttttagtgatgcatccgacgaagctgctttatacgcggcatgcgacgaggtggaaagtgaattgaatgaagccgcaagcaggtttggcctgggctctcctctcccctctccccgtgcttcccctagaccatggaccccagaagatccctggtcactgtacggaccctcccctggtggaaggggccctgaggattcctggctcctgctgtccgctcccggacctactcctgctagccccaggccagccagcccatgcggtaaacggaggtattcgtcttccggtaccccaagctctgctagccctgcattgtcacgcagaggaagccttggtgaagaaggttccgagccacccccaccgccaccactgccactcgctcgggatcctggcagtcccggtccctttgactatgttggagcacccccagcagagagtataccacagaaaacaagaagaacgtcttctgagcaggccgtcgcactgcctcgcagcgaggagcccgcaagctgcaatggaaaattgcctctcggcgctgaggagagtgtcgctcctccaggaggttcaagaaaagaagtggcaggaatggactatctcgcagtaccatccccacttgcatggagcaaggctaggattgggggacacagtcctatcttccgaacttcagcactccccccactggattggccactcccctctcaatacgagcagttggagctccgcatagaagttcagcctagagcacatcatcgcgctcattatgaaacagagggctccagaggtgccgtgaaagcagccccaggcggacaccctgtcgtgaaactcttaggatatagtgaaaaacccctgaccctccagatgttcattggtacagcagacgagaggaacctgcgccctcatgccttctaccaggtgcaccggataactggaaagatggttgccaccgccagctacgaagccgttgtgagcggcactaaagtgctggaaatgaccctgctcccagagaataatatggcggctaacatcgactgcgccggtatcctcaagctgagaaatagcgacatcgagctccgaaagggggagaccgacattggcagaaagaatacacgtgtccggctcgtctttcgcgtgcatgtgccccagggcggaggtaaggtggtctctgtgcaggccgcatcagtgccaatagagtgttctcagcgaagcgctcaggaactgccacaggtagaagcctacagccctagcgcctgcagcgtcagaggcggagaggagctcgtgctgacgggctccaactttttacctgactcaaaagttgtttttatagaacgaggacccgacgggaagctgcagtgggaggaggaagcaactgtcaacagactccaatctaacgaagtaaccctcaccttgactgtccccgagtacagcaacaaacgtgtcagtcgcccagtccaggtgtacttctatgtcagcaatgggaggcgtaagcgtagtccaacccaatcattcaggttcctcccggttatttgcaaagaggagccattgcctgattcctctctgcgaggcttcccttcagccagtgccactcctttcggtacagatatggactttagtccccctcggcctccgtatccgagctacccccacgaggaccccgcatgcgagacgccttacctgagtgaaggcttcggctacggcatgccaccgttatatcctcagacaggaccacccccatcgtataggcctgggttgcgaatgttccctgagacccgaggaaccacagggtgtgcccagcccccagctgtctcttttcttccacgccctttcccctccgatccttacgggggaaggggcagcagtttcagtctgggccttccattctctccccctgcgccatttcgtccacccccactacccgcttcacctccgctagaaggtccgttcccttcgcagtccgatgtgcacccactccccgctgagggctacaacaaagtgggacccggatatggaccaggcgaaggggctcctgaacaggaaaagtccaggggcggttacagttccgggttccgggattccgtgccgatccaaggcatcactttggaagaggtcagtgaaataatcggtcgagatctctctgggttccccgctcccccaggcgaagagccacccgcttag

SEQ ID NO: 29879 - DNA, 1314 bp, synthetic construct
  misc_feature 1..1314: note = Description of Artificial Sequence: Synthetic coding sequence
  source 1..1314: mol_type = other DNA
atgttcataggcactgcggatgaacggaacttgcgccctcatgcgttttatcaggtacaccgaattacaggcaagatggtcgccacagcgtcatatgaggcagtagtgtccggaacaaaggtgttggagatgactttattacccgagaataatatggcagccaatatagactgcgccggaatcttgaaattgcgcaatagtgacattgagctacgtaaaggagagactgatatcggtcggaaaaatacacgcgttcggctggtgtttcgagtccacgtgcctcagggtggcggaaaagtggtgtcagtacaggctgcgagtgtgcccatagaatgtagtcagcgcagcgcacaagagttaccacaggtcgaagcttactccccttccgcctgttccgtccgcggaggcgaagagctggtgctgacaggcagtaactttctccctgacagtaaggtggtgtttatagaaagagggccagacggcaaattgcagtgggaagaggaagccacagttaaccgtcttcagagcaatgaagtcactctcacactgaccgtgccagagtactccaacaagcgtgtgagcagaccggtccaggtttacttttacgtgagtaacggtcgtcgcaagcggagtccaacgcaaagttttaggttcttgccagtgatttgcaaggaggaacctttgccagattcaagcttgagaggatttccaagcgccagtgcaactccttttggtaccgacatggacttctcaccgcctcggcctccttacccaagctatccacacgaggatccggcttgcgaaacaccttacctctcagaagggtttggatatggtatgccacctctgtatccccaaactggacctccgccaagttacagaccgggacttcggatgttcccagagaccaggggaactacagggtgcgcacaaccaccagcagttagcttcttgcccagaccttttcccagcgacccttatgggggtcgagggagctccttttctctgggcctgcctttctcccccccagctccgttccggccacctcccctccctgcttcaccccctctggagggccctttcccatcacaatccgatgtgcatccccttcccgctgagggttataacaaggtcgggccaggttacgggcctggggagggggcaccggaacaggaaaagagcagaggcggttactcgtcaggcttcagagattctgttccaatccaaggaatcaccctcgaagaagtctccgaaataatcgggagggacttgtctggcttccctgctccacctggtgaagagcctccggcttag

SEQ ID NO: 29880 - DNA, 2496 bp, synthetic construct
  misc_feature 1..2496: note = Description of Artificial Sequence: Synthetic coding sequence
  source 1..2496: mol_type = other DNA
atgcattctcctccaccccgtcccgcaccgtccccagggacatgggagtcccagccagctcggtcagtccgacttgggggacccggaggcggagcgggtggtgccggtggtggcagggttttagaatgtccgtccatcagaataacatctatatccccaacacctgaacctcctgcggctctggaggacaatcccgacgcctggggcgatggcagtccccgtgattatcccccacccgagggttttggtgggtacagagaagccggtgggcaggggggaggggcatttttttccccttcccccggatcatcctctctgagctcctggtccttcttcagcgacgcttccgacgaagcagccctctatgcagcttgcgacgaagtggaatcggagcttaacgaagcagcgtccaggtttgggcttgggagcccactgcctagcccacgggcaagtccacgcccttggactcctgaggatccgtggtcactgtacggcccttcaccaggtggaagaggccctgaggacagttggctattgctgagtgctccgggacccactcccgcatcccccagacctgcctccccctgtggaaaacgtcgctattctagttcaggtacccctagcagcgccagcccggcactgtctcgccgtgggtccctcggcgaagaaggcagcgagccccctccgccaccacctctgccactcgctcgcgatccgggttcacccggtcctttcgactacgttggtgcaccacctgccgagagcatccctcaaaagacgcggagaacaagctccgagcaggccgtggccctgcccaggtcagaggagccagcctcctgcaatggcaaacttccactgggggctgaggagagtgtggcgccacctgggggatcacggaaggaggttgccggtatggactacttggcagtgccatctcctctcgcttggtccaaggctaggattggaggccattcacctatatttcgcacgtccgccctccccccactggattggcctctgcccagtcagtacgaacaacttgagttacgaattgaggtgcagcctcgagcacatcatcgggcacactatgaaacagaaggtagtcgcggtgctgtcaaagccgcacctgggggtcatccagtggttaaattactcggttattcggagaagcccttgactctgcagatgttcataggtaccgctgatgagcgtaacctccgccctcacgcattctaccaggtgcatagaatcactggtaagatggtcgccactgcaagttatgaagccgtggttagcggcaccaaggtcctagagatgacactgttgcctgagaacaacatggcagccaacatcgattgcgctggtatcttaaagcttcgcaactctgacatcgaacttcgaaaaggcgagactgacattgggcgaaaaaacactcgcgtaagactggtgttcagagtgcacgtgcctcaaggtggcggtaaagtcgttagtgtgcaagcagccagcgtcccaatcgaatgttcccaaagatccgctcaggagctgccccaggtcgaggcctattccccatccgcgtgtagcgtacgcggtggcgaggaacttgtactgactggaagtaatttcctgcccgacagtaaggtcgtgtttatcgaaagaggccctgatggaaagctacagtgggaggaggaggcaactgtaaatcgacttcagagtaatgaggtcactctgaccctcactgttcctgaatatagcaataaaagagtttcacgtcctgttcaggtatacttctatgtctctaacggtcgtagaaaaaggtctccaacccagagcttcaggtttctgcctgtcatctgtaaggaggaaccgctgccagactcttccctgcggggattcccttctgcaagcgccaccccgttcggcacggatatggacttctcaccaccgaggcccccttatccatcttatccccacgaggatcctgcctgtgagacgccttacctgagcgaagggttcggctacggcatgccgcctctgtacccacaaacagggcctccaccttcctacaggccagggttacggatgtttccggagaccagaggcaccacaggctgtgctcaaccaccagcggtctcttttctgccccgaccattcccttctgatccctacggcggacggggatcttcgtttagtttggggctgccatttagcccacctgcccctttcagacccccacctctgcctgctagtcccccattagagggacctttcccttcccagtcagatgtgcatccattgccagctgagggctataacaaggtgggtcccggatatggccctggagagggagcgcctgagcaggaaaaatccaggggtgggtacagctccgggtttcgcgatagcgtgccaattcagggaatcactttggaggagggaggatgtgggaccggcggatgtgagtgcgaatgcgttcaagagatcgccttgcatgtgtgctag

SEQ ID NO: 29881 - DNA, 249 bp, synthetic construct
  misc_feature 1..249: note = Description of Artificial Sequence: Synthetic coding sequence
  source 1..249: mol_type = other DNA
atggacttctctccccctagacctccctacccctcctatccccacgaagaccccgcttgtgaaactccatatctctccgaggggtttggatatggaatgccccctctgtatccgcagacaggacctcccccatcatataggcccggactcagaatgttcccggaaacacgcggaactacagtcagcgaaatcatcggaagggacttatcagggtttccagctccccctggagaagaaccaccggcatag

SEQ ID NO: 29882 - DNA, 315 bp, synthetic construct
  misc_feature 1..315: note = Description of Artificial Sequence: Synthetic coding sequence
  source 1..315: mol_type = other DNA
atgtcctcagctgccaggtcacgtttgactagggcaacccgccaagaaatgctgttcttagcactcctactcttgcctgtcgtagtcgcttttgccagagccgaagctgaagaagatggtgatctgcaatgcctgtgcgtgaagacaacatctcaggtgagaccacggcatatcactagcctggaagtgatcaaggccggaccccactgccctactgcccagctcattgcaacactcaaaaacggtcggaagatctgcttggatctccaggcactgctgtacaagaagattatcaaggaacacctggaaagttag

SEQ ID NO: 29883 - DNA, 2907 bp, synthetic construct
  misc_feature 1..2907: note = Description of Artificial Sequence: Synthetic coding sequence
  source 1..2907: mol_type = other DNA
atggcagaggatgacccttacctgggtaggcccgagcagatgttccatctcgatccttccctgacgcatacaatcttcaacccagaggtgttccagccgcagatggcgctgcccacggacggcccatatctgcagatcctcgaacagcctaaacagagaggctttagatttcggtacgtgtgtgaagggccatcccatgggggacttcccggtgcctcatccgaaaagaacaagaaaagctaccctcaagtcaagatctgcaactatgtcggtccagccaaagtgattgtgcagctggttaccaacggaaagaatatccaccttcacgcccattcgttagttggcaagcactgtgaggacgggatatgcacggttaccgcgggtcctaaggacatggttgttggatttgcaaatttgggcattcttcacgttaccaaaaaaaaggtgtttgaaactctggaggctcgtatgaccgaggcctgtattcgtggttacaatcctggactgctcgttcaccctgatctcgcctacttacaggccgaaggaggaggagatagacagctgggagaccgggagaaagaactgatcagacaggctgccctgcagcagactaaagagatggacttgagcgttgtacgcctgatgtttactgccttcctgcctgattccacggggagtttcactagaaggcttgagccagtggtctccgacgcgatctatgacagcaaagcacccaacgcatcaaatcttaagatcgtgcgcatggacagaaccgccggttgcgtaaccgggggagaagagatatatcttctctgtgacaaagtgcaaaaagacgacatccaaattaggttctatgaggaagaagagaatggtggagtgtgggaaggctttggtgatttctctcccacagatgtacacaggcaatttgccatagtgttcaagactccgaagtacaaggacattaatatcactaagcctgcctctgtttttgtgcagctgcgcagaaagtctgacttagagacttctgaacccaaaccctttctttactacccagagattaaggataaggaggaagtgcagaggaagcgacagaaactcatgccaaatttttcggactccttcggaggtgggagcggcgctggcgctggagggggagggatgtttggaagcgggggaggaggcggaggcactgggagcaccggcccaggttattctttcccccattatggctttcccacttacggaggcatcacatttcatccaggtacgacaaagtctaacgcgggaatgaagcacggcactatggacacagaatccaagaaagaccctgaaggctgcgataagagcgacgacaaaaacaccgtgaatctgtttgggaaggtcatcgaaactaccgaacaggatcaggaaccctctgaggcgacggtgggaaatggcgaggttacgttgacctatgccactgggaccaaagaagagtcggcaggagtacaggacaacttgttcctcgagaaagctatgcagctcgctaagaggcatgctaacgccctgttcgattatgccgtgaccggtgacgttaagatgctgctggcggtgcaacgacacttgaccgcagttcaggacgagaacggagattccgtgctgcaccttgctatcatacatctgcacagccagctcgtccgcgacctccttgaggtaacttcgggcctaatttctgacgacattatcaatatgcgcaatgacttgtaccaaaccccactgcatctggcagtgatcaccaaacaggaagacgtggtcgaggaccttctgcgtgccggtgcagacctgagtctgctcgatcgtctggggaatagcgtgctgcaccttgcggcaaaggagggccacgataaggtgctctcaatcctgctgaaacataaaaaggccgcacttctgctcgatcatcctaatggagatgggctcaacgctattcatctggccatgatgagcaactccctcccttgcctgttgctactggtggcggcaggggcagatgtaaatgcacaggaacaaaagtcagggaggacagccctgcacctggctgtcgaacatgacaacatttcactggcaggatgtctgctgcttgaaggagatgcccacgttgattccacgacatacgacgggacaactcccctgcacattgccgctggtagaggctccacccggctggctgcactcctgaaagccgctggtgccgaccccctggtggaaaattttgagcccttgtacgatttagatgattcttgggaaaacgcaggcgaggatgagggggtagtgccaggtactacccccctggacatggctacatcttggcaggttttcgatatcctcaatggaaaaccatatgagcctgagtttacctcggacgaccttctcgcgcaaggagatatgaagcagctggccgaagatgtaaagcttcagctctacaagctgcttgaaatccctgatcccgacaaaaactgggctactctggcccagaagcttggactgggcatattgaacaacgctttcaggctttcaccagctccttcaaagacgcttatggataactacgaagtgtcgggaggtacggtacgggaactagttgaagctctgaggcagatgggatacactgaagcaattgaagtgatacaggccgcttctagccctgtcaaaaccaccagccaggcccactcccttcccctctcacccgcttcgacacgtcaacagatcgatgagctgagagattcagactctgtgtgtgattctggcgttgaaacttcatttcggaaactcagtttcactgaatctctcaccagcggcgcaagcctgctgaccctgaacaaaatgcctcatgattatgggcaggagggcccactcgaagggaagatttag

SEQ ID NO: 29884 - DNA, 2907 bp, synthetic construct
  misc_feature 1..2907: note = Description of Artificial Sequence: Synthetic coding sequence
  source 1..2907: mol_type = other DNA
atggccgaagacgatccgtacctaggtaggcccgaacaaatgttccatctggatccgtccctgacacacactatttttaatcctgaggtgttccagccgcagatggccttgcctactgacggcccttacctgcagatactggaacagccaaagcagcggggttttagatttagatatgtgtgcgaaggtccctctcacggcggactgccaggtgcctctagcgagaaaaataagaaatcctacccacaagtaaagatttgtaattacgtgggcccagccaaggtgatcgttcagcttgtcacgaatggaaaaaacatccacctgcacgcccactctctggtggggaagcattgtgaagatggcatctgcaccgtgactgccggaccaaaagacatggtggtcggttttgccaacctggggatactgcacgtgacaaaaaagaaagtgttcgaaactcttgaagccaggatgacggaggcgtgcatccgaggttataaccccggacttctcgtgcatcccgacctcgcttacctccaggcagaagggggaggcgaccggcagctcggcgaccgggagaaagagcttatcaggcaggctgctctgcagcaaacaaaggaaatggacctttcagtcgttcgactgatgttcaccgctttccttcccgattcaacagggagtttcacaaggagattggaacctgtggtgagcgacgctatctatgattccaaggccccaaacgcgagcaatctcaaaatcgttcgaatggaccgcactgccggatgcgtcaccggaggtgaggaaatctacctgctctgtgacaaggtgcagaaagatgacatacagatccggttctatgaggaagaggaaaacggaggcgtgtgggagggctttggggacttttcacccacagacgtccacaggcaatttgccatcgtctttaaaactccaaagtacaaggatatcaacattacgaaacctgcctccgtctttgtgcagctccgcagaaaatccgacttggaaacttctgaaccaaagccgtttctgtactatcctgagatcaaagacaaggaggaagtgcaaagaaagcgccagaagctcatgcccaattttagcgattcttttggcggagggtctggggctggtgctggcggaggcggaatgttcggctccgggggagggggtggcggaacgggcagcaccggccctggctacagcttcccacactacggcttccccacttacgggggtatcacatttcacccaggaaccacaaagtccaatgccggtatgaagcacggtaccatggacacggagagcaagaaagacccagaggggtgtgacaaatccgatgataaaaatacagtcaaccttttcggcaaagtcattgagactaccgaacaggaccaggaaccatctgaagctaccgtgggcaacggagaggtcaccttaacctacgctactggcaccaaggaggaatcggccggagttcaggacaatttgtttctggaaaaagccatgcaacttgccaagagacatgccaatgctttgtttgactacgcagtgaccggcgatgtgaagatgctgctggctgtacagaggcatttaactgccgttcaggacgaaaatggcgactcagtcctccacctcgcaatcattcacctacattctcaactggtgagggacctgttggaggtgacctcaggcttaattagtgacgatatcattaacatgcgcaatgacctgtatcagacacccttacatttagcagtaatcacaaagcaggaggacgtggtcgaggatctcctgcgcgctggggctgacctgtcccttctcgaccgtctcggaaacagtgtgttacaccttgcagctaaggagggtcacgacaaggtcctctctattctgcttaagcacaaaaaagccgcattactcctcgaccatcccaacggagacggcctcaacgccatccacctagctatgatgtccaattcactcccctgtctgctgcttctggtcgccgctggcgctgatgtaaacgcccaggagcaaaaaagcggacggaccgctcttcatctcgcagtagaacacgataacatttccctggctggctgcctgctgttagaaggagacgcccacgtggacagtacgacctacgatggaactacgcccctccatattgctgctggtagagggtccacacggctggccgctctgctcaaggccgcaggcgctgatcccctggtcgaaaacttcgaacccctatacgaccttgacgattcttgggaaaatgcgggtgaggatgagggagtcgttccgggaacaacaccactcgatatggccacctcatggcaggtctttgatatattgaatggaaaaccttacgagcctgagtttacttccgatgacttgttggctcagggggacatgaagcagctcgctgaggacgtcaagctgcagctgtataaattgttggagattccggatccagacaagaattgggccacgcttgcacagaaactgggtctcggaatcctgaataatgccttcaggctctctcctgccccttcaaaaaccctcatggacaactatgaggtgagcggaggcaccgtccgcgaattagtagaggccctgcgccaaatggggtatacagaggccatcgaagtgatccaggcagcatccagtccagtgaaaaccactagtcaggcccatagcctgcctttgtcacccgctagtacccgacaacagatcgacgaactgcgggattctgacagtgtgtgcgattctggagtggagacatccttcagaaaactttcattcaccgaatccttgactagcggcgcaagtctgcttacactcaacaaaatgccacacgattatgggcaggaaggcccactggagggcaaaatatag

SEQ ID NO: 29885 - DNA, 438 bp, synthetic construct
  misc_feature 1..438: note = Description of Artificial Sequence: Synthetic coding sequence
  source 1..438: mol_type = other DNA
atggccgaggatgacccctacctggggaggcctgaacagatgttccatcttgacccctcactcacccatactatctttaaccccgaggtcttccagcctcagatggcactgcccacagctgacgggccatacctacagatcctggaacagcccaagcagagaggctttcggttccgttacgtctgtgaaggtccaagccacggaggactgcctggcgctagcagcgaaaagaacaagaagagctacccacaggttaaaatctgcaactacgttgggcctgccaaggtcatcgttcagttggttaccaatggaaaaaatatccatctccatgctcactcactggtgggtaaacattgtgaggacggcatttgtaccgtgacggccggacccaaggacatggtagtgggtttcgcaaatctgggaattcttcatgtgtag

SEQ ID NO: 29886 - DNA, 225 bp, synthetic construct
  misc_feature 1..225: note = Description of Artificial Sequence: Synthetic coding sequence
  source 1..225: mol_type = other DNA
atgaagaggacgaccagctttcgaatggcagaggatgatccatacctgggcaggcctgagcagatgttccaccttgaccctagcctgacacatacgatatttaatccggaggtgtttcagccccagatggcactgcctaccgacggcccatatctccagattttagaacagcctaagcagaggggttttcgatttcgctatgtctgcgaggggccttctcactag

SEQ ID NO: 29887 - DNA, 1923 bp, synthetic construct
  misc_feature 1..1923: note = Description of Artificial Sequence: Synthetic coding sequence
  source 1..1923: mol_type = other DNA
atggccgctctgtacagaccaggcctgcggctaaattggcacgggctgtctccattggggtggcccagctgcaggtcaatccagactctacgcgttttgagcggggatctcggtcagctgccaacaggaatccgcgactttgtagaacactctgccagactgtgccagcccgagggaattcacatctgcgatggaactgaagccgagaatacagccacactgacgctgctggagcagcagggattgatcagaaagttgccaaagtacaacaactgttggctagccagaacagaccccaaggacgtggccagagttgagtccaaaacggtaattgtaacccccagccagcgcgatactgtgcagctgccccctggaggtgctcggggtcagctgggcaattggatgagcccagcggacttccagcgcgcagttgacgaacggttccccggttgcatgcagggacggaccatgtatgttctgcctttttctatgggtccagttggttcaccactgagtcggatcggagttcagcttacagattctgcctacgtggttgcgtcaatgagaatcatgacccgcttggggacgcccgtgctgcaggccctgggtgatggtgatttcgtcaaatgtctgcatagcgtgggacagcctcttaccggccagggagagcccgtttcccagtggccatgtaacccagaaaagacacttatcggacatgtacctgatcagcgcgaaataattagtttcggcagcgggtacggcggaaactcactgctggggaaaaaatgtttcgccctgaggattgcctcccggttagccagggatgaggggtggctcgccgaacacatgctgatcttggggattacatctcctgctggcaagaagaggtatgtggctgccgctttccctagtgcttgtggtaaaacgaacctcgctatgatgcgccctgcccttccaggatggaaggtggagtgcgtgggggacgacatcgcttggatgcgcttcgactctgagggcaggctccgcgcaataaatccagaaaatggtttttttggagttgctcctggtactagcgccactacaaaccccaacgccatggcaactatccagtccaatacaatcttcaccaacgtagccgaaaccagcgacggaggagtctactgggaaggaatcgaccaacccttgcctccaggcgttaccgtcacctcgtggctcgggaaaccttggaaaccgggagacaaagaaccctgcgcccacccaaactctagattttgcgccccagcacgacagtgtccgatcatggacccagcttgggaggctcccgaaggggtgcctatagacgcaattatatttggaggcagaagaccgaaaggagtgcccttggtgtacgaggccttcaactggaggcatggcgttttcgtcggcagtgccatgcgtagcgaaagcactgctgctgccgaacacaagggaaaaattattatgcacgatccctttgccatgcgtccctttttcggttataactttggtcattatttggagcactggctttctatggaaggcaggaagggcgcacagttaccccgaatctttcacgtcaactggtttcgtcgtgacgaagctggacactttctgtggcccggattcggggagaatgccagagtgctagattggatctgccgcagacttgagggcgaagacagtgcaagagaaactcctatcggtcttgttcccaaagagggcgctttggacctcagtggcctgcgcgcaatagacacaactcagcttttctctctcccaaaagacttctgggaacaggaagtaagagacattcggagctatctgacagagcaagtcaaccaagacctgccaaaagaggtgctggctgaactggaggcactggagcggagggttcataagatgtag

SEQ ID NO: 29888 - DNA, 3477 bp, synthetic construct
  misc_feature 1..3477: note = Description of Artificial Sequence: Synthetic coding sequence
  source 1..3477: mol_type = other DNA
atgacgcacggtgaagaactgggctccgatgttcatcaggactctattgtgttaacataccttgaagggctcctaatgcaccaggcagccggaggatctggaacagccgtggataagaagtcagctgggcacaacgaggaggaccagaatttcaatattagcgggtcagcctttcctacttgtcagtccaatggcccagttctgaatacccatacctaccagggcagcggaatgcttcatctcaagaaagcgcgactgctacagtctagcgaggactggaacgcggcaaagagaaaacgcctgtcagactcaatcatgaatctcaatgtgaagaaggaggcattgctggcaggcatggtcgactccgtccctaagggaaaacaggactcaacgcttctcgcaagtttgttacagtcgttctcctcacgtctccagaccgttgctttatcccaacagataagacagagcttaaaggaacagggatacgcgctcagccatgattccctaaaggtggagaaggacttgcgttgttacggtgttgctagctcacatttgaagaccctgctgaagaagtctaaggtcaaggaccaaaagcccgatactaatctgccagacgtcacgaagaatctaattcgcgaccggtttgccgaatctccacaccacgtgggacagtccggaaccaaggttatgtccgagcctctttcatgtgctgcgcgattgcaggcggtggcttccatggtggaaaagagagcttcacctgctacaagccccaagcccagcgttgcctgcagccagctggccctcctcctctccagcgaggcccatctccagcagtacagtagggaacacgccctgaagactcagaatgccaatcaggctgcctctgaaaggctggctgccatggccagattgcaggaaaatggccagaaggacgtcggctcttatcagctgcccaaagggatgtccagtcatctgaatggacaagctagaacaagcagctccaaactgatggcgagcaaaagcagcgccacagtgttccagaatcccatggggatcatcccctcatccccaaaaaacgcaggctacaagaattcactcgagcgcaacaacatcaagcaggcagcaaacaatagccttctgctgcatctgttgaaatcccaaactattcccaaaccaatgaacgggcactcgcactcagaacggggaagtattttcgaggagtcgtcgacacctacaactattgatgagtattctgacaacaatccctccttcacggatgattctagtggagacgagtcgtcctatagcaactgcgttcccatcgacctatcctgtaaacaccgaactgagaagtcagagagcgaccagccggtgtccctggacaactttacacaatccctcctgaacacttgggaccccaaggtgcccgatgtggatatcaaagaagatcaggatacgagcaaaaactcaaaactgaatagtcaccaaaaggtgacactgttgcagctgctcttaggccacaaaaatgaggagaacgtggagaagaatacatctccccagggagtgcataatgatgtctcgaagtttaatacccagaattacgccaggacgagcgtcattgagtcgccatccaccaataggacaacgcctgtttctacgccaccgttacttacatcatccaaagccggatctcccatcaatctcagccagcactctttggtgattaagtggaatagtcccccatacgtgtgtagcactcagtcagagaagctgacaaatacagccagtaatcactcaatggatctgaccaagagcaaggacccgccaggcgagaagcctgcacagaacgaaggggctcagaattctgctacgttctccgccagtaaactcctgcaaaacttggcccaatgcggaatgcaaagttctatgtccgtggaggaacaacgccctagtaagcagctactgaccggcaacaccgataaaccaatcggcatgatagacaggctgaactctcccctgctgtctaacaagactaatgccgtcgaggagaataaagcattcagttcacagccaactggacctgaaccaggcctttcagggagcgagattgagaatcttctggagagacggacagtcctgcagctgcttttaggtaaccccaacaaagggaagagcgaaaagaaagaaaaaacaccactcagagacgagagcactcaagagcatagcgaacgcgctctgagcgagcagattctgatggttaagataaaaagcgaaccctgtgacgacctgcaaattcctaacactaacgtgcacttgagtcacgatgccaaatccgcaccctttttaggcatggctccagctgtacagaggtcagctccggctctcccagtctcagaggacttcaagtcagagccagttagtccacaggacttcagctttagtaagaatgggctgcttagcaggttactgcgacagaatcaagacagttatctcgctgatgacagtgatcgatctcaccggaacaatgagatggccctgttagagtctaaaaatctttgcatggttccaaaaaagaggaagctttataccgagccactggagaaccctttcaaaaagatgaaaaacaatattgtcgatgcagcgaacaaccacagcgctcctgaggtcttgtacggtagccttctgaatcaagaggagttgaaatttagccgcaacgatttggaattcaagtaccccgcaggacacggttctgctagcgagagcgaacatcgctcctgggccagggagagtaagtcattcaatgtcctcaagcaactgctgctctcagaaaattgtgtgcgcgatctgagtccgcatagatctaactcagtcgcggatagcaaaaaaaagggacacaagaataatgtgactaattctaagccagagttttccatctcgagtctcaatgggcttatgtactctagtacacaaccatcttcctgcatggataaccgtactttcagttacccgggtgtcgtcaagacaccggtgtcacccaccttccctgaacatctgggatgtgcgggatctaggcctgaaagtggcctcctcaatggctgcagtatgccttccgaaaaaggacctatcaagtgggtaataaccgatgctgaaaaaaatgagtacgagaaggatagccccagactaacgaagaccaaccctattttgtactatatgctccagaagggaggtaactcagtgacctccagggagacgcaggataaggatatttggcgagaagcttccagcgcagaatccgtatctcaggttaccgccaaagaagagttactgcctactgccgaaaccaaggcaagttttttcaacctgcgtagcccctacaactctcacatgggaaataatgcctcacgccctcacagcgctaacggtgaagtatacggtttgctcgggagcgtcctcacaatcaagaaggaatctgagtag

SEQ ID NO: 29889 - DNA, 3477 bp, synthetic construct
  misc_feature 1..3477: note = Description of Artificial Sequence: Synthetic coding sequence
  source 1..3477: mol_type = other DNA
atgacacatggggaagagctgggctctgacgtccaccaggactccattgtcctcacatacttggaggggctcctgatgcatcaggcagcaggaggatcgggaaccgccgttgacaagaagagcgcaggtcataacgaggaggaccagaatttcaatattagtggaagtgccttccccacttgtcaaagtaacggcccagttctcaacacacatacgtaccaggggagcggtatgctgcacttgaaaaaagctagacttcttcagtcttcggaggattggaatgctgcaaagcggaagaggttgtcagattccatcatgaacctgaatgtcaaaaaggaggccctcctcgctggcatggtcgactctgtacccaaaggcaagcaagactctaccctgcttgcttccctccttcagtcattttcctcccgacttcaaaccgtcgctctgagtcagcaaatcagacagagcctgaaggaacagggatacgctttatcccacgacagcctgaaggtggagaaggatctccgctgctatggtgtggcctctagccaccttaagactctcctcaagaaaagtaaagttaaagatcagaaacccgacactaacctgcctgatgtgactaagaacctgatccgcgaccgattcgccgagtcaccgcaccacgtgggccagagcggcacaaaggtcatgtctgagcccttgtcttgcgccgctcgcttgcaggcagttgcttccatggtggaaaagcgtgcctcgccagcgacatcccctaaacctagtgtagcctgctcgcagctggctctcctgctttctagcgaagctcatttgcagcagtactcaagggaacacgcactcaagacacaaaacgccaatcaagcggcaagcgagcggctcgcggctatggccaggcttcaggagaatggacagaaagatgtggggagctatcagctgcctaagggcatgagtagccacctgaacggacaagccaggacatcctcctcgaagctgatggctagtaaaagttccgctacagtgtttcagaaccccatgggcatcattccctcctcccccaaaaacgccggatacaaaaacagtctcgaacggaataacataaagcaggccgctaataattccctgttacttcacttgctcaagtcccagacaatcccaaagcctatgaatggccacagtcactctgagcgagggagcatttttgaagagtctagtaccccgacgaccatcgacgagtatagtgacaataatccaagctttaccgatgactcttcaggagacgaatcttcctactcaaattgcgtacccattgacctttcttgtaaacaccgaaccgaaaaaagcgaatctgatcagcccgtctcactagataacttcactcaatccctccttaacacgtgggatccgaaggtcccagacgttgacatcaaagaagaccaggacactagcaaaaatagtaaactgaactctcatcagaaggtaacattactacagctcctgctgggccataaaaatgaagaaaatgttgagaagaataccagcccccaaggggtgcataatgacgtcagtaagtttaatacccagaattacgccagaaccagtgtcatcgagtcaccctctacaaacagaacaacccccgtctctactcctcccctgctgaccagcagtaaggccggaagtcccattaatctgagccagcactcactggtgataaagtggaattcccctccctatgtgtgtagcacccaatcggaaaagttgacaaacacggcaagcaatcactcaatggacctgaccaaaagcaaagatcctcccggtgagaaaccagctcagaatgagggagcccagaactcagctacattttccgcgtcgaaactgctgcagaacctcgctcaatgcggaatgcagtccagtatgagtgtagaagagcaacgtccatccaagcagttgttaaccggtaatacagacaagcccatcggtatgatcgacagacttaactcaccacttctgtcaaataaaactaatgccgtggaagagaacaaggcattcagttctcagccgacgggtcccgaaccaggcctgtcagggagtgaaatcgagaatctgctggagcggcgaaccgtgttgcagcttctgctcggcaatcccaataagggcaaatcagaaaagaaagagaagacacctctgagagacgagtccacgcaggagcacagtgaaagggctctgtccgagcaaattctcatggtcaagataaaatcagagccttgtgatgacctgcaaattccaaataccaatgtgcatctgagccacgacgcaaaatcagctccattcctcggcatggcccctgccgtccagcggagcgccccagccctgccagtgtccgaagactttaaaagcgaacctgttagtccccaggactttagctttagcaaaaatgggctgctttccagattgctgagacagaaccaagatagctatctggccgacgacagcgatagatcccaccgaaacaacgagatggcgctgctggaatcgaagaacctgtgtatggtccctaaaaaacgtaagttatacactgagccgctggaaaaccccttcaagaagatgaagaacaacatagtggatgcggctaataaccactccgcccctgaggttctgtacgggtcactgttaaatcaggaggagctgaaattctccagaaacgacctagaattcaaatatccagcaggccacgggtcagcctcagaaagtgagcaccgctcatgggcccgtgagtctaaatctttcaatgtgctgaagcagctgctgctctctgaaaattgtgtccgggatctgtcgcctcaccggtctaactccgtagccgattccaaaaaaaagggccataaaaataacgtgactaactctaagcctgagttctctatcagtagcctgaatggcttaatgtatagctccacccagccaagcagctgtatggataaccgtacattctcttatccgggtgtggttaaaaccccagtgtcaccgactttcccagaacacctgggttgcgctgggtcccgtccggaaagtggactgctcaacggatgttccatgcctagcgaaaaggggcctattaagtgggtgataacagacgctgaaaagaacgaatacgaaaaagactctccacggttgacaaaaacaaatcccatcctctattatatgctgcaaaaaggtgggaatagcgtcaccagtcgcgaaacccaggataaggatatttggagagaagctagcagcgccgagagtgtcagccaagtcaccgccaaggaggaacttctacccaccgccgaaactaaagccagtttcttcaatctacggtctccctacaattcccatatgggcaacaatgcctctaggcctcactccgcgaatggcgaggtgtacggcctgcttgggtccgttctgaccataaagaaggagtctgagtag

SEQ ID NO: 29890 - DNA, 3477 bp, synthetic construct
  misc_feature 1..3477: note = Description of Artificial Sequence: Synthetic coding sequence
  source 1..3477: mol_type = other DNA
atgactcacggcgaagagctcggcagcgatgtgcatcaagactccatcgtgctcacatatctggaaggtctgcttatgcatcaagctgccggaggctctggcaccgctgtagataagaagtccgccggacataatgaagaagaccagaattttaacatcagtggatctgcctttcctacttgccaatctaacggaccagtcctgaacactcacacatatcagggcagtggcatgcttcacctgaaaaaagctagattgctccaaagtagcgaggactggaatgcagccaagaggaagaggctgagtgactctataatgaaccttaacgtgaaaaaggaagccttactggcaggcatggtggattctgtgcccaagggaaagcaggacagtaccctattggccagcctgctgcagtctttcagtagtagacttcaaaccgtggccctctcccagcagattcggcaatctctgaaggaacaggggtacgcgctttcacatgattctctgaaggtggagaaggacctcagatgctatggcgtggcctcttcccatcttaaaactctgctaaaaaaatctaaggtcaaggaccagaagcccgatactaatctcccagacgtcaccaaaaacttaattcgggacaggttcgccgagtccccgcatcacgtcggtcagtctggcacaaaagtgatgtccgagcccttatcttgcgcagcaaggctccaggctgttgccagcatggtggaaaaacgtgcatcgcctgctaccagtcccaagccttcagtggcatgttcacagctcgccctcctgttgagctctgaggcgcacctgcagcaatacagccgtgagcatgcgctgaaaacccagaatgccaaccaggcagcctcagaacggctagcggctatggctaggttgcaagagaacgggcagaaagatgttggcagttatcagctacccaaggggatgagctctcatctgaatggacaggcgagaacctcatcttcgaagctaatggcaagcaagtccagtgctactgtgtttcagaatcctatggggataattccatcatccccgaaaaatgctggttataagaattccctggagcgcaataatatcaaacaggcagctaacaatagcctgctgttacacctactaaagtctcagactattccgaagcccatgaacggacactctcactctgaaagagggtcaatcttcgaagagtcttcaacacccacaaccattgatgagtacagtgacaataacccctctttcaccgatgatagctccggggatgaaagttcctactctaattgtgtaccgattgatctctcttgcaagcaccgcacggaaaaaagtgaatccgaccaacctgtctcgctcgataacttcacacagtctctgctgaacacctgggaccctaaagtgccagatgtcgacatcaaagaggatcaagacacctccaagaactcgaagctgaattcccaccagaaggtcaccctgctccagttattgctcggacataaaaacgaagaaaatgtggagaaaaacacgagtccgcaaggagttcacaatgacgtaagcaagttcaacacccagaattatgcccgaaccagtgttattgaatctcctagtactaatcggactacaccggtgtccacacccccactgctgactagctccaaggctggtagtcccatcaatctgagccagcattctcttgtcattaaatggaactcccccccttacgtttgctcaacacagagtgaaaagctcactaatacagcgtccaatcactccatggatctcaccaagtcaaaagaccctccgggtgaaaagccagcccagaatgagggagcccagaattctgccacattctcagcgagcaagcttctgcagaatcttgcccagtgcggcatgcagtctagcatgtctgtcgaagagcagcgaccatcgaagcagctattaactggcaataccgacaaacctatagggatgatcgatcgtcttaacagtccactgctgtcgaataaaacgaacgctgtggaggaaaataaagccttctccagccagcccactggtccagaaccaggacttagcggttccgagattgaaaatctgctcgaaagaaggaccgtgctgcagctcctgctgggcaaccctaacaaggggaaaagtgaaaagaaagagaagacccccttacgcgatgagtcaactcaggagcattcagagagagcactgtcagagcagattctgatggtaaagataaagagtgagccatgcgatgacttacagatccccaatacgaatgtgcacctttcacacgatgctaaatctgcgccttttttaggcatggcaccagctgtgcagcggagcgcccctgcccttccagtgtccgaggacttcaagtccgagcctgtatcaccccaagacttcagcttttcaaaaaacggactcttaagtagactcctgcgacagaaccaggacagttaccttgccgacgattccgacagaagtcacagaaataacgagatggccctgctggagtctaaaaatctttgtatggtccccaaaaaacggaagttgtacactgagccccttgagaatccatttaagaagatgaagaacaatatcgtggacgcggctaacaatcactccgctccagaggtgctgtatggtagtttactaaatcaggaggagcttaagttttctcgtaatgatcttgaattcaaataccctgcaggacacggatctgcctcagagagcgaacatcggtcgtgggctcgggaatctaagtcttttaatgtgctgaaacagctgctcttatccgaaaattgtgttcgagatttgtcgccacacaggtctaattcagtggccgacagcaagaagaaaggacataaaaataacgtgaccaattcaaaacccgaattttccatctcctctctcaatgggctgatgtactcatctacgcagccttcctcttgtatggacaatcgtacgtttagctaccctggggtcgtaaagaccccggtttcccccaccttccccgaacacttagggtgcgccggaagtagaccggagagcggcctattgaacggttgttccatgccaagcgaaaagggacccatcaagtgggtaattacagacgctgagaagaatgaatacgaaaaggatagcccaagactgacaaagaccaatcccatactatactacatgctgcagaaggggggaaattctgtgaccagccgcgagacacaagacaaagacatctggcgcgaagctagttccgccgagtccgtgtcacaggtgacagctaaagaagagcttttgccaactgctgagacaaaggcctccttttttaatttaaggtcaccctataactctcatatgggaaataacgcttcacgcccacactccgcgaatggggaggtgtacggactcctgggaagcgtgctgacaattaagaaagaatccgaatag

SEQ ID NO: 29891 - DNA, 201 bp, synthetic construct
  misc_feature 1..201: note = Description of Artificial Sequence: Synthetic coding sequence
  source 1..201: mol_type = other DNA
atgacgcacggagaagaactcggttccgacgtgcatcaggactccattgtgctgacctatctagaaggccttctgatgcatcaggctgctggcggtagcggaactgctgttgacaagaaatcagcaggacataatgaggaggatcagaatttcaacatttctggctcagccttccccacatgccaatctaacggcccttag

SEQ ID NO: 29892 - DNA, 4176 bp, synthetic construct
  misc_feature 1..4176: note = Description of Artificial Sequence: Synthetic coding sequence
  source 1..4176: mol_type = other DNA
atgcccagtagcctccttggcgctgcaatgcccgcttcaacatcagctgccgctttacaggaggcactggagaatgcgggacgactaatagaccgacaactgcaggaagaccgcatgtatcctgatctctccgagctgctaatggtgtccgccccaaacaaccccacagtctcaggtatgtcggatatggactacccacttcaaggccctggcctgctttctgtgcctaaccttcctgaaatttccagtataaggcgggtccccctgcctccagaactagtcgagcagtttggccatatgcagtgtaattgcatgatgggggtatttcctcccatttccagggcatggctgacgatcgactccgacatttttatgtggaattacgaagacgggggtgatctggcgtactttgacggcttgtcagaaacaatcttggcggtagggctggtgaaacccaaagccggaatctttcaacctcatgttagacatttgctagtgctcgctactcccgtggacattgtcattctgggactctcgtatgcgaacctgcagacaggcagcggtgttctcaacgattcgctgtctggcggaatgcagctgctgccggacccactctacagtcttcctacagataacacttatctgctgacaatcacctctaccgataatggtcgcatcttccttgctggtaaggatggatgtttgtatgaggtggcttaccaagccgaagctggctggttctcccagcggtgtaggaagatcaatcatagtaaatccagtctgtccttcctcgtgccgtccctgctacagtttactttttctgaggacgatccaattctgcaaattgcgatcgacaattccaggaatattctctacaccagatctgagaaaggagtgatacaggtgtatgacctcgggcaggacggccagggaatgtctagagtggcctccgtttcccagaacgccattgtttcagctgctggaaatattgcacgcaccattgacagatccgtcttcaaacctattgtccagatcgctgtgatcgagaacagcgagtcacttgactgccagctccttgccgtgacacatgctggcgttaggctgtacttcagtacttgtcctttcaggcagccccttgcaaggcctaacacactgaccttggtgcatgtacgacttccaccaggatttagcgcgtcctctactgtcgagaagccctcaaaggtgcaccgggctctttatagtaaggggattcttctcatggcagcgtctgagaacgaagacaacgatatcctctggtgtgtgaatcacgacacttttccttttcagaagccaatgatggagacacagatgactgccggagtcgatgggcattcttgggccctgtccgctatcgacgaactcaaggttgataagataatcactccacttaataaagatcacataccaattactgattcccctgtggttgtccagcaacatatgctgcctcctaaaaagttcgtcctgctctcagctcaaggcagcctcatgtttcacaagctgaggcccgtggaccaactgcggcatctgctcgtgagcaacgtcggtggagacggagaagaaatcgagagattcttcaagttacaccaagaggaccaggcctgcgccacctgtctcatccttgcttgtagtacggctgcatgcgaccgagaagtgtcagcctgggccaccagggccttcttccgttacggaggtgaggcgcagatgaggttcccaactacactgccccctcccagcaacgtgggccctatcctaggcagtcctgtatacagctcctctccagtgccttctggcagtccataccccaatccaagtttcttaggtactccttcgcatggcatccagcctcccgctatgtctactcccgtatgcgcattggggaatcctgcaacccaggctaccaatatgtcttgcgtcaccggacccgaaattgtgtacagtgggaagcataatggaatctgcatttacttctcgcgcatcatggggaacatctgggatgcatcactggttgtcgagcgcatcttcaaatcggggaacagggagatcactgcgattgagagttccgttccgtgtcagttactggaatccgttctgcaggagcttaagggtctgcaagagtttctggaccggaactctcaattcgccggtggaccactcggtaaccccaatactacagctaaggtgcaacagcggctcattggctttatgcgccctgagaacggtaatcctcagcagatgcagcaagagcttcagcggaagtttcatgaagcccagttaagcgagaaaatctccttacaggctatccagcagcttgtccgaaaatcataccaagcattggcactttggaaactattgtgcgaacaccagttcactattattgtggccgaactgcagaaggaactccaggaacagttaaagatcacaacattcaaggaccttgtgattagggataaagagctgacaggcgctcttatagcctccctgataaactgctatatacgggacaatgcagccgtcgacgggatcagtctccacctgcaggatatttgccctctcttgtattcaacggatgatgccatctgcagcaaagcaaacgaactactacagcgatcgcgacaagtccagaataaaaccgagaaggagaggatgttacgagagtctctgaaggaataccaaaagatatccaaccaagtcgacctgtctaacgtgtgcgcacagtacagacaggtgagattttatgaaggggtggttgagctgtctctgactgccgcagagaaaaaagatccccaggggctcggcctgcacttttacaaacacggcgaaccagaggaggatatagtgggactgcaggctttccaggagagacttaattcgtataaatgtataactgatacgttgcaggagctggtgaatcagtccaaagctgcaccgcaatcaccctccgtgccaaaaaaaccagggccacccgtgctcagtagtgaccctaacatgctctctaacgaggaggccggtcaccacttcgagcagatgctaaaattgagccaacgttccaaggacgaacttttttctatcgcgctgtacaattggttgatccaggtcgatcttgccgacaagctgctccaagttgcctcacccttcctggaaccccacctcgtccgcatggctaaggtggaccagaatagggtccgatacatggacctgctctggcggtattacgaaaaaaatcgaagcttcagcaatgcagcccgtgttctctcccgacttgctgatatgcactctacagagatcagtctacaacagcgcctagagtatatcgcaagggccatcctgtccgccaaaagttcgacagctatctcgagtatagctgccgacggcgagtttctacacgaactggaggagaagatggaagttgcgcgaatacaacttcagattcaggaaactctgcagcgccaatactcacaccactccagcgtacaggacgctgtatctcagcttgattccgaactcatggatatcactaagctgtacggcgaattcgccgatccatttaaactcgcagagtgcaagttggcaatcatccattgcgccggatactctgatccaatcctagttcaaaccttgtggcaggatattatagaaaaagagctgtcagacagcgtgacgttatcctcttcagatcgaatgcatgcgctgtctctgaaaatcgtgttactcgggaagatatacgcaggtacaccaagattctttcctctggacttcatagtgcagttcctcgagcaacaggtgtgtactctcaactgggacgtcggattcgttatccagaccatgaacgaaataggtgtccccctccccaggctgctggaggtttatgatcagcttttcaagagtcgggatcccttctggaatcgcatgaaaaaacctcttcacctgctggactgcattcatgttctgctcattaggtacgtggaaaacccttctcaagtacttaactgcgaacgcaggcgcttcactaatttgtgcttggacgcggtctgtggttacctagtggagctgcagtctatgagttcctccgttgctgtgcaagcaattactggcaattttaagagtttacaggctaagttggaaaggctgcactag

SEQ ID NO: 29893 - DNA, 2334 bp, synthetic construct
  misc_feature 1..2334: note = Description of Artificial Sequence: Synthetic coding sequence
  source 1..2334: mol_type = other DNA
atggattccaaggagtcactgacccctggccgagaggagaacccttcctcagtcctcgctcaggagcggggagacgtaatggatttctataaaaccctccggggtggtgccactgtaaaagtctctgcatcgtcgccctccctggcagttgcgtcccagtccgactccaaacagcggaggctattagtggacttcccaaaaggatccgtttccaatgcccagcagcctgatctgtccaaggccgtgtcattatctatgggactttatatgggagagaccgagactaaagtcatgggcaacgacctggggttccctcagcagggtcaaatctcactttccagcggtgagacagatctgaagttgttggaagaatcaattgccaacctcaacaggtcgacaagcgtccccgagaatccaaagtcttcagcgtccacagccgtgagtgccgctccgaccgaaaaggagttcccaaagacccacagtgatgtgagttccgaacagcagcacctgaaaggtcagaccggcaccaatggtggaaacgtgaagctgtacaccaccgaccagtccacctttgatatcttgcaagacttagagttttcgtcagggtcgccaggcaaggagacaaacgaatccccctggcggagtgatctactgatcgacgagaattgcctgttgagtccgttggctggggaagatgactccttcttattggagggcaattccaatgaagattgcaaacctcttattctgcctgataccaagcccaaaataaaggacaacggggacttagttttgagctccccaagcaatgttacccttcctcaggtcaaaacggaaaaggaggattttatcgagctttgcactcccggtgttatcaagcaggaaaaattgggcacagtgtattgtcaggccagctttcccggagcaaatataattggtaataagatgagcgccatttctgtccacggggtgagcaccagcggaggacagatgtatcactacgatatgaatacggcctcgctgtcacagcagcaggaccagaagcctatttttaatgtgatccctccaatccctgttggctccgagaattggaatcggtgtcagggttctggggacgacaatctgaccagcctgggcacactgaactttccaggccgaactgtgttctcaaatgggtatagttcaccttccatgcgccctgatgtaagtagtcctccgtccagttcttctaccgctactaccggacctcctcctaagctgtgtctggtatgctccgatgaggcctctggatgccactacggagtgctcacctgtgggagctgtaaggtgttctttaaacgggcagtggaaggccagcacaattatttgtgcgcgggtcgaaacgactgtattatagacaaaattcggagaaagaactgtccggcatgtagataccgcaagtgcttacaggctggaatgaatctggaggcccgtaagacaaaaaaaaagattaaaggcatccagcaggctactaccggagtttctcaggaaacttctgaaaaccccggaaataagacgattgtccccgcaacactcccccagttgacgccaactctcgtcagccttctcgaggtcatcgaacctgaggtgctgtacgccggttatgacagtagcgtgcccgactcaacttggaggattatgactactctcaatatgctcggtggcaggcaggtcattgcagccgtcaagtgggccaaggccatcccgggatttcgcaacttgcatctggatgatcaaatgacactgctccaatacagctggatgtttcttatggctttcgcactcggctggaggagctaccgtcaatctagcgccaatctgctgtgcttcgcgcctgacctgatcattaacgagcagcgaatgacccttccttgtatgtatgaccaatgtaaacacatgttatatgtcagctctgagttgcatcggctgcaggtatcctatgaagagtacttatgtatgaaaactctactcttgctgagctccgtaccaaaagacggactgaaaagtcaagagctgtttgacgagattcgaatgacctatattaaggagcttggcaaggcgattgttaagcgggagggcaatagctcgcagaactggcaacgtttctaccaactgacaaagttactggacagcatgcatgaagttgtggaaaaccttttaaattactgcttccagacgtttctggataagaccatgtctatagagttcccagaaatgctggcagagattatcacaaatcagatccccaaatactctaacggcaacattaaaaagttattattccatcaaaaatag

SEQ ID NO: 29894 - DNA, 1782 bp, synthetic construct
  misc_feature 1..1782: note = Description of Artificial Sequence: Synthetic coding sequence
  source 1..1782: mol_type = other DNA
atggatagcaaagagtccctgacacccggacgggaagagaatcccagcagcgtgctcgctcaggaacgtggcgacgttatggacttctacaaaaccctcagagggggtgcaacagtgaaggtgtcagccagcagcccgtcactcgcagtggcctcccagagcgacagtaagcagagaaggttgctcgtcgacttccccaaggggagtgtcagtaatgcacagcaaccagacctgtcgaaggcagtgagcctgtccatgggtttgtatatgggagagactgaaacaaaggttatgggcaacgatctgggatttccacagcaagggcagatctcactatcatctggagagaccgaccttaagctcctcgaagagtcgattgctaaccttaatcgttccaccagtgtgcccgagaacccaaagtcgagcgcctcgacagctgtgtccgcggctccaacagagaaggagtttcccaaaacgcattctgatgtcagcagtgaacagcaacacttgaaaggccagacaggaaccaatggcggaaacgtcaaactgtacactacggatcagtcaacatttgacatcctgcaggacttggagttcagcagtgggtcccccggtaaagagacgaatgagtccccttggcggagcgacctgttgatcgacgaaaactgcctcttgagcccactggcaggagaagacgattccttcctgttggagggtaacagcaatgaggactgcaaaccacttatccttccagatacaaagccaaagatcaaagataacggagaccttgtcctctcctcaccttccaatgttacactgccacaggtgaagacagaaaaggaggacttcatagaactgtgtacaccgggagtcattaagcaggaaaagttagggactgtttattgccaggcatcgtttcccggtgcaaatatcatcggcaacaaaatgtccgcgatcagtgtccacggagttagtaccagtggtggtcagatgtatcattatgacatgaatacagcttcactgagccagcaacaggatcagaagccaatattcaacgtgatcccaccgatacctgtgggcagtgagaattggaatcggtgtcaggggtccggggatgacaatcttacttccttagggacattgaatttccccggtcgcaccgtttttagtaatggttactcttccccctctatgagaccagatgtttcctcaccacccagctcctcatccactgcaaccaccgggcctcctccgaaactctgtctggtctgttctgacgaggcgtccggctgccactacggggttctgacctgtgggagctgcaaggtcttctttaagcgcgcagtggagggccagcacaactatctgtgtgctggcagaaatgactgcataattgataaaatccggagaaaaaattgccccgcatgccgctacaggaaatgtctgcaggctggaatgaacctggaagtcgtgcctaaggatggcctgaagtcccaggagcttttcgatgaaatcaggatgacctatatcaaagaactgggcaaagctattgtgaaaagggaaggtaattcgagtcagaactggcagcggttttaccagctgactaaactcttggactctatgcacgaggttgtagagaatctgctgaactattgttttcaaacatttctggacaaaacaatgtccatcgagttccctgagatgctcgccgagattattacaaatcagatacccaaatactctaacgggaacatcaagaagttgttattccaccagaaatag

SEQ ID NO: 29895 - DNA, 2334 bp, synthetic construct
  misc_feature 1..2334: note = Description of Artificial Sequence: Synthetic coding sequence
  source 1..2334: mol_type = other DNA
atggactccaaagaatcattgaccccaggacgcgaggaaaatccaagctccgtgctcgcccaagaaaggggagatgtcatggacttctacaagacccttcgtggcggtgcaaccgtgaaggtttccgctagcagtccctctctggcagtagccagtcagagcgattcaaaacaacgcagactgcttgtagatttccccaaaggaagtgttagcaatgcgcagcagcccgatctgagtaaggcagtgtctctgagcatgggactctacatgggtgaaaccgagaccaaggtgatgggcaacgacctcggttttccccaacagggtcagatctccctgtccagcggagagacggatttaaaattgttggaggagtctatcgcaaacctgaataggtctacctcggtcccggagaacccgaagtcatccgcttcgaccgccgtcagcgccgcacctactgaaaaggaatttcccaagacacattccgacgtgagcagtgagcagcaacacctcaaagggcagaccggcactaatggagggaatgtgaaactgtacaccactgatcagtccacctttgacattcttcaggatctcgagtttagcagcgggtctcccggtaaagagactaacgaatccccatggcgatccgacctactgattgacgagaattgtctcttgtcaccactggcgggtgaagatgactcattcctgttagaagggaacagtaatgaagactgtaaacctcttatcctgcctgacaccaaacctaagatcaaggacaacggtgatctcgtactgagctcacccagtaacgtcactctcccccaagtcaaaacagaaaaagaggactttattgaactgtgcaccccgggtgtgataaagcaggaaaaactgggaactgtgtattgccaggcatcattcccgggagctaacatcatcggcaataagatgagtgccatttccgtacatggggtgagcacatcaggcggtcagatgtatcattatgacatgaataccgcctcactctctcagcagcaagaccagaaaccaattttcaatgtgatcccacctattcctgtgggttctgaaaactggaaccgctgccagggcagtggcgatgataatctcacctccctgggcacgctgaactttccgggtcgcactgtgttctccaatggttattcttcaccaagcatgaggccagacgttagtagtcccccatcctcatcgagcacagccacaacagggccacctcccaaactgtgtttggtgtgctcagacgaggcctccgggtgtcattatggagtgctgacatgtggcagctgtaaggtatttttcaagcgggctgtcgaaggacagcataattacctgtgcgcgggacgtaatgactgcatcattgataagatcaggcgcaaaaactgccccgcttgccgctaccgtaaatgcttgcaggccggaatgaatctggaagccagaaagacgaagaagaagatcaagggtatccagcaagctactactggcgtgtctcaggaaacaagcgaaaacccagggaataaaactattgtacctgctaccctccctcagttgacccctaccctggtaagcctcttagaagtgatcgaacccgaagtgctgtacgcagggtatgatagctccgttcctgattccacatggcggattatgacgacattgaacatgctgggcggacgccaggtgatcgcggcagtgaagtgggccaaagcaatccccggatttcgtaacctgcacctcgatgaccagatgaccctcttacaatacagttggatgtttctcatggcatttgctttagggtggcggtcttaccgtcaaagttcggccaacctgctctgtttcgctcctgatctgattattaatgaacagcggatgactctgccgtgtatgtatgatcagtgcaaacacatgctgtacgtaagtagcgagctccacaggcttcaggttagttacgaggagtatctatgcatgaagacgttactactactctcttcagtgcccaaggacgggctgaagagccaggagctgttcgacgaaatcaggatgacttacattaaggagcttggaaaagctattgtaaaacgtgaaggaaattccagccagaattggcaacgattctaccagctcaccaaactgctcgattcaatgcacgaggttgtcgagaatttgctgaactattgttttcaaacgtttctcgataaaacgatgtccatagagttcccagagatgttagcggagatcattacaaaccagatacccaaatattcaaatgggaacattaagaaattactttttcaccagaaatag

SEQ ID NO: 29896 - DNA, 2337 bp, synthetic construct
  misc_feature 1..2337: note = Description of Artificial Sequence: Synthetic coding sequence
  source 1..2337: mol_type = other DNA
atggactcgaaagaaagcctgactcctgggagagaggagaacccaagctccgtgctcgcccaagaaagaggtgacgtgatggatttttataagacgctgagaggaggcgctacagtgaaggtgtctgcctcgtccccatcattagccgttgcatctcagagcgactcgaagcagcggagactgctggtggactttcctaaaggaagtgtatccaacgcccagcagcccgacctctcaaaagccgtgtctctcagcatggggctgtacatgggggaaacagagactaaagtgatgggtaatgaccttgggttcccacagcaggggcagatttccttgtcctcgggggagaccgatcttaagctgctggaagagtccattgctaatttgaatagatctacttccgtacccgagaatccgaaatcctcagcttcaaccgctgtgtccgcagcgcctacagagaaggagtttcctaagacccacagcgatgtttcctcagagcagcagcaccttaaggggcaaactggaaccaacggaggaaatgtcaaactgtataccacagatcagagtaccttcgacattctacaagacctcgagttttcctctggtagcccgggaaaagagacgaacgaaagcccttggcgctcagaccttctaattgatgagaattgcctactgagtcccctcgctggcgaggacgattcattcctgctggagggaaacagcaacgaagactgcaagccactgatcttgcctgacactaagcctaagatcaaagataacggcgaccttgttctctcgtcacctagcaatgtgacgttgccgcaggtgaagacagagaaagaagacttcattgagctctgtactccaggagttatcaaacaggaaaagctagggacagtttattgccaggcttcttttccaggggctaacataattgggaacaaaatgagcgctatctctgtacacggcgtgtcaaccagcggtggacagatgtaccattacgatatgaacactgcaagtttatcccagcaacaagaccaaaaaccaatatttaacgtgatcccacccatcccagtaggaagcgagaattggaatcgttgccaaggctccggagacgacaacctcacctcgctgggcaccctgaatttccccggacgcacggtcttcagtaacggctattcctccccatccatgcgaccggatgtctctagcccgccaagctccagttcaactgctacgaccggccctccgcctaaactttgtttggtgtgctctgatgaggcatcaggatgtcactacggagttcttacatgtggcagttgtaaggtcttctttaagagagcagttgaaggcaggcagcacaactatctgtgtgccggtcggaatgattgcattattgataagatcagacggaagaattgtcctgcatgtcgataccggaaatgtttgcaggccggtatgaatctggaagccaggaaaacgaaaaaaaagattaaaggcattcagcaggccaccactggggtaagtcaggaaacttccgagaatccgggaaataagactatagtgccagctaccctccctcagctcacccctacgctggttagcttactagaagttatcgagccagaagtgctttatgctggttacgacagcagcgtgccagattcgacatggcggattatgacgactttaaacatgctggggggtaggcaggtgattgctgcagtcaagtgggccaaggccattccgggattccgtaatttgcacctcgatgaccagatgacactcttgcagtactcttggatgtttctgatggcattcgcccttggctggcgctcctatcgccaatcctctgccaatctcctttgcttcgccccagacctcattataaatgagcagcgaatgacccttccatgtatgtacgatcagtgcaaacacatgttgtatgtaagtagcgagctacaccgccttcaggtgtcttatgaggagtatctgtgtatgaagactttgcttctccttagctccgttcctaaggacggactaaaaagccaggaactcttcgacgaaattagaatgacctacattaaggagctgggcaaagccattgtgaagagggagggaaactctagtcagaattggcagaggttttaccagcttacgaaattattggactcaatgcatgaggtagtggaaaacctgcttaattactgtttccagactttcttggacaagaccatgagcatcgaattccccgagatgcttgctgaaattataaccaaccagataccaaagtactctaacggaaacattaaaaagttactgtttcaccagaagtag

SEQ ID NO: 29897 - DNA, 2229 bp, synthetic construct
  misc_feature 1..2229: note = Description of Artificial Sequence: Synthetic coding sequence
  source 1..2229: mol_type = other DNA
atggatagcaaagagtctcttacacccggtcgcgaggagaatccctcttcagttttagcgcaagagagaggagacgtgatggacttctataagactctaaggggtggcgctactgtcaaggtgtcggcctcaagccctagtctcgccgtagcctctcagagtgattcaaagcagcgacgtctgctcgtcgacttcccaaaggggagcgtgtctaacgcccagcaacctgacctgagtaaagctgttagcctctctatggggctgtacatgggagagactgagaccaaagtgatgggtaacgatctggggtttccccagcaggggcaaattagcctgagcagcggagaaactgacctgaaactcctggaagagtccattgccaatctcaacagatctactagcgtccccgagaaccctaaatcaagcgctagcacggctgtctcagccgctcctacagagaaagaatttcctaagacccacagtgacgtaagctctgagcagcagcatctgaaaggccaaactggcacaaacggtgggaatgtgaaactctatacaactgaccagagcactttcgatatcctgcaggacctagagtttagcagcgggtctccgggtaaagagacaaacgagtctccctggcggagcgacttgctgattgacgagaactgcttactgtcccccctcgctggtgaggacgactctttcctcctggaggggaactccaatgaagactgtaaaccattgatcttgcctgacaccaaacccaaaattaaggataatggagatctcgtcttgtcatctcccagcaatgtgaccctacctcaggtaaagacggagaaggaagacttcattgaactctgtactcccggtgttatcaagcaggaaaagctgggtacggtttactgccaggcctcattccccggtgccaacataattggtaacaagatgtccgcaatcagcgtccacggcgtgtcgacctcaggaggccagatgtatcactacgacatgaataccgcatctctctcacagcaacaagaccagaaacccattttcaatgttatacctccaatccccgttgggtcggagaattggaaccgatgccaaggaagcggagatgacaacttgacaagcctgggaacccttaacttccccggaagaactgtgtttagcaacggttattcttcgccatcaatgagacccgatgtatccagcccgcctagctcctcatcaaccgccacaacagggccacccccaaagttgtgtctggtatgcagtgacgaagcgtccggctgccattacggcgtattaacatgcgggagctgcaaagtcttttttaaacgggctgtggaaggtcaacacaattacctgtgtgcaggcagaaatgattgcatcattgacaagattcgtcgtaagaactgcccagcttgccggtatagaaagtgtctgcaggctgggatgaatctggaggccaggaagactaaaaaaaaaataaagggaattcaacaggcaaccactggggtgtcacaagaaacatcagagaaccctggaaataaaactattgtgccagccaccttgcctcagctgacccctaccctggtgagtctgctggaggtgatcgagcccgaagtgctttacgccggatacgactctagcgttcctgacagcacgtggaggataatgacaaccttgaatatgctcggcggacggcaggtgattgccgcagtcaagtgggccaaggctatccctggtttcagaaacctccacctggatgaccaaatgacacttttgcagtattcctggatgttccttatggcatttgccctgggctggcggagttatagacagagctctgcgaacctgctgtgcttcgccccagatcttattatcaacgaacagaggatgaccctcccatgtatgtatgaccagtgcaagcatatgctgtatgtgagctcggaactccaccggttacaggtgagttatgaggagtatctgtgtatgaagaccctcctgctcctgagctcagtgccgaaagacggtcttaagtcgcaggagctgtttgacgagattcgcatgacctacatcaaagagctgggtaaagcaattgtcaagagggaggggaactcaagccagaactggcagcgcttctaccagttgactaaactccttgactccatgcacgaaaatgtgatgtggttaaagcctgaatccacatctcacacactgatatag

SEQ ID NO: 29898 - DNA, 1143 bp, synthetic construct
  misc_feature 1..1143: note = Description of Artificial Sequence: Synthetic coding sequence
  source 1..1143: mol_type = other DNA
atgcgcccagacgttagttctcccccatccagctcttccacagcaactaccggaccacctccgaaattatgtctggtttgcagcgatgaggcctctggctgccattacggcgtcctcacatgcggatcttgcaaggtgttttttaaacgggctgtggagggacagcacaactacctatgtgccggacggaatgattgtatcattgacaagatacgccgaaaaaactgccctgcgtgcaggtataggaagtgtctgcaggcgggaatgaatctggaggccaggaagaccaagaaaaagattaagggtatccagcaggccacaacgggggtgagtcaagaaacatctgagaacccgggtaataagaccatcgtgccggcaactcttcctcagctcacccccaccctcgtcagcctactggaagtgattgaaccagaggttctttatgccggatatgatagttcagttcccgacagtacatggaggattatgactaccctgaacatgctcggcggtcgccaggtaatagccgcagttaaatgggccaaggccatcccgggattccgcaatctgcatctagacgaccagatgacactcctgcagtatagctggatgttcttgatggcatttgccctcggatggcgctcctatcgacagagcagcgccaacttactttgctttgctccagacctcatcattaatgagcagagaatgacactcccatgcatgtatgaccagtgtaaacacatgttgtatgtgtctagcgagctgcaccggctgcaggtgagctacgaggagtatctttgcatgaagactttgctcttgctgagttcagtacccaaggatggtttaaaatctcaggaactcttcgacgaaattagaatgacttacataaaagaactcggaaaagctatagtgaaacgggaggggaactcgtcccaaaattggcaacggttttatcagttgacaaaactgctcgattccatgcatgaagtcgtcgagaatctactcaattattgttttcaaacgttcctggataagacgatgagtatcgaattcccagaaatgctagctgagatcatcacgaaccagatccccaaatacagcaatggcaatatcaagaagctactgtttcaccagaaatag

SEQ ID NO: 29899 - DNA, 2256 bp, synthetic construct
  misc_feature 1..2256: note = Description of Artificial Sequence: Synthetic coding sequence
  source 1..2256: mol_type = other DNA
atggacagcaaggaatcgctcacgcccggtcgagaagagaatccgagtagcgttctcgcacaggaaaggggagacgtcatggacttttacaagactctccggggaggcgcaactgtgaaagtatcggcatcttccccgtccctagcagtggcatcacaaagcgatagcaaacagcggcgtctcctggttgactttcccaaggggtctgtgtccaatgcccagcaaccagacctatccaaggcagtcagtctgagcatggggctgtacatgggcgagacagagactaaagttatgggcaatgaccttggattcccgcagcagggccagatctccctatctagtggagagacggaccttaaactgctagaggagtctatagccaacctgaaccgatctactagcgttcccgaaaatccaaagtcttctgcatccaccgcggttagcgctgctcccactgagaaggagttccccaaaacacactctgacgtgtcgagtgaacaacaacatcttaagggccagaccggcacaaacgggggaaatgtaaaactgtacacgaccgatcagtcaacatttgatattctccaggacttggaattttctagcggcagccctgggaaggaaactaatgagagcccttggcgcagcgacctgctgatcgacgagaactgcctgctgtcacccctggccggtgaagatgactcttttctccttgaaggcaacagcaatgaggactgtaagcccctgatcctcccagacacaaagccgaagatcaaagataatggggatctggtcctttcatcgccgagcaatgttaccctcccacaggtgaagaccgagaaagaggacttcatagaactgtgcacacctggcgttatcaagcaagaaaaactcggcactgtgtactgccaagcatcgttccccggagccaacattatcgcaagcctctcacaacagcaggaccagaagccaatttttaacgtcatacctccaattcctgtagggagcgaaaattggaatcgctgccaggggtcaggcgatgataacctgacttccctgggcacactcaatttccctggcagaaccgtgttctccaacggatactcaagtcctagtatgagaccagacgtgagtagtccaccctcctcctctagcaccgcaactactgggcctccgcctaaactttgcctagtgtgttcggacgaggctagcggctgtcactacggggtcctgacttgcggttcttgtaaagtcttttttaagcgggctgtggagggccagcacaattacctctgcgctggcagaaacgattgcataattgacaagattcgaagaaagaattgtccggcttgtcgttacaggaagtgtctgcaggccggtatgaaccttgaggctcgtaagacaaagaaaaagataaagggcatccagcaagccacgactggcgtctctcaagaaacttccgagaatcctggcaacaagaccattgtgcccgctacattgccgcagctgactcccaccctggtgagcctgttggaggtgatagaaccagaagtactgtatgctgggtatgatagtagcgtgcccgactcaacctggcgaattatgacaaccctcaacatgctaggtggtcgtcaagtgatagcggctgttaagtgggcaaaggccatccctggcttccggaacttgcacctggacgatcaaatgaccctgctccaatactcctggatgtttctgatggcatttgctctgggttggaggagttaccgccagtctagcgccaacctcttatgcttcgcaccagacctcatcataaatgaacagcggatgacactgccctgtatgtacgaccaatgtaaacacatgctgtatgtgtctagtgagttgcaccggttgcaggtgagctatgaggagtacctctgcatgaaaacactgctgcttctctcttccgttcctaaggatggacttaaatctcaggagctcttcgatgagattcgcatgacttatatcaaggagctaggaaaggcgattgtgaagcgtgaaggcaactccagtcagaattggcagcggttttaccaactgacaaagctcctcgactcaatgcacgaagtcgtggaaaatctactgaactattgttttcaaacgtttttggacaagactatgtcgattgaatttcccgagatgctggccgaaattatcaccaatcaaatcccgaaatatagtaacgggaatattaagaaactgctttttcaccagaagtag

SEQ ID NO: 29900 - DNA, 435 bp, synthetic construct
  misc_feature 1..435: note = Description of Artificial Sequence: Synthetic coding sequence
  source 1..435: mol_type = other DNA
atggattctaaggagtctctcactcccggacgggaggagaatccttcgagcgtgctggctcaggagcgaggtgatgtaatggacttttacaaaactcttagaggcggtgctaccgtcaaggtatccgcaagcagcccgagtttagccgtcgcatcacagtctgacagcaagcagaggcgattactcgtggatttccctaagggctcagtatctaacgcccagcagcccgacctcagcaaggccgtgagtttatccatggggctatatatgggagaaactgaaactaaggtgatggggaacgaccttgggttcccacaacaggggcagatatccctcagctcaggagagaccgatctcaagctgttggaggaatctattgctaatttgaaccgttcaactagcgtaccagaaaatcctaagagttcagcctcctag

SEQ ID NO: 29901 - DNA, 438 bp, synthetic construct
  misc_feature 1..438: note = Description of Artificial Sequence: Synthetic coding sequence
  source 1..438: mol_type = other DNA
atggatagcaaggaatccctcaccccgggtagggaggaaaacccgagcagcgttttggctcaagaacggggagatgtcatggatttttacaaaaccttaaggggtggcgcaacagtgaaagtttcagccagctcaccgtcactggccgtggcatctcagtccgactccaaacagcgcaggctgttggttgattttccaaaaggctccgtttcaaacgcccagcaaccagatctgtctaaggcagtgagtctctctatgggcctttacatgggggaaaccgagactaaagtcatgggcaatgacctcgggttcccccagcaagggcaaatatcactcagtagcggggagacggatctgaagctgttggaggagtctatcgcgaatctgaacagaagcacctccgttcctgagaaccccaaaagttccgcctccacatag

SEQ ID NO: 29902 - DNA, 2334 bp, synthetic construct
  misc_feature 1..2334: note = Description of Artificial Sequence: Synthetic coding sequence
  source 1..2334: mol_type = other DNA
atggacagtaaggagagcctgactcccggtagggaagaaaacccctcctctgtactagcacaagagcggggagacgtaatggatttctataagaccctacgcggaggcgctacagtcaaggtctccgcctctagtccaagcctggcagtagcgtctcaatcagacagtaagcagagacgtctacttgtggatttccccaaggggagtgtgtcaaatgctcagcaacccgacctgagtaaagcagtgagcctctctatgggactgtacatgggagaaaccgagactaaggtgatgggaaatgaccttgggtttcctcagcagggtcaaatctccttaagttcaggagaaacagatctgaagttattggaggagtccattgccaatctgaaccgcagcacaagcgtacctgaaaatcccaagagttctgccagtactgcagtgtccgccgctccaaccgaaaaggagttcccgaaaactcatagcgatgtctcaagtgagcagcaacacctaaaggggcagacaggaactaatgggggtaatgtgaagctgtatactacagatcagtctaccttcgatatcctccaagatcttgagttctcatccgggtccccgggtaaagaaactaacgagagcccttggcggagtgatcttttgatcgatgagaactgtctgctgtcgccgttggccggtgaggacgacagctttttattggaagggaatagcaacgaggactgtaaaccactaattctgcctgacactaaacccaagattaaggataatggggacttggtgctgagcagccctagcaatgtgaccctgccccaggttaagaccgaaaaggaggattttattgagctgtgcactcctggagtgatcaagcaggaaaagctcggcaccgtttattgtcaggcctcttttcctggcgctaacatcatcggtaataaaatgagcgcaatctctgtgcatggggtatcaacaagcgggggtcagatgtatcattatgacatgaacactgcctccctttcgcaacaacaggaccagaagccaatctttaacgttatccctcccattcccgtggggtctgagaattggaatcgctgtcaaggctctggagacgacaacctgacttcactgggcactctgaatttccccggacggaccgtcttttctaacggctacagtagtcccagtatgaggcctgacgtctccagtcccccaagctcttcatcaaccgcaaccacaggacctcctccgaagctttgcttagtctgtagtgatgaggcttcaggctgccactatggggtgttgacctgcgggagctgcaaagtgttttttaagcgcgcagtcgaaggccagcacaactatctctgcgctggccgtaacgattgtattattgataagatacggagaaaaaactgcccagcctgccggtaccgcaaatgtctgcaagccggaatgaaccttgaggccagaaagacaaaaaagaaaattaaagggattcaacaggctaccaccggggtatcccaggagaccagcgagaatccgggaaataagacaatagtgccggctactttgccacagcttacacctaccctcgttagcctcttagaggtcattgagcctgaggttctttacgccggttatgatagctcggtgcctgattccacctggaggattatgactacattaaatatgttgggtgggaggcaggttattgcagctgttaagtgggccaaggcaatccccggatttcgaaatctgcacctggatgaccagatgactctcctacagtactcatggatgttccttatggccttcgcactgggctggagatcctataggcaatcgtctgccaatctactgtgttttgctccagacctgatcattaacgagcagcggatgaccttaccttgtatgtatgatcagtgcaagcacatgctctatgttagcagtgaactgcacaggcttcaggtgtcttatgaggagtacctatgcatgaaaactcttctcctgctgtcctcggtccctaaggacgggctaaagtcacaggagctgtttgacgaaatcaggatgacctacataaaggaactgggcaaagccatcgtgaagagagaaggaaatagctcccagaactggcaaagattctatcagttgacaaagctcctggactccatgcatgaagtcgtagagaacctgttgaattactgtttccaaacatttctggacaagaccatgtctatcgaatttcctgaaatgctcgccgaaattattaccaaccagatccctaaatattctaacgggaacatcaaaaagctgctgtttcaccaaaagtag

SEQ ID NO: 29903 - DNA, 2337 bp, synthetic construct
  misc_feature 1..2337: note = Description of Artificial Sequence: Synthetic coding sequence
  source 1..2337: mol_type = other DNA
atggattctaaggagagcctcactccaggtagggaagagaatccctctagcgtgctcgcacaggaaagaggggatgtgatggatttctacaagacgcttcgaggaggagccacggtcaaggtttccgcgagctctccatcactggcagttgccagccagtccgacagcaagcagcgacgcctgctagttgatttccccaagggtagtgtcagcaacgcacagcaacccgatttgtcgaaagctgtcagtctgagcatgggattgtatatgggcgagacagagactaaggttatgggaaatgatttgggtttccctcagcaagggcagatcagtctcagttcgggtgaaaccgatctgaagctgctcgaggagtcaatcgctaatctgaaccggtccacgtccgtgccagaaaaccccaaaagttccgcctcaacagctgtctccgctgcaccaacagagaaggagttccccaagacccactccgatgtctcgtccgagcagcagcacctgaagggacagaccgggacaaatggtgggaacgtcaagctttacaccacggaccagtccacgttcgatatactgcaggatctggagttcagctcgggcagcccaggtaaagaaaccaacgaaagcccttggcgaagtgacctcctgatcgatgagaattgcttgctgtctccactggccggagaggacgattcctttcttctggagggcaactctaacgaggactgcaaacccctgattttaccagacaccaaacctaagatcaaagacaacggcgacctggtcctgtcatcgccgtccaatgtcaccctaccccaggtgaagacagagaaggaggattttattgaactctgcacccccggagtcatcaaacaggaaaagctggggacggtgtactgtcaggcatcttttcccggtgccaacataataggtaacaaaatgtctgcgatttccgtgcacggcgtgtctacgtccggaggccagatgtaccactatgatatgaataccgcttccctgagccagcagcaggaccagaagcccattttcaacgtaatcccccctatccctgtggggtctgaaaattggaaccgatgtcagggaagtggcgatgataacttgactagtctcggcacactcaacttccccggacggaccgtgttctcgaacggctatagctcaccttcaatgcgccctgatgttagcagcccgcctagctcatcttctaccgccacaacgggcccacctcccaagttatgcttagtatgtagcgacgaggctagtggctgccactacggcgtgctaacatgcggaagctgtaaagtgtttttcaagcgggcagtggaaggccgtcagcacaattatctgtgtgctgggcgaaatgattgcataatcgataagatccggcgaaagaactgcccagcctgcaggtacagaaagtgtctccaggcaggaatgaacctagaggctcgcaagacaaagaagaaaatcaagggcatccaacaggcaacaaccggagtgtcccaggagacctccgagaatccaggaaacaagacaattgtccctgcaaccctgcctcagctaacccctacactggtgagcttgttagaagtcatcgagcccgaggtgctgtatgccggttatgactcttcagtacctgacagcacatggagaatcatgaccacactcaatatgctgggtggcaggcaggttattgcggctgttaaatgggctaaggcgatcccaggttttcgcaacctgcacttggacgaccagatgactttgctgcaatattcctggatgttcttgatggctttcgccctgggatggagatcataccgtcagtctagcgccaatttgttatgctttgctcctgacctcatcatcaacgaacaacgcatgaccctgccatgcatgtacgatcagtgtaaacatatgctctatgtttcatccgaactgcatcgtttgcaggtttcatatgaagagtacctgtgtatgaagacgctgctactgctgtccagcgtgcctaaggacggcctgaaatctcaggaactattcgatgaaatccggatgacttacataaaggagcttggcaaggcaatcgtgaaacgggagggtaatagttcccaaaactggcaaagattctaccagctgacgaaacttcttgattctatgcatgaggttgtggagaaccttctgaattactgcttccagacctttcttgacaagacaatgagcatagagtttcccgagatgctggcagagataattactaaccagatacctaagtacagtaatggcaatatcaagaagctgctgttccatcagaaatag

SEQ ID NO: 29904 - DNA, 438 bp, synthetic construct
  misc_feature 1..438: note = Description of Artificial Sequence: Synthetic coding sequence
  source 1..438: mol_type = other DNA
atggacagcaaagagagtctgacccctgggcgtgaggagaatccctcctccgtgctggctcaggaaaggggagacgtcatggatttttacaaaacactgcgaggtggcgctaccgtcaaggtttctgcctcatctccgagcctggcagtcgctagccagagtgacagcaagcagcggcgtctactggttgatttccccaaagggtcagtaagcaatgcccaacagccagatttatcaaaagccgtatccctgagtatgggattatatatgggtgagactgagaccaaggtgatgggaaatgacctgggatttccgcaacaggggcagatttctttatcctcaggcgaaacagaccttaaactcttagaagaatccattgccaatctgaacagatccacctctgttcctgagaaccccaaatcaagcgccagcacctag

SEQ ID NO: 29905 - DNA, 438 bp, synthetic construct
  misc_feature 1..438: note = Description of Artificial Sequence: Synthetic coding sequence
  source 1..438: mol_type = other DNA
atggatagtaaggaaagcctgacccctgggcgtgaagaaaatccctcctcggtgctggcacaggaacgtggtgatgtgatggacttctacaaaacactgaggggaggggctacggttaaggtgtctgcttccagcccaagcctcgcggtagcctctcagtccgatagcaagcaacggcgtctcctagtagacttcccaaagggctccgtgtccaacgcacagcagccagacctgtctaaagcagtttctctcagtatgggtctctacatgggggagactgaaactaaagtgatggggaatgacctcgggtttccgcagcaggggcagatatcgctgtcgtcaggagaaaccgatttaaaactccttgaagaaagtatcgcgaaccttaacaggtcaacctcagtgcctgaaaaccccaagtcgagtgcctccacatag

SEQ ID NO: 29906 - DNA, 438 bp, synthetic construct
  misc_feature 1..438: note = Description of Artificial Sequence: Synthetic coding sequence
  source 1..438: mol_type = other DNA
atggacagcaaggaatccctgaccccaggaagggaggagaatccctccagtgttctggcccaggaaaggggggacgtgatggacttttacaagactctgagaggaggggcaactgtgaaggtgagcgcgtcttctccctcgttggctgtcgcgagtcagagcgactcaaaacagcggaggctcttggtggacttccccaaaggctcagtttccaatgcccagcagcccgatctgagtaaggccgtgagcctgagtatgggcttgtatatgggggagacagagacaaaggtgatggggaacgacctcggttttccacaacaggggcagataagtctgtctagcggagaaaccgacctgaagttacttgaagaaagtatagctaatttgaaccggtctacctccgttcctgagaatccgaaaagctccgcgtctacctag

SEQ ID NO: 29907 - DNA, 1914 bp, synthetic construct
  misc_feature 1..1914: note = Description of Artificial Sequence: Synthetic coding sequence
  source 1..1914: mol_type = other DNA
atgcatgactctattaggttcggcaatgtcgacatgccatgcgtccaagcccagtacagcccttcacccccagggagcagctacgcggctcaaacctatagtagtgaatatactactgaaatcatgaatcctgactacactaaactgactatggatctcggttccaccgagattactgcaactgcgacaactagcctcccaagcatttcaaccttcgtggaaggctactcttccaattatgaactgaaaccttcttgcgtgtaccaaatgcagagaccactaataaaggtggaggaaggcagggctcctagttaccaccaccatcatcatcaccaccatcaccatcatcatcaccaccagcagcagcaccagcagccatctattccccctgccagttctcctgaggacgaggtattaccctctacttctatgtactttaagcagagcccaccttcaaccccgactactcccgcattccctccacaagccggtgcactctgggatgaagcgctaccctccgctcccggatgtatcgctccaggccctctgctcgaccctccaatgaaggccgttcccacggtcgccggagcacgctttcccctgttccattttaaaccatctcctcctcatcctcccgcaccgtcgcccgctggaggccaccacctgggatacgaccccactgccgcagcagccctttccctgcccctcggtgctgccgctgccgctggatctcaggccgcagcgctcgaaagtcacccttacgggctcccacttgcaaagcgggctgctccgctggcgtttcctcccctgggtttgaccccttccccaacagcgagttctttactgggtgaatctcctagtctgccatcccccccatcacggtctagctcatccggtgaggggacctgtgctgtctgtggagacaacgccgcatgccagcattatggcgtgcgcacctgcgaggggtgtaagggcttcttcaaaaggaccgtacaaaagaacgcaaagtacgtctgcctcgcaaataaaaactgtccagtagacaagaggcgaaggaataggtgtcaatattgccggttccagaagtgcctatctgttggcatggtaaaggaagtagttcggactgatagtctgaaaggacggagaggtagactccctagcaagcctaagtcccccctgcagcaggagccaagtcagccatcccctccatcacctccaatatgcatgatgaacgctctggtgcgcgctctgacggactccacccccagagacctggactactctagatactgccccaccgatcaagcggctgctgggacggacgcagaacacgtacaacaattctataatcttctgacggcaagcattgacgtctctcgcagctgggctgaaaagattcccggttttacagatttgcctaaggaggatcagacgttgttgatcgaaagcgccttcttggaactgttcgtcctgcggctctctatccgatccaacacagctgaagacaaatttgtgttctgtaatggacttgtattacaccgcctccagtgcctgagaggattcggggagtggctggacagcatcaaggatttctcactaaatctgcagtcactcaaccttgacatccaggctctggcctgccttagcgcattgagcatgatcactgaacgacacggcctgaaggagccaaaacgggtagaggagctgtgcaataagattacttcttcactaaaagaccaccaaagtaaaggccaggccctggagcccacggagtctaaggtgctcggcgctctggtagagcttagaaaaatttgcaccttgggactgcaaagaatattctacctcaagttagaggacctggttagccccccttccattatagacaagctattcctggacactctccccttttag

SEQ ID NO: 29908 - DNA, 1332 bp, synthetic construct
  misc_feature 1..1332: note = Description of Artificial Sequence: Synthetic coding sequence
  source 1..1332: mol_type = other DNA
atgccttgcgtgcaggcgcagtacagcccatctccgccagggagtagttacgctgctcagacctactcaagtgagtatacaacggaaattatgaatcccgactatactaagctgacgatggatctcggttcaaccgagattactgcaaccgcaacaactagtctgccgtctatcagcacttttgttgagggatacagttctaattatgagctaaaaccgtcgtgtgtctaccaaatgcaacggcctctgattaaagtggaagaaggacgcgctccaagctaccatcatcatcatcaccaccaccatcaccaccatcaccatcaccagcaacagcatcagcagccctctattccacctgcctccagtcccgaggatgaggttctccctagcaccagtatgtacttcaaacagagtccacccagtaccccaacaacgcctgcctttccacctcaggccggagcactgtgggacgaagcgctgccttctgcaccaggctgtatcgccccaggacctcttttagacccccctatgaaggcagtgcctacggtggccggtgcacggtttccgctgtttcatttcaagccttctcctccacaccctccagccccatccccagctggtggacaccacctggggtatgacccaactgccgcagccgctctgtcacttcccctgggggctgcagcggcagcgggaagccaggctgccgcactggaaagtcacccctatgggctgcccctcgcaaaacgagctgcgccactggcctttcctccactcgggctgacacctagcccgacagcatcctcattgctcggcgagagcccaagcctgcccagccctccctcccgtagtagctcaagcggagaggggacttgtgccgtctgtggggataacgcggcatgtcagcactatggtgtgcgaacctgcgaggggtgcaaaggctttttcaaaaggacagtacagaagaacgctaagtacgtctgtctggccaacaagaattgccctgtggataagcggaggaggaaccggtgtcaatactgccgctttcagaagtgcctgtctgtgggtatggtgaaagaagtggtaagaactgacagtctgaagggcaggaggggacgcctgccatcaaagccaaaaagtccgctgcaacaggagccctcccagccttctcccccatcaccccctatctgcatgatgaacgcactcgtaagggcacttacagattccacaccgcgagacctcgactactcacgagtctcctttatgatctcttgcttccagatgaacgaccaaggcctttacttatggctgttggtgatacgggttgattag

SEQ ID NO: 29909 - DNA, 894 bp, synthetic construct
  misc_feature 1..894: note = Description of Artificial Sequence: Synthetic coding sequence
  source 1..894: mol_type = other DNA
atgaaagcggtaccaaccgtagccggagcacggtttcctctgtttcacttcaagccatccccacctcatcccccagcccctagtccggcaggcggtcaccacctcgggtacgaccctacagccgcagccgcattatcgctccccctgggagcagctgcagctgccggttcacaggccgctgctcttgaaagtcacccatatgggttgccgctggcaaagcgagctgcgcctctggcatttccacctcttggcctgacaccttcccccaccgcctcttcactgctaggcgagagcccaagccttccctcccccccttcccgatcctcgtcctccggggagggtacctgcgctgtctgtggcgataacgccgcttgtcagcactatggagtgagaacttgcgaaggttgtaaaggtttttttaaacggacagttcagaagaacgctaagtacgtctgtcttgccaacaaaaactgtcctgtggataagcggagacggaacaggtgtcagtattgccgattccaaaagtgcctctctgtcggaatggtgaaagaagtggtgaggactgactcgctgaaaggcagacggggaaggctgcccagtaagcccaagagcccgctgcagcaggagccttcccagccgagcccaccaagccccccaatttgtatgatgaacgcgcttgtgagagccctgacggacagcactcccagagacctcgactactctagggtctcattcatgatctcctgcttccagatgaatgaccaggggttgtacctgtggctcctagtgatccgcgtactcgacagctttcacacgtttagcatctttctcgctagcttcagcaactccgtgcatccactacagcaaatcatttttgcccttctgaacctgtag

SEQ ID NO: 29910 - DNA, 1881 bp, synthetic construct
  misc_feature 1..1881: note = Description of Artificial Sequence: Synthetic coding sequence
  source 1..1881: mol_type = other DNA
atgccttgtgttcaggcccagtatagtccctctccacccggttcttcctatgccgcacagacctacagctccgaatacactaccgaaattatgaacccggactacacaaagcttacgatggatcttggaagcacagagattactgcaacagctacaacttctctcccatcaatctcgacatttgtcgagggctacagttcgaattatgagctgaagccatcatgtgtttaccagatgcaaagaccgctgataaaggttgaggagggacgagccccttcctatcatcaccaccatcatcatcaccaccatcaccaccatcaccaccagcaacagcatcagcagccttcgattccgcctgcatccagccctgaggacgaggtactcccttccacttcaatgtattttaagcagtcccctccaagtacccccacaactccagctttcccaccacaggctggtgcactatgggatgaggccctgccaagcgccccagggtgtattgccccagggcctctgctggatcctcccatgaaggctgttcctactgtggccggtgcccgatttcccctgttccacttcaagccatccccaccccatccccctgctccaagtcctgccggtggccatcacctcggctacgacccaaccgctgcagcggcactcagtctcccccttggcgcagctgctgcggctggttcccaggcagctgccctggagtctcatccctacggactgcctctggccaagagagccgctcctctcgcatttcctccccttggtttaacccccagtcccactgccagttcattactcggtgagtcaccaagcctgccatcccctccttcaaggagcagctcttctggtgagggcacttgcgctgtttgtggcgataatgccgcatgtcagcactatggcgtgaggacatgcgaggggtgtaaaggattcttcaaaaggacagtacaaaagaatgccaaatacgtgtgccttgcaaacaagaactgcccagtcgacaagcgacggagaaaccggtgccagtactgtcgctttcagaaatgtttgtcggtgggaatggttaaggaagtagtcaggacagacagcctgaagggtcgaagaggtcgcttgccatccaaaccaaagagccccttgcagcaggaacccagccaacccagccctccctcgcctcccatttgtatgatgaatgcactggtacgcgctctcactgacagtaccccacgagacttagattacagccgctactgccctactgaccaggcagccgcaggtacggacgcagagcacgtacagcagttttataacctgctcaccgcttccatagatgtctcgcgcagctgggctgaaaaaatccctggcttcaccgatcttccaaaagaagaccagactctgctgatagaatctgcatttcttgagctgttcgtactgcggttgtcaatccgtagcaatacagctgaagacaagtttgtgttctgtaacggcctagtgctgcataggctccagtgtttgcgcggtttcggggagtggctagattctataaaggacttctccctgaatctgcagagcctgaacctggacatccaggctttagcttgtttaagcgcactaagtatgattactgaaagacacgggctgaaggagcccaaacgggtggaggagctttgcaataagatcacaagcagtctgaaagatcaccagtccaaagggcaggccctggaaccgaccgaatctaaggtgctaggggcactggtcgagttgaggaaaatctgtaccttagggctccagcgcattttctacttaaaacttgaggacctggtatcccctccttcaataattgataaactctttctcgacacactccctttttag

SEQ ID NO: 29911 - DNA, 627 bp, synthetic construct
  misc_feature 1..627: note = Description of Artificial Sequence: Synthetic coding sequence
  source 1..627: mol_type = other DNA
atgggtaacgcccaagagcggccttctgaaacaattgaccgtgaacgcaaaagactcgtagagacactccaggcagattccggcctactgctcgatgcactattggccagaggtgttttaacaggccctgagtatgaggcacttgatgctctgccagatgccgaaaggagggtccggcgtctgctgctgttggtgcagggaaagggtgaggcagcgtgccaggagttactgaggtgtgcccagaggaccgcaggggcacctgaccctgcctgggactggcagcacgtgggacccggttaccgggacaggagctatgatcccccatgccccggtcactggacgccagaggccccaggcagcgggacaacttgccctggcctccccagggctagcgatccagacgaggcagggggtccggaaggatctgaggccgttcagtctggaacacccgaggaacctgaacccgaacttgaggctgaggcctcgaaagaggccgagcctgaaccagagcccgagcccgagctggaacccgaagccgaggcagagcccgagcccgaattggagccagagccagaccctgaacccgaacccgactttgaggagcgcgatgagtcagaggacagctag

SEQ ID NO: 29912 - DNA, 627 bp, synthetic construct
  misc_feature 1..627: note = Description of Artificial Sequence: Synthetic coding sequence
  source 1..627: mol_type = other DNA
atgggcaatgcccaggagcgcccttccgagacaatcgatcgcgagagaaagagactggtggagaccctgcaggccgacagtggccttctcctggatgctctcctagctcggggagttctaactggccctgagtacgaagccctggacgccttgcctgacgctgaaagacgggtgagacggctgctgttgttggtgcagggaaaaggggaggcagcctgtcaagaacttcttagatgtgcacagaggactgccggagcccctgatcctgcatgggattggcagcacgtcggccctggttaccgggatcgaagctatgaccctccatgtcccggacattggacacctgaggcccctggaagtggcaccacctgccctgggcttccaagggcctccgatccggatgaggctggcggtccagagggatctgaggctgtccagagtggcaccccagaggaaccagagcccgagttggaagcagaggcctcaaaagaagccgaaccagagcctgaacccgagcccgagttggagcctgaggcagaagcagagccagagccagagcttgagccagagcccgacccagagcctgagccggactttgaagagagggacgaatcagaggattcttag

SEQ ID NO: 29913 - DNA, 2133 bp, synthetic construct
  misc_feature 1..2133: note = Description of Artificial Sequence: Synthetic coding sequence
  source 1..2133: mol_type = other DNA
atggtcaagctagccaaagctggcaaaaaccaaggagaccccaaaaagatggcaccccctcctaaagaggtggaggaggatagcgaggatgaggagatgtctgaggatgaggaggacgatagttctggagaagaggtagtgatccctcaaaagaaaggaaaaaaagctgctgcaacatctgccaagaaggtggtagtgagtccgaccaagaaggtcgctgtggctacacctgcaaagaaggccgcagttacaccaggaaaaaaagcggcagctacaccagccaaaaagacggttacgccggctaaggctgtcaccacccccggtaaaaaaggcgcaacccctggcaaggccctggttgctacaccgggaaaaaagggggctgcaatcccggctaaaggagctaagaacggtaagaacgctaaaaaggaggattctgatgaggaagaggacgatgattctgaggaagacgaagaggatgacgaagatgaggacgaggatgaggacgagatcgaacccgcagctatgaaagccgcagccgctgcccctgcctctgaggatgaggacgatgaggatgacgaggatgatgaggacgacgatgatgatgaggaggacgattcagaggaagaagccatggagactacacctgccaaaggaaagaaggcggcaaaagtcgtgcccgtgaaggcaaaaaacgtggccgaggatgaggacgaggaagaagatgacgaagatgaggatgacgacgacgacgaggatgacgaggatgatgatgacgaagacgatgaagaggaagaagaagaggaagaagaagagcctgtgaaggaggccccaggaaaacgaaaaaaggaaatggcaaaacaaaaagccgcacctgaggccaaaaaacaaaaagtagaagggacagagccgacaacagccttcaatctcttcgttggaaacctaaactttaacaagtccgccccagaactgaagaccggaatcagcgacgtattcgccaagaacgacctcgccgttgtggatgtcaggattggaatgacacggaaattcggttacgtcgatttcgaatcggccgaagatctggagaaggctttagagctgacagggctgaaggttttcggcaacgagattaaactcgagaagcctaaggggaaggactccaaaaaggaaagagacgctcggacactgctagcaaagaatcttccttataaggtgacccaggatgaacttaaggaggtgtttgaagatgccgcagagattcgcttagtatcaaaagacgggaagtccaagggaattgcctacatagaatttaagactgaagcagacgctgaaaaaaccttcgaggagaaacaagggacagaaatagacgggaggagcatctcactttattataccggcgaaaagggccagaatcaggattatcgagggggtaaaaattcaacgtggtccggagaaagtaaaaccttggtgctgtcaaatctcagttattcagcaaccgaggaaacgctgcaggaggtattcgaaaaagccacattcatcaaagtcccacagaaccagaacgggaaatcaaagggctacgcttttatagaattcgctagtttcgaagatgccaaagaagccttgaatagctgcaataagcgagaaatcgagggcagagcaattaggctcgagctgcagggcccacgaggaagcccaaatgccaggtcacaaccgagcaagaccttattcgtgaaggggctatccgaagatactactgaagagacactcaaagaaagcttcgacggatctgtccgtgctcgcattgtgaccgaccgggagaccggctcctccaaaggattcggattcgtggacttcaactctgaagaagacgccaaagctgctaaggaagcaatggaagacggagagatagatggcaacaaggtgaccttggattgggctaagcctaaaggagagggaggattcggcggtcggggaggtggaaggggaggttttggcggtcgaggaggcggacgtggaggaaggggcggatttggaggacgcggaagaggaggattcgggggtagaggtggcttcaggggaggtcggggaggaggtggcgatcataagccccagggaaaaaaaaccaagttcgagtag

SEQ ID NO: 29914 - DNA, 1449 bp, synthetic construct
  misc_feature 1..1449: note = Description of Artificial Sequence: Synthetic coding sequence
  source 1..1449: mol_type = other DNA
atggtgaaactggctaaagccggaaagaatcagggggatcccaaaaagatggcgcctccgccaaaggaggtggaggaggacagcgaagatgaggaaatgtccgaggacgaggaagacgactctagcggcgaggaggtggtaatcccgcaaaaaaagggtaagaaggccgctgcaaccagtgcaaaaaaggtggtcgtctcacccacaaagaaagtggccgttgcaacacccgcaaagaaagccgctgttactccagggaaaaaagcagccgctaccccagctaagaaaacagtcaccccagcaaaagctgtcacaacaccgggtaaaaaaggggcaaccccaggcaaggctttggtcgccacccccggaaagaaaggcgcagcgatcccagccaaaggggcaaagaatggaaagaatgccaaaaaagaggactcagatgaagaagaggatgacgattctgaggaggatgaagaggacgatgaagacgaagatgaggatgaggacgagatcgagcccgctgccatgaaagccgcagccgctgcccctgcatccgaggatgaagacgatgaggatgatgaggatgatgaggacggtaaaagcaagggaatcgcatatatcgaattcaagactgaagcagatgcagagaagacatttgaagagaagcagggcacagagattgacggccgaagcatcagtctgtactacactggcgagaaggggcagaaccaggattaccgaggcggaaagaattctacctggtcaggggagtctaagactctagtattgagtaatttgagctactcagctacagaggaaaccctgcaggaggtgttcgaaaaagctacctttataaaggtaccccaaaatcagaacgggaagtctaaaggatatgcatttatcgaatttgccagctttgaggacgcaaaagaagcgctgaattcctgcaacaagagagagatcgaaggcagagctatccgactagaactccaggggccacgaggcagtcctaacgccaggagccaacctagcaagacgctattcgtgaagggactttctgaggacacaaccgaagagactctcaaagagtcatttgacgggtctgtgcgggctcggatcgtcaccgatcgagagaccggctcatcgaagggctttggtttcgtggatttcaattctgaggaggatgctaaggccgctaaggaggcaatggaggacggggagattgacgggaataaagtgaccttagattgggcaaagccaaagggtgaaggcggatttgggggtaggggaggtggcagagggggtttcggcggacggggtggtggtcgcggagggaggggaggctttgggggacgcggtcgaggcggttttggaggtcggggaggctttcgcggagggcgaggaggaggaggcgatcataagccacagggaaagaagactaagtttgagtag

SEQ ID NO: 29915 - DNA, 1809 bp, synthetic construct
  misc_feature 1..1809: note = Description of Artificial Sequence: Synthetic coding sequence
  source 1..1809: mol_type = other DNA
atggtgaaattggcaaaagccggaaaaaaccagggagatccaaagaagatggctcctcccccaaaggaggtcgaagaagacagcgaagatgaggaaatgagcgaagatgaagaagatgacagcagtggcgaggaattaaatgacgatttctatcagacaaccatgcacaccttatggaagaagggaaagaaggcagctgcaactagtgcaatcccggctaagggcgcaaagaatgggaagaacgccaagaaggaggactcagacgaggaggaggatgacgactccgaagaggacgaggaggacgatgaagacgaagatgaagacgaagatgagatcgagccggctgccatgaaggccgcagctgctgctccagccagcgaggacgaggacgacgaggacgatgaagacgatgaggacgatgatgacgatgaagaggatgacgatgatgatgaggatgacgaggaggaggaggaggaggaggaggaggaacccgtgaaggaagctccaggcaagcggaagaaggagatggctaaacaaaaagccgcaccagaagccaaaaagcagaaagtggaggggaccgaacccactacagcttttaacctattcgtcggaaacctgaactttaataaaagtgctcctgagttaaaaactggcatcagtgacgtgttcgcgaagaacgacctggccgtggtggacgtgcggatcgggatgaccagaaagttcgggtatgttgacttcgaaagcgctgaagacctggagaaagcgctggaactgaccggcttaaaggtttttggtaatgaaatcaagttggagaaacccaaagggaaagattctaagaaagaaagggatgccagaactttgcttgcaaagaatctgccatataaggtgacccaggacgagctaaaggaagtattcgaagacgcggctgaaatccgactggtgtctaaggatggaaagagcaagggtattgcatacattgagtttaagaccgaagcggacgcagaaaagacattcgaagagaaacaagggactgaaatcgacggtagatctatctctctatactatactggtgaaaagggccagaaccaagactatcggggaggtaaaaacagcacctggtctggtgagtccaaaaccttggtgctgagcaatctttcttattccgccaccgaggagacactacaggaggtatttgaaaaagcaacatttatcaaggtcccgcagaaccaaaacgggaagtccaaaggttatgcgttcatcgagtttgcatccttcgaagatgccaaagaggcgcttaactcctgcaacaagagggaaattgaagggagggccataaggctggagctgcagggtccccgtggaagcccaaacgccagatcacagcccagtaaaaccctctttgtgaaagggctttctgaggatactaccgaggagactctgaaggagagctttgatggttccgtcagagcgagaatcgtcaccgatagagaaaccggttcctccaaagggttcggcttcgtcgactttaactcagaggaagacgcaaaggccgctaaagaggccatggaggatggagagattgacggcaacaaagtcacactggattgggccaaacccaagggggaaggcggatttggagggagaggcggtggacgcggtggattcggagggaggggaggaggcagagggggaaggggtgggtttggcggaaggggcagggggggttttgggggaaggggaggtttcagagggggaaggggcggaggaggggatcataagccacaaggaaagaagaccaaatttgagtag

SEQ ID NO: 29916 - DNA, 885 bp, synthetic construct
  misc_feature 1..885: note = Description of Artificial Sequence: Synthetic coding sequence
  source 1..885: mol_type = other DNA
atggaagactctatggacatggatatgagccccctgaggccacagaactaccttttcggttgcgaactgaaagcagacaaggactaccattttaaggtcgacaatgatgaaaatgagcatcagctttccctaagaacagtctctctaggagccggtgccaaagacgagctgcatatcgtcgaagcagaagctatgaattatgagggaagtcccattaaggtaactttggcgacactgaaaatgtcagtgcaaccaaccgtatccctgggaggctttgaaatcactccacccgtcgtcttgcgcctgaaatgcggctcagggcctgtccatatttctggacagcacttggtcgccgttgaggaagatgctgaatctgaggacgaagaagaagaggacgtcaaactcctttcaatatctggcaagcggagcgctcctgggggtggctctaaggtaccccaaaagaaagtaaagctagccgctgacgaggacgacgatgacgatgatgaagaggatgacgacgaggacgatgacgatgatgatttcgatgatgaggaggcagaagaaaaggcacctgttaagaagtcaattagagatacaccggctaaaaatgcacagaagtcgaatcagaacggcaaggactctaagccctcttcgacacctcgcagcaaaggtcaggaatcatttaagaaacaggagaagacacccaaaaccccaaaagggccatcctcggtagaggacattaaggccaagatgcaggccagcatagagaagggcggtagtctgcccaaggttgaggccaaattcattaactatgtgaagaactgttttcgaatgacagatcaggaagctatccaagatctgtggcagtggcggaagtccctttag

SEQ ID NO: 29917 - DNA, 798 bp, synthetic construct
  misc_feature 1..798: note = Description of Artificial Sequence: Synthetic coding sequence
  source 1..798: mol_type = other DNA
atggaggacagcatggacatggacatgtcaccgcttcggccacaaaattacctgtttggttgcgagttgaaggcagacaaggattaccacttcaaggttgataacgacgagaatgagcatcagctgtctctgaggaccgtgtctcttggcgctggcgcaaaagacgaacttcacattgtggaagcagaagctatgaattacgagggctcacccatcaaagtgaccctagcaacactcaaaatgtctgtccagccaacagtgtcccttggtggattcgaaattacgccacccgtggtgctacgcctgaagtgcggcagtggccctgttcatatcagcggccagcacctggtcgctgtggaggaggacgctgagtctgaggacgaggaggaagaagatgtgaagctgctttcaatttccggcaagagatcggcccctggcggagggagcaaggtgcctcagaagaaagtgaaactggcagccgatgaagacgacgacgacgacgacgaggaagacgacgatgaagatgatgacgacgatgatttcgatgatgaggaggctgaggagaaggccccagtgaagaagggacaggaatccttcaagaagcaggagaaaacccccaagacgcctaagggaccttccagcgtagaggacatcaaagccaagatgcaagctagcatcgagaagggaggcagcctaccgaaggtggaagccaaattcatcaattacgtaaagaattgcttccgaatgaccgaccaggaagctatacaggacctgtggcagtggaggaagtccttgtag

SEQ ID NO: 29918 - DNA, 780 bp, synthetic construct
  misc_feature 1..780: note = Description of Artificial Sequence: Synthetic coding sequence
  source 1..780: mol_type = other DNA
atggaagattctatggatatggacatgtccccactgcggcctcaaaattacctctttggatgcgagctgaaggccgataaagattaccattttaaagtggacaacgacgagaacgaacatcagctgtcccttcggactgttagccttggagcaggcgctaaggatgagctacacatagtagaagccgaggccatgaattacgaaggttcaccgattaaagtgacccttgctacgctgaagatgtcggtccagccgaccgtttccttgggtggatttgagattacgcctcccgtagttctgcgactcaagtgtggttccggccctgtgcacatttcaggccagcatctggttgctgttgaggaggatgccgagagcgaggacgaagaagaggaggatgtcaaactgctgtctatttcaggtaaaaggtctgccccaggaggtggttctaaagtgcctcagaagaaggttaagctggcagcagacgaggatgatgatgacgatgatgaagaggacgacgatgaggatgatgatgacgatgactttgacgacgaagaagccgaggagaaagcccctgtaaagaaaagcatacgcgacactcctgcaaaaaacgcacagaaatccaatcagaatggcaaagactctaaaccatcatctaccccccgatctaaggggcaggaaagcttcaaaaagcaggagaagaccccaaagacccctaaaggaccctcatctgttgaagacatcaaggcaaagatgcaggcctctattgaaaaggcccattag

SEQ ID NO: 29919 - DNA, 885 bp, synthetic construct
  misc_feature 1..885: note = Description of Artificial Sequence: Synthetic coding sequence
  source 1..885: mol_type = other DNA
atggaggatagcatggacatggatatgtccccgctgcgccctcagaactatttattcgggtgcgagctgaaggctgacaaagactatcactttaaggtcgataatgacgagaacgagcatcagctgtctctccgtacagtgtcactgggcgcaggcgcaaaggacgagctgcacattgtggaggccgaggctatgaactatgaaggttcaccgattaaggtcacattagctaccctgaaaatgtctgttcaacccacagtgtcacttggtgggtttgaaatcacacctcctgtcgtcctgcgattgaagtgtggctctggccctgtgcacataagcggccagcacttggttgccgtggaagaggatgcagaatccgaggacgaggaagaggaggacgtaaagttgttgagcattagtgggaagcggtccgctcccggaggtgggagtaaggtacctcaaaaaaaggtgaagcttgccgctgacgaagatgacgatgacgacgatgaagaggatgacgatgaggatgatgacgatgacgattttgatgacgaggaggctgaggagaaggcccctgtaaagaagtctattcgtgacacccctgctaaaaacgcccagaagtcaaatcagaatggtaaagatagcaagccatcgagtactccacgttccaagggacaggagagcttcaagaagcaggagaaaacacccaaaacaccaaaggggccatcaagtgtcgaggacataaaagccaagatgcaggcgagcatagaaaaaggtggttcgctgccaaaggtcgaagccaaatttattaattatgttaagaattgttttagaatgactgaccaagaagcaatccaggacctttggcagtggagaaaaagtctttag

SEQ ID NO: 29920 - DNA, 867 bp, synthetic construct
  misc_feature 1..867: note = Description of Artificial Sequence: Synthetic coding sequence
  source 1..867: mol_type = other DNA
atgaaggacaggacacaggagttgagaaccgctaaagactcagatgatgacgatgatgtagctgtaaccgtagatcgcgatcgattcatggatgagttcttcgaacaggtggaggaaattaggggcttcattgataagattgccgagaatgtggaagaggtaaagagaaaacatagcgcaatcctcgcatccccaaaccccgatgaaaagaccaaggaagagcttgaagaacttatgtcagatataaagaaaacagcgaacaaagtgcgaagcaagctgaagagtatcgagcaatctatcgagcaggaggaaggcctaaatcgcagctctgccgacctacggattcgaaagacccagcactctactctctctcgaaaatttgtggaagtgatgtcagagtataacgcaacacagtcagattatcgcgaaaggtgcaaaggtaggattcagcggcagctcgagatcacagggagaactacgacctccgaggaactcgaagatatgctcgagtcagggaatcccgcaatatttgcaagcggcatcataatggatagctctatcagcaaacaggccctctcagagatagaaaccagacacagcgagatcatcaagctagagaactccatccgcgagctgcacgatatgttcatggatatggctatgctggtagagagccagggagagatgatcgatcgaatcgagtataatgtcgagcacgccgtagactacgtggaaagagccgtttcggacacgaagaaggcggtcaagtaccagtcgaaggcgcgtagaaagaagatcatgattatcatttgctgcgtgatccttggcatcgtgatcgcgtccacggtcggcggaatctttgcctag

SEQ ID NO: 29921 - DNA, 183 bp, synthetic construct
  misc_feature 1..183: note = Description of Artificial Sequence: Synthetic coding sequence
  source 1..183: mol_type = other DNA
atggaagaacagggtcattctgaaatggaaataattcctagcgaaagccacccacacatccaactcctcaagagcaaccgcgagcttctggtaacccacatacgaaatacgcagtgcctggtggataacttgctgaagaatgactatttttccgccgaggacgccgaaatcgtttgcgcatag

SEQ ID NO: 29922 - DNA, 183 bp, synthetic construct
  misc_feature 1..183: note = Description of Artificial Sequence: Synthetic coding sequence
  source 1..183: mol_type = other DNA
atggaagaacaaggccactcggagatggagattattccatccgaatcccatccacacattcagttgctgaaatcaaatcgagagctgctggtgacccacatcagaaacacacagtgcctggtggataatctgctaaagaacgactatttcagcgcagaagatgccgaaatagtatgtgcatag

SEQ ID NO: 29923 - DNA, 138 bp, synthetic construct
  misc_feature 1..138: note = Description of Artificial Sequence: Synthetic coding sequence
  source 1..138: mol_type = other DNA
atggaggagcaaggacactccgagatggagatcataccctctgagtctcacccacacatccaactgctgaaatccaaccgtgagcttctagtgacccacatccgaaacacacaatgtctggtggacaatttattgtag

SEQ ID NO: 29924 - DNA, 183 bp, synthetic construct
  misc_feature 1..183: note = Description of Artificial Sequence: Synthetic coding sequence
  source 1..183: mol_type = other DNA
atggaggaacaaggacactccgagatggagattatccctagtgagagccacccacatatccagctgcttaagagtaaccgagagctgctggttactcatattcggaatacccaatgccttgtcgacaacctgctgaagaatgattatttctccgctgaagacgctgaaattgtgtgtgcatag

SEQ ID NO: 29925 - DNA, 750 bp, synthetic construct
  misc_feature 1..750: note = Description of Artificial Sequence: Synthetic coding sequence
  source 1..750: mol_type = other DNA
atggaagagcaaggccacagcgaaatggagattatcccaagcgagtctcatccacatatccagctcctgaaatcaaatcgtgagctcctggtaactcacattcgaaacacacaatgcctggtggataatctgttaaaaaatgattatttttccgcagaggacgctgaaatcgtgtgcgcttgccctacccagcctgataaggtcaggaagattctggatttggtgcagtctaaaggagaggaagttagtgagttcttcctttacctcctgcaacagcttgcagacgcttacgtggatcttaggccctggctgctggagattgggttcagtccctctctgctgacccagagcaaagtcgttgttaacaccgatcctgttagccggtacactcagcagttacggcaccatctcggtagagacagtaagttcgtgctctgttacgcgcagaaggaagagttgctcctggaggaaatctatatggacacaatcatggagctggtcggattctcaaacgaatctctaggttcactaaattccctcgcctgcctattggaccacaccacaggcatcctgaacgagcaggctgcaagccggaaagttacaggatgtgtgtgcaggacatgttcctcctccaccacggccacccagagcggaaccccccgtcgctgtctgccatcctgctgtgcttcaccaacctggccgagctccccctctatggcttggacatcttgtactaggacatggacttag

SEQ ID NO: 29926 - DNA, 2340 bp, synthetic construct
  misc_feature 1..2340: note = Description of Artificial Sequence: Synthetic coding sequence
  source 1..2340: mol_type = other DNA
atggaggaacaagggcacagtgaaatggagattattcccagcgaaagtcaccctcacattcagttgttgaagtctaacagagagctgctggtgacccacattcggaacacccagtgtcttgttgataatctgctgaagaacgattacttctcggcggaggacgccgaaattgtgtgtgcatgccccacccagcccgataaggtgagaaagattttagacctggtgcaaagcaaaggggaggaggtgtctgagttcttcctgtacctgctccagcagttagccgacgcctatgttgacctgcggccatggttactggaaatcgggttctcgccttcgttgctcacccaaagtaaagtggttgtgaacaccgaccccgtcagcagatatactcagcaattgagacaccatctgggcagagattcaaagttcgtactatgttatgctcaaaaggaggagctacttctcgaggaaatttacatggatactatcatggagctggtaggatttagcaacgagagcttggggtctctgaatagcctggcatgcttgctggaccatactacaggcatcctgaacgagcagggcgagacgattttcatcctgggcgatgccggagtcggtaagtctatgcttttgcagagactgcagtccctgtgggccaccggccgactcgacgccggtgttaaattcttcttccacttccggtgtcgaatgttctcttgctttaaagaatcagatcggctgtgtctgcaggacctcctgttcaagcattactgctacccggagagagaccccgaggaggtcttcgcctttctcctgcgctttccacacgtggcacttttcacgttcgacggcttggacgagctccacagcgacctagatctgagcagggtgccggacagtagctgcccctgggagcccgcacacccactggtactgctggctaatctgctatccggtaaattattgaaaggagcgtctaagctgctcactgcccgaaccggtattgaagtgcccagacagttcttgaggaagaaagtactcctaagaggcttttcgccatcccacttgagggcctatgcacgcaggatgtttccagaaagagcgctgcaggatcggctgctcagccagctggaggccaatccaaacctttgttccctttgctcagttccgttgttttgctggatcatcttccgctgcttccagcactttagagccgcttttgagggctcaccgcagcttcccgactgcaccatgactctcaccgatgttttcctccttgtcactgaagtccacctgaatcgcatgcagccgagtagtttagtgcagcgaaatactcggagtcctgtagaaaccctgcacgccggtcgggacaccctttgcagcctgggtcaggttgcccaccggggtatggagaagagcttgttcgtctttacacaagaggaagtccaggccagcggcttacaggagagggatatgcaactgggctttctcagggctcttcccgaattaggtcccggtggtgaccaacaaagttacgagttctttcacctgaccctgcaggccttttttaccgcattcttcctagtgctcgacgatagagttggcactcaggaattactgcgatttttccaagaatggatgccccctgccggagccgctactacgtcgtgttatcctcccttccttccttttcagtgtctgcaaggttccggccctgcacgggaagatctgttcaaaaacaaggaccatttccagttcacaaatttatttttgtgcgggctgctgtccaaggcaaaacagaaactgctaagacacttagtccccgcagccgctcttaggcggaagagaaaagccctgtgggcccatctgttcagctccttgcgcggatatttaaaaagcctacctcgcgttcaagttgaaagtttcaaccaggttcaggcgatgcctacttttatttggatgttacggtgtatctacgagacccagtcccagaaagtggggcagctcgctgcgcgaggtatttgcgcgaattacctgaaattaacatattgtaatgcgtgtagcgccgattgtagtgcactgagtttcgtgctccaccacttcccaaaacggttggcattggatcttgataataataatcttaacgactatggtgtccgggaacttcagccatgttttagtcgccttacggttctccgcctcagtgttaaccaaatcacggatggaggggtgaaggttctgtcggaggagctcacaaaatacaaaattgtcacttacctcggcctctggaagtccgtggatactatttgcttcaaaaagcagggacttctcaaatag

SEQ ID NO: 29927 - DNA, 495 bp, synthetic construct
  misc_feature 1..495: note = Description of Artificial Sequence: Synthetic coding sequence
  source 1..495: mol_type = other DNA
atgaagtgcaaacccaatcaaacgcgcacgtacgaccccgaaggatttaaaaaaagagccgcatgcctgtgtttcagatccgagcgcgaggatgaggttctgctcgtatcttcaagcaggtaccctgatcgctggatagtgcctggaggaggaatggagcctgaggaagagccagggggtgctgcagtacgcgaagtatatgaggaggcaggcgtgaaggggaagttagggagacttctgggcgtcttcgagcagaatcaagaccgcaaacaccgcacatatgtgtacgtcttaacggtgacagaacttttggaggactgggaagactctgtgtccattggacgcaagcgggagtggttcaaggtggaggacgccataaaggtgctccagtgtcacaagccagtccacgccgaatatttagagaagttaaaattgggcggaagtccaaccaacggaaacagcatggctccctcatcccccgactcagatccatag

SEQ ID NO: 29928 - DNA, 792 bp, synthetic construct
  misc_feature 1..792: note = Description of Artificial Sequence: Synthetic coding sequence
  source 1..792: mol_type = other DNA
atgagcctgtactgcggaatcgcatgccggaggaaattcttctggtgctataggcttctgtctacttacgttaccaagacgcgatatctcttcgagcttaaggaagacgacgacgcttgcaagaaagcccaacaaaccggagccttctacttatttcactctctcgccccactcctgcagacatcagcacatcaatatctcgcccctcgacactccctccttgaactggaacgcctccttggaaagttcgggcaggacgcccagaggatcgaggatagcgtactgattggatgcagcgagcagcaggaggcttggttcgcactggaccttggattagactcgtctttttccatatctgcctccctgcacaagccagagatggaaaccgagctgaagggatctttcatcgagctgcggaaggccctctttcagctgaatgcccgagatgcatccctgctgagtacggcgcaggctctgttgcggtggcacgacgcgcatcaattctgtagtcgcagcggtcaacccaccaaaaagaacgtggcaggaagtaaacgggtgtgtcccagtaataacatcatatactacccacaaatccaggttaatctgcgggagctggagacagccgcttggttttctcacgatgaagtggctaccgcactgaagcgaaaaggaccatacactcaacagcaaaacggaactttcccattttggctgcctccgaagctagccatttctcaccagctgattaaggagtgggtggagaagcaaacttgcagtagtctccctgcatag

SEQ ID NO: 29929 - DNA, 1059 bp, synthetic construct
  misc_feature 1..1059: note = Description of Artificial Sequence: Synthetic coding sequence
  source 1..1059: mol_type = other DNA
atgtccttatactgcgggatagcttgcagaaggaagttcttctggtgctacagactgctgtccacttatgtgaccaagactagatatctgtttgaattaaaagaggatgacgacgcttgcaagaaggcacagcaaacgggcgcattctaccttttccattccctcgctccactcctccaaacttctgcacaccaatatctggccccacgccactctttacttgagctggaacgattgctcggcaagttcgggcaggatgcccaacgcatcgaagactccgtgctgatcggttgtagcgagcagcaggaggcatggtttgcccttgacctgggactggatagttccttttctattagcgcctctttgcataaacctgagatggagactgagttaaagggcagcttcattgagttacgaaaagctttgtttcagctgaacgcccgagatgccagcctcttgtcgaccgcacaggcacttctccgttggcatgacgcccatcagttctgcagcagatccggacagccaacaaaaaaaaatgttgccggaagtaagcgagtgtgtccatccaacaacatcatctattacccccagatggctcccgtggccatcaccctggtctctgatggcacgaggtgcctcctggctcgacagtcttcattccctaaaggaatgtactccgcactcgctggattttgtgacatcggggaaagcgtggaagagacgataagacgagaggtagctgaggaggtgggtcttgaagtagagagtctgcaatattacgctagccagcattggccattcccgtctggctcccttatgattgcgtgccacgctacggtgaaaccgggacaaaccgagatccaggttaatttgagggagctggagactgctgcttggttctcccatgacgaagttgctactgcgttgaagagaaaaggaccttacacacagcaacaaaacgggaccttcccattctggttacctcccaagttggctattagtcaccagctgattaaagaatgggttgaaaagcagacatgttcatctttaccggcatag

SEQ ID NO: 29930 - DNA, 708 bp, synthetic construct
  misc_feature 1..708: note = Description of Artificial Sequence: Synthetic coding sequence
  source 1..708: mol_type = other DNA
atgtcactgtactgtgggatagcttgccgtcgaaagtttttctggtgctacagactcctgtccacgtatgtcactaagactcgttatctattcgaactcaaagaagacgacgacgcgtgcaagaaggctcagcagaccggcgctttctacctgttccactctctggcacctctgcttcagactagtgcacaccagtacctcgcccctcgacattctctgcttgagttggagagattgctcgggaagttcggccaggatgctcagagaattgaagacagtgtgctgatcggatgttctgaacagcaagaggcttggtttgccctcgatctcgggcttgattcttccttttctatctcagcctccctgcataagcccgagatggaaacagagttaaagggctccttcatcgaacttagaaaggccctttttcaattgaacgccagggatgcctccctcctgtctactgcgcaggccttgctccgctggcacgatgctcatcaattttgctcacggtccggtcagcctacgaagaaaaatgtagctggcagcaagcgcgtatgtccgtcaaacaacataatctactaccctcaagttaaagtgtggaaacgaccttctgcagagaagctgcaaaaaagatgggactggcggtggaaagcctgtagtacaatgcacccctccatcggaccatctctggtcgctcacagctag

SEQ ID NO: 29931 - DNA, 468 bp, synthetic construct
  misc_feature 1..468: note = Description of Artificial Sequence: Synthetic coding sequence
  source 1..468: mol_type = other DNA
atggccccagtcgcaatcacattagtgagcgatggcactagatgtctgctggccaggcagtcatcatttcccaaaggaatgtacagcgctctcgcgggattctgtgatattggcgagtcagtggaggaaacgatacgtagggaagtggctgaggaggtgggccttgaggtggaatctttgcagtactatgcctcacagcactggccatttccttccgggtccctgatgattgcctgccacgctacggtgaaacccggtcaaacggaaatccaggtaaacctgcgggagctcgagactgccgcttggttcagtcacgacgaggtggcaaccgcactaaaacgtaaaggcccttatacacaacagcagaatggcacctttcccttctggcttcccccaaaacttgctatctcacaccagctgattaaggagtgggtcgagaagcagacatgtagcagcctgccggcttag

SEQ ID NO: 29932 - DNA, 681 bp, synthetic construct
  misc_feature 1..681: note = Description of Artificial Sequence: Synthetic coding sequence
  source 1..681: mol_type = other DNA
atggagacagagttgaaaggttcgttcattgagctgcgcaaagcactgttccagctgaatgcaagagacgcatccctgttaagcacagcccaggcattgctgaggtggcacgacgctcaccagttctgtagccgcagcgggcaacccaccaagaagaacgttgcgggaagtaagcgcgtctgcccgtccaataacatcatttactaccctcaaatggcccctgtggccatcaccttagtttccgatgggacacgttgcctgctggcgaggcagagttctttcccaaaaggaatgtactcggcactggccggtttttgcgacatcggcgagtcagtggaagaaacaataagacgcgaggtggcagaagaggtcggccttgaggtcgaatctctgcaatactacgcctctcagcactggcccttcccttctggctcactcatgatagcttgccatgccactgtgaaaccaggccagaccgaaatccaggttaatctccgagaactggaaaccgcggcatggttctcacacgacgaggtggccactgctctcaagcggaagggcccatacacacagcaacagaatgggaccttccctttttggctgccccctaaactcgccataagccaccaactcattaaggaatgggtcgagaaacagacttgttcctcattgcccgcttag

SEQ ID NO: 29933 - DNA, 717 bp, synthetic construct
  misc_feature 1..717: note = Description of Artificial Sequence: Synthetic coding sequence
  source 1..717: mol_type = other DNA
atgctgggtcagccagcaccactcgaacgcttcgcgtctcggcgaccgcaggtcctagctgtacgaaccgtatgtgacctggtgctaggaaagatggacaaggactgcgagatgaagcgcaccaccctcgatagccctctcggcaagctggaactctctggatgcgaacaaggcctccacgaaataaagctgttgggaaagggaaccagcgctgcagacgccgtggaagtaccagcacccgcagctgtgttgggaggacctgagccccttatgcagtgcactgcctggctcaatgcatactttcaccagcctgaagcaattgaggagttccccgttccggctctccaccacccagtctttcagcaggagagtttcactagacaggtgctttggaagttgctgaaggtagtaaagtttggtgaagttatttcgtaccagcagttggccgctctcgcgggtaatccaaaggcagccagagcagtgggcggtgccatgcgtgggaaccctgttcccatcctgatcccctgccaccgcgtggtttgcagttctggcgcagtgggtaattacagcgggggactggctgtcaaggaatggctgcttgcccatgagggacaccggctaggaaaacctggcctgggcggtagctctgggctcgccggtgcttggctgaaaggtgccggtgccacaagcggaagcccccctgcaggacggaattag

SEQ ID NO: 29934 - DNA, 1569 bp, synthetic construct
  misc_feature 1..1569: note = Description of Artificial Sequence: Synthetic coding sequence
  source 1..1569: mol_type = other DNA
atgtctagcagaccattggaaagtccacccccatataggccggacgaatttaagccaaaccactacgcaccgtccaacgatatttatggcggagagatgcacgttcgccctatgctgagtcaacccgcttattcattttatcctgaggatgagattctgcacttttacaagtggaccagtccacccggtgtcatccgcattctatctatgctgataattgttatgtgcatagcaatattcgcgtgtgtcgcaagcaccttggcttgggatcgaggctatggcacctccctcttggggggaagtgtagggtatccttatggaggcagcggattcggctcttatggcagcggttacgggtacgggtatgggtatggatacgggtacggaggatacaccgatccccgagcagccaaggggtttatgctcgcgatggccgcattttgttttatcgctgcactcgtgatcttcgtgacgagcgtcatccggagcgagatgtccaggacaagaaggtattacctgtccgtgatcatcgtgagcgcaattctgggaataatggtatttatcgctactattgtatacatcatgggagtgaaccccaccgcccagagtagtggaagcctgtatggatctcaaatttacgccctctgtaatcagttttatacgccagcagctactgggctatacgtagaccagtatttatatcattactgcgtggtggacccacaggaggccatcgccattgtccttggctttatgattatcgtcgcatttgctttgatcatcttcttcgcagtgaagacccgaagaaagatggaccggtacgacaagagcaacattctgtgggacaaagaacatatatatgacgaacaaccacccaacgtggaagaatgggttaaaaatgtgtctgctggcacacaagacgtgccatccccaccctctgactatgtcgagagagtagacagccctatggcctattcctccaacggaaaggtcaatgataaacggttctatcctgagtcctcttacaagagcacaccggtcccagaagtcgttcaggaattacctctgacaagtcctgtggacgactttcggcaacccaggtactcttctggtgggaatttcgaaacaccttctaagagagcaccagcgaaaggcagggccggtaggtcaaagcggacggagcaggaccactacgaaacagactatactaccggaggtgagagttgcgacgagctggaagaggattggattcgcgagtaccccccaataacctccgatcaacaacgacaactgtataaacgcaactttgataccggtctgcaggagtataaaagtttacagtctgagcttgacgaaatcaacaaagagctttccaggcttgataaagagctggacgattaccgtgaagaatcagaagaatatatggccgcagccgacgagtataatcggctcaaacaggtgaagggaagtgctgactacaagtcaaagaagaaccactgcaaacagcttaagtcgaaactgtcccatatcaagaaaatggtcggtgactatgatcgacagaaaacatag

SEQ ID NO: 29935 - DNA, 1407 bp, synthetic construct
  misc_feature 1..1407: note = Description of Artificial Sequence: Synthetic coding sequence
  source 1..1407: mol_type = other DNA
atgagctcccgaccgctggaaagtcccccaccctacaggcccgacgagttcaagcccaatcattacgcccctagcaacgatatttacggaggtgagatgcatgttagaccaatgctatcccagccagcctattcattttatcccgaggacgaaatcctgcatttctataaatggactagcccccctggtgtaatccgtattttgagtatgctgattattgtgatgtgtatcgcgatcttcgcgtgtgtggcaagtacacttgcctgggaccgcggatacggaacaagcctcctaggcggttctgtaggttacccatacggcggttctggctttggctcatacggctcaggctatggctatggatatggttatgggtatggctatgggggatacacagatccacgcgcagcaaaaggatttatgctggctatggccgcattctgttttattgctgcactggtcatatttgtaaccagtgttattcggtccgagatgtctcggaccaggcgttactatctgtccgtgatcatcgtctccgccattctgggaataatggtgttcattgccaccatcgtttatatcatgggcgtgaaccctaccgcacagtcctctggcagcctgtatgggagtcagatatacgcgttgtgtaaccagttttacacccccgctgctacagggctctacgtggaccaatatctgtatcactactgcgtcgttgacccacaggaggtgaagaatgttagtgccggaactcaggacgtgccaagccctcctagcgattacgtagagcgggtggactccccaatggcctactcaagcaacggaaaggtaaacgataaaagattttacccggagagcagctacaaaagtacccccgtcccggaggtcgtgcaggagctgcccctgactagccccgtcgatgacttcagacaaccacggtacagcagtggcggaaattttgaaacacccagtaagcgcgctcctgctaaaggcagagctggccgtagcaagagaaccgagcaggaccattatgagaccgactatacgaccggtggagagagttgtgacgaattggaggaagattggatcagggagtatcctccaataacttctgaccagcagcgccagctctacaagcgcaatttcgatacaggcctccaagaatataagagtctgcaatccgaactggatgaaatcaataaggagctgagccggctcgataaagagctggacgactacagggaagaatccgaggaatatatggcggctgccgatgaatataatcggctgaaacaagttaaaggcagtgctgattacaagtccaagaaaaaccactgcaagcagctgaagagtaagctcagccatatcaaaaagatggtgggtgattatgaccgtcaaaagacctag

SEQ ID NO: 29936 - DNA, 1569 bp, synthetic construct
  misc_feature 1..1569: note = Description of Artificial Sequence: Synthetic coding sequence
  source 1..1569: mol_type = other DNA
atgagttcccgaccactggaatccccaccgccatacagaccggacgaattcaaaccaaaccactacgcccctagcaacgacatatacggcggagagatgcatgttcgacccatgctttctcagccagcatatagtttctatcccgaggacgagatattacacttttataaatggacgtccccacccggagttataagaattttgtctatgctcattatagtcatgtgcatcgcgatttttgcgtgcgttgcgtcaactctcgcttgggatcgcggatacggcacaagtctgctgggcggaagtgtgggatacccctacgggggaagcgggtttggaagttacgggtctggctacggctacggttacggctacggatacggctatggcggatataccgacccacgtgctgcaaaaggcttcatgcttgccatggccgctttttgtttcattgccgctctcgtcatttttgtgacctctgtgattcgatctgagatgagcaggacccgacgttattatctgagcgtcattattgtatctgcaatcttagggataatggtgttcattgctacgattgtttatattatgggggtaaacccaacagctcagtctagtggatccctctatgggagtcagatttatgccctgtgtaaccaattttataccccggcagccacaggactttacgtggaccagtatctctaccactactgtgttgttgatccccaggaggctattgccatcgttctcggctttatgattatcgtggcctttgccctgatcatatttttcgccgtgaagacccggagaaaaatggaccgatacgataaatccaacatcctgtgggataaggagcacatatacgacgaacaacccccaaatgtcgaggaatgggtgaaaaatgtatctgccggaacccaggacgtacctagccctccttccgactacgtagagagagtcgactctcccatggcctacagcagtaacggaaaagtgaacgacaaaagattttatcccgagtcctcctacaaaagcacccccgtgccagaagtagtgcaggaactcccactgacatcgcccgtcgatgattttcggcagccaaggtattcatctggagggaactttgaaactccttccaagagggcccctgccaaagggcgtgccggacggtccaagcgcaccgagcaggatcactacgaaaccgattatacaactggtggcgagagttgtgacgaactcgaagaagactggatccgggagtacccacctatcacctccgatcaacaacgccaattgtataaaaggaacttcgacacaggccttcaagagtataagtcattacagtctgagctggatgagattaacaaagagctttcccggctggacaaggagcttgacgactatagggaggaatccgaagagtacatggccgcagccgacgagtacaatcgtctgaaacaggtgaaagggtccgccgactataagagtaagaagaatcactgcaagcagctgaagtcgaagttgagtcatataaaaaagatggtgggcgactatgatcggcagaagacctag

SEQ ID NO: 29937 - DNA, 816 bp, synthetic construct
  misc_feature 1..816: note = Description of Artificial Sequence: Synthetic coding sequence
  source 1..816: mol_type = other DNA
atgattatagtggccttcgctctaatcattttctttgctgtcaagacacggcgaaagatggaccgttacgataagtccaatatcctatgggacaaggaacacatatatgacgaacagcccccaaacgtggaggagtgggtgaagaacgtgtcagccggaactcaagatgtgccttcaccgccatctgattacgtggagcgtgtggactcaccaatggcctacagcagcaacggaaaggtgaacgataagcggttttaccccgagtcgtcctacaagagcacacctgtgccagaagtggtgcaggaactgcctctgacatctcctgtcgatgactttcgccagcctaggtatagttcaggcggaaattttgagactccaagtaagcgtgctcccgctaaaggcagggccggtcgaagtaaacggacagagcaggatcattacgagaccgactacacaactggcggagaatcttgcgatgagttggaggaagactggattcgcgagtatccaccaataacgtctgatcagcaaagacagttgtataagaggaattttgataccggattgcaagaatacaagtcactacaaagtgaactggacgagattaacaaggaactaagcaggctggataaggagttggacgactaccgggaggaatccgaggaatacatggccgctgctgacgagtacaaccggcttaagcaggttaaggggtccgccgactacaagtcaaagaagaaccattgtaaacagttaaagtcgaaactctcacacatcaagaaaatggtgggggattacgaccggcagaagacttag

SEQ ID NO: 29938 - DNA, 603 bp, synthetic construct
  misc_feature 1..603: note = Description of Artificial Sequence: Synthetic coding sequence
  source 1..603: mol_type = other DNA
atggcatatagtagtaatggaaaagttaacgataaaaggttttaccccgaatcctcctataagtcgacccccgtacccgaagtggtgcaagaactgcctctgacgtcccccgtggacgattttaggcaaccacggtacagttcaggtggcaactttgaaactcccagtaagagagcaccggctaagggccgtgctggcaggtccaaaaggacagagcaagaccattacgaaactgattacacaaccggaggtgagagttgcgatgaactcgaagaagactggattagggagtatccccctatcacctcagaccaacagcgccagctatacaaacggaacttcgacacagggctccaggagtataagtcactccagtcagaactggacgaaataaacaaagaactgtcccgcctggacaaggaactggatgactatcgagaagagtcagaagagtacatggcggcagcagatgaatacaaccgccttaaacaggtgaaaggctccgccgattacaaaagtaagaaaaatcactgtaagcagctgaagagtaaactgtcccacatcaagaaaatggtaggagactacgaccggcagaagacatag

SEQ ID NO: 29939 - DNA, 3114 bp, synthetic construct
  misc_feature 1..3114: note = Description of Artificial Sequence: Synthetic coding sequence
  source 1..3114: mol_type = other DNA
atgtggcgttgcggaggcaggcagggcctgtgcgtgctaaggcggctgtcgggcggacatgcccatcacagagcttggcgatggaactctaatcgggcttgcgagcgggctctgcaatataagctaggggacaaaatccatggattcaccgtgaaccaggtgacttctgttccagagctgttcctgacagccgtgaaactcacccacgatgacaccggggctaggtaccttcacctggcacgcgaagacacaaacaacctgttctcagtgcaattcaggacgacacccatggacagtacaggggttccgcacattctggagcataccgtgctctgtgggagccaaaaatatccttgtcgggatcccttctttaagatgctgaataggagcctgagtacttttatgaacgccttcactgctagcgattacaccctttaccccttttcgacccagaatccaaaggactttcagaatctcttgtcggtttacttggatgctacattctttccctgcctgagagagttagacttttggcaagaaggctggcgcctggagcacgagaatcccagtgatccccagaccccactggtgtttaagggtgtcgtatttaacgaaatgaagggcgctttcgtcaataatgaacgaattttctctcagcatcttcaaaaccggctcttaccggaccatacctactcagttgtaagcgggggagatcccttatgtatccccgaactgacatgggagcagctgaaacaatttcatgccacgcattaccatccatcaaatgctagattctttacttacgggaactttccactagagcagcacctcaagcagatccacgaagaagccctatccaagttccagaagatcgagcccagtaccgtcgtgcctgcgcagactccgtgggataaaccgcgagagttccagatcacatgcggtcctgactcctttgcgaccgatccttccaagcaaacaaccatctccgtgtcgttcttactgcctgacataacggacacctttgaggcatttactctgagcctcctttcttctctactgacctctggccctaactccccattctacaaagccctgattgagagcggactcggtactgatttttcccccgacgtcggatataacgggtacacacgcgaggcgtatttttccgtggggctgcaaggcatagctgaaaaagacatcgagaccgtgcgaagcctgatcgaccgaacaatagatgaagtggtcgaaaaaggattcgaagacgatcggatcgaggccctacttcacaaaatcgagatccagatgaagcatcagtcaaccagtttcggcttaatgctgacaagctacattgcaagttgttggaatcacgacggcgacccagtagaactgttaaaattaggaaatcagctggctaagttcaggcaatgcctgcaggaaaatcctaaatttctccaggagaaggtcaaacaatattttaagaataatcagcataagctcactttgtccatgcgcccagatgacaaataccacgaaaagcaggctcaggtggaggcgacaaaattgaagcagaaggtggaggccctgagtcccggagacagacagcagatctatgaaaaggggctagagctgaggagccagcagtctaagccacaggacgcgtcatgtcttccagctctaaaggtgtccgatattgaaccaacaatccctgtgactgaattggatgtcgtccttaccgccggagacattcctgttcagtattgcgcccagcccacgaacggtatggtgtattttcgtgccttctcatctctaaatacattgccagaggagctgagaccttacgtccctctcttctgtagtgtgctgactaaactgggttgtggccttctagattaccgcgagcaggcccaacaaattgaacttaagactggcggaatgtctgctagcccccacgtgttgcccgacgactctcatatggatacctacgagcaaggggtgctgttctcttctttgtgcctcgaccgtaatctcccagatatgatgcaattgtggagcgaaatattcaataatccctgctttgaggaggaggaacacttcaaggtgctggtgaaaatgaccgctcaggagttggccaacggcatccccgactctggacacctgtacgctagtatcagggctgggaggacacttactcccgcaggagacctacaagagacattctcaggaatggatcaggtgaggctgatgaagaggatcgcggagatgacagatatcaaacccattttaaggaaattgccacgcataaagaaacatctgctgaatggtgataatatgcggtgtagtgttaatgcaaccccccagcagatgcctcaaacggagaaggctgtggaggacttcctcagatccataggcaggagtaagaaggagaggagaccagttcgaccccacacagtggagaagcccgtgccgtcttcatctgggggagacgcccatgtccctcatggaagtcaggtcatccgaaagcttgtgatggagcccacattcaagccttggcagatgaaaacccacttccttatgccattccctgtcaattacgtcggcgagtgtatccgaacggtcccgtacaccgatcctgatcatgcctctctgaaaattctggctaggctcatgacagctaaattccttcataccgaaatcagagagaagggcggtgcgtacggcggaggcgctaagctgtcacacaacggcatatttacgctctatagttaccgggatcccaatacaattgaaacactgcagagcttcgggaaggccgtggattgggcaaaaagcggcaagttcacccaacaggatatcgacgaagccaaacttagcgtctttagcacggtcgatgcgccagtggccccatccgacaaagggatggatcacttcctgtacggcctaagcgacgagatgaagcaggcacaccgagaacagctgtttgccgtgagccacgacaagcttcttgctgtcagcgatcgctatctgggtaccggaaagagcacccacgggctggccattcttggacctgagaacccaaagatcgcaaaggacccatcttggattattcagtag

SEQ ID NO: 29940 - DNA, 1107 bp, synthetic construct
  misc_feature 1..1107: note = Description of Artificial Sequence: Synthetic coding sequence
  source 1..1107: mol_type = other DNA
atgcaacctggctcctcacggtgcgaggaagagactccctctttgctttggggactggacccggtctttctggcatttgccaagctgtatatcagggatatcctggatatgaaggagtctagacaggtgcccggagtgttcctgtacaatggacaccctattaagcaggtggacgttctgggcaccgtaatcggtgtgcgtgagcgggacgctttttactcatatggtgtagacgactcaaccggtgtgatcaactgcatttgctggaaaaaactgaacaccgagagtgtgagcgcagcgcctagtgctgctcgtgagttatcactgacctcccagttaaagaagttacaggagaccatagaacagaaaaccaagatcgagatcggagacacgattagagttcggggaagcattcggacttatcgagaggagcgcgagattcatgcaacaacctactacaaagttgatgaccctgtctggaacattcagattgccaggatgctcgagctgcctacaatctacaggaaagtttatgatcaacctttccactcctccgcccttgagaaagaagaggctttgtcgaaccccggagcactggatctgccgagcctcacatcacttctctctgaaaaggcgaaagagttcctgatggaaaatcgggtgcagtcgttctaccagcaggagcttgaaatggtggaaagcctcctatcccttgcaaatcagccagttatacattctgccagctcagatcaagtgaactttaagaaagatacaacaagcaaagctatccattccattttcaaaaacgcgatccagctgctccaagaaaaagggcttgtttttcagaaggatgacggtttcgacaatctatactacgtgacaagggaagataaagacctccaccgaaaaattcaccggatcatacaacaggattgtcagaagcccaaccacatggaaaaagggtgccattttctgcatatcctcgcctgcgcccgtctctcaattcgtcccggactgagcgaagctgtgcttcagcaagttttggagctgctggaggaccagtccgacatcgtatctacaatggagcactactacactgccttttag

SEQ ID NO: 29941 - DNA, 1038 bp, synthetic construct
  misc_feature 1..1038: note = Description of Artificial Sequence: Synthetic coding sequence
  source 1..1038: mol_type = other DNA
atgggcgtgtgtggctatctcttcctgccttggaagtgtcttgtggtggtaagccttcgtctgctgttcctggtgccaacgggagtgcctgtgcggtctggagacgcaacgtttccaaaagctatggacaacgtcactgtgcgccaaggggaatccgctacactcaggtgcacaatcgatgacagggttacccgggtagcatggctgaatagatcaactattctgtatgcgggaaatgacaagtggtccatcgacccgagagtgatcatcctggtcaatacaccaacacagtactcgatcatgatccaaaacgtggatgtgtacgacgagggaccgtatacctgttcagttcaaaccgataatcaccctaagacatcccgcgtgcatttgatagtccaagtgcctccacaaatcatgaatatttctagtgatattacagtgaacgaaggtagttccgttacgctgctttgtctcgccatcggacgacccgaaccaactgttacttggcgacacctcagcgtgaaggagggccaggggtttgtgtcagaagatgagtacctggagatcagcgacattaaacgcgaccagagcggggaatacgaatgcagcgcgctgaacgacgtggctgcccctgacgtccgaaaagtaaaaataacagtcaactaccccccatatatctcgaaagcaaagaataccggtgtgtccgtggggcagaagggcatcctgagctgtgaagccagtgccgtgcccatggcagagttccaatggtttaaagaggagactaggttggctacagggctagatggaatgcgcatcgaaaacaaggggaggatgtcaacgttgacattcttcaacgtgtccgaaaaagattacggtaattacacctgtgttgcaaccaataaactgggcaataccaatgcttcaatcacattgtacggtcctggcgcagttatcgatggcgtaaacagtgcctcgcgcgcactagcatgtctgtggctatctggcacactgttggcacatttttttatcaaattttag

SEQ ID NO: 29942 - DNA, 939 bp, synthetic construct
  misc_feature 1..939: note = Description of Artificial Sequence: Synthetic coding sequence
  source 1..939: mol_type = other DNA
atgtatcaccccgcatactgggtggtcttctctgcaactacagcactgctgtttatcccaggtgttcccgtgagaagtggcgatgcgactttcccgaaagccatggataatgtgaccgtccggcagggcgaaagtgcaacattgcgctgtaccatcgacgatagagttactagggtagcctggctgaacaggtccactatcatgatacagaacgtggatgtgtacgacgaaggcccttacacatgttctgtccagacagataaccatcccaagacatctagagtccatctgatcgtgcaggtgcctccccaaattatgaatatctcttctgatattaccgtcaatgaagggtcttcagtgactcttttgtgcctggctatcggacgacccgagcctactgtgacatggcggcatttgtccgtaaaggaagggcagggattcgtttctgaagatgagtatctggagatctctgacattaagagagaccagagcggcgagtacgaatgttctgcccttaatgatgtggctgcccctgatgtgaggaaggttaagatcacagtgaattaccccccatatattagcaaggccaagaacaccggcgtttctgtaggacagaagggcattctgtcatgtgaagcgtctgctgtgccaatggctgaatttcagtggtttaaggaggaaacccgactggccacaggcctggacgggatgcgaattgagaacaaaggtcgcatgagtacactaacctttttcaacgtcagtgagaaagactacggcaactacacatgcgtagcaaccaataaactgggaaacacaaacgcctccatcaccttgtatgggccaggcgcagtcatcgatggcgttaattccgcctctcgggctctggcttgtctctggctcagcgggacactgcttgcccacttctttataaagttctag

SEQ ID NO: 29943 - DNA, 1017 bp, synthetic construct
  misc_feature 1..1017: note = Description of Artificial Sequence: Synthetic coding sequence
  source 1..1017: mol_type = other DNA
atgtatcacccggcttattgggtggtgttcagtgctacaacggcccttctgttcatccccggagtgccggtgcgatcgggcgacgcaacatttcctaaggcgatggacaatgtgactgtgaggcagggcgaatctgctactcttcggtgcaccattgacgaccgggtgacccgggtcgcctggttgaatcgatccaccatcctctacgcaggcaatgataaatggtcgattgatccgcgagtaataattctggttaatactcctacccagtattccattatgatccagaatgtggacgtttacgacgaaggaccctacacttgctcagtccagaccgacaaccaccccaaaacatctagggtccacctcattgtgcaggtccctccgcaaattatgaatatcagctccgacatcacggtcaacgagggaagctcagtgactctcctgtgcttggcaattgggaggcccgagccgaccgtaacttggcgccacctgtccgtgaaggagggtcagggcttcgtcagcgaagatgagtacctcgagatcagtgacattaagagagaccagagcggagaatatgaatgctcagccttgaatgacgtagcggctcccgacgtgcgcaaagtgaagatcactgtgaactacccgccttatatcagcaaagctaagaataccggagtatcagtgggacagaagggtatcctctcttgcgaagctagcgcagtacctatggctgagttccaatggttcaaggaagaaactcgccttgcaactggcctggatggcatgcgcatcgaaaacaaaggaagaatgtctaccctcacattctttaacgttagcgaaaaggattacggaaattatacctgcgtggctacaaataaactgggtaataccaatgcttcaattaccttgtatggtccaggtgccgtgattgatggcgtgaacagtgcttccagagcactggcttgcctgtggttatctggaactctgctggcacatttctttatcaaattctag

SEQ ID NO: 29944 - DNA, 1065 bp, synthetic construct
  misc_feature 1..1065: note = Description of Artificial Sequence: Synthetic coding sequence
  source 1..1065: mol_type = other DNA
atgggcgtctgtggatatctgtttctgccatggaaatgccttgttgtagtctcattacgcctgttattcctagtgcccaccggagtacccgtgcgttcaggtgacgcaaccttccccaaagctatggacaatgttactgttagacagggagagagcgccacactgcggtgcactattgacgaccgagtgactcgcgttgcctggttaaatcgaagtaccattttatatgccggtaatgacaaatggtccatcgaccccagggttatcatactggtcaatacccccacccagtactcgatcatgatccagaacgtcgacgtgtatgacgaagggccttacacctgcagtgtgcagactgataatcaccccaagactagcagggtgcacctcatcgtgcaggtaccaccccagatcatgaatatctcttccgacattacagttaacgagggaagcagtgtgactctcctatgtcttgccatcggaaggcctgaaccaaccgtcacttggcggcacctttccgtgaaggagggccaaggtttcgtgtcagaggatgaatatctcgagatatccgatattaaaagggaccaatcgggggagtatgagtgttccgccttaaacgacgtggcagctcccgacgtccgcaaagtgaagatcactgttaattacccgccatacatttcaaaggcaaaaaatactggcgtcagcgtcgggcagaagggcattcttagttgcgaagcttcagctgtacctatggcggagtttcagtggtttaaggaagagacaagactagcgacaggattggacgggatgaggatcgaaaataaaggaagaatgtctactttgacgtttttcaatgtgtcagaaaaagactatgggaattacacgtgcgtggccactaataaactgggtaatacaaacgcatccatcaccttgtacgagatatcaccctcatcagccgtcgccggtccgggtgcggtgatcgacggggtgaattctgcgtctagggccctggcctgtctgtggttgtccggaacactgcttgcccactttttcataaagttctag

SEQ ID NO: 29945 - DNA, 1662 bp, synthetic construct
  misc_feature 1..1662: note = Description of Artificial Sequence: Synthetic coding sequence
  source 1..1662: mol_type = other DNA
atgtctaataatggactggacattcaagacaagccaccagcgcctcctatgagaaatacttcaacaatgatcggcgctggctccaaggacgcgggaaccctgaatcatggctctaaacctctgcctcccaaccctgaggagaaaaagaagaaagataggttttacagatcgattctgcctggcgataagacaaacaagaagaaggagaaggagcggccagagatctcactgccatcagatttcgagcacacgattcacgtggggttcgacgctgtgacaggcgagtttactggtatgccagaacagtgggcacggctgttacagacatcgaatataactaagtcagagcaaaagaaaaacccacaggcagtgttagacgtccttgaattctacaatagtaaaaagactagtaattctcagaaatatatgtcttttactgacaaatcagccgaggactataatagcagcaacgcactaaacgtcaaggccgtgtctgaaactcccgctgtgccccctgtgtctgaggacgaggacgatgacgacgacgatgctacgccccctcccgtcatcgcccctcgacctgagcacaccaagtcggtgtatactagatctgttatagagcctctacccgtgactccgactcgggatgtggctacttctcccatttctcctaccgagaataacactacaccacccgacgctttaacaagaaacaccgagaaacagaagaaaaagcctaagatgtccgacgaagagattcttgagaagctgcgctccatcgtgtccgtaggcgacccaaaaaaaaaatatacccgctttgagaagattggacagggggctagcgggacggtgtataccgccatggatgtcgcgacagggcaggaagtggcaataaaacagatgaacctacagcagcagcccaagaaggaactgatcattaacgagattctagtgatgcgagaaaacaaaaaccctaatattgttaactatctcgactcctacctggtgggtgatgagttatgggtggttatggagtatctggcgggtgggagcctcacagacgtagtgaccgaaacctgtatggatgagggccagatcgccgctgtctgtagggagtgcctacaggccctggagtttctgcattctaatcaggtgatccacagagacatcaagtccgacaacatcctattaggtatggatggctcggttaagctgacagactttggattttgcgcccagatcacaccagagcagagtaaacggtcaacaatggttggcactccttactggatggctcccgaggtagtgacccgtaaagcctatggcccaaaagtggatatctggtctctgggtattatggcgatagagatgattgagggggaacctccatatctaaatgagaaccccctccgggcactctatctgatcgcgaccaacggaacgccagagttacaaaacccagagaagctgagcgccatctttcgtgacttcctgaacaggtgtttggaaatggatgttgagaaaaggggatcagcgaaagagctactccaggtgagaaagctgcggttccaagtgtttagcaattttagtatgatcgcagcatctattcccgaagattgtcaggctcctctccagcctcattccacagactgctgttcatag

SEQ ID NO: 29946 - DNA, 1638 bp, synthetic construct
  misc_feature 1..1638: note = Description of Artificial Sequence: Synthetic coding sequence
  source 1..1638: mol_type = other DNA
atgtccaataatgggcttgatattcaggacaagccacccgctccccctatgcggaacacaagtaccatgataggtgcgggttcaaaggatgctggcaccctgaaccacggatccaaacctctgccaccaaatccagaggagaaaaaaaagaaggaccggttttacagatctatcctgccgggagacaaaaccaataaaaaaaaggaaaaggagagaccagaaatctctctccccagcgattttgagcataccatccatgtggggttcgatgccgttacaggcgagtttacagggatgccagagcagtgggctcgactattacagacaagtaatatcaccaaaagcgaacagaagaagaaccctcaggccgttctcgacgttctcgagttctacaattccaagaaaacctctaatagtcagaagtacatgagcttcacggacaaatcagcagaggactataacagcagcaatgcactcaatgtgaaggctgtgtcagagactccagccgtgcccccagtgtcggaagatgaagacgatgacgacgacgacgccaccccccctcctgttatcgctccccgtcctgaacacaccaagagcgtctacactcgatctgtcattgagcctctcccagttacacccacacgcgatgtggcaacttcacccatctctcccacggaaaataataccacgccacctgatgccctgaccagaaacactgaaaaacagaaaaagaaaccaaagatgagcgatgaagagatcctcgagaaactcagaagcatcgtgagcgttggcgatcctaagaaaaagtatactcgcttcgaaaagatcggccagggagccagcggcacagtgtatactgcgatggacgttgctacgggccaggaagtggcgatcaagcagatgaatttacagcagcaaccgaaaaaagaactgataataaacgaaattcttgtgatgcgtgaaaataaaaaccccaacattgtgaactatctcgactcatacctggtgggggatgagttgtgggtggtgatggagtatctggcaggcggaagcctcacagacgtagtgactgaaacctgcatggatgaaggtcaaattgccgcagtctgtcgcgaatgtcttcaggcccttgagtttcttcactccaatcaggttatccatcgcgatatcaagtcagataatatcctcctcggaatggacgggagcgtgaagctgacagactttggattttgtgcgcaaatcacacctgagcagtctaagcgttccactatggtagggactccctactggatggcccctgaagtggtcactaggaaagcttacggtccgaaggtggacatctggagcctgggaatcatggctattgaaatgattgagggcgagcccccttacctaaatgaaaatcctcttagggctctatatctgatcgctacgaatggaaccccagaactgcagaatccagaaaaactatccgctatcttcagggacttcttgaaccgctgcctggagatggacgttgaaaaacgtggcagtgcaaaggagttgttgcagcatcagtttctgaaaatcgctaagcctctctcctctctgactccgctgatcgccgcagctaaggaagccactaagaacaatcattag

SEQ ID NO: 29947 - DNA, 300 bp, synthetic construct
  misc_feature 1..300: note = Description of Artificial Sequence: Synthetic coding sequence
  source 1..300: mol_type = other DNA
atgtcaaacaatgggctcgatattcaggacaagccaccggcaccccctatgaggaacacatcaacgatgatcggcgctggctctaaggacgcgggtactttaaaccacgggtctaagcccctgccaccaaacccagaagaaaaaaaaaaaaaggatcgattttatcgcagtattctgccaggagacaaaacaaacaagaagaaggagaaggagcgcccagagattagcctgccctccgactttgagcacacaatacacgtgggtttcgatgccgtgactggtgaattcaccggtatgtag

SEQ ID NO: 29948 - DNA, 81 bp, synthetic construct
  misc_feature 1..81: note = Description of Artificial Sequence: Synthetic coding sequence
  source 1..81: mol_type = other DNA
atgtcgaacaacggcctcgacattcaggacaagcctcctgccccaccaatgaggaataccagcaccatgataggtgcttag

SEQ ID NO: 29949 - DNA, 270 bp, synthetic construct
  misc_feature 1..270: note = Description of Artificial Sequence: Synthetic coding sequence
  source 1..270: mol_type = other DNA
atgtctaacaacgggttggacatccaggacaagcctccagccccaccgatgaggaatacatcaacaatgattggcgcaggctccaaagatgctggtacacttaatcacggttcaaagcctctccccccaaacccagaggagaaaaagaagaaagaccgtttctataggtctatcttacctggggacaagaccaacaagaagaaagagaaagaacggccagaaatttcactcccatctgactttgaacacaccattcatgtgggtttctag

SEQ ID NO: 29950 - DNA, 192 bp, synthetic construct
  misc_feature 1..192: note = Description of Artificial Sequence: Synthetic coding sequence
  source 1..192: mol_type = other DNA
atgtctaataatggactggatatccaggacaaacccccagctcctccaatgcgtaacacgtcaaccatgataggggcaggttctaaggatgccggaaccctaaatcacggttccaagccactccctcccaatcccgaagagaagaaaaagaaggaccggttctatcgctcaatcttacctggagacaaatag

SEQ ID NO: 29951 - DNA, 321 bp, synthetic construct
  misc_feature 1..321: note = Description of Artificial Sequence: Synthetic coding sequence
  source 1..321: mol_type = other DNA
atgagcaataacgggctggatattcaagataaaccgcctgctccaccaatgcggaacacatcaactatgataggcgcaggttctaaagacgctggaacgctgaatcatggatctaagccacttcctcccaaccctgaagagaagaagaagaaggaccgattctataggtcaatccttccaggagacaaaactaacaaaaagaaggaaaaagaacgccctgagatcagcttgcccagcgatttcgagcacaccattcacgttgggtttgacgccgtcaccggagaatttactgggatgccagagcagtgggccaggctgtag

SEQ ID NO: 29952 - DNA, 1569 bp, synthetic construct
  misc_feature 1..1569: note = Description of Artificial Sequence: Synthetic coding sequence
  source 1..1569: mol_type = other DNA
atgtcaaacaacggcctggatattcaggataagcccccagcaccccctatgcggaacacatcaacaatgatcggtgccggttccaaggacgcgggtacactgaaccacggcagcaaaccactcccccctaatcctgaagaaaaaaagaagaaagaccggttctaccgcagtatcctccctggggataagaccaataaaaagaaagagaaggagaggcctgagatcagtctgccaagcgactttgagcatacaatccacgttggttttgacgctgtcactggagaatttacggggatgcctgaacaatgggctcgcctgctccagaccagcaacatcaccaagagtgagcagaagaaaaacccccaggctgtgcttgacgtcctggaattttataactcaaagaagacaagcaacagtcagaaatatatgtcatttaccgataagtccgcagaggactataattcctctaacgccctgaatgtcaaagccgtaagcgagacccccgctgtccctcccgtgagcgaagacgaagacgatgatgatgacgatgcgacgccccctcctgtcatcgcacccaggccggagcatacaaagagtgtatatacccggtctgtgatcgagcctcttccggtgacacctacacgagatgtggcaacgagccctatctctcccacagaaaataataccactccacctgacgccttgacaagaaacactgaaaagcagaagaaaaagccaaaaatgtctgacgaggagattctagaaaagttgagatccatcgtttccgtgggggatccaaaaaagaagtacacaaggttcgagaaaatcggccagggcgctagcgggactgtgtacaccgcaatggacgtcgccacggggcaagaggtggccattaaacagatgaatctgcagcaacaacccaagaaagagctgattattaacgagattctggtgatgcgagaaaacaagaacccaaatatagtaaattatctggacagttatttggtcggtgacgagctgtgggtcgtgatggaatacctggcaggcggatctttgacagacgtagtgacagagacatgcatggacgaggggcagatcgccgctgtgtgtcgggagtgtctgcaggcactggagtttttacacagcaatcaggtcatccacagagatatcaaatccgataatatactcctcggaatggatggtagtgtaaagctgacagactttggattttgcgctcaaatcacaccggaacagtctaaacgttccaccatggtgggtacaccatactggatggcccctgaggtcgtcacccgtaaagcctacggaccaaaggttgatatctggtccctcggtattatggccattgaaatgattgagggcgaaccaccctaccttaatgaaaaccctctgagagccctctaccttattgccacaaatggcacacccgaactgcaaaaccccgagaagctgagtgccattttccgggacttcctcaaccgatgtcttgagatggacgtagagaagagaggctctgccaaggaactcctgcagcactcgtccaggctgtag

SEQ ID NO: 29953 - DNA, 1317 bp, synthetic construct
  misc_feature 1..1317: note = Description of Artificial Sequence: Synthetic coding sequence
  source 1..1317: mol_type = other DNA
atgtttggaaagagaaaaaaaagagttgagatatcagctccatccaatttcgagcatagggtgcacaccggcttcgaccaacacgagcagaaattcacggggctgccccgtcagtggcagtcacttattgaggagtctgctaggcgtccaaaacctctggtcgacccagcctgcattacgagtatccagcccggtgctcctaaaggcgagccccatgatgtggctccaaatggacctagtgctgggggtctggccattccacagagctcaagttcctcttcccggccacccacgcgagcgagaggcgctccctcccctggggtgctgggcccacacgccagtgagccacaactcgccccacccgcttgtactcccgcagcacccgctgtgccaggaccaccagggcctagaagcccccagcgtgagccacagcgcgtgtctcatgagcagtttagggctgcactccagcttgtggtggatccaggggaccctcgctcctacctggacaactttatcaaaatcggcgaggggtctacggggatagtgtgcatcgcaaccgtgaggtcatctggcaagttggttgctgtgaagaagatggaccttcggaaacagcagcgaagggagctactgtttaacgaagttgttatcatgcgagactaccagcatgaaaatgtagtagagatgtataatagctatttggtgggagatgaattatgggttgtgatggagttcttagagggtggcgctctgacagacattgttacacatacacggatgaacgaggaacagatagctgccgtgtgcctagctgttctccaggcgctgtcagtactccatgcccaaggcgtaatccatcgagacatcaagtccgattccatcctgcttacacatgacggaagagtcaagctgtccgacttcggattttgtgctcaggtgagcaaagaagtgcccagacggaaaagcctggtaggtacaccttattggatggctcctgagctgatatctcggttgccatatgggccagaagtggacatctggagcctgggcataatggtcattgagatggtagacggagagccaccttactttaatgagcctcctctaaaagctatgaaaatgatccgtgacaatcttcccccacgcctgaaaaatctgcacaaagtgagtccaagccttaaaggtttccttgacaggctgctcgtgcgcgacccagcgcaacgcgctacagctgccgagctgctgaagcatcctttcctggctaaggcagggccacctgccagcattgttccccttatgcgtcaaaaccgcaccagatag

SEQ ID NO: 29954 - DNA, 1776 bp, synthetic construct
  misc_feature 1..1776: note = Description of Artificial Sequence: Synthetic coding sequence
  source 1..1776: mol_type = other DNA
atgttcggcaagcgtaagaagagggttgaaatttcggccccatccaactttgagcaccgggtgcatacggggttcgatcagcatgagcaaaagttcacgggcttgccgaggcagtggcagtcattgatcgaggagtccgcccgtcggccaaagccactcgtagatcccgcttgcatcacatctattcagcccggtgcacccaagaccattgtccgaggatcgaaaggggcaaaagacggggcacttacactcctgctggatgagttcgagaacatgtcagtgactaggtccaacagtctgaggagagactccccaccacccccagccagggctagacaggaaaatggaatgcccgaggagcctgctacgaccgctcggggtggacctggcaaagccggtagtagggggaggtttgccggacactccgaggccggagggggatctggggatcgtcgtagggccggacctgagaagagaccaaaatcgagtcgggaaggaagcggcggtccacaggaatcaagtcgtgataagcggcctctctccggcccagatgtgggcaccccacaacctgctggactcgcctccggcgctaaacttgctgccggtcgtcccttcaatacataccctcgtgccgacacagatcatcctagtagaggggctcagggagaaccccatgatgtagcgcctaatggtccttctgcgggagggctcgcgatcccacagtcttcaagctcatcgagcaggccacccaccagagccagaggcgcaccgtctcccggtgtcctcggaccccacgcaagcgagccacagctggcccctccggcttgcaccccagcagccccagccgtaccaggcccacccggaccacgctctccgcaaagagagccccaacgagtgtctcacgagcaatttagggccgctttgcagctggttgtggaccctggggatccacggtcttatctggacaactttataaagatcggagaggggtccacagggatcgtctgcattgcgacagtgagaagctctggcaagctggtggctgttaagaagatggacctgaggaagcagcaacggagagagttactctttaatgaggttgtcatcatgcgggattatcaacatgagaacgttgtggagatgtataactcttacctcgtgggcgacgaactatgggtggtaatggaattccttgaaggcggagccctcactgatatcgtcacacatactcgaatgaatgaggagcagatcgccgctgtctgcttggcagtgctgcaggctctatccgtgctgcacgcgcagggagtgattcatagggatattaagtcagattccattctcctgactcacgacgggagagtgaagttaagcgactttggattctgcgcgcaggtcagcaaagaagtgccacgtcgaaagagcctggttggaactccatactggatggctccggaactgattagcaggctcccgtacggacccgaggtcgatatctggagcttgggcatcatggttattgaaatggtggatggggaaccaccctattttaatgaacccccactgaaggctatgaagatgatcagagataatcttccccctcggctgaagaacttacacaaagtatcaccatccctcaagggtttcctggatcggttactggttcgggatcctgcccagcgcgcaactgcagccgagctgttaaaacacccttttctcgccaaggcaggcccacccgcatctattgtgccccttatgcgtcaaaaccgtaccaggtag

SEQ ID NO: 29955 - DNA, 1188 bp, synthetic construct
  misc_feature 1..1188: note = Description of Artificial Sequence: Synthetic coding sequence
  source 1..1188: mol_type = other DNA
atgggctgtcaacgttctcgcccttttaatacatatcccagagccgacaccgaccatccatccaggggggcacagggggagccccacgatgtggcccctaatggcccaagcgcgggaggcctggctatccctcagagctcttctagcagcagccggcctcctaccagggccagaggcgcacccagtcctggcgtgctgggccctcacgcctctgaaccccagctagctccccctgcgtgtactccggctgctcccgctgtgcctgggccacctgggcctcggtccccccagagagaaccgcagagggtgtcacatgaacaatttcgcgctgcattgcagcttgtcgtggatcctggagatcccagaagctacttggacaactttatcaaaattggggaaggctcaacaggcatcgtgtgcatcgcaaccgtgagatcctccggtaaactcgtagcggtgaaaaaaatggacttgaggaagcaacagcgacgggaactgctctttaatgaagtggtgataatgcgagattaccagcatgagaacgtcgtcgagatgtacaactcataccttgtgggggatgagctgtgggtggttatggagtttctcgaaggtggcgcattaaccgacatagtaacccacacccgcatgaacgaagaacagatcgcggctgtctgcttggcagtcctgcaggcattgtccgtcctgcatgcccagggcgtaattcatcgcgacattaaaagcgacagcatactgcttacccatgatggtcgcgttaaactcagcgattttggcttttgtgcgcaggtctctaaggaggtgcccagacggaagtcactggttggaacgccttactggatggcacctgaactgatctcccgcctgccttacgggccagaggtagacatttggagtctgggaataatggtgatcgagatggttgatggcgagcctccttatttcaatgagcctcccctcaaggctatgaaaatgattcgggataacctccccccaagactgaagaacttgcacaaggtgtcgccaagtcttaagggctttttggatcggctcttagtgcgggatcctgcccaacgagctacagccgctgagctgctcaagcacccatttttggcaaaggctggcccacctgcgtcaatcgtgccactgatgagacagaataggacacgctag

SEQ ID NO: 29956 - DNA, 1776 bp, synthetic construct
  misc_feature 1..1776: note = Description of Artificial Sequence: Synthetic coding sequence
  source 1..1776: mol_type = other DNA
atgttcgggaaacggaagaagcgagtcgagatatctgccccaagcaatttcgagcacagggtgcacactggatttgatcagcatgagcaaaaatttactggcctccctaggcagtggcagagcctaatcgaggaatccgcaaggcggccaaaacctttagtcgatcccgcttgcataacctctatacagccaggggctcccaagacaatcgtacggggatctaaaggagcaaaggacggcgctctgacccttctcttagatgagttcgagaatatgagtgttacccgatccaacagcttacgtcgcgatagtccgcctccccctgcccgagccagacaggaaaacggaatgccggaagagcctgcaaccaccgctcgcggaggaccaggtaaagcagggtctcgcggtagatttgccggacactctgaggccggaggaggctccggtgatcgccgacgtgctggcccagagaagcgtcccaagagctcccgagaaggcagtggtggtccacaggagagtagtcgcgacaaaagacctctatccggacccgatgtgggaacaccccagcccgcaggacttgcctccggagctaaattagctgctggcaggccttttaacacttacccgagggccgataccgaccatcctagccggggagcgcagggcgagccacacgacgtcgctcccaacggccctagtgcagggggtttagccatccctcagagcagtagtagctcttctcggccacctacaagagctcggggagccccatcaccaggcgtgcttgggcctcatgcctcggagccacagctggcaccgcctgcatgcacgccggcagcacccgcagtacccggaccccctggacctcggagtcctcagagggaaccacagcgggtgagtcacgagcaatttagggcagctcttcagcttgttgtggaccctggggacccgaggagctacctcgacaacttcatcaagatcggcgaaggaagtacaggcatagtgtgcattgctactgtgagaagttcagggaagttagtggccgtcaagaaaatggatttgcgaaagcagcaaaggagggaactgctctttaacgaggtggtgattatgcgtgactatcagcacgaaaatgtcgtcgagatgtataatagctacctcgtcggcgatgaattgtgggtggtgatggagtttttggaggggggagccctgaccgatatagtcactcacaccagaatgaatgaggaacagatcgcagccgtctgcctagccgtgctccaggcgctcagcgtgcttcatgcacagggagtgattcatcgcgatattaagagcgacagcatactgttaacacacgacggtagagtgaaactgagcgattttgggttctgcgctcaggtgtctaaagaagtgcctaggaggaaatctctggtaggcaccccatactggatggcgccagaattgatcagccggcttccatacggccctgaagtggacatttggagcctcggcatcatggtcattgaaatggttgatggcgagcctccatactttaatgagccacccttaaaggcaatgaagatgatacgggacaacctcccacccaggctcaaaaacctgcacaaggtgtctccaagtctgaaagggttcctggatcgcctgttagttcgggaccccgctcagcgcgcaacggcggcagagcttcttaagcaccccttcctggcgaaggccggtcccccagcttctattgtgccactcatgcgccagaatcgaacgaggtag

SEQ ID NO: 29957 - DNA, 1776 bp, synthetic construct
  misc_feature 1..1776: note = Description of Artificial Sequence: Synthetic coding sequence
  source 1..1776: mol_type = other DNA
atgtttggcaaaaggaaaaagagagtcgagattagtgcaccgagcaacttcgaacaccgggttcataccggtttcgatcagcacgagcagaaatttactgggcttcccagacagtggcaatctttaattgaagagtccgcaagacgtcccaaacctttggtcgaccccgcttgcatcaccagcatacagcccggtgctccgaaaaccatcgttaggggaagcaagggagccaaagacggagcgctcacactgctcttggacgagttcgaaaatatgagcgtgacccgatcgaacagtctcaggagagatagccccccaccgccagcccgagctaggcaggaaaatggcatgcctgaagagccagcgaccactgccagggggggacccggtaaagccggttctcgaggcagatttgccggtcattccgaggctgggggtggaagcggtgatcgccgtcgagcagggccagaaaagcggcctaagagtagccgtgaagggtcaggcggtccacaagagagttcgcgggacaagcgaccgctcagtggacctgatgtaggcacacctcagcctgctggtctggcttcgggagctaagctagccgctggccgtccttttaatacctaccccagagccgatactgaccatccgtcaaggggggcacagggtgagccccatgatgtcgcacctaacggcccaagtgcaggcggactggccattccgcagagctcatccagctcctcccggccaccaacgcgagctagaggcgcaccttcgccaggtgtgctcggcccacacgcatcagagccgcagcttgcaccgcctgcatgcactccagccgcacccgcagtacctggacctcccggacccaggagtccccagagggaaccacagcgggtgtcccacgaacagttccgcgcagctcttcagctcgtggtcgaccctggggaccccagaagctatctggataatttcatcaagatcggggaaggatccacaggaatcgtgtgtatcgcaacggtcaggagctcaggcaagctcgtggccgttaaaaaaatggatctacggaagcagcagcggagagagcttctcttcaatgaggtcgtgataatgcgcgattatcagcacgaaaatgtcgtggagatgtacaattcatatctagtgggtgacgaactatgggttgtgatggaattcctcgagggcggagccctgaccgacatcgttacacatacccggatgaatgaggaacagattgcggctgtgtgtttggccgtgctccaggcgctttctgtgctgcatgcccagggagtcatacatagagacatcaaatcagacagcattctccttacacacgatggaagagtgaaattgagcgatttcggcttttgtgctcaagttagtaaggaggtgcctagacgtaagtcgctggtcggaaccccttactggatggcccctgagctaatttcacggttaccttatgggcctgaggttgatatttggtccctaggaatcatggtcattgagatggtggacggtgagcctccttactttaacgaaccccctctgaaggccatgaagatgattcgggacaacctgcctcctaggctgaagaatctgcataaagtctccccttccctgaaggggtttctggacaggctgcttgtgagagaccctgcccagagggctactgctgccgagctccttaaacacccgttcttagctaaggccggaccacctgcctccatcgtccctctgatgcgacagaacagaacccgttag

SEQ ID NO: 29958 - DNA, 1044 bp, synthetic construct
  misc_feature 1..1044: note = Description of Artificial Sequence: Synthetic coding sequence
  source 1..1044: mol_type = other DNA
atgacctggccacttaccgggcatcagcgtggagcttggcctagccccagccccccaccacctcctcccggactaccacccgagcctgaggtccctcccgcacttgaatgctgggaccctactccgcagagtccacggagtccacagcgcgaaccccagagggtgtcacatgagcagttccgcgctgcattgcagctggttgttgaccctggagacccacggagttatctggacaattttattaagattggtgaagggtccacagggattgtttgtatcgcaacagtacgctctagtggaaagctcgtcgcagtaaaaaagatggatctgaggaagcagcaaagaagggagttactgttcaatgaggtggttattatgagagattaccagcacgaaaatgttgtggaaatgtataattcatacctggtaggcgatgagctctgggtggtgatggagtttctcgaaggaggagccctgacggatatagtcacccatacaaggatgaacgaagagcagatcgcagccgtgtgtttggctgtgctgcaggctctgtctgttctgcacgcacagggggtcatccatagggatattaaatctgattctatcctcctgacccacgacggacgagttaagttgtcagactttggcttttgcgcgcaggtgtccaaggaagtcccgcgaagaaagtctttagttggcacaccgtattggatggccccagaacttatctcaagactgccatatggccctgaggtcgacatttggagcctggggatcatggttattgaaatggtggacggcgagcctccttactttaatgaacctccacttaaggccatgaagatgatcagggataatttaccccctaggttaaaaaatcttcacaaagtaagtccaagtctgaaaggctttctggatcgcttgctggtgcgcgatcccgctcagagggcaacagctgctgaactgctcaagcacccatttctcgctaaggccggtccaccagcctccattgtgccacttatgagacagaataggacgagatag

SEQ ID NO: 29959 - DNA, 1776 bp, synthetic construct
  misc_feature 1..1776: note = Description of Artificial Sequence: Synthetic coding sequence
  source 1..1776: mol_type = other DNA
atgtttggcaagcggaaaaagagagtcgagatcagcgctccttccaacttcgaacatagagtgcatacaggctttgaccagcatgagcagaaatttacagggctcccacggcagtggcagtcactcattgaggagtctgctagacgtccaaagcccctggtggatccagcctgcataacctccatccagcccggtgcccctaagactattgtgcgcggatccaagggggctaaagacggagccttgaccttgctgcttgatgagttcgagaacatgagcgtgacccgatcgaatagcttgagaagagattcaccccctccgcctgcgagggcacggcaggaaaacggaatgcctgaggagccagctaccaccgctagagggggaccaggcaaggcaggatcccgtggaagattcgccggacactccgaggctggaggagggagcggcgatagacggagggcagggccagagaaaagacccaagtcttctcgcgaaggatccgggggacctcaggagagctcccgtgataagcggccattgtcaggccctgatgtaggcaccccacagccggctggcctggcaagcggcgctaagctagctgccggaaggccattcaacacctacccaagagctgacacagaccatccctcaagaggagcacagggagagccgcatgacgtagcaccgaacggaccgagcgctgggggtttggccatacctcaatcatcctcttcatctagtcgcccacctaccagagctaggggggcaccctcccccggtgttctcgggccacatgcttcagaaccgcagctcgctcccccagcctgtacccccgctgcgcctgccgtccccggaccacccggacctcgcagccctcaacgagaaccacagcgcgtgtcgcacgagcaatttcgcgctgcactacagctggtggtggatcctggggacccacggtcctacctggacaacttcatcaagataggtgagggcagcacggggatcgtgtgtattgccacggttagaagcagtgggaagctggtggctgtaaagaagatggatttgaggaagcagcagcgacgggaactcttgttcaacgaagtagtgatcatgcgcgattaccaacatgagaatgttgtggaaatgtacaactcgtacctggtaggcgacgagctctgggtggtgatggagttcctggaaggcggagctcttaccgacatcgtgactcacacccgcatgaacgaagaacagatcgcagctgtgtgcctagccgtgctgcaggcactgtccgtcttgcatgcccagggagtgatccacagagacatcaagagtgacagtattcttctcactcacgatggcagagtgaaacttagcgatttcggattctgcgcacaggtgagcaaggaagtgccaagaaggaagtcactggttggaactccatactggatggctcccgagctcatcagtcgattgccctacgggcctgaagtcgatatttggtccctggggattatggtcatagagatggtggacggtgagccaccatacttcaacgagccgcctctgaaggctatgaagatgattagagataatctgcccccacgcctgaagaacttgcataaggtgtctcctagcctgaagggttttctggaccgcctgttggtacgcgatcccgcacagcgcgcaacggctgccgaactgctgaaacatcctttccttgccaaggccggacccccagctagtattgtacccctgatgcgccaaaaccgaacccggtag

SEQ ID NO: 29960 - DNA, 1317 bp, synthetic construct
  misc_feature 1..1317: note = Description of Artificial Sequence: Synthetic coding sequence
  source 1..1317: mol_type = other DNA
atgtttggtaaacgtaaaaaacgggtggagattagcgcgccttctaactttgagcatcgagtgcacactgggttcgatcaacacgagcaaaaattcactggcctgcctcgacagtggcagtctctgatcgaggaatctgcacggagacctaagcccctcgttgaccccgcatgcatcacgagtatccagcccggtgcacctaagggcgaaccacatgatgtggccccaaacggaccttccgcagggggtttagccataccccagtcgagctcttcttcatcaagacccccaactcgcgcacgaggggctccctcacccggagtgctaggccctcacgccagcgagccgcagttggcacctccagcttgtacccccgcagcacccgctgttcctgggcctcccggtcccaggtccccccaaagggagccccaacgtgtgtctcacgagcaatttagagcggctctgcagctggtggtcgaccccggagatccgaggtcatacttggacaattttataaagatcggcgagggtagcaccggaatcgtctgtatagcaacagtccgctcgtcggggaaattagttgccgtgaagaaaatggaccttagaaagcaacaaaggagagagttactgttcaatgaagtcgtgataatgcgggactatcagcatgagaatgtggtcgagatgtataattcttacctggtgggtgatgaattgtgggtggtgatggagttcttagagggcggtgcactcacagatattgtcacccatacccggatgaacgaggagcagattgcagctgtgtgtctggccgtgctgcaggccttgagtgttctgcatgctcaaggagtcatccaccgggacatcaagagtgactcaattttgctgacgcacgatggcagagttaaactaagtgacttcggattttgcgcccaagtgtcaaaagaagtgccgagaagaaagagtcttgtgggcaccccgtattggatggcccctgaacttatcagccgccttccatatggccctgaggtcgacatttggagcttaggaatcatggtcattgagatggtggatggcgaacctccatatttcaacgaaccacctctcaaagctatgaagatgatccgggacaacctgcctccccgactgaagaacttgcacaaggtgtcgccaagcctgaagggctttctggaccgcctgttggtcagagaccccgctcaacgcgctactgccgcagagctcctgaagcaccccttccttgccaaagctgggccacccgctagtattgtgcccctcatgaggcagaaccgcacccgctag

SEQ ID NO: 29961 - DNA, 1458 bp, synthetic construct
  misc_feature 1..1458: note = Description of Artificial Sequence: Synthetic coding sequence
  source 1..1458: mol_type = other DNA
atggcccctaccatccagacacaggctcaacgggaggacggccaccgatctggagtggtgtgcagggtgaagtattgtaactcgcttccagacattccattcgatccaaaatttatcacctacccatttgaccaaaacaggtttgtccagtacaaagcgacttcgctggaaaagcagcacaagcacgacctgctcaccgaacctgatcttggcgtcaccatcgacctcattaatcccgatacgtaccgaattgatcctaacgtgttgctggatcctgctgatgagaagctgttggaggaagaaattcaggcccctacctccagcaaaagaagccagcagcacgctaaggtggtgccatggatgagaaaaactgaatatatatcaacagaattcaatagatacggcataagtaatgagaagccagaggtcaagatcggggtgagcgtgaagcagcaatttactgaagaagagatctataaggatcgcgactcccaaattaccgccatcgaaaagacctttgaggatgcacagaaatcgatctctcagcactactccaaacctagggtcactcccgtcgaagtgatgccagtctttccggactttaaaatgtggataaacccttgcgcacaggtgatttttgatagtgatcctgcaccaaaagatacatctggggctgcagcactcgagatgatgtcacaggctatgatcagaggcatgatggacgaggagggaaaccaatttgtagcctactttttacccgtggaagagacactcaaaaagagaaagcgggatcaggaggaggagatggattatgctcctgacgatgtgtacgattacaagattgccagggagtataactggaacgtgaaaaacaaagccagcaagggctacgaagaaaactatttcttcatctttcgcgaaggcgacggcgtttactacaacgaactggaaacacgggtgcgcctcagcaaaagaagagccaaggccggtgtgcagtccgggaccaatgcgctgctggtggtaaagcaccgtgacatgaacgagaaggagctcgaagctcaggaggccaggaaggcccaattagaaaaccacgaaccagaggaagaggaggaggaggagatggagaccgaagagaaggaagcaggcggttccgtgatgctgattctgcggacaatgccaaccttaatgatgaggaccgaggatcggcctaaagtggcagtaactatgatacagacggctgccgctatgggggtggccagtggtgctggggcaaccgcggcagccccagtcccctctccagtggccgcaagtacccgtcctcggaggatggcagtcaagctccagttactcatccctgttaagctgatagtgacagttacggagtcacagggtattcagggctggtttagacaccactattgcgagcagcaatcaacttttctcgtggtgtgcctctag

SEQ ID NO: 29962 - DNA, 873 bp, synthetic construct
  misc_feature 1..873: note = Description of Artificial Sequence: Synthetic coding sequence
  source 1..873: mol_type = other DNA
atgggccaccctcctcttctgccactgctgttactcctgcacacgtgtgttcccgctagctgggggctgagatgcatgcagtgcaagacgaatggcgactgtagagtagaggaatgcgcactggggcaggacctttgccggactacaatcgtgcgactgtgggaggaaggagaagagctggaactggtcgagaagagctgcactcactcagagaagaccaacaggacattgagttatcggactgggctgaagataacgagcctcaccgaggtagtatgtggcttagacctctgcaatcagggaaattcaggtcgtgcggttacgtatagtcgctcccggtatctggaatgtataagctgtggcagctcagacatgtcgtgtgaacgtggaaggcaccagtctttgcaatgtcggtctcctgaggagcagtgtctggacgtcgtcacccattggatccaggagggcgaggaggtgctagagcttgagaaccttccccagaatggtcgacagtgttattcgtgcaagggcaacagcactcacggatgtagttccgaggagacattcctgatagactgccggggaccaatgaaccagtgtcttgttgctacaggaacacacgagcccaagaatcaatcctacatggtgaggggctgtgctaccgcctcaatgtgccagcacgcccacttgggcgacgctttttccatgaaccacatcgacgttagctgctgcacgaaaagtgggtgtaaccatcctgacttagacgtacagtatcgcagtggagctgctccccagccgggaccggcacatctgagcttgaccattacattactgatgacagcgaggctgtgggggggtactctcttgtggacctag

SEQ ID NO: 29963 - DNA, 1596 bp, synthetic construct
  misc_feature 1..1596: note = Description of Artificial Sequence: Synthetic coding sequence
  source 1..1596: mol_type = other DNA
atggccccaaccatacagacccaggcccagagggaggacggacaccgtccaaactcccaccgaacactacctgagagaagcggtgtggtgtgtagggttaaatattgtaattcacttcctgacattccatttgatcccaagtttattacttaccctttcgaccagaatcgatttgtccagtacaaggcaacctcgcttgaaaaacagcacaaacacgatctgttgactgagcccgatctcggcgtgaccattgatcttataaatcctgacacctaccggattgatcccaatgtgctgctcgatccagcggatgaaaagctcctggaggaggaaatacaggctccaacctccagcaaaaggagtcagcagcacgccaaagttgtgccttggatgcgcaagacagagtacatctctaccgaattcaatagatatggaatcagtaacgagaaacctgaggtgaagataggggtgtctgtcaaacaacagtttactgaggaggagatctataaagatcgcgacagccagatcactgctatcgaaaagaccttcgaagacgcccaaaaatctatatcccaacactacagcaaacctagagtgaccccggtggaagtcatgccggtgtttcctgacttcaaaatgtggatcaacccatgcgctcaggtaattttcgactccgaccctgctcccaaggataccagtggtgccgcagcattagaaatgatgtcacaggccatgattagaggaatgatggacgaggaaggcaatcaattcgtggcctattttctccctgtggaggagacgctgaaaaagcgcaagcgtgaccaggaggaggagatggattacgctccagatgacgtatacgattacaaaatcgcacgtgaatacaactggaacgtcaaaaacaaggcttccaaagggtatgaggaaaattacttttttatatttcgagagggagatggggtgtattacaacgaactggaaacccgggtgcggctctcaaaaaggcgggcaaaagccggagtccagagtggtacaaacgcacttcttgtggttaagcaccgagacatgaacgaaaaagaactggaggcccaggaagcacgtaaggcacagcttgaaaaccacgagcctgaggaagaggaggaggaagaaatggagaccgaagaaaaggaggctggtggatccgatgaggagcaggagaagggcagctctagcgaaaaagagggttcagaggatgaacatagtggctctgaatctgagagggaagagggggaccgcgacgaggcttcggataagagcggttctggcgaggacgaatccagtgaggacgaagctcgtgccgcacgggataaagaggagatattcggaagcgatgctgactccgaggatgacgccgattctgatgacgaagatcggggtcaagcccaggggggttcagataacgattctgacagcggttcgaatgggggaggtcagaggtctaggtcacacagccggtctgcttcacctttcccgagcggatcagagcactccgcacaggaggatggcagcgaggctgccgcatccgattctagcgaagcagactccgacagcgactag

SEQ ID NO: 29964 - DNA, 867 bp, synthetic construct
  misc_feature 1..867: note = Description of Artificial Sequence: Synthetic coding sequence
  source 1..867: mol_type = other DNA
atggccacaggaccaatacctacaggtttatgtctgcgcggtctagaatggtcagccgagtcctccacagccatagccagcctgatttctccatctaccccaagctcatcccccacgccttccaccagaactgtgctcttggatcccgcagatgagaagctgctggaagaagaaatccaagctcccaccagtagtaagcgatcgcagcagcatgccaaggtagtgccatggatgagaaaaacggaatacatctcaacagaattcaataggtatggcatttccaatgagaagccggaggtgaaaataggggtctctgttaaacagcagtttaccgaggaggaaatctacaaagatcgcgatagccagataacagcaatcgagaaaacattcgaagacgcccagaagtctataagtcagcactattcaaagccaagagtcacccccgtggaggtgatgcctgtatttcctgactttaaaatgtggatcaacccctgtgctcaagtgattttcgactcagatcccgcacccaaggatacaagcggagctgcagctcttgaaatgatgagccaggcaatgattagggggatgatggacgaggagggcaatcagtttgttgcctatttcctgcccgtagaagaaaccctgaagaaacgcaaaagggaccaagaagaagagatggactacgcccctgatgacgtctacgactacaaaatcgctcgggagtataattggaacgtcaaaaacaaggcatcgaaaggctacgaagagaactatttcttcattttccgggagggggacggcgtatattataacgagctcgagacatcaatccaatactcccatatgctgtataatctggtggcttag

SEQ ID NO: 29965 - DNA, 1176 bp, synthetic construct
  misc_feature 1..1176: note = Description of Artificial Sequence: Synthetic coding sequence
  source 1..1176: mol_type = other DNA
atggacctggaaaaaaattacccgactccccgaacttcacggacgggccacggaggggttaatcagcttggtggggtgttcgttaatggacgccctttaccagacgtggtcagacagaggattgtagagctcgctcaccagggagtgcgaccttgtgacatctctcgccagctgcgagtgtcccatggttgtgtttccaaaatcctcggacgctactatgaaaccgggagtattaagcccggagtcatcggcggtagcaaacccaaggtagccaccccaaaagtggtcgagaaaatcgcagaatataagaggcagaaccctaccatgtttgcctgggagatcagagatcgcctactcgcagaaagagtgtgtgataatgacaccgtaccatctgtcagctccatcaaccggattattcggactaaagtgcagcagcctccaaaccaacctgttccagcctcctcccatagcattgtgagtacagggagtgtaacgcaagtatccagcgtgagcactgactcagcagggagttcatattctatcagcgggatactgggtattacaagtcctagtgctgacaccaataagagaaagcgcgacgaggggatccaggagtcaccagtgccgaacggtcactcattacctggcagagactttctcaggaagcagatgaggggtgacctgttcacccagcagcaattggaggtactcgaccgggtgtttgagaggcaacattactcagatatttttacgacgactgagcctatcaagcctgaacaaaccacagagtatagcgctatggcgagcctggctgggggattggacgatatgaaagcaaatcttgcctcacccacacccgcagacatcggttcgagcgtcccaggaccccagtcctacccaattgtgacagggagggatttagcctccacgactctgcccggttacccgcctcacgtacccccagcaggacaaggctcctatagcgcgcctaccctcaccgggatggtgcctggctcagagtttagcgggtccccatattcccaccctcaatactcgagttataacgattcatggaggtttcccaatccaggcctgttaggtagcccttattattattccgcagcagcacgaggtgcggctccccctgcggctgccacagcctacgataggcactag

SEQ ID NO: 29966 - DNA, 867 bp, synthetic construct
  misc_feature 1..867: note = Description of Artificial Sequence: Synthetic coding sequence
  source 1..867: mol_type = other DNA
atggacctcgagaagaactatccaacacccagaacatcaaggaccggccatggaggagtgaaccaacttggcggagtttttgtaaacgggagaccgctcccagatgtggtgcgacagaggatagtcgagttagcccaccaaggtgtgcgaccttgcgacatctcccgacaacttcgtgtcagccacggttgcgtgagcaagattctggggagatattatgagactggatcaatcaagcctggagtcatcggaggctctaagcccaaggtcgcaactccaaaagtagtggaaaagatagccgagtataagcggcagaaccctacaatgttcgcttgggaaattcgcgatcggctgctcgccgagagggtttgtgataatgacactgtgcctagtgtgagcagcattaatcgcattatcagaacaaaggtgcagcagccccctaaccagcctgttcccgcttcctctcactccatcgtctcaactgggagtgtgacccaagttagttccgtgagcaccgactctgcgggaagctcctattcaatttccggtatccttgggattacttccccctccgcagacacaaataaacgcaagagggatgaaggcatccaagagagccccgtgccaaacgggcacagccttccagggcgtgattttttacgcaagcagatgagaggggatctatttacccagcagcagcttgaagtcctggatcgtgtttttgaaagacagcattattccgatattttcacgaccacagaaccaattaaacccgagcaagctgtaacttggcgcgctagaccttctccaggaacattacatactagcccaccgcttgacagagccgcaacacagcatagaaggtag

SEQ ID NO: 29967 - DNA, 987 bp, synthetic construct
  misc_feature 1..987: note = Description of Artificial Sequence: Synthetic coding sequence
  source 1..987: mol_type = other DNA
atggatctggaaaaaaactatcctacccctagaacctcgcgaacagggcacggtggcgtcaatcagctgggaggtgttttcgtcaacggaaggccactcccagatgtggtgcgtcagcggatcgtggagcttgcgcaccagggggttaggccttgcgacatatcgagacagttgcgagtcagccacggttgtgtgagcaagatccttgggaggtattacgagactgggtcaataaagcccggagtgatcggcggtagcaagcctaaggtggccacgcccaaggtggtcgagaagatcgctgagtataaacgccagaatcctacgatgttcgcctgggagataagagacaggctactcgccgagcgcgtttgcgacaatgatacagttccatcggtgtccagcatcaatcgaatcatacggactaaggtgcagcagccaccgaaccagccagtccctgcctcttcccactctatcgtgtccacgggttccgtgacccaggtaagttctgtatcaaccgactcggctggatccagctatagcattagcggcattctgggaatcacgtcaccaagcgccgataccaataaaagaaagcgtgacgagggaatccaagaatcccccgttccgaacggccactcactgcctggcagagactttttgagaaagcagatgagaggagacttgtttacacagcagcagctcgaggtattagatcgcgtctttgagcgacaacactacagtgatattttcacaaccactgagccaatcaagccagagcagaccacagaatacagtgccatggccagtcttgccggagggctggatgatatgaaagccaacctggcatcaccaactcccgcagacattggttcgagtgttcccggaccacagagctatcctatcgtcacggggagcccctactactatagtgccgctgcccgaggcgctgcccctccagctgccgcaaccgcatatgaccgtcattag

SEQ ID NO: 29968 - DNA, 909 bp, synthetic construct
  misc_feature 1..909: note = Description of Artificial Sequence: Synthetic coding sequence
  source 1..909: mol_type = other DNA
atgttcgcttgggagatacgcgaccggcttctggcggagcgagtctgcgataacgacaccgtcccatcggtgagtagcattaaccggattatccgtaccaaggtgcaacaaccacctaatcagcctgtgcccgcatcaagccacagtattgtctccaccggcagcgtcacacaggtgtccagtgtttccacagactctgccggaagttcctatagcattagcggaatcctcgggatcacgtccccaagtgctgacacgaacaagcgcaagcgcgatgaaggcatccaggaatcaccggtgccaaatggacactcgctccccggacgagatttcttgaggaaacaaatgagaggcgacttgtttacccagcagcaactggaagtgttggacagagtttttgaaaggcagcactactcagacatcttcaccacgaccgaaccaatcaaaccagaacagtggtgtcctgttcttatgcgccagtatttagtgcagccacaagctgttctgtttcagaccaccgaatactctgcgatggcatcactggctggtggactagatgatatgaaggcaaatctcgcgagtccgacccctgccgacattggctcttctgtacctggaccccagagttaccctattgtgactgggagggatttagcttccaccaccttacccggataccctcctcacgtgccgccagctgggcagggcagttattccgcccctacactgaccggtatggttcccggatctgagttcagtggttctccttacagccacccacaatactcgtcttacaatgactcctggagattccccaatcctggcctcctcggcagcccttactactacagtgctgctgctcgaggggctgccccaccagctgccgctaccgcctatgatcgtcactag

SEQ ID NO: 29969 - DNA, 1074 bp, synthetic construct
  misc_feature 1..1074: note = Description of Artificial Sequence: Synthetic coding sequence
  source 1..1074: mol_type = other DNA
atggatttggagaagaactaccccacaccgcgaacgtctagaactggacacggcggtgtcaaccaactcggcggagtgtttgtaaatgggagacccttacccgatgtggtgaggcagcgaatcgtcgagctggctcaccaaggggtgcgcccatgcgacattagccgacagctgagagtctcacatgggtgcgtgtcaaagattcttggacggtattacgagacgggatccatcaagccaggggtaattgggggttccaagccaaaagtggccaccccaaaggttgttgagaagatcgctgaatacaaaaggcaaaaccctaccatgtttgcttgggagatccgggacagattactggctgagcgggtctgcgataatgataccgtgccgagcgtgagttccataaacaggatcatacgtacaaaggtgcagcagcctccgaaccagcccgtgccagccagcagccatagcatcgtgagtactggaagtgtgactcaggtgtcgagcgtgtctacggactctgccggaagctcttattctatcagcgggatactgggtatcacctcaccctctgcggacactaataaaaggaagagagacgagggaatccaggagtcacctgtaccaaacggtcatagcctacctggcagggattttctaagaaaacaaatgcgcggtgatctgttcacccagcagcagctcgaagttctggatcgcgtttttgagcgtcaacactattccgatatcttcacaacgacagaacccatcaaacctgaacagacgacagaatattctgcaatggcctcccttgccggaggcttagacgacatgaaagccaatctggctagcccaacaccagcggacattgggtcaagtgttcctggccctcagtcgtaccctattgtcacgggcagtgagttctcaggctccccctactctcatcctcagtattcgtcatacaacgactcgtggaggttccctaaccccggattgttaggaagtccttactattactcagccgctgccagaggcgcagctccaccggcagcagcgaccgcatatgataggcactag

SEQ ID NO: 29970 - DNA, 1089 bp, synthetic construct
  misc_feature 1..1089: note = Description of Artificial Sequence: Synthetic coding sequence
  source 1..1089: mol_type = other DNA
atggatctcgagaagaattatcctaccccacgaacctcacgaactggccatggcggagtgaaccagcttgggggtgtttttgtaaatgggagacccctgcccgatgtggtgcggcagagaattgtggaactggctcaccagggagttcgcccatgtgacattagtagacagctacgagtgtcacacggatgcgtgtccaaaattctgggcaggtattatgagactggctctataaaacccggtgtaatcgggggaagcaagcccaaggttgcgactcctaaggtcgtggaaaagatagccgagtacaaacggcaaaacccaaccatgttcgcttgggaaatcagagaccgccttctggcagagcgagtgtgtgataacgacaccgtcccttccgtgtcttccataaacaggataatcaggactaaagtccaacagcctcccaaccagccagttcccgcttctagtcactctattgtgagtactggatcagttactcaagtcagctctgtctccacagatagcgccggatcttcatactctatctcaggtatacttggtataacaagtccctcagccgacacaaacaagaggaagcgcgacgaagggatccaagagagcccggtgcccaacgggcactccctgccgggaagagacttcctccgcaaacagatgaggggcgatctcttcacgcagcagcaactggaggtgttggaccgggtctttgaaagacagcattatagcgacatctttacaactaccgagcctatcaagccggagcagaccacagagtacagcgctatggcctctctagcagggggactggacgatatgaaggccaacctggcttcgcctacaccggcagacatcgggagcagcgtgcctgggccacagtcatacccaattgtgacggggagagatctggcttctactacactgcctggttatcctccgcacgtacccccagcaggtcagggcagctattcagcgccaactttaacggggatggtgcccggaagtccttactattacagtgcggctgctaggggggctgcaccacccgctgccgcaacagcatatgatagacactag

SEQ ID NO: 29971 - DNA, 1047 bp, synthetic construct
  misc_feature 1..1047: note = Description of Artificial Sequence: Synthetic coding sequence
  source 1..1047: mol_type = other DNA
atggatctggaaaagaactaccccacaccacggacaagccggactgggcacgggggtgttaaccagctgggaggtgtgtttgtaaacggacggcctctacctgatgtggtgaggcaaaggattgtagagcttgcacaccaaggggtgcgcccttgtgacatcagccggcaactgcgcgtgtcccacgggtgcgttagtaagatcctgggcaggtactacgagactggtagtatcaagcccggagtgattggcggatctaagcctaaagtagccacaccaaaggtggtggaaaagatcgcggagtacaagcgccagaatccgaccatgtttgcgtgggaaatcagagaccggttactggctgagcgagtttgcgacaatgatacagtcccctctgtgtccagcattaataggattattcgtacgaaagtgcaacaacctcctaatcagccagtcccagccagctctcattccatcggcatccaggaaagccccgtccctaatggccacagtttacccggacgggatttcttgcggaaacaaatgagaggcgacctgttcacacaacagcaactggaagtgctagatagggtattcgaacggcagcactatagtgacatcttcacgactacagagcctattaagccggagcagaccacagagtactcagcaatggccagcctggcaggcggtctggacgacatgaaagcaaatcttgcctccccaacacctgcagatatcggctcctcggttccaggtccacaatcatatcccattgtgacagggcgagacctcgcttccaccactctgcccggttaccccccacacgtgccgccagctggccagggttcatatagcgcacccacactaacagggatggttcccggatcagagttctctggctccccatatagtcacccgcagtacagctcctataatgactcgtggcggtttcccaatcctggattactggggtctccctattattactctgccgctgccaggggtgcagcacctcctgctgcggcaaccgcatatgaccgacattag

SEQ ID NO: 29972 - DNA, 876 bp, synthetic construct
  misc_feature 1..876: note = Description of Artificial Sequence: Synthetic coding sequence
  source 1..876: mol_type = other DNA
atggatcttgagaagaactaccctacaccgcgaactagccgcactggccacggcggtgtgaaccaactagggggagttttcgtcaatgggaggccgcttccagatgtggtacgccagagaatcgtcgaactagcccatcagggggtccgaccctgcgacatatccagacagctcagagtgtctcacggctgcgttagcaagatcttggggaggattattcgaaccaaagtacagcagccccctaaccagccagtgccagcctcatctcattcaattgtgtctaccggtagtgtcactcaagtgagcagcgtttctacggacagtgcaggaagttcatactcaatcagcggaattctgggcatcacatccccgtcggccgatactaacaagcgtaagcgcgatgagggaatccaggagagtcccgtaccaaatggtcacagtctgcctgggagggacttcctgcgtaagcagatgcgtggcgacctgttcacacaacagcaactggaagtgctagaccgtgttttcgagaggcagcactactccgatatatttactacaaccgaaccaatcaagccagagcagacaaccgaatactctgcaatggccagcctggccggtggtctcgatgatatgaaagctaatctggcctctccaacccccgcagacataggatcatccgtgcctgggcctcagtcctaccccatcgtcacaggctcggagttttccgggtccccttactcccatcctcagtattcaagttacaatgatagttggaggttccccaaccctggcctcctggggtctccctattactactcagccgcagcgcgaggagccgcacccccagcagctgcgacagcttatgatcgccactag

SEQ ID NO: 29973 - DNA, 960 bp, synthetic construct
  misc_feature 1..960: note = Description of Artificial Sequence: Synthetic coding sequence
  source 1..960: mol_type = other DNA
atggacctggagaagaattatcccacccctaggacatcccgcacgggacacggcggagtgaatcagcttggaggtgtttttgtgaatggcaggccacttcccgatgtagtgcggcagaggatcgtggaactcgcccatcaaggagtacggccatgcgacataagtcgccaactccgcgtgtcccacgggtgtgtgagcaagattctcggaaggtactacgagaccggctccatcaaaccaggcgttatcggtgggagcaaacctaaggtggcaactccgaaagtcgtcgaaaaaatagccgaatataaacgtcagaaccccacaatgtttgcctgggagatcagagaccgtctcctggctgaacgggtttgcgacaacgatacggtgccctctgtgtcctcaataaatcgaatcatccgaacgaaggttcaacagcccccaaatcagcctgtgcctgcaagctcccattctattggcatccaggagtcccccgtaccaaatggacattcattgccagggagggactttttgaggaaacaaatgaggggcgacctctttacccaacagcagctggaggtgctcgacagagtgtttgaacgacaacattactccgacatctttacaactacagagccaattaagccggaacagacaaccgaatactcagccatggctagtctcgccggaggattggacgatatgaaggccaatctggcatctcctacacctgccgacataggctcctccgtgcctgggccacaatcctacccaatcgtcactggtcgtgaccttgcttccactaccctcccaggataccctccccatgtgccacctgccggacaaggctcatactctgcacctactctcacaggaatggtgccgggaagcccatattattattccgcagcagcgaggggagccgctccaccagcagccgcaacagcctatgatcggcattag

SEQ ID NO: 29974 - DNA, 852 bp, synthetic construct
  misc_feature 1..852: note = Description of Artificial Sequence: Synthetic coding sequence
  source 1..852: mol_type = other DNA
atgtttgcttgggagatcagagatagactacttgcggaacgcgtctgcgataatgatactgtgccatccgtgagcagtatcaaccggataatccgaactaaggtgcagcagccacccaaccagccagtgcccgcatcctcgcactctatcgtgtccaccggcagtgttacccaggtcagcagtgtgtcaactgacagcgcgggatcaagttattccatcagcggcatcctcggcatcacctcacctagtgcggatactaataagcgcaaacgggacgagggaattcaagaatcccccgtaccaaacggccactcgctccccggtagggactttctccgaaagcagatgcgcggagacctctttactcagcagcaactggaggtgctcgacagagtgtttgaacgtcagcactactctgacatttttaccacaactgagccaataaaaccggaacaaacgacagaatattcagccatggccagcttggcaggcggacttgatgatatgaaagcgaacctcgcctcgcccacaccggctgatatcggttcctcagttccgggaccccagtcataccccattgttacaggccgagatcttgcatctaccacccttcccggatatccgccacatgtccccccagccggacagggtagctacagtgcccctaccctgaccggtatggtacctgggtctgagttttccggatccccctactcccatccgcagtattctagttataacgacagctggagattcccaaacccaggtcttctggggtctccttattactacagtgctgccgctaggggcgcagctccacctgctgctgccaccgcgtatgatagacactag

SEQ ID NO: 29975 - DNA, 924 bp, synthetic construct
  misc_feature 1..924: note = Description of Artificial Sequence: Synthetic coding sequence
  source 1..924: mol_type = other DNA
atggacctagaaaagaattaccctacacccagaaccagtcggaccgggcatggcggtgtaaatcagctggggggtgtgtttgtcaacgggcgacccctgcctgacgtggtgaggcagcgtattgtggaacttgcccaccagggagtgcgtccatgcgacatttctcgccaactgagagttagccacggctgcgtctctaagatcctggggcgatactatgagactggaagcatcaagcccggtgtgattgggggatctaagccaaaggtggctaccccaaaagtagtggagaaaatcgcggagtacaagcggcagaacccgaccatgttcgcttgggaaatacgcgatcgattactggcagaaagagtgtgtgacaacgatacggtgccctccgtgtcatctatcaaccgaatcattagaaccaaggtccagcaacctcccaatcagccagtacctgcttcatcccattcaatagtaagcaccggttcagtcacgcaggtctccagtgtgagcacagacagcgccggtagcagctactccatcagtggtatcttgggtatcacttccccttctgctgacacaaataagaggaagcgggacgagggaatccaagagagccccgttcccaacggccactccctgcctggacgagattttctgcggaaacaaatgaggggggatctgtttacccagcagcagctggaggttctggacagggtgttcgagcgacagcactactcagacatttttaccacaactgaacctataaaacccgaacagtggtgcccagttctcatgcgacagtatctggtgcagccacaggctgtgttattccaggccgtcacatggcgagcacgccctagtcccggaactcttcatacaagccccccactcgatcgtgctgcaactcagcacagacggtag

SEQ ID NO: 29976 - DNA, 1197 bp, synthetic construct
  misc_feature 1..1197: note = Description of Artificial Sequence: Synthetic coding sequence
  source 1..1197: mol_type = other DNA
atgccacataactccattagatccggccacggcggactgaatcaactcgggggagctttcgtgaacggacgcccacttccagaggttgtcagacagcgcattgttgatttggcacaccagggtgtacgcccttgcgatatatcccggcagctgcgcgtgagtcatggttgcgttagcaagattctgggacggtattatgaaacaggctccatcaggccaggcgttattggcggtagcaagcctaaggtggccactcctaaagtggtagagaagattggagactacaaacgacagaaccccacgatgttcgcatgggaaatccgcgatcggcttctggctgaaggagtctgtgacaacgacactgttccctccgtctccagcattaatcgaatcatacgtacaaaagtgcagcagcctttcaacctccctatggacagttgtgtagcaactaaaagtctctcccccggtcacactctgattccttcaagcgccgtgactccacctgaatctccccagtctgatagcctgggaagtacctactccatcaatggccttctcggcattgcacagcctggatccgacaaaaggaaaatggatgattcagatcaggactcttgccggcttagtattgattcacagagcagttcctccggtcccagaaaacatctgaggacggatgccttctcccagcatcatctcgaacccttggaatgcccctttgaaagacagcactatcccgaagcgtacgcctccccgtcccataccaaaggcgaacagggcctgtacccgctccccctgttgaactccacacttgatgatggtaaagccacgctaacaccaagtaacacacctttgggtaggaacctatctacacatcagacgtacccagtggtggccgctccacctttctggatatgttctaagagcgcaccaggttctcgtcctagtatgccattccctatgctcccaccatgtactggcagttcacgcgcacgtccttcatctcagggagagcggtggtgggggccacgatgcccagatacccacccaacctctccaccagctgaccgggctgccatgcccccacttccctcacaggcttggtggcaggaggtgaacactctcgcaatgccgatggccacacctcctaccccaccaacggcaagacccggagcttctccaacaccagcatgctag

SEQ ID NO: 29977 - DNA, 966 bp, synthetic construct
  misc_feature 1..966: note = Description of Artificial Sequence: Synthetic coding sequence
  source 1..966: mol_type = other DNA
atgccccataatagtatccgcagcgggcacggcggattgaaccaactgggtggtgctttcgtgaatgggaggccactcccagaagtggtgcgacagcgaatagtcgatctcgcacatcagggagtgaggccgtgtgacatcagccgacaactgagagttagccacggctgtgttagcaagatattggggagatattatgagactgggagcattaggccgggtgttatagggggtagcaaaccgaaagtggccaccccaaaggtcgtagagaaaattggagactataaaagacagaacccaacaatgttcgcctgggaaattcgcgaccggctgctcgcggaaggtgtgtgtgacaatgatacagtccctagcgtgagttccatcaataggattattaggacaaaggttcagcagcccttcaacctgcccatggattcttgtgtggctactaagagtctcagtcctggccacactctgatcccctctagcgctgtcacacctccagaatctccacagagtgattctctgggaagtacatactctatcaacggtcttctgggaatagcccagccgggttccgataagaggaagatggatgacagcgatcaggactcttgtaggctaagcatcgacagtcaaagctcctcctcagggccacgcaaacacctgagaacagacgcctttagccagcaccaccttgaaccgctcgagtgtcccttcgaacggcagcactacccagaagcatacgctagcccatcccatacaaagggcgaacagggagagcgatggtgggggccacgttgcccagatacgcatcctacctcaccaccagctgatagggctgccatgcctcctctgcctagtcaggcttggtggcaagaagtgaatacactcgcgatgccgatggccacacctcccacacccccaaccgcgagacccggtgccagccccacccctgcgtgctag

SEQ ID NO: 29978 - DNA, 1197 bp, synthetic construct
  misc_feature 1..1197: note = Description of Artificial Sequence: Synthetic coding sequence
  source 1..1197: mol_type = other DNA
atgccccataatagtattagatctggacacggcggacttaatcagttgggtggagcatttgtcaacggacgccctcttccagaggtcgttcgtcagaggatcgtggacctggcccatcaaggagtacggccttgtgatatttccaggcagctcagggtgagtcacgggtgtgtgagcaagatattggggagatactatgagaccggaagcattcgccctggggtcattgggggtagcaagcccaaagtcgcgacacccaaagttgtggaaaagattggcgactacaagcgccaaaacccaaccatgttcgcttgggagatacgtgataggctcctcgcagaaggtgtgtgtgataacgacacagtcccctcagtctcctcaattaaccgaatcatccgcaccaaagtacagcagccgtttaatctgccgatggactcttgcgtcgctactaagtccttgagccccggacacactctgattccttcgagtgccgtgacacccccagagtcaccccagtccgactctctcggatctacatactcgataaacggtctgctgggcattgcccagcccggatccgacaagcggaagatggacgacagcgatcaggacagctgcagactatcaattgattcacaaagttcctcatcagggccaagaaagcacctgcggacagatgctttttcacagcatcatttagagccattagagtgcccgtttgaaaggcaacactatcccgaggcctacgcatccccctcccatacaaagggggagcaggggctgtaccccctaccactgctgaactcaactttggatgacggcaaggcaactctaacaccgtctaataccccactgggccgaaatctgagtacccaccaaacctacccagtggtagccgcaccacccttctggatttgcagtaagtctgctcccggttctaggccctcaatgcccttccctatgttgccgccttgtaccggaagctcacgcgcacgccctagctcacaaggtgaacgctggtggggccctcgctgtcccgacacccatcccacatctcccccagccgacagggccgctatgcccccactgccctcccaggcctggtggcaggaagttaacacactcgccatgccaatggcaactccgcctacacctcccacggcacgacctggtgcttccccgacaccagcatgctag

SEQ ID NO: 29979 - DNA, 864 bp, synthetic construct
  misc_feature 1..864: note = Description of Artificial Sequence: Synthetic coding sequence
  source 1..864: mol_type = other DNA
atgccacataacagcatccggtctggacacggaggattgaatcagctcggaggagcctttgtcaatggaagaccactccctgaggttgtcagacagaggatcgttgacttagcacatcaaggggtgcgaccttgcgatatctcccggcagctgagagtatcccacggatgtgtatccaagatcttggggagatactacgaaacagggtcaatcaggcctggagtcattgggggatccaagcctaaagtcgccacacccaaggtggtggagaaaattggagactacaaaagacagaaccccaccatgttcgcctgggagatacgcgaccgtcttttggccgagggcgtatgcgacaatgataccgtccctagcgtatccagcatcaacagaataattcgaactaaagtgcagcagccttttaatttgcctatggattcctgcgtagccaccaagtccttgtcccctggtcacactctgatcccatcctctgccgtcacgccaccagagtcaccccagagcgacagcctcggtagcacctactcaatcaatggcctgttgggcatcgcccaaccaggcagcgacaaacggaagatggacgacagtgatcaagacagttgccgcttatccatcgactctcagagctcctcctcaggtcctagaaagcatttgagaaccgacgccttttcccagcatcatttggagcccttggagtgccccttcgagcgccagcactatccggaagcctacgcctctcccagtcacaccaaaggagaacaggaggtcaacaccctagccatgcctatggccacgcctcctacaccccctacggccaggccaggcgcaagcccaactcccgcttgctag

SEQ ID NO: 29980 - DNA, 1353 bp, synthetic construct
  misc_feature 1..1353: note = Description of Artificial Sequence: Synthetic coding sequence
  source 1..1353: mol_type = other DNA
atgccccataatagcattagatctggtcacggcggtctcaaccagttaggaggggctttcgtcaacgggagaccattaccagaggttgtacggcaacgcattgtggatctggcgcaccagggcgtgcgaccttgcgacatatcacgtcagttgcgcgtctcgcacggttgtgtctctaagatcctggggaggtactacgagaccggtagcatcaggcccggtgtgattggcggttcgaaacctaaagttgccaccccgaaggtggtcgagaagataggggactataaacgtcagaatccgactatgttcgcctgggagatccgtgataggcttctggctgagggtgtgtgtgataacgacactgttcccagtgtcagtagtatcaaccggattatccgaacgaaggtgcagcagccttttaacctgcctatggacagttgtgtggcgaccaaaagcctgtctccgggacacacattaatcccaagttccgccgttacaccgcctgagtctccccaaagtgactccctgggtagtacatacagtatcaacgggctgctgggcattgcacaacccggtagtgacaagcggaaaatggacgatagtgatcaagactcttgccgcctttcgatcgactctcaaagttcaagcagcggcccacgcaagcatctgcgaaccgatgcattcagccagcatcacctcgagccacttgaatgtcccttcgaacggcaacattatcctgaggcctacgcatcacccagccatactaagggagagcagggtctgtatcccttgcctctgctgaacagcacactggacgatgggaaggccacattgactccctcaaacacaccactgggaagaaaccttagcacacatcagacctaccctgtcgtggcagaccctcactctcctttcgccattaaacaagagacacccgaagtgagctccagttctagcacgccttcttccctatctagctcagccttcttggatttgcagcaggtcggatccggggttcccccttttaacgcgtttcctcacgccgcttccgtgtatggccagttcaccggtcaggccttactgtcaggaagagagatggttggtcctactctgcctggttaccctccccatattccgacctccggtcagggctcatatgcctcatctgctattgccggtatggtggccggttctgagtactcaggcaacgcatatggtcacactccctacagctcttattccgaagcctggagattcccaaatagttccctcctgtccagcccatactattactcaagtacaagccgcccatccgctcctcccacgactgcaaccgcgttcgaccacctatag

SEQ ID NO: 29981 - DNA, 570 bp, synthetic construct
  misc_feature 1..570: note = Description of Artificial Sequence: Synthetic coding sequence
  source 1..570: mol_type = other DNA
atggctagcaaaagagctctggtgattctggctaaaggggctgaggaaatggagactgtcattccagttgacgtgatgcggcgagccggtatcaaggtcactgtggccggactagccggaaaagatcccgtacagtgctcccgcgatgtggtgatttgcccagacgccagcctggaggatgctaaaaaggagggaccgtatgatgtcgttgtgttgcccggtggtaacctcggtgctcagaacctaagcgaatccgcagcagtgaaagagatactcaaggaacaggagaaccgaaagggactaatcgctgccatatgtgcaggccctactgctttgttagctcatgaaataggattcggctctaaagtcacaacgcatcctcttgctaaggataaaatgatgaatggaggacactatacctattcagagaacagagtagagaaagatggcctgattctgaccagtcgcggtcccggaaccagcttcgaattcgctctggctatcgttgaggcattgaatggaaaagaggtggcagcccaggtgaaggccccactggttctgaaagattag

SEQ ID NO: 29982 - DNA, 570 bp, synthetic construct
  misc_feature 1..570: note = Description of Artificial Sequence: Synthetic coding sequence
  source 1..570: mol_type = other DNA
atggcgagtaagcgggctttggtgatcctcgcaaagggggcagaagaaatggaaaccgtgattcccgtggacgtcatgcgtcgggcaggcattaaggtgacagtagcgggtctagcaggcaaagaccccgtgcaatgcagcagggacgtcgtgatctgtcccgatgcctcccttgaggacgccaaaaaagagggaccatatgacgttgtcgttctgccaggtggtaatttgggagcccaaaacctttccgagagcgcggctgtgaaggagatcctaaaagagcaggagaaccgcaagggactgattgcagccatttgtgccggacccacagctctgctggcgcatgagattggcttcggatcaaaagtcactacccaccctttagctaaagacaagatgatgaatggcggacattatacttacagcgagaatcgtgtggaaaaagacggcctaatcctcacttcccgaggacccggaacctccttcgaattcgccctcgctatagtagaagcactgaacgggaaggaagttgcagcccaggtcaaagctcctctagttctgaaagactag

SEQ ID NO: 29983 - DNA, 570 bp, synthetic construct
  misc_feature 1..570: note = Description of Artificial Sequence: Synthetic coding sequence
  source 1..570: mol_type = other DNA
atggcatccaagagagccttagtgattctggctaaaggcgctgaggagatggagaccgtgatccctgtcgatgtgatgaggcgggcaggaatcaaggtgacagttgccggactggccggtaaagatcctgtccagtgtagccgagacgttgttatctgcccagatgcctccctggaagacgcaaaaaaagagggcccatacgatgttgtggtgctgcctggtggcaacttaggggctcagaacttgagcgaatcagccgctgtgaaagaaatacttaaagaacaggaaaatcggaagggactgattgctgctatttgcgcaggcccaacagcgctgctagcccacgagatagggtttggcagcaaagtcacaacccaccccctggccaaggataaaatgatgaacggtgggcactacacgtattctgagaatcgcgtcgagaaagatgggctaatcctgacatctcgaggacctggcactagcttcgaatttgctctagcaatagtcgaagccctgaacggtaaagaagtggccgcacaggtcaaagcacccctggtcttgaaggactag

SEQ ID NO: 29984 - DNA, 570 bp, synthetic construct
  misc_feature 1..570: note = Description of Artificial Sequence: Synthetic coding sequence
  source 1..570: mol_type = other DNA
atggctagcaaacgagctttagtgattctggctaagggggcagaagaaatggagacagtgatccccgtggacgttatgcgccgtgcgggaatcaaggtaaccgtggctggcctggcgggaaaggatcccgtacagtgcagtcgagacgtggtgatctgtcctgatgcgtctcttgaggacgccaagaaagagggaccgtatgacgtggtggtgctgcccggtgggaacttaggagcgcagaatctctccgaaagcgcagcagtcaaggagattctaaaggaacaagagaaccggaaggggctgattgccgcaatttgcgcaggtccgactgcccttttagcccatgaaataggatttgggtccaaagtcacaacccacccgcttgccaaggacaagatgatgaacggcggtcattatacatacagcgaaaaccgggtcgaaaaggacggcttaattctgacctcgcgcggaccgggaacttcttttgaattcgctctggccatcgtcgaagcactgaacggaaaggaggttgccgctcaggtgaaggccccactggttctaaaagactag

SEQ ID NO: 29985 - DNA, 3561 bp, synthetic construct
  misc_feature 1..3561: note = Description of Artificial Sequence: Synthetic coding sequence
  source 1..3561: mol_type = other DNA
atggacgagcctcctgggaagccactgagctgcgaggaaaaggagaaactgaaagaaaaacttgccttcctcaaacgtgaatactctaaaacactggccaggctgcagcgagcccagcgcgctgaaaaaatcaaacatagcatcaagaagacagtggaggaacaggactgtctaagccaacaagacctcagccctcagttgaagcattccgagccaaagaacaaaatatgcgtatatgataaactccatatcaagacccacttagacgaggaaaccggcgaaaagacgtccattaccctcgatgtgggcccagaaagcttcaatccgggtgacggccctgggggtctgcccatccagaggaccgatgatacccaggagcacttcccccacagagtgagcgacccatctggtgagcagaagcaaaagctcccctcccgcaggaagaagcaacaaaagagaacctttatatctcaggagagagactgcgttttcggaactgatagtttgcggctctctggcaaacgtctgaaggaacaagaagagatcagcagcaaaaaccccgcacggagcccagttacagaaataagaacccatctattgagcctcaagtccgagcttcctgatagcccggaaccggtgactgagatcaatgaagactccgtgctcattcctcctacggcacagcctgaaaagggagtggacaccttcttgcggaggcctaacttcaccagagcaacgaccgtgcctctacagacgctgagcgacagtgggagcagtcaacatttggaacatataccccctaagggctcatcagagttaacaacgcacgacctgaaaaatatccgatttactagccctgtaagcctggaagcccagggcaaaaaaatgaccgtcagcacggacaacttactggtgaacaaggccatatcaaagagcggacagctgcccacaagctcaaatctggaagcaaatatttcatgttccctgaatgaactgacatacaataacctccccgctaacgagaaccagaacctgaaagagcagaatcagacagaaaagtcgctcaagagcccttcagatacacttgacggtcgcaacgagaacctacaagagagcgagattctttcccagccaaagtctctgagtctagaggctaccagtcccttgagtgcagaaaagcactcttgcacagtgcccgagggattactgttcccagctgagtattacgtccgaaccaccaggagtatgtccaattgtcagagaaaagtggccgtcgaggcagtgatacagagccatctggatgtgaagaaaaaaggttttaagaacaaaaataaagatgcttcaaagaacctcaacctctcaaacgaagaaacagatcaatcagagattcggatgtctggcacctgcacaggacagccgtccagcaggacgagccaaaaacttttatctttgacgaaggttagctcaccagctggacccacagaagataacgatctcagcagaaaggctgtggcacaggccccagggaggcggtataccggaaagaggaaatctgcatgtacacctgcaagcgaccattgtgagcccctgctgccgaccagttcgctgagtatagtgaatagatctaaggaggaggttacatcccacaaataccagcacgaaaagctgtttattcaagtgaaaggtaagaaaagcagacaccagaaggaggacagcctctcatggagtaacagcgcatatctgtccttggatgacgacgcgtttactgccccattccatcgcgatggtatgttgtctcttaaacagctgttgtcctttttgagcattactgatttccaactgcctgacgaggatttcggtcctcttaagcttgaaaaggtgaagtcctgctcagagaagcccgtggagccattcgagtctaagatgtttggtgaacgccatttgaaggaggggagttgtattttcccggaagaactaagtcccaaacgaatggacaccgaaatggaagatctggaggaagatttgatagtccttccagggaaaagccacccaaagcgacccaactcacagagccagcacactaagaccggcctgagttcgtccatattgctgtatacccccctgaatactgtggctcccgatgacaatgatcgcccaaccactgatatgtgctcacccgctttcccaattctgggcaccactcctgcgtttggcccacagggcagctatgaaaaagccagtaccgaggtggcaggtaggacatgctgtacgccccagctcgcccacctcaaggatagtgtctgtctggctagcgacactaagcaattcgacagcagcggcagtcccgcaaaaccacataccaccttgcaggtctccgggaggcaggggcaacctacatgtgactgcgattctgtacctcctggcactcctccccctatcgagtctttcacatttaaggagaatcaactgtgccggaatacctgtcaggagcttcacaaacattccgtggagcaaacagagacggcagagctccccgcttctgattccataaaccccggaaatcttcagctggtgagtgaattaaagaatccatcaggcagctgcagcgtggacgtatctgcaatgttctgggaacgggctgggtgtaaggaaccttgcatcattacagcctgcgaggatgtggtctcactgtggaaggctcttgatgcctggcagtgggaaaaactgtacacctggcattttgccgaggtgccggtgttgcagatagttccagtacctgatgtctataatctcgtctgcgtagctctgggcaatctggagattagggaaattcgcgcactgttctgttcctcggatgacgaaagtgaaaagcaagtgctgctgaaaagcggtaacatcaaagccgtgcttgggctaaccaaaagaaggctggtgagctcgagcgggacactgtccgaccagcaagtggaggtaatgaccttcgctgaagacggagggggtaaagagaaccaattcctgatgcctccagaagaaactattctcacttttgccgaagtgcaggggatgcaggaagctctgctcggtactaccattatgaataatatcgttatttggaacctcaaaactggtcagctgctgaagaaaatgcatattgacgactcgtatcaagcctctgtctgtcataaagcctattctgagatggggctgctgttcatagtcctctctcatccatgcgctaaggaatctgaaagtcttcgatctcccgtgtttcagctaatcgtgatcaaccctaaaacgaccttgtctgtgggcgtaatgctgtactgccttccaccgggacaggcaggcagatttctagaaggggatgtcaaagaccactgcgctgctgctattcttacctccggaacaatagcaatctgggacctcctgttaggccagtgtaccgccttgctacctcccgtctccgaccaacactggtcctttgtgaaatggtccggcacagactctcaccttttagccggacagaaggacgggaatatttttgtgtatcactatagttag

SEQ ID NO: 29986 - DNA, 4344 bp, synthetic construct
  misc_feature 1..4344: note = Description of Artificial Sequence: Synthetic coding sequence
  source 1..4344: mol_type = other DNA
atggcttccgccggaaatgccgctgaacctcaggatagggggggaggcggaagcggatgcattggagcacccggacgccctgcgggaggcggaaggaggcgccgaactggcggactacgaagagccgctgcaccagatcgggattacctccaccggccatcatattgtgacgccgcatttgctctcgagcaaatctctaagggaaaggccactggccgaaaggctcctttgtggctgagggccaaattccagaggttactgtttaagttagggtgctatattcaaaagaattgtggcaaatttctcgtggtgggactgctgatttttggggctttcgccgtcggtctgaaggcggctaacctggaaaccaacgtagaggaactctgggtagaagtaggagggagggtcagtcgggagctgaattatactcggcagaagattggggaggaggcgatgtttaatccccaattgatgatacagacccccaaagaagagggagccaacgtgctgacaacggaagcacttctgcaacacctggacagtgctcttcaggcctctagagtccacgtctatatgtacaatcggcaatggaagctggagcacctttgctacaaatccggcgagctgatcaccgagactggctatatggatcagatcatcgaatatctgtacccatgtctgataatcacacctttggattgcttttgggagggagcaaagctgcagagcggtaccgcctacttgctgggtaaaccccctttgaggtggacaaacttcgacccactcgagttcctggaggaattgaaaaaaatcaactaccaggtcgattcgtgggaagaaatgcttaataaagcggaagtggggcacggctacatggaccgcccttgcctgaaccctgccgatccagattgtcccgcaaccgctccgaataagaattctacaaagccccttgacatggccttagtactcaacggagggtgtcacggtttatcacggaaatacatgcattggcaagaagagctaattgtgggtggaaccgtgaagaacagcactggcaaactggtctcagcccatgctctgcagacaatgttccagctcatgacccccaagcaaatgtatgaacatttcaagggctatgagtatgtctcacacattaactggaatgaggacaaagctgcggcaatactcgaggcctggcagcggacctatgtggaggtggttcaccaaagcgtggcacagaattccacccagaaagtgctgtcttttaccactacgactctcgacgatatccttaagagtttctccgatgtgtcggtcattcgggtggcaagtggttatctgctaatgcttgcctacgcatgcctgactatgttacgttgggactgctccaaaagtcagggggctgtggggctagccggagtgctgctcgtggccctgtctgtggccgcagggctcggcctctgctcactgatcgggatatccttcaacgccgctacaacccaagtactgccattcctggcactgggagtcggtgtagacgatgtgtttctgttagcccacgcattttccgaaactggacagaataagcgcatcccctttgaggacagaaccggtgagtgtctgaaaaggaccggcgctagcgttgctctgacctcaatttccaacgtgaccgcgtttttcatggctgctctgattcctatccccgctctccgcgctttcagtcttcaagcagctgtggtggtggttttcaattttgcaatggtactgctgatcttcccagctattctctcaatggatctctacagaagggaggatcgtcgcctcgacattttctgttgcttcactagcccttgcgtgtcgcgcgttatacaagtcgagcctcaggcatataccgatacccacgataacacaagatactcgccccctcctccctactcttcccatagcttcgctcatgaaactcagatcaccatgcagagcacagtgcagctgcgaacagagtacgatccccacacccatgtatactacaccaccgccgagccacgttctgaaatctcggtgcagccagtcaccgtgacacaggacacactgtcttgccaatcgcctgaaagcaccagttccacccgcgacctgctttcacaattcagcgatagcagtcttcactgtcttgaacctccttgtaccaagtggactctttctagcttcgcagaaaagcactacgctccattcctgctgaagcctaaagccaaagttgtggtaatctttctgttcctgggactgctcggggtcagcctctacggcacgaccagagtgagagacggcttagacctgacagatatcgtccctcgcgagacaagagagtacgactttatcgccgctcaatttaagtatttctccttttacaacatgtatatagtgactcaaaaagctgattatccaaacattcagcacctgctgtacgatctccacaggtctttttccaacgttaaatacgtgatgctggaggagaacaagcagctccccaaaatgtggttgcactatttccgagactggctccaggggctgcaagatgctttcgacagtgactgggaaacggggaaaatcatgccaaacaactataaaaatgggtccgacgacggcgttcttgcatacaagctccttgtgcaaaccggatcccgagacaagcccattgacatctcacagcttacgaagcaaaggctcgtcgatgcagatggaattattaacccttctgcattctacatatacctcacagcatgggtgagcaatgaccccgtcgcctatgcggctagccaagcaaacatccgtccacaccggcctgaatgggttcacgataaagctgattacatgcctgagactcgtctgcgaatccctgctgctgagcccattgaatatgcacagtttcccttctatctgaacgggctccgagacactagtgattttgtcgaagcaatcgaaaaagtgaggaccatctgttcaaactatacctctctgggactcagcagctacccgaacggatacccgtttctgttttgggagcagtacatcgggctgaggcattggcttctgttatttatttccgttgttctggcctgcacctttctcgtgtgcgccgtctttttgctcaacccatggacagccggaatcatcgtcatggttctggcactgatgaccgtagagctgttcggaatgatgggactgattggcataaaactttctgctgtgcctgtggtgatcctgatcgccagcgtgggaatcggtgttgagttcacagtgcacgtcgccttagcttttttaactgctattggtgacaaaaatcgccgtgccgtgctggcgctggagcatatgtttgcgcctgtcctggacggcgctgtaagcacactcctgggcgtgcttatgttagccggaagcgaattcgacttcatcgtgagatactttttcgcggtgcttgccatcttgaccatcctgggagtgctgaacggcctcgtgcttttacccgtgctgctctctttcttcggaccgtaccctgaggtttccccagccaacggactgaatcggttgccaaccccttccccagaacctcctccaagcgtggtcaggttcgccatgccccctgggcatacacattctggtagtgattccagcgattctgagtatagctctcagacaaccgtgtcgggcctttcagaagagctgagacattatgaagctcagcagggagcgggaggccctgcccatcaggtgatcgtagaagccactgaaaatcctgtgttcgcccactctaccgtagtccatccagagtcacggcaccaccctccaagcaaccctcggcagcagcctcacctggacagcggttctctccctcctggcaggcaaggccagcaaccacgcagagaccccccacgggagggcctctggccaccgccataccgccctcgacgggacgctttcgagattagtactgaaggacattccggcccatccaaccgggcacggtggggcccaaggggagcccgttcacataaccctaggaatcctgcgtctaccgcgatgggaagttccgtgcccggttactgccagccaataactactgtgaccgccagtgcctccgtgaccgtcgctgttcaccctcctccggtacccggtccaggacgaaatccaaggggtggactgtgccctggctaccctgaaacggaccatggtttgttcgaagatcctcatgtacccttccacgttaggtgcgagagaagagattcgaaagtggaagtgattgagctccaggacgtggagtgcgaggaaaggcctagagggtcatcttctaattag

SEQ ID NO: 29987 - DNA, 1059 bp, synthetic construct
  misc_feature 1..1059: note = Description of Artificial Sequence: Synthetic coding sequence
  source 1..1059: mol_type = other DNA
aaagccgaagtggggcacgggtatatggatcggccttgtctgaatccagccgatcctgactgccccgcaacagccccaaataaaaacagcactaagcccctggatatggccctggtgctgaacggcggttgtcatggtttatcacggaagtacatgcattggcaagaagagttgattgtcgggggtactgtcaagaactcaactggtaagcttgtgtctgctcacgccctccaaacaatgtttcaattgatgacacccaagcagatgtacgaacacttcaaaggctacgagtacgtaagccatattaattggaacgaggataaggctgcagctatccttgaagcatggcagcgcacttacgtcgaggtggtccatcagagtgttgcgcagaactcgacgcagaaagtgttgtcattcaccacaaccacgctggacgacatcctcaagtccttctccgatgtgtcagtgatccgcgtggcaagtggctatcttctgatggtgcttcctttcctggctttgggtgttggggtagatgacgtgttcctgcttgcccacgcattttctgagacgggccaaaacaagaggataccattcgaagatcgtacaggcgaatgcctgaagcgcacaggggcatccgtagcccttaccagcatctccaacgtgactgcattcttcatggcggctctgatccccattcctgctctgcgcgctttcagtctccaggcagcggtggtagtggtatttaacttcgcaatggttctgctaatcttccccgcaatcctgtccatggacttatatagacgcgaggaccggagactggacattttctgctgttttacatctccttgcgtgtctagagtaatacaggtcgaacctcaggcctacaccgacacccatgacaacactcgctattcacccccacccccttactcctcacattctttcgcacacgaaactcagattaccatgcagtctactgtccagcttcggaccgaatatgaccctcacactcatgtatactatactaccgccgaaccgagatcggaaatatcagtatag

SEQ ID NO: 29988 - DNA, 4341 bp, synthetic construct
  misc_feature 1..4341: note = Description of Artificial Sequence: Synthetic coding sequence
  source 1..4341: mol_type = other DNA
atggaactcctgaaccggaatcgcctggtgattgtgagccccagatgtacacctcccaaagcatccggcggacccgcacgcagaggcttctacacattccggtctttttgcaaagatgggggtgggggagaggaggaagaggagaacggaggcgaggagaaagacgatcgcggagataaagaaacacgttctgataagggaaaggccaccggtagaaaagcgccactatggttgcgggcaaaattccaacgactgttgttcaaactgggatgctacatccagaaaaactgtggaaaattcctcgtggtgggattgttgatttttggggcattcgccgtgggtctaaaggcggctaaccttgaaactaatgtagaagaactctgggtggaagtggggggtcgcgtcagtagagagctcaactacactaggcagaaaattggggaagaagcaatgttcaatccccagttgatgattcagacaccgaaagaggagggcgcaaacgtgttaactaccgaggctctgctacaacacctggattcggctcttcaagccagtagggtccatgtgtacatgtacaaccggcagtggaagctagaacacctctgctataagagcggtgaactgatcacagagacgggctacatggaccagattatcgagtatctgtatccttgtctgatcattaccccactcgattgcttttgggagggcgctaagttacaatcgggcacggcctaccttctaggtaagcctcccctgcgttggacaaatttcgaccccctcgaatttttggaggagcttaaaaaaatcaactatcaagtggatagttgggaagaaatgttaaacaaggctgaagtgggacatggctacatggatagaccctgcctgaatccagccgatccggattgccccgcaactgccccaaacaaaaactccactaagccattggatatggcactcgtgctgaacgggggatgccacgggctatcgaggaagtacatgcattggcaggaagaattaattgtcggcggaaccgtgaagaactctacgggaaagttggtgtcggcacatgccttgcaaaccatgtttcagctgatgacgcctaagcagatgtacgagcattttaaaggctatgaatatgtaagtcatattaactggaacgaagataaggccgctgcgatattagaggcctggcaacgcacctacgtggaggtcgtacatcagtcggtggcgcagaattctacccagaaggtgctctcctttacgactactactcttgacgacatcctcaaaagtttcagtgacgtgtctgtgatcagagtcgccagtgggtatctcttgatgctagcctatgcctgtctaacgatgttacgctgggattgctcgaagagccagggagcagtgggactggcgggtgtgttacttgttgcactgtctgtggccgctggactaggtctatgcagtctcatcggaatttcattcaacgcagctaccacccaggtactgccttttctggctcttggagtcggcgtagatgatgtatttctgcttgcccacgccttctccgagaccggccaaaataagcgtatcccctttgaggatcggaccggggagtgtctaaaacggacaggagcaagcgtggccctgacatcaatcagtaatgttacggcattttttatggccgcactgattcccatcccagccctgcgcgcattctccttgcaggccgctgttgtggtcgtgtttaactttgccatggtgttgctgatcttccccgcaattctctcgatggatttgtacagaagagaggaccgtcgcctggacatattttgctgctttacaagtccctgtgttagtagggtgattcaggtcgagccccaggcttataccgacacacatgacaacacccgatattccccccctccaccctattcttctcactcattcgcacacgaaacccagatcacaatgcaaagcacggtccagcttcgaaccgagtacgatcctcacacacacgtctactacaccacagcagaacctaggtccgagatcagcgtacagccggtgaccgttacacaggataccttatcttgccagagcccggagagcacctctagcaccagggacttactgtcccaattcagtgatagtagtttgcattgcctggagcctccgtgcaccaaatggaccctgtccagcttcgcggagaagcattatgcaccctttttgctgaaacccaaggctaaggttgtcgtgatttttcttttcctcggtctgcttggagtgagcttatatggaaccacaagggtcagagacggactggatctgaccgatattgtgcctagggagacacgggagtacgatttcattgcagcacagttcaagtacttttctttttacaacatgtatatcgtgacgcagaaggccgattaccccaacatacagcacctgttatacgacctgcaccgctcttttagcaacgtgaagtatgttatgctggaagagaacaagcagttacccaagatgtggttgcattatttcagggactggctgcaaggtctccaagatgcttttgacagcgattgggagaccgggaagatcatgcctaacaattataagaacggatccgatgatggcgttctggcatataagctgcttgtccaaaccggcagcagggataagccaatagacatttcacagttgaccaaacagcgcctagttgacgcagatggtatcattaacccctctgctttttacatttacttaaccgcttgggtcagcaatgacccggtggcttacgccgcttcacaggcaaatataagacctcaccggccagagtgggtgcacgataaagctgattatatgcctgagacccgtctccgaatcccggcagctgagcctatcgagtacgctcagttcccattttacctcaacggactccgagataccagtgacttcgttgaggccatcgaaaaagtacggaccatctgcagcaattacaccagtctcgggctatcttcctaccccaatggatacccattcctgttctgggagcagtatatcggcctgaggcattggctcctgttgttcattagcgtcgtgctcgcctgcaccttcctggtctgtgctgtgttcctattaaacccgtggaccgctggcatcatcgttatggtgctggctctgatgacggtggaactatttggcatgatgggattgattggcattaaactgtccgctgttcccgtcgtgatcctgatcgcaagcgtggggattggagtcgagttcactgtgcacgttgccctagccttcctcactgccattggagacaagaacagacgcgcagttctagcgctggaacacatgttcgcgcctgtgctggacggggctgtgtctactctcctgggagttctaatgcttgctggatccgagttcgactttatcgtgaggtattttttcgcagtccttgcaattctcacgatccttggagtcctcaacgggttggtgctccttccggtgctactgagcttctttggaccatatcctgaggtgagccccgctaacggcctgaacagactgcccacaccatcccccgagccaccaccatcagtggtccgattcgctatgcctccaggccatactcactctggcagtgattcctccgactctgaatacagcagccaaacaacagtctccggattgtccgaggaattgagacactatgaagcccagcagggagctggaggccctgctcaccaggtaatagtggaagccacagaaaatccagtgttcgctcattctactgtggtgcatcccgaatcccgccaccatccgccatccaacccacgccagcagccccacctggattctggcagcttgccccctggccgtcagggacaacagcccaggagggacccaccacgggagggtctgtggccaccaccttacagacccagacgagatgccttcgagatttcaactgagggccactctggaccgtccaacagagcgagatgggggccacggggagcccgaagtcacaacccgagaaacccggcatcaacagcaatgggttctagcgtgccagggtactgccagcccatcactaccgtaacagcaagcgcctcagtcactgtggctgtgcatcctcctcctgttcccggacccggtcggaaccctagaggcggtctatgtcccggatatcccgaaacagatcatgggcttttcgaggacccgcacgtgcctttccatgtgaggtgtgaacggcgagacagcaaagtggaggtgattgaactgcaggacgtggagtgcgaagagaggcctcgtggctcttcttccaattag

SEQ ID NO: 29989 - DNA, 1758 bp, synthetic construct
  misc_feature 1..1758: note = Description of Artificial Sequence: Synthetic coding sequence
  source 1..1758: mol_type = other DNA
ccctgtcgaaaatcctccgccttgaatagtcctaaggccgctgtggtggtggtgtttaactttgcaatggttctgctgatcttcccggctatactctctatggatttgtatcggagagaggatcgcagacttgacatattctgctgtttcacctctccgtgtgtgtctcgcgtaattcaggtcgaaccccaggcctataccgacacacacgataacacaagatatagtccaccccctccttatagctcccactcttttgcacatgaaacacagataaccatgcagtccactgtacagctgcgcacagagtatgatccccacacccacgtgtattatactacagccgagccaagaagtgagatctcggttcagcccgtgacggtgactcaggataccctgtcctgtcagagcccggagagtacctcatctacccgagacctcctgagtcagttttctgacagctctttgcattgtcttgaaccaccgtgcaccaagtggaccctgagctctttcgccgaaaagcactacgccccttttctcctgaagccaaaagctaaggtggtggtcatcttcttgtttctcggcctgttaggtgtgagtctctatggaacaacacgtgtgcgcgacgggttggacttaaccgacatcgtcccaagggaaaccagggaatatgatttcattgctgcccagttcaaatatttctctttttacaacatgtacatcgtgacacagaaggccgactatcctaacattcaacacctgctctacgaccttcacaggtcattctccaatgtgaaatatgtcatgcttgaggaaaataagcaactgcctaagatgtggctccactactttcgcgactggttacagggacttcaagacgccttcgatagtgactgggaaaccggtaaaattatgccgaataactacaagaatggttctgacgacggtgtgctggcgtacaaactgctggttcaaacaggttctcgagataagcccattgacatcagccagctcacaaagcagagactcgtggacgcagacggaattatcaacccctcagcgttctacatttacttaaccgcttgggtttcaaacgatccggtcgcttacgccgcatcccaggctaacatcaggcctcatcgccctgagtgggtccatgataaagctgattatatgccagagacccgcctgcgcataccggcagccgagcctatagagtatgctcagtttccattttatcttaacggcctccgagacaccagtgactttgtggaagctatagagaaggtgagaacaatttgctccaactatacaagcctaggattgtcttcgtatcccaatgggtatcccttcttgttctgggaacagtatatagggctgcgacactggctactactttttataagcgtggtgttggcctgcacctttttggtttgtgccgtattcttactgaatccatggaccgctggaatcatcgtcatggtcttggccctgatgacagtcgaactctttggcatgatgggcttgatcggcattaagttgtcagcagtaccggtggtgattctcattgcttccgtagggattggtgtggagtttacagtgcatgttgctcttgcattccttacagccattggcgacaagaatcgtagagccgtgctagctctcgaacatatgtttgcacccgtgctcgatggcgctgtcagcacactgcttggggttctcatgctggcaggcagtgagtttgactttatcgtgtag

SEQ ID NO: 29990 - DNA, 729 bp, synthetic construct
  misc_feature 1..729: note = Description of Artificial Sequence: Synthetic coding sequence
  source 1..729: mol_type = other DNA
atgcctccaggccacacccattcgggcagcgattccagcgatagcgagtacagtagccagacaacggtcagcggcctgagtgaggaacttagacactatgaggcacagcagggggctggcggtccagcacaccaggtgattgtcgaagccaccgaaaatccagtcttcgctcattcaactgtagtccacccagagagtaggcatcacccaccctccaatcccagacagcagccacatctcgattctggaagcctaccccctggacggcagggtcagcagccaagaagggaccccccaagagaagggttatggcctccaccctaccgacctcggagggatgcatttgaaatttccaccgaagggcatagcggcccatctaatcgggcaagatgggggcctcgcggagcaaggtctcacaacccaagaaaccctgctagtacggccatggggtccagtgtgccgggatactgccagccaataacaaccgtgaccgcctcggctagcgtgaccgtggccgttcacccccctcccgtacctggccctggcaggaacccacggggaggcctgtgtcctggttacccagagacagaccacgggctgttcgaggatcccacatgcctgtctaccagtggcgttcggggaggcatacgaagatggaagtctttaagctgccgaacctggaatgcccgtagaggtccaggcgaagcggcaccaaccgaaggagattag

SEQ ID NO: 29991 - DNA, 1461 bp, synthetic construct
  misc_feature 1..1461: note = Description of Artificial Sequence: Synthetic coding sequence
  source 1..1461: mol_type = other DNA
ggaaaagccactggcaggaaggctcctctctggctgcgggcaaaatttcagagactgctgtttaagcttggctgctatatccagaaaaattgtgggaaatttctggttgtgggactattgattttcggagccttcgccgtaggtcttaaggccgcaaacctcgaaaccaatgtagaagagctgtgggtcgaagtcggcggacgagtttcaagagagctgaattacacaaggcagaaaattggagaagaagccatgtttaatccacagttgatgattcagactcctaaagaggagggcgctaatgtgctgactaccgaggctctgctccagcatttggactccgccctccaagcttccagggtccacgtgtatatgtataatcggggtaaaccccctctgagatggacaaacttcgatccgctggaattcctcgaggagctcaaaaagattaactatcaagtggatagctgggaagaaatgctgaacaaggccgaggtgggccatggctatatggataggccatgtctcaatcccgctgaccccgattgtccagcgaccgctccaaataagaacagtacgaagccactagacatggccctcgttctgaatggtggctgccacggtctaagcaggaagtacatgcactggcaagaggagctcatcgtaggcggtacagtcaagaactctaccggcaagttggtgagcgctcacgctctgcaaactatgttccagttgatgacgccgaaacaaatgtatgaacacttcaaagggtatgaatatgtttcccacataaactggaatgaagacaaggctgctgccattctggaggcttggcagcggacttatgtggaagtcgtccaccagagtgttgctcaaaattctacgcagaaggtattgagctttacaactacaactctggacgacattttgaagagtttcagcgacgtgtccgtgattcgcgtggccagcggatacttgctgatgctcgcctacgcatgcctgaccatgttgaggtgggactgcagcaagtcccagggcgcagtagggctggctggtgtgctactagttgccctgagcgtggccgctggattggggctctgctctttgattggtatcagcttcaacgccgcaacaactcaggttctcccattcctggcactcggagtgggggtggatgacgtgttcttgctggcgcacgcattttcagaaacaggtcaaaacaagcgaatcccattcgaggataggacgggggaatgtctgaagcgaacgggggcatcggtggcactcacatcgatctccaacgtcaccgctttcttcatggctgccctgatccccatccccgctctgagggcttttagcttacaatacatcttgatggcccataggggaaggctttcattcaacgacactttatggtgcggaggccttaaaagctacatgcgctttccctacgaagaatag

SEQ ID NO: 29992 - DNA, 3891 bp, synthetic construct
  misc_feature 1..3891: note = Description of Artificial Sequence: Synthetic coding sequence
  source 1..3891: mol_type = other DNA
atgtttaatcctcaactcatgatccagactccaaaggaggagggggcaaacgttcttacaactgaagcactcttacagcaccttgactcagcgctccaggcctcccgggttcatgtgtatatgtacaacagacagtggaagctcgagcatctgtgctacaagagcggagaattgatcaccgagactggttacatggaccagatcatagagtatctctatccttgtctcattattacaccccttgactgcttctgggagggtgccaagctccagagcggcacagcttatctgctgggaaagccccctttgcgctggacaaatttcgaccccctcgagtttttggaagaactcaaaaaaataaactaccaggttgacagctgggaggagatgctcaacaaagcagaggtagggcatggttacatggataggccctgcctgaatcctgccgatccagactgtcctgccacagcgcctaacaaaaattctaccaagcccctggacatggctttagtgctaaacggaggatgtcatggtctctctcgcaaatatatgcactggcaggaggaactgatcgtggggggtacggttaagaattcaacaggcaagctagtctcagctcacgctcttcagactatgttccaactgatgacgcccaaacaaatgtacgagcactttaagggctatgaatacgtgagtcatattaattggaatgaggataaggccgcagctattctggaggcatggcagcgtacatacgtcgaagtggtccaccaaagcgtggcgcaaaatagcacccagaaagttctgtcctttactactaccacgttagatgacattctgaaatcattttcagatgtgtctgttatccgcgtcgctagtggatatctcctcatgttggcctatgcttgtctgaccatgctgagatgggattgcagcaaatctcaaggcgcagtggggcttgccggagtgctgttggtcgctttatctgtggctgcgggactgggactatgtagccttataggaatcagcttcaacgccgcaaccacacaggtgctaccttttttggccctgggtgttggcgtggacgatgtatttctgttagcccacgcttttagtgagaccggccagaacaaaagaattcctttcgaagaccgcacaggagagtgtctgaagcgcacgggtgcttcggtagcactgacttccatctccaacgtgactgccttctttatggcagcccttatcccgattcccgcattgcgagcatttagcctgcaggccgctgtagtggtggtcttcaatttcgcaatggtgcttttgatctttcctgccattctttccatggacctttacaggagagaggatcggagactagatatcttctgttgctttacgagtccctgcgtttcaagggtcattcaggtggagcctcaggcctacaccgacacgcacgataacacccgctattccccaccacctccatatagctcgcactcttttgcccacgaaacacaaatcactatgcagagcacggtccagctgcgcactgaatatgaccctcacacacacgtctactatacaaccgctgagccaagatcagagataagcgtgcaacctgtgacagtaacccaggatacactgtcttgccagtcccccgagtctacatcttcaacacgcgacctgctgtcccagtttagtgacagttcattgcactgcctggagcctccttgcacgaaatggacactgtcttcttttgcagagaaacattacgctcccttcctgctaaaaccgaaagcgaaagtagtagtcatctttttgtttttgggccttcttggcgtgagtctttacggtacgactcgcgtgcgtgacggtctcgacctaaccgacatagtgcccagagagactcgcgagtatgatttcattgccgcacagtttaaatatttttccttctataatatgtacatcgtgacccagaaagctgattatccaaacatacagcatctgctctacgacctgcatcggagcttcagcaacgtcaagtatgtaatgctggaggagaacaagcagctgccgaagatgtggctgcattacttccgcgattggctgcaaggcctgcaagatgccttcgacagcgactgggaaaccgggaagattatgcccaataattataagaacggaagcgacgatggtgtccttgcctacaagcttctcgtgcagacaggtagcagggataaacccatcgatatttcccagttgactaaacaaaggctagttgacgcagatgggatcatcaacccctctgcgttctatatatacttgaccgcttgggtcagtaatgatcctgttgcctacgcggctagccaggccaacatcaggcctcatcgaccagagtgggttcacgacaaggctgattacatgcctgaaactagattaaggattccagctgcggagcctatagagtacgcccagtttcctttctatctcaatgggctgcgtgatacatccgattttgtcgaagctattgagaaagtccgtacaatctgcagcaattacactagcctgggactcagcagctatcccaatggctaccccttcttattttgggaacagtatataggcctgcggcactggttgttactgttcatttcggtggtcttagcctgtaccttcctggtgtgcgccgtctttctgttgaatccgtggacagcgggtatcatcgtgatggtgttagctctgatgaccgtggaattatttgggatgatgggactcatcggcataaagctcagtgctgtgcctgtggtgattttgattgcttctgttgggatcggggtggagttcacagtccatgtggcactggccttcctgaccgccattggagataaaaatcggagggccgtgctcgcgcttgagcacatgttcgcaccagtactggacggagctgtgagtactctccttggagtactgatgctggctggaagcgaatttgactttatagtcagatatttttttgctgttcttgctatccttacaattctgggggtcctcaatggcctcgtactcctgccagtccttctcagcttcttcggaccctacccagaggttagtccggcaaatggactcaatcggctcccgaccccatcgcccgaacccccaccgtccgtggtgcggtttgcgatgccgcctgggcatactcacagcggctcggattcgagtgattccgaatactctagtcagaccaccgtgagtggactgtcggaagagctgcgccattacgaagcacagcaaggggcagggggtccagcgcaccaggtgattgttgaagctaccgagaacccggtgttcgctcactcgaccgtggtgcatcccgaaagccgccaccaccctccctccaatcctcggcagcagcctcatctcgactctgggtctctacctccaggaaggcaaggtcagcagccgcgtagagatcccccaagggaaggactgtggccgcctccataccgtcctaggagggatgctttcgaaatttctacagagggccacagtggcccatctaacagggcgaggtgggggccacgcggagctcggtcccacaatccgcgaaatcctgcctcaactgccatgggaagcagtgtccccggatattgccagccaattacaaccgtgaccgccagtgcctctgtcacggtggccgtccatcctccccctgtgccaggccctgggagaaacccacgcggaggactttgtcctggataccccgaaaccgaccatggcctctttgaagatcctcatgtaccatttcatgtccggtgcgaaagaagggattccaaggttgaggtcattgagctgcaggatgttgagtgcgaagagcgacctcgcggttctagctctaattag

SEQ ID NO: 29993 - DNA, 3891 bp, synthetic construct
  misc_feature 1..3891: note = Description of Artificial Sequence: Synthetic coding sequence
  source 1..3891: mol_type = other DNA
atgtttaaccctcagttgatgatacaaactccaaaggaggagggagccaatgtgttgacaacagaagcactgttacagcatctagacagtgccctccaagcaagcagagtgcacgtttacatgtataatcgccagtggaagctggagcatctttgctataaatcaggtgagctcataacagaaacagggtacatggatcaaatcattgaatatctctatccgtgtttgataatcacacctctcgattgcttctgggagggggctaagttgcagtcgggaactgcatacctcctgggcaagcctcccctccgctggaccaattttgacccgctcgaatttctcgaagagctaaaaaagattaactaccaggtggatagctgggaagagatgctcaataaggcagaagtgggtcacggatacatggaccgcccttgcctgaaccccgcagatccagactgccctgccacagctcccaataaaaattcaaccaaacctctggacatggctcttgtactcaacggcggatgtcatggactcagccgaaaatacatgcattggcaagaggaattgatcgtagggggaaccgtgaaaaatagcactggaaaactcgtgtctgctcatgcccttcaaaccatgttccagttgatgacacctaaacaaatgtatgaacactttaaaggctacgaatacgtttcacacatcaattggaacgaggacaaagcggctgccatccttgaagcctggcaacggacctacgtcgaagtggttcatcagagtgtggcccagaatagtacccagaaagtgctgtcgttcaccaccacaacactcgatgacattttaaagagcttcagcgacgtctcagtgatcagagtcgctagcggatacttgcttatgctagcctatgcatgcctcacaatgttgcgctgggattgcagcaagtctcagggcgcagtgggactagccggagtgctgcttgtggcactcagcgtggctgcaggactggggttatgcagcctgatcgggatatcattcaatgcagctactacacaggtgctcccatttctagccttaggagtgggggtggacgacgtcttcctgttagcccacgccttttctgagaccggccagaacaagcgtatacctttcgaagataggaccggggagtgtcttaagcgaactggggcatccgtggctctgacgtccatctctaacgttaccgccttttttatggcagccctcattccaatccctgccctcagggccttttccctgcaggccgctgtagttgtcgtcttcaactttgcaatggtgctcctaatttttcccgcaatcctaagcatggatctgtaccgaagggaagatcgcagactggatatcttttgttgtttcactagcccctgtgtgtctagggtcattcaggtggaaccacaggcatacaccgatacacacgacaatacccgttactcaccaccccctccgtattcctctcactcgtttgcccacgagactcagattacaatgcaatccactgtgcaactgcgcacagaatacgatccccacacccacgtttactacaccacggccgagcctcgatctgagatttccgtccagccggtgactgttacccaagatactttaagttgccagtcacccgagtccaccagcagtacaagggacctgctgtcccagttcagtgacagttctctccactgtctagagccaccgtgtacaaagtggaccttatctagcttcgccgagaagcactatgctccgtttctgcttaaaccgaaggccaaagttgtcgttattttcctcttccttgggctgctgggggtgagcctgtacggtaccacccgggtgcgcgacggactagacctgaccgacatagtgcctcgcgagactcgcgaatacgatttcatcgcagctcagttcaagtacttctctttctataacatgtatatcgtgacccagaaggccgattatccaaacatccaacatctgttgtacgatctgcacaggagcttttccaatgtgaaatatgtgatgcttgaagagaataaacagttgccgaagatgtggttgcactatttcagggactggctgcagggactgcaggacgcatttgattcggattgggagactggtaaaatcatgcccaacaactataaaaacggaagcgacgacggagtgctggcctataaactcttagtacagactggctcacgggacaagccgatcgacattagtcagctcacaaagcagcggctggtggacgctgatgggatcatcaacccaagtgccttctatatttacctgactgcctgggtgagtaatgatccagttgcctatgcggcatcacaggccaatattaggcctcataggcctgaatgggttcatgataaggcagactacatgcccgagaccaggttaagaattcctgccgcagaaccgattgaatacgcccaattcccattttaccttaatggcttgcgagatacaagcgacttcgtcgaggccatagagaaagtgcggaccatttgcagcaactatacctcactgggactgagctcatatcccaatggttaccccttcttattttgggaacaatacattgggttgagacactggctcctgttattcatttcggtcgtcctggcttgtacgttcctggtgtgcgcagtctttttgctaaatccatggacagctggtattatcgtgatggtcttggccctcatgactgtcgagctttttggaatgatgggcttgataggaattaaattgagcgcagtgccagttgtgatcctgatcgcatccgttggcattggggtggaattcacggtgcacgtagccctcgcattccttacagccatcggggacaaaaaccggagagctgtgcttgcactggagcacatgttcgcaccagtgctcgatggtgctgtgtccacactgctgggtgttttaatgcttgccggttcagaatttgactttatcgtcaggtatttctttgctgtgttggcgattctgactatcctgggagtgctgaatggccttgtgctactaccggtgttgttatcattctttgggccataccccgaggtgtcccccgctaacggccttaatcgattgcccactccaagccctgaacccccaccatcagtcgtgaggttcgcaatgccacctggacacacccactcaggatcagacagctctgactccgagtattctagtcagactaccgtgtccggactgtcggaggaactgcggcattacgaagcccaacaaggagcaggcggacctgctcatcaggttatagtcgaagccacggagaaccccgttttcgcccattccacagtagtgcatccggaatcgaggcaccaccctccttccaaccccaggcagcagcctcatctcgacagtgggtctctacccccaggccgacagggccaacaacccagacgtgatcctcctcgcgagggactatggcctcccccataccggccacgtcgggacgctttcgagataagcacagaaggacacagcgggccatccaaccgagctcgctggggccctaggggcgcaaggagtcacaaccccaggaaccccgcatcaaccgccatgggctctagcgtaccaggttattgccagccaattaccaccgtcaccgccagcgcgagtgtaacggtcgctgtgcatcctcctccagtgcctggcccagggcgaaacccccgaggcggtctgtgcccaggctaccctgagacagaccacggactttttgaagatccacatgtaccttttcacgttagatgcgagaggcgggatagcaaggtcgaggtaatagaactgcaggatgttgagtgcgaggagaggcccagaggcagcagctccaactag

SEQ ID NO: 29994 - DNA, 3891 bp, synthetic construct
  misc_feature 1..3891: note = Description of Artificial Sequence: Synthetic coding sequence
  source 1..3891: mol_type = other DNA
atgttcaatccacaactgatgattcaaacacccaaggaggagggggctaatgtattgactactgaagccctcctgcaacacctcgactccgctttgcaggcttctcgcgttcacgtctatatgtacaaccggcagtggaaactggagcacctgtgctataagagcggtgagttaatcactgaaacagggtacatggaccagattattgaatacctttatccatgtctcattataacgcctctcgactgcttctgggagggtgccaagctgcaatcaggcaccgcatatcttctgggcaaaccccctcttcggtggacaaactttgaccccctggagttccttgaggaactgaagaaaataaattaccaagtcgatagctgggaagagatgttgaataaggcagaggtcggacatggctatatggataggccctgcctgaatcccgcagaccccgactgtcctgccacagctcccaacaagaattcgacgaagccgctggacatggcccttgtcctcaacgggggatgtcacgggctcagccgcaaatacatgcattggcaggaagagctcatcgtcgggggaactgtgaaaaactctactgggaaattagtctctgcccacgccctacagactatgttccagctgatgacccccaaacaaatgtacgaacattttaaaggttacgagtatgtctcccatatcaattggaatgaggataaagctgcagctatcttagaggcttggcagcgcacgtacgtggaggtggtccatcaatcagtcgctcaaaactccacccagaaagttctgtctttcactactacaacactcgacgatatcttaaaaagcttctccgacgtatccgttatcagggttgcttcagggtacctgctcatgttagcttacgcatgtcttacaatgctgcgatgggattgtagcaagtcccagggagcagtcggactggccggagttctgcttgttgcattatccgtggctgctggcctcggattgtgctctcttatcggcatctccttcaacgccgctaccacccaggtgctgccattcctggctttgggcgtgggggttgacgacgtgttcctattggcccatgcattctctgagacaggtcagaacaaaagaatcccatttgaagacagaaccggcgagtgcctcaaacgaactggggcatcagtagccctgacaagtatctctaatgtcaccgcattctttatggccgcactgatccccatacctgctctgcgcgcatttagtctgcaggcagcagtggttgtggtatttaacttcgcaatggtgctgcttattttcccagccatcctgtctatggatctgtacagacgggaagaccggcgactggatattttttgctgtttcactagtccatgcgtgtcacgtgtgattcaagttgaaccccaggcttacacagatactcatgataacacccgttatagcccccctccaccatacagctcacattccttcgcacatgagacccaaatcactatgcagagcaccgttcaactcagaaccgagtacgacccgcatacgcatgtctattacacaaccgccgagccacggagcgaaatttcagtccagccggtcactgtgacgcaagataccctgtcgtgtcagtccccagagtccacctcttccacccgagacttattgtctcagttcagcgatagctcgctacattgtcttgaaccgccttgcaccaaatggacactgtcctcatttgctgaaaagcactacgcgcctttcctcctgaaaccaaaagccaaggtggtcgtgatctttctatttctgggtctcctgggagttagcctttacggcaccaccagggtgagagatggactcgatctcaccgacatcgtgcctcgagaaacgcgggagtacgacttcatcgctgctcagttcaagtatttttccttctataatatgtacatcgttacccagaaagccgactatcccaacatccagcacttgttatatgatctgcatcggtcgtttagcaacgtgaagtacgtgatgcttgaggagaataagcagctcccaaagatgtggttacattatttccgggattggttacaggggttacaggacgcctttgatagtgattgggaaaccggaaaaattatgcccaacaattacaagaacggttcagatgacggggtgctggcttataagcttctggtccagacgggcagtcgagataagccgatcgacatctcacagttaaccaagcagcggctggttgatgcagatgggataattaacccatccgctttttacatttatctgacagcctgggtctcaaacgacccagtggcgtacgccgctagccaagccaacatcagaccgcaccggcctgagtgggtgcacgacaaagccgattatatgcctgaaacccgactgcggatccctgctgctgaacctattgaatacgcacagtttcccttttatctgaatggtctgcgggatacttcggactttgtggaggcaattgaaaaagtgcgaacaatctgttcaaactatactagtctgggcctcagcagttatcccaacggatacccctttcttttctgggagcagtatataggcctgagacactggctcctgttatttatttccgtggtccttgcctgcacctttctggtgtgtgccgtgtttctgctaaatccatggaccgcgggtattatcgttatggtcttggccctcatgactgtggaactgtttgggatgatgggcctgattgggattaaactgagtgctgtgcctgtggtgattctaatagccagtgtgggcatcggggttgaattcacggtgcatgttgccctggcattcttgacggcaattggcgacaagaaccggagggctgtgctggcactcgagcatatgtttgcacctgtgctggacggagccgtgtctactttattgggtgtcctcatgttggctggcagcgaattcgattttattgtacgttatttctttgccgtgctggctatcctgaccatattgggggtattgaacggccttgtccttttacccgtgctcctgtcattctttgggccataccccgaagtgagccccgctaacggactgaaccggcttccaacgccctcccctgagcctcctccaagcgtcgtgcggtttgctatgcctcccggtcacacccatagcggtagcgacagctctgacagcgagtatagctctcagaccaccgtctctgggctcagcgaggagctgcggcactacgaggcacagcaaggtgcgggtggccctgcacatcaagtcatagtagaggcaaccgaaaatcccgtttttgcacattccacagtggtgcatcctgaatctcggcatcatcccccatcgaacccaaggcaacaaccgcatctcgactctggctctctgcctcctggacgccaggggcagcagccgaggcgcgatccccctagagagggcctatggcctcctccttacaggcccaggcgcgatgccttcgaaatctcaactgagggtcactccggaccgagcaatcgggcacgctggggtcctcggggagcaagatctcataatcccagaaatccagcatccacagctatgggcagttcggttcccggttactgccagcctatcacaactgtgactgcttctgcgtctgttacagtggccgtgcaccctcctcccgtgccgggtccaggtagaaaccctcggggagggctgtgcccaggttatccagagactgaccatggtctatttgaagatccccatgtcccatttcatgtacggtgtgagcggcgagactccaaggtggaagtgatcgagctccaggatgtcgaatgtgaggaaagaccgcgtggatcttctagtaattag

SEQ ID NO: 29995 - DNA, 4146 bp, synthetic construct
  misc_feature 1..4146: note = Description of Artificial Sequence: Synthetic coding sequence
  source 1..4146: mol_type = other DNA
atgggtaaggccacaggccgtaaggctcctctttggttgcgagctaagttccagcgtctgctatttaaactgggctgctacatccagaagaattgtggtaagtttctggtggtgggcttgctaatctttggcgcatttgctgtgggcctaaaggctgccaatcttgaaacaaatgtggaggagctttgggtggaagtggggggtcgcgttagtcgggaactgaactatactaggcagaaaattggcgaagaggccatgttcaaccctcaactcatgatccagacacccaaagaggagggcgctaatgtcctgactacagaggccctgctccaacacctggacagcgcactgcaagcctcaagagtccacgtttacatgtacaaccgccagtggaaacttgaacatttgtgttacaagagcggcgagctgatcacagaaaccggttacatggatcaaatcattgaatacctctacccatgcctgataattactcccctggactgtttctgggagggcgctaaattacagtctgggacagcctacttgctggggaagcccccactaagatggactaactttgaccctctggagttcctggaggaattgaaaaaaatcaattaccaggtcgattcctgggaagagatgttgaataaagccgaggtcggccacggatatatggatcgcccttgcctgaatcccgcagacccagattgccctgctactgcaccaaataaaaattcaactaagccactggacatggcgctggttttgaacggaggctgccacggtctatcaaggaagtacatgcactggcaggaggaactgatagtcggcggtactgtgaagaactctacgggtaagctggtctccgctcacgcgctgcagactatgttccagctgatgactccgaaacaaatgtatgaacactttaagggttatgaatacgtatcccacattaattggaatgaggataaggcggctgcaatcctcgaggcatggcagcggacctacgttgaagtggtgcatcagtccgtggcgcagaactctactcagaaagtgctcagcttcactacgactaccctcgatgatattctgaaatctttcagtgatgtgtctgtgattagggtggcctcaggctacctcttgatgcttgcttacgcatgcctgactatgttgcggtgggactgctcgaagtcccaaggtgcagtcggcttggctggggtgcttcttgtcgccctgtctgttgccgctggtctagggctatgttcactcattggtatttctttcaatgccgcaacgacacaggtgttaccttttttagccctaggggtgggtgtggatgacgtttttctactcgcccatgcattcagcgagactggacagaacaagcgcattcccttcgaggatagaaccggcgagtgcctgaaacgcaccggagctagcgttgccctcacgtccatctctaatgtgacagcttttttcatggctgctcttataccaatacccgctctgagggccttcagtctgcaagcagctgtcgtagttgtgtttaattttgctatggtgctgctcatctttcctgcaatcctgtctatggatttataccggcgagaggaccgtcggctcgatatcttttgttgctttacttcgccatgtgtgagccgcgtcatacaggtggagccccaggcttatacagatacccatgataatactaggtacagccctccccctccatatagtagtcacagcttcgcacatgagactcagatcaccatgcagtccaccgtacagttacggaccgagtacgatccgcatacccatgtgtactacaccacggccgaacccagaagtgagatctctgtgcagccagtgaccgtgactcaggacacgctttcatgccaaagcccagagtctaccagttcaacgagggacctcctgagccagtttagcgatagttcacttcactgtctggagcctccctgcactaagtggacattgagctcttttgctgagaaacactatgcgccatttcttctgaaacccaaggcaaaggtggtagtgatttttctgttccttgggctgcttggagttagtctctatggaaccacacgtgttcgcgatgggctcgacctcacagatatcgtgccacgcgagacccgggagtacgattttattgccgcacagtttaaatatttctcattttacaatatgtatattgtcacgcagaaagcagattatcccaacattcaacatctactgtacgacctgcataggagcttctccaatgtgaaatacgtgatgctagaagagaacaaacagctaccaaaaatgtggcttcactatttccgggactggctacagggccttcaggatgccttcgactcagactgggaaactgggaaaatcatgccaaataactataaaaatggttcagatgatggagtgctggcttacaaactgctcgtccaaacaggcagcagagacaagcctatagatatcagccagctcacaaagcagagattggtggacgccgacggaattatcaacccctccgctttctatatctatttgactgcttgggttagtaacgatcctgtggcgtatgcagctagccaagccaatattagaccccatagaccagagtgggtgcacgacaaggccgactatatgcctgaaacccgtctcaggataccggctgcagagcctatcgagtatgcccaatttccattctatttgaatggacttcgtgacaccagcgatttcgtggaagcgattgagaaggtccggacgatctgctccaactacacttcattaggtctctcaagctaccctaacggttatccatttctcttctgggagcaatacattggccttcgccactggcttctgctcttcatttcagtggtgctggcttgcaccttcctggtgtgcgccgtgtttcttttgaatccctggaccgctgggatcatcgtgatggtgctcgcactcatgacagtcgagttgtttggaatgatggggctcatcggcattaaactcagcgccgtcccagtggttatcttgatcgctagcgtcggcatcggggttgagtttacagtgcacgtagccctcgcttttttaacggcaatcggggacaagaaccgtagagcagtcctggccctcgaacatatgtttgctcctgtgctggacggtgccgtcagtactttgctcggcgttctgatgctggcgggttctgagtttgattttattgttagatacttcttcgccgttctggccatcctgaccatcctgggggtgttaaatggcctcgtactgctacccgtgcttctgagcttcttcggcccttaccccgaggtttctcctgccaatggtctgaatcggctgcccaccccttcccccgagcccccaccaagtgtagttcgcttcgcaatgcctcccggacacacccactccggtagcgattctagtgactccgaatacagctcccagacgacagtcagcggactgtcggaggagctcaggcactacgaggcccagcagggggctgggggtccagcccatcaagtcatcgttgaagcgacagagaatccggttttcgcgcactccacagttgtacatcccgagtcaagacaccacccgcctagcaacccgagacaacagcctcatttagacagcggctcgctaccccctggaaggcaggggcagcagcctcgaagggatcctccacgcgaggggctgtggccgccaccttaccgccctcgcagagacgcattcgaaatctctaccgaaggtcacagtgggccatctaatcgggcaagatggggcccacgcggagcacggtctcacaacccccgtaatcctgcctcaaccgcaatgggaagctctgtgcccggttattgccagcctattactactgttaccgcgtctgcctcggtcaccgtcgctgtgcatcctccccctgtgcctggacccggtaggaacccccgaggaggcctgtgcccagggtaccctgagacagatcacggactcttcgaagaccctcacgtgccttttcatgtacggtgcgagaggcgcgacagcaaagtagaggttattgagttgcaggacgtggagtgtgaggaaagaccacggggaagctcttcaaattag

SEQ ID NO: 29996 - DNA, 4146 bp, synthetic construct
  misc_feature 1..4146: note = Description of Artificial Sequence: Synthetic coding sequence
  source 1..4146: mol_type = other DNA
atgggcaaggccacaggacggaaggcccctttgtggctgcgggctaagtttcaaaggctgctgttcaagctggggtgttacatccagaaaaattgcggaaagttcttggtggttggactcctcattttcggggcatttgcggtgggcctgaaagcggcaaatctggagacaaacgtggaggaactctgggtagaagtgggcggaagggtaagcagggagctgaattacacacggcaaaagatcggtgaagaggcaatgttcaatccacagctgatgattcaaacaccgaaggaggagggagctaatgtcctgactaccgaagctttgcttcagcacttggactctgcacttcaggcttctcgcgtccacgtgtacatgtacaaccggcagtggaaactggagcacctctgctacaagagcggagagctgattaccgaaacggggtatatggaccaaattatcgagtacctgtacccatgtctgattataacgccgctggattgcttctgggaaggtgccaaactgcagtccggcacagcatacctcctaggcaagccccctctgaggtggaccaacttcgatcccctggaatttttggaggaactgaagaagattaactatcaggttgattcatgggaggagatgctcaataaggccgaggtcggacacgggtatatggatcgtccatgcctgaatcccgcagatcccgattgcccggctacagccccaaacaaaaattccaccaagccccttgacatggctctggtcctaaacggaggctgccacggcctgagccgcaagtatatgcattggcaggaggagctgattgtggggggtacagtgaaaaattccaccggcaaactggttagcgctcatgcgctccagaccatgttccagctcatgacaccaaagcaaatgtatgaacattttaagggctatgagtacgtcagccatatcaattggaatgaagacaaggccgcagctattcttgaggcttggcagagaacctacgtggaggttgtgcatcagagtgttgcccagaattcgacccagaaggtgctcagtttcactactacaacactggacgatattctcaagtcattttctgatgtgtctgttattagggtggcaagcggttatttgctgatgctggcttatgcctgtcttactatgctgaggtgggattgctcaaagtcacaaggtgccgtcggcctggccggagtgcttcttgtcgccctgagcgtggccgcaggcttgggactgtgctcgttgatcggcattagctttaacgctgctacaacacaggtccttcctttcctagcactcggagttggagtggatgacgttttccttcttgcacacgccttttctgagacaggacaaaacaaacgtatcccgtttgaagacagaactggggaatgcctgaaacgcaccggtgcatctgtcgctctcaccagcattagtaacgtgaccgcatttttcatggctgccctgattcccattcctgcacttcgggcttttagcctgcaggcagctgtggtggtcgtgtttaacttcgctatggtactgctgatattccctgccatcctgagcatggacctgtataggcgagaggatcgacggcttgatattttctgttgtttcacaagcccatgcgtgagccgggtcattcaggtagagccgcaggcttacaccgatacccacgataatacaaggtattcacccccacccccttattctagtcactcatttgcccacgagacacagattactatgcaatccacggtccagctccggaccgaatacgacccacacacccacgtttattacacaactgcagaaccgagaagtgaaattagcgtgcagcccgtgacggtgacacaggacaccctgtcctgccagtcccccgaaagtacctcctccacacgggatctgttgtcccagttttcagattcatccctccactgcttggaacccccttgcacgaaatggacattgtctagctttgctgaaaaacactatgctcccttcctgctgaagcctaaagccaaggtcgtagtgatatttcttttccttggccttcttggcgtgtcactgtatggtactacgcgggtgagggacggtcttgatctcacggacatcgtcccacgcgagacccgagagtatgatttcatagccgctcagttcaaatacttttccttttacaacatgtacattgtgacacaaaaagccgattacccaaacatacagcacctgctttacgacttgcataggtccttctcgaatgttaagtatgtgatgcttgaggagaataaacagctgcctaagatgtggctgcactatttccgcgactggttgcagggactgcaggacgctttcgattcagattgggagaccggcaaaattatgcccaataactacaagaatggatcagatgatggcgtgctagcatacaaactcctggtgcagacgggctcccgcgataagcccatcgatattagtcagctgaccaaacaacggcttgttgacgctgacggaatcatcaatccttctgccttttatatctatcttaccgcctgggtaagcaatgaccctgtcgcctatgctgccagccaggccaacatacggccacacaggcccgagtgggtacacgacaaggccgactatatgccggaaaccaggcttaggattccagccgctgagccaatagaatacgcgcagtttcccttctaccttaatggtttgagagatacttcagactttgtagaggctatagagaaggtgcggaccatttgttctaactatacatccctcggcctgtccagctaccctaacggttatcccttcttgttctgggaacagtacatcggtctgaggcactggctgctgctgttcattagcgtcgtcctcgcttgcactttcctagtgtgcgcagtgttcctccttaacccctggaccgctggcattatcgtgatggtgcttgccctgatgaccgttgaacttttcggcatgatgggcctcatcgggattaaactgagtgccgtccctgtggtaatccttattgcctcagtaggtatcggagtggagttcacagtgcatgtggctctggcctttctgaccgccattggagacaaaaaccgtagagccgttctcgcacttgaacatatgtttgcgccagttctggatggcgctgttagtacattgctgggggtgcttatgctggcaggcagcgagttcgattttatagtacgctatttctttgccgtgctcgctatactcaccattctgggcgtgttgaacggtctggtgctactccctgttttgttgtcattttttggcccttacccggaagtgtctcctgcaaatggactgaacagactgcccactcctagccccgagccccctccttccgtggtccggtttgcaatgccacctggccatacgcatagcggctccgattcatctgactctgagtatagtagccagactaccgtttctggcttaagtgaggaattgcgacactacgaggcacaacagggggcaggcggtccagctcaccaggtgatcgttgaagccaccgagaatcctgttttcgcccatagtacagtcgtccatcccgagagtcggcaccatccaccaagcaatcctaggcagcagcctcatctggattccggatcgctaccacccggtagacagggccaacagccgcgtcgtgaccctcccagagaaggactgtggccacccccttatagaccaaggcgggatgcttttgagatttctactgagggacattcggggccatctaatcgagcacggtggggcccacggggtgcccgtagccacaatccacggaatcctgcatcaactgctatgggatccagtgtgcccggttattgccagccaattacaactgtcacggcatctgcatccgtgacagtggcggtacacccccctcctgtgcccggaccaggcagaaacccacgcggtgggctgtgtcccggataccctgaaaccgaccatggtttgtttgaagacccccacgtgccgtttcatgttaggtgtgaaagacgcgatagcaaggttgaagtgatcgagctgcaggatgttgaatgtgaggaacgaccacgcggtagctcgagtaattag

SEQ ID NO: 29997 - DNA, 255 bp, synthetic construct
  misc_feature 1..255: note = Description of Artificial Sequence: Synthetic coding sequence
  source 1..255: mol_type = other DNA
atgggcaaagcaaccggcaggaaggcccctctgtggctgcgggctaagtttcaaaggctcctatttaagttgggatgctatatacaaaaaaactgcggaaaattccttgtggtcggactcctcatatttggggcattcgctgttggattgaaggccgctaacctcgaaaccaatgtggaggagttgtgggtggaggaggtcaatctgttatgcgggggtcagacctcgactttatggaatagttggaaaagctag

SEQ ID NO: 29998 - DNA, 525 bp, synthetic construct
  misc_feature 1..525: note = Description of Artificial Sequence: Synthetic coding sequence
  source 1..525: mol_type = other DNA
atgtttaatccacaacttatgattcaaacacctaaagaggagggggctaacgtcctgacaacagaggcacttctccagcatttggatagcgcccttcaggctagtagagtccacgtgtatatgtataaccgccaatggaagctggagcatctctgttataagtctggcgaactgatcactgagacgggatatatggaccaaattattgaatacctgtacccatgcctcattatcactcccttggattgcttctgggagggggctaagctccagagcggcacggcgtacctgctcggaaaacccccactgagatggacaaacttcgatcctcttgagtttctggaggagctaaagaagatcaactatcaggtcgactcttgggaggagatgctgaataaggcagaggttgggcacggctacatggacagaccctgtctgaatccggcagatcctgactgtccagccacagcacctaacaagaatagtaccaaaccacttgacatggcattggtgctgaatgggtag

SEQ ID NO: 29999 - DNA, 525 bp, synthetic construct
  misc_feature 1..525: note = Description of Artificial Sequence: Synthetic coding sequence
  source 1..525: mol_type = other DNA
atgtttaatccacagctgatgatacagactcccaaagaagagggggctaacgtgctaaccaccgaagctctgctgcaacaccttgacagcgctctgcaggctagtcgggtccacgtatatatgtacaaccgacagtggaagttggaacatctgtgttacaagtccggggagttgataacagagacagggtacatggaccagataatcgagtacttgtacccatgcctaatcataacccccctcgattgcttctgggagggggcaaaactgcagagcggcacagcctacttacttggtaaaccccctctgcggtggaccaacttcgatcccttggaattcctcgaggagcttaagaaaataaactaccaggttgactcctgggaagagatgctgaacaaggccgaagtgggccacggctacatggacaggccgtgcttgaatcccgcagaccctgactgccctgcgaccgcgcctaacaagaacagcactaagcctcttgacatggcgctagtgctgaatggatag

SEQ ID NO: 30000 - DNA, 279 bp, synthetic construct
  misc_feature 1..279: note = Description of Artificial Sequence: Synthetic coding sequence
  source 1..279: mol_type = other DNA
atgttcaacccccagctgatgatccaaactccaaaagaagaaggcgctaatgtgctaactacagaagctttactccaacacctggactctgctctgcaggcatcaagagtccatgtctatatgtataatcgccagtggaaactcgagcacttgtgctataagtccggcgaacttataacagagaccggttatatggatcagattatcgagtatctgtacccttgtttaatcatcaccccattggattgcttctgggagggagctaagttgcagtcctag

SEQ ID NO: 30001 - DNA, 525 bp, synthetic construct
  misc_feature 1..525: note = Description of Artificial Sequence: Synthetic coding sequence
  source 1..525: mol_type = other DNA
atgttcaatccacagttgatgatacagaccccgaaagaagagggtgctaatgtgctgactaccgaagctcttttgcaacacctggattctgccctgcaagccagcagggtgcacgtgtacatgtacaacaggcaatggaaacttgagcacctgtgctataagagcggggagctgatcactgaaacagggtacatggaccagatcatcgaatacctgtacccatgcttgattatcacccctcttgattgcttttgggagggcgcaaagctgcagagcggcaccgcatacttgctcggaaagcccccattaaggtggacaaatttcgaccctttggaattcctcgaggaactcaagaagatcaactatcaggtcgactcctgggaggaaatgctcaacaaagccgaggtcggacacgggtacatggacagaccttgcttgaatcccgctgatcccgattgccctgcaaccgctccgaataagaactccaccaaaccgctggacatggcactcgtgctgaatgggtag

SEQ ID NO: 30002 - DNA, 525 bp, synthetic construct
  misc_feature 1..525: note = Description of Artificial Sequence: Synthetic coding sequence
  source 1..525: mol_type = other DNA
atgttcaatccccagctcatgattcaaacccccaaggaagagggtgccaacgttctgactactgaggccctgctgcagcatctggattccgctctgcaagcaagtagggtgcacgtttatatgtacaataggcaatggaagcttgaacacctctgctacaaatctggggaactgatcactgaaacaggttatatggaccaaatcatcgaatacctgtatccctgcctcattataacgccgctcgactgcttttgggaaggcgctaaactgcagagcggcaccgcgtatttgctgggcaagcccccacttcgttggacgaattttgatccgttggaatttcttgaagagctgaagaagatcaattaccaggtagattcctgggaggagatgttgaataaggccgaagtgggccacggatacatggatcgcccttgtctcaacccggctgaccccgactgccccgcaacagcacctaacaagaattcaactaaacccctagacatggccctcgttctgaatggatag

SEQ ID NO: 30003 - DNA, 954 bp, synthetic construct
  misc_feature 1..954: note = Description of Artificial Sequence: Synthetic coding sequence
  source 1..954: mol_type = other DNA
atgccacgggaggacagagccacatggaagtcaaactacttcctgaagatcatacagctactggacgactacccaaagtgctttatcgttggagctgataatgttggcagcaaacagatgcagcaaattaggatgagcctccggggtaaagccgtggttctaatgggcaagaatactatgatgagaaaggctatacgtggccacctcgaaaataaccctgcactagagaagcttttaccgcacattaggggcaatgtgggcttcgtgtttaccaaagaggaccttacggagatcagagacatgttactggccaataaggtgcctgcagcagctagagctggcgcaatagctccgtgtgaagtcactgtccctgcccagaacactggccttggtcccgagaagacttctttcttccaggctcttggtatcacaactaaaatctcccggggaactatcgagatcctttctgatgtgcagctgattaaaacgggtgacaaagtgggcgcaagcgaagccaccttgctgaacatgctaaacatcagtccattttcctttggcctggtgattcagcaggtatttgataatggaagcatctataacccagaagttctggatatcaccgaggaaaccctgcattctcggttcttggaaggtgtccgcaacgtggcgagcgtgtgcctgcagatcggttatccaaccgtggccagcgtccctcactcgattattaatggctataaacgcgtcctggccctgtctgttgagaccgattatacatttccgctagcagagaaggtaaaagcatttttggccgacccaagtgcgtttgtggcagcagccccagtcgccgcagccaccaccgctgcccctgccgcagcggctgccccagccaaggtggaagccaaggaggaaagcgaggaatctgatgaggacatggggttcggccttttcgactag

SEQ ID NO: 30004 - DNA, 1818 bp, synthetic construct
  misc_feature 1..1818: note = Description of Artificial Sequence: Synthetic coding sequence
  source 1..1818: mol_type = other DNA
atggacgatctggacgccctgttagcggatctagagagcacaacaagccatatctcaaagcgaccagtcttcctgagcgaggagacaccctattcgtatcctacgggaaaccatacctatcaagagatagccgtaccccctcctgtgcctccgccacctagcagcgaggctctgaacgggaccattctcgatccgctagatcagtggcagcccagttctagtcgatttatccatcagcaaccacagagcagcagccctgtgtacggctcctcagccaagacttcttccgtctcaaacccccaagattctgtgggctccccctgttcaagagtgggtgaagaggaacatgtctacagctttcccaacaagcaaaagtccgctgagccgagcccgaccgtgatgtcaaccagcctgggctcaaacctttcagaactggatagattgctgttagaactcaatgccgttcagcataacccccctgggtttcccgctgacgaagcaaattctagcccccctctgcctggagcactttccccattgtatggtgtccctgagaccaacagccccttaggcggaaaggcgggaccgctgaccaaagaaaaacctaaacggaacggtggcagggggcttgaggatgtgaggccatctgtagaatcccttctcgacgaactcgagtcttctgtgccgtcaccagtgccggctattactgtgaaccagggagagatgagctcacctcaacgcgtgacgtctacccagcagcagacccgcatttccgcctcttccgctaccagggaattagacgagctgatggcgtccctgtctgatttcaaaggtagctggcccctcgaggaggtggtgctgctagtcagcattagctcctccgttcaagagggggagaagtatcctcatccttgcgcagcgcgacacaggacaccaagcctgaggagccccgaccagccgccaccatgtcctcagttcatggctcaggggaagacgggttccagctcccctcccggagggccacctaaaccgggttcacagttagattctatgctgggcagtctgcagtcggaccttaataaattgggagtggccacagtcgctaaaggggtgtgcggcgcttgcaaaaagcccatcgccggacaggtcgtgactgctatgggcaagacgtggcacccagagcattttgtgtgcacacactgccaagaagagataggaagtaggaactttttcgagagagatggacagccatactgtgaaaaggactaccataatctgttctcacctagatgctactattgcaatgggcctatcttggataaggtcgtgaccgccctggataggacctggcaccctgagcattttttctgcgcccaatgtggggctttctttggtcctgagggatttcacgaaaaagacggaaaagcatactgcaggaaggactattttgacatgtttgcacccaaatgcggaggctgcgctcgagccatcctggagaattatatctcagccctgaacacgctgtggcatcccgaatgcttcgtctgccgagaatgttttacgcctttcgtcaacgggagcttcttcgagcacgacggccagccctattgtgaagtgcattaccatgaacgacggggaagcctgtgtagcgggtgccaaaagcctatcactggaaggtgcattactgccatggccaaaaagtttcaccccgaacatttcgtttgcgccttctgcctcaagcagctaaacaaaggaacatttaaggaacagaatgataaaccttattgtcaaaattgtttccttaagttgttttgttag

SEQ ID NO: 30005 - DNA, 702 bp, synthetic construct
  misc_feature 1..702: note = Description of Artificial Sequence: Synthetic coding sequence
  source 1..702: mol_type = other DNA
atgggcaaaacgtggcacccagaacactttgtgtgcactcattgtcaggaggagattggatcccgtaactttttcgaaagggatggacaaccgtattgtgagaaagactaccataatctatttagccccaggtgctactattgcaatgggcctatcctggataaggtggtgacagccttagataggacatggcaccctgagcattttttctgtgctcagtgtggggcattttttgggccagaagggttccacgaaaaggacggtaaagcatattgtcggaaggattactttgatatgtttgcacctaaatgcggcggatgcgctcgtgccatcctggagaactatatcagcgcactcaatacactgtggcacccagagtgcttcgtgtgtcgtgaatgttttactccatttgtgaatggtagcttcttcgagcacgatggacagccctactgtgaggtgcattatcacgagcgtaggggctccctctgctccgggtgtcaaaaaccgataaccgggaggtgtatcaccgcaatggccaagaagttccaccccgatccatgtaccagcccaagaaccggccttgcatctacaccacactggtcccacctttttctgatttttcagcagtgttcgcgcggtgcgggaaagggaagacaaggactgttgggatctctttttattttaattccaccacccacctag

SEQ ID NO: 30006 - DNA, 1212 bp, synthetic construct
  misc_feature 1..1212: note = Description of Artificial Sequence: Synthetic coding sequence
  source 1..1212: mol_type = other DNA
atgtccgccccttcatctaccggccctcagtactgccctggccttcccagtcgaaaggaggcgacaccagaaggcaggccagagacatgccttctgcctagttccccccaggcacaacgccctattcagggattggaacagcgggcagacggagagcgatgctgggcagcgggttggccacgagatggcggtcgctcctctcctggcggtcaggacgagggcggaggctcatggcctctggaagaggtggtactcctggtgtctatatcaagctcagtccaggaaggcgagaagtaccctcatccttgtgccgcacgtcacaggaccccgtcactaaggtcgccagaccagccccctccgtgtccgcaatttatggcacaaggtaagaccggcagcagctcaccgcctgggggaccgcctaaacctggctcccagttggatagcatgctcggatcactgcaatccgacttgaataagctgggagttgctacagtggctaaaggagtgtgcggagcttgcaaaaaacctatcgccggtcaagtcgtgaccgcaatgggcaaaacctggcaccccgaacacttcgtctgcactcactgccaagaggaaattggcagcaggaacttcttcgaacgggatgggcagccttactgtgagaaggactaccacaacttgttcagtcccaggtgttattactgtaacgggcctattctcgataaggtcgttacagctctcgataggacctggcacccagagcactttttttgtgcacaatgcggcgcatttttcgggccagagggtttccacgagaaggatggtaaagcgtactgtagaaaggactactttgatatgttcgcccctaaatgtgggggttgtgctagagccatcctcgagaactatattagcgcattgaacactctgtggcatccagaatgcttcgtgtgccgcgaatgctttacaccatttgtgaacggatcttttttcgaacatgatggacagccatattgcgaagtgcattaccatgagcgaagaggttctttgtgtagcggctgccagaagccaatcactggacgatgcatcaccgccatggctaagaagttccaccctgagcacttcgtctgtgcgttctgtcttaaacaactcaacaagggcaccttcaaagaacagaacgacaaaccctattgccaaaactgcttcctgaaattgttctgttag

SEQ ID NO: 30007 - DNA, 1674 bp, synthetic construct
  misc_feature 1..1674: note = Description of Artificial Sequence: Synthetic coding sequence
  source 1..1674: mol_type = other DNA
atggacgatttagatgctctgctcgccgatctggaatccaccacaagtcatatttcaaagaggcccgtattcctcagcgaagagacgccctattcatacccgaccgggaaccacacctaccaggaaatcgcggtcccacctccagtcccaccacccccttctagtgaggctctgaacggcaccatactggaccccctggaccagtggcagcccagctctagtcgcttcatccaccagcagccccagagcagttccccagtgtacgggtccagcgctaaaaccagttcagtgtccaaccctcaagattctgtaggttcgccctgcagccgcgtgggggaggaggagcacgtgtatagttttccaaataagcaaaaaagcgccgagccgtcacctactgtcatgagcacaagcttgggcagtaacttgtcagaactggacaggctgttactagagttaaatgcagtacagcacaatcccccaggatttcccgcagacgaggccaactccagtccacctctgccaggcgctctgagtccgttatacggcgtgcctgaaactaattctccactgggtgggaaggccggacccctgactaaggagaagcccaagcgcaacgggggtagggggctggaggatgtgcgaccatccgtcgagtcgttgctggatgagctggaaagcagtgtgccaagtcctgtccctgcaattaccgttaaccagggcgaaatgtcttcccctcagcgtgtaacgtcaacgcagcagcaaacaagaatctctgcctcttctgccacacgcgagctggacgaactcatggcttccttatcggacttcaaatttatggctcagggcaagaccggcagcagctctccaccaggcggaccccctaagcccggaagccagctggattctatgctgggctcactgcagagtgatctgaataagcttggcgttgcaactgtggccaaaggcgtctgcggcgcatgtaagaaaccaattgcagggcaggtcgtgaccgctatgggaaagacttggcatcccgagcacttcgtgtgtactcactgccaggaagagataggttcccgcaacttcttcgaacgggatgggcaaccatattgtgaaaaggattatcacaacctgttttccccaagatgttattattgcaacggaccaattttggataaagtagtcaccgcacttgaccgcacttggcaccccgagcattttttttgtgctcagtgcggcgctttcttcgggccagaaggcttccatgaaaaggacggtaaggcctactgtcggaaggattacttcgatatgttcgctccaaaatgcggtggctgcgccagagctatcctggagaattatatttccgcgctgaacacactgtggcaccccgagtgtttcgtgtgtagggaatgttttaccccctttgtgaatggatccttttttgaacatgacggccagccgtactgcgaagtccactatcacgaaagacgaggcagcctgtgtagcggctgtcagaaaccaattactgggaggtgcataacagcgatggcaaaaaaatttcaccccgaacatttcgtttgcgcgttttgtctgaagcagctcaataagggaacctttaaagaacagaatgacaaaccatattgtcagaactgcttcttaaagcttttctgctag

SEQ ID NO: 30008 - DNA, 1275 bp, synthetic construct
  misc_feature 1..1275: note = Description of Artificial Sequence: Synthetic coding sequence
  source 1..1275: mol_type = other DNA
atgtctacaagcctcgggagcaatctatctgaacttgacagattactccttgaactgaatgcggtccaacataatccaccgggtttccccgctgatgaagctaacagttccccccctctgcctggtgccctgagtccgttgtacggtgtccctgaaactaattcacctctgggcggtaaagccggaccgctgactaaagagaagccgaagagaaacgggggacgcggattagaggacgtgcgtccgtccgtcgaatctctgctggacgaactcgagagctcagttccttcccccgtgccagccatcacagtgaaccagggagagatgtccagcccccagcgcgtgacttcgactcagcagcagacccgaattagtgcttcttccgccacaagggaactggacgaactaatggcatctctgtccgattttaagttcatggcgcagggcaaaactggaagctcgagccctcccggagggcctcccaagcccggaagccagctcgacagcatgctaggttcactgcaatccgacctgaacaagctcggggtggcgaccgtcgctaagggggtgtgcggagcttgtaagaaacccatagccggacaggtggttaccgcaatggggaaaacctggcaccccgagcactttgtttgcactcactgccaagaggaaatcggatcgcgcaatttcttcgaacgcgacggtcagccatactgcgagaaagattaccataacctgttctccccccgatgctactactgcaatggacctatcttagacaaagttgtgactgcactggatcgtacatggcaccccgaacacttcttctgcgcccagtgcggtgcattttttgggcctgagggattccacgagaaggacggcaaagcgtactgccggaaggactactttgacatgtttgcgcctaagtgcggcggttgcgccagagccattctggagaattatatatccgcccttaatactctgtggcatcccgaatgctttgtctgtagagaatgctttacaccttttgtcaacggctctttttttgagcatgatggccagccttactgcgaagtgcactatcacgaaagaaggggatccctttgctcaggctgtcagaagcccatcaccggccgttgtattacagccatggccaagaagtttcaccccgagcattttgtgtgtgccttttgcctgaagcagctaaataaaggtactttcaaagagcaaaacgataaaccctactgtcagaattgtttcctcaagctgttttgctag

SEQ ID NO: 30009 - DNA, 951 bp, synthetic construct
  misc_feature 1..951: note = Description of Artificial Sequence: Synthetic coding sequence
  source 1..951: mol_type = other DNA
atgagctcaccacagagagtcacttcaactcagcaacagactagaatatcagcgagcagtgccacccgcgagctggacgagctgatggcctctttatctgattttaaattcatggctcagggcaagaccggctcaagcagcccccctggcggaccgccaaagcctggtagtcagctcgacagcatgctgggatccctgcagtccgacctgaataaactgggcgtagctaccgtagccaagggcgtgtgtggagcctgcaaaaagcctattgcaggtcaggttgtgaccgcgatgggcaaaacttggcatccagaacacttcgtatgcacgcattgtcaggaggagataggaagcagaaactttttcgagcgggatggtcaaccctattgcgagaaagattatcacaacctgttcagccccagatgctattattgtaacggacctatattagataaggtggtgaccgcgctggatcgtacgtggcacccagaacactttttttgtgcacagtgtggggcttttttcggacccgagggctttcacgagaaggatgggaaggcatattgtaggaaggactacttcgacatgtttgcacctaagtgcggcggatgcgcgcgagccattctggaaaactacatcagcgcgttgaatacgttatggcatccagagtgtttcgtttgtcgcgagtgtttcaccccgttcgtaaatggctccttcttcgagcacgacggccagccttattgtgaggtgcactatcatgagagacgtggttcactctgctcaggctgccagaaacccatcacaggtcgctgcataaccgccatggccaagaagtttcaccctgaacattttgtctgtgccttttgcctcaagcaattgaacaagggtacttttaaagagcagaacgataaaccgtactgtcagaactgcttcctcaagctcttttgctag

SEQ ID NO: 30010 - DNA, 993 bp, synthetic construct
  misc_feature 1..993: note = Description of Artificial Sequence: Synthetic coding sequence
  source 1..993: mol_type = other DNA
atgcctcatagcgtgactctgcgaggtccatcaccttgggggtttcgactagtgggcggaagggacttttcggctcctttgaccatttctcgcgttcatgccggatcaaaagccgctttggccgctctctgtcccggagatctgatccaggcaattaacggagaaagtaccgagttaatgacccacctggaagcccaaaatcgaatcaaaggctgccatgaccacctgaccctctcagtgtctagacctgagggcagaagctggccgtccgcacctgacgatagcaaggctcaggcacatcgcatccacatcgaccctgaaattcaggacgggagccccactacatctcgcaggccaagcggtaccggcaccggcccagaggacggccgtccttcacttggctcaccatatgggcagcccccacgcttccccgtgcctcataatgggtcctcagaagccacgctccctgcccaaatgtccaccctgcatgtgtcccctcctccatctgctgatcctgcacgcggtctgcccaggtcaagagactgtcgtgtggacctcgggtctgaggtctatcgtatgctcagggagccggctgagcccgtggcggcagaacctaagcaatccgggagctttcgttatctgcagggcatgcttgaggctggggaaggcggtgattggccgggtcctggaggacctcgtaatctgaaaccaaccgctagtaagttgggcgctcctctgtccgggctccaggggctccccgaatgtactcgatgtggtcacggtattgtggggaccatcgtgaaagctagggataaattgtaccacccagagtgttttatgtgttcagactgcggattaaatctcaagcaaaggggttacttttttcttgacgagagactttattgcgaatcccacgctaaggccagagtgaaaccccctgaaggctacgatgttgtcgcggtgtaccccaatgctaaggtcgaattggtctag

SEQ ID NO: 30011 - DNA, 741 bp, synthetic construct
  misc_feature 1..741: note = Description of Artificial Sequence: Synthetic coding sequence
  source 1..741: mol_type = other DNA
atgccccactctgtgacccttcggggacccagcccctggggattccggctggttggaggacgcgacttctctgccccattaaccattagcagagtccatgctggatccaaggccgctctggctgccctgtgtcctggcgatctcattcaggccatcaatggcgagagtacagaactgatgacacacctcgaggcacagaatagaatcaagggctgccatgaccatctaaccctgtccgtcagtcgaccagaaggcaggagctggccgagtgcacccgacgactcgaaagctcaggctcaccgtattcacatcgaccccgagattcaggatgggagtccaacaacaagccggaggccctctggaaccggaaccggccctgaggacggcaggccaagcctcggatctccatacgggcaaccacccagatttccggtaccacataatggatccagcgaggctaccctgcctgcccagatgtctacactgcacgtgtcaccccctccgagtgcagacccggctcgcggattgcctagatcgcgcgactgccgagtggatttgggatctgaagtgtataggatgttaagggaaccagcagagcctgttgcggctgagccaaagcagtccgggtctttcaggtacctacaagggatgttggaggcgggagaaggcggagccccatcttctaggcatgggacaagtagtacgatcccttctgcaagttgcgctgtaacagccgcatag

SEQ ID NO: 30012 - DNA, 1791 bp, synthetic construct
  misc_feature 1..1791: note = Description of Artificial Sequence: Synthetic coding sequence
  source 1..1791: mol_type = other DNA
atgtctaattacagcgtaagcctggtcggaccagctccttggggatttcgccttcagggaggtaaggatttcaacatgcccctgacaatttctagtctgaaggatggcggaaaggcagcccaagccaatgtgcgaatcggagacgtcgtcctgtccatcgatggcatcaacgctcagggtatgacacacctggaagcgcaaaataagatcaaagggtgcactggaagcctaaacatgacgctacaacgtgcctccgccgcacctaagcctgaaccggtcccagtgcagaaaggcgagcccaaggaagttgttaaacccgtaccgattacatcacctgcggtaagcaaggtcacctccaccaacaacatggcatataacaaagcacctaggccatttggcagcgtgagcagcccaaaagtgaccagcatcccttccccctccagcgcctttactccagcgcacgctacaacctcttcacacgcttccccctcccctgtagcagcagtcacacccccactttttgcggctagcgggctccacgccaatgccaaccttagtgcagaccagagtccttccgccctctcagctggaaagacagctgtgaacgtcccccgacaaccgacagtgactagcgtttgtagcgaaacatctcaggagctagctgagggccaaagacgaggatcacagggcgattcaaagcagcagaacggtccacctagaaagcacattgtcgagagatatactgagttctatcacgtccccactcatagtgatgcttcaaaaaagcgcctgattgaggatactgaagactggaggccacgcacaggtactactcaatcacgtagcttccgaatactggctcaaatcacagggaccgaacacctgaaggagtcggaagcggataacacaaaaaaagccaataacagccaggagccatccccacagctcgcttcaagtgtggcatctacgcggagtatgccagaatctctggacagtcctacatctgggagacccggtgtcacaagcctgacagcggcagccgcattcaaacctgtgggcagcaccggcgttatcaaatccccatcgtggcagcgccctaatcagggggtgccatcaaccgggaggatatctaattcagccacttactcggggtccgtggctcctgctaactcggcgctgggacagacccagccttcagatcaggatacactcgtgcagcgagccgagcatatccctgccggtaagcggaccccaatgtgtgcccattgtaaccaggtaataaggggtcccttccttgtggccctgggcaagtcttggcaccctgaggaattcaactgtgcgcattgcaagaacaccatggcctatatagggttcgtagaggagaagggtgccctgtactgtgagctctgttacgagaagtttttcgctcctgaatgtgggcgttgtcagaggaagattcttggggaggtcatctcagctttgaagcagacttggcacgtgtcctgcttcgtctgtgtggcctgcgggaaacccataaggaataacgtgttccacctcgaagacggcgagccctactgtgagaccgactattatgccctgttcgggacaatttgtcacggatgcgagtttcccattgaggccggtgacatgttcctggaagcgttgggctacacttggcacgacacctgcttcgtgtgttctgtgtgttgtgaatctctggaggggcagactttcttttcaaaaaaggataagccactgtgtaaaaagcacgctcactccgtgaatttttag

SEQ ID NO: 30013 - DNA, 645 bp, synthetic construct
  misc_feature 1..645: note = Description of Artificial Sequence: Synthetic coding sequence
  source 1..645: mol_type = other DNA
atgagtaattactcagtatccctggttgggcctgccccatggggatttcgactgcagggagggaaggactttaatatgccactcactatctcctcccttaaggacgggggaaaggccgctcaggctaacgtgagaatcggggacgttgtcctgtcgattgatgggatcaacgcccagggaatgacgcatctggaggctcagaacaagatcaaaggatgcacaggctcactcaatatgacactccagcgggcttcagcagcccctaagcccgaaccagtccccgtgcagaaaaaaacccaggtaacaaacaatccaggaacagtgaagattccacctaagcgacccccacgcaagcacatagttgagagatataccgagttttaccacgtgccaacacactccgatgcaagcaaaaaacgacttatagaagacaccgaagactggcggccaagaacgggcacaacccagtcaaggagtttcaggatcctcgcgcagattaccgggactgagcatctcaaagaatccgaagccgataacaccaagaaagcgaaagagaaaatccccctccacgttttctccccgaagtacactaaattgcgcgactggcaccatgaggttagcgctcgagcactcaacgtgcagtag

SEQ ID NO: 30014 - DNA, 705 bp, synthetic construct
  misc_feature 1..705: note = Description of Artificial Sequence: Synthetic coding sequence
  source 1..705: mol_type = other DNA
atgagcaactacagcgtttctttagtggggccagccccatggggctttaggctgcagggaggcaaggactttaatatgccactcactatcagttcactcaaagacggcggaaaagcagctcaggctaatgtgcgtatcggcgacgtagtgttgtctatcgatggcataaacgcccagggaatgacccacctagaagcgcaaaataagatcaaagggtgtactggtagcctcaatatgacgttacagagggctagcgcagcacccaagccagagccagttcccgttcaaaagccgactgttacgtcggtgtgctccgagacttcacaagagttagcagaaggacagcgcaggggctcccagggcgactcgaaacagcagaacggcaaaatcccacccaagagacctccgaggaaacatatcgtcgaaaggtataccgagttctaccatgtcccaacacactccgacgcatctaagaagaggctaatagaggatacagaggactggcgacccaggaccggtacaactcagtcccgttctttcagaatcctggctcagataactggaaccgagcacctgaaggagtctgaggccgataatacaaaaaaggccaaggagaaaatccctctgcatgtgttttcaccaaagtatacaaaactccgcgattggcaccatgaagtgtcagctcgggctttgaacgtacagtag

SEQ ID NO: 30015 - DNA, 1464 bp, synthetic construct
  misc_feature 1..1464: note = Description of Artificial Sequence: Synthetic coding sequence
  source 1..1464: mol_type = other DNA
atgagcaattactccgtttcactggttggtcccgctccatgggggttcagattacagggtggaaaggacttcaacatgcccctgacaatctcgagcctgaaggacgggggaaaagctgcgcaggctaatgtcaggatcggtgatgtcgtgctgtccatagatggaattaacgctcaagggatgactcatctcgaggctcaaaacaagattaaaggttgcaccggtagtctcaatatgacgttgcagcgggcttcagccgcaccaaagccagagcctgtgccagtacagaagcctaccgtcacttcagtttgctcagaaacctcacaggagctggccgaggggcagagaagaggcagccaaggtgattctaaacagcagaatggaccacctagaaagcacattgttgagaggtacaccgagttttaccacgtgccgacccactctgatgcctcgaagaagagactcatcgaagacaccgaggattggcggcctagaacaggaaccacgcagagtcggagttttcggatcttggcacagataactggtacagagcatctcaaggaatccgaagctgacaatactaaaaaagctaataattctcaggagccctccccccagctggctagcagtgtagcctccacacggtctatgccggagtctctcgactcaccgacatccggcaggcccggagttacatcgctgacggctgcagccgctttcaagcctgttggtagtaccggagttatcaaatcaccttcttggcagcgaccaaaccaaggtgtgccttcaacagggagaattagcaactcagctacgtactccggcagcgttgctcccgcaaatagcgccctgggccagacccaaccatctgaccaggacacattggtgcagcgcgctgaacacataccggcaggtaagagaacgcccatgtgtgcacactgtaatcaggtgatacgtggcccttttttggtcgccctgggtaaatcttggcatccagaagagtttaattgcgcacattgcaagaataccatggcttatatagggtttgtggaggagaagggagcactgtactgcgagctctgctatgagaagttctttgccccagagtgtggcaggtgccagagaaaaatccttggcgaggtgattagcgccttaaaacagacctggcatgtgtcttgctttgtgtgcgtggcctgcggaaagcctattagaaacaacgtttttcatcttgaggacggcgagccctattgtgaaacggattattatgccctgtttggaactatctgccacggctgcgagtttcctatcgaagccggtgacatgtttctggaggctctcggttatacatggcatgatacgtgtttcgtgtgctccgtctgttgcgagtccttagaaggacagactttcttctccaagaaggataagcctctgtgtaaaaagcacgctcacagcgtgaatttctag

SEQ ID NO: 30016 - DNA, 705 bp, synthetic construct
  misc_feature 1..705: note = Description of Artificial Sequence: Synthetic coding sequence
  source 1..705: mol_type = other DNA
atgagcaattatagcgtttccttggtagggcctgcaccttggggcttccgcctccaggggggtaaagacttcaatatgcctctcactattagtagcctgaaagacggtgggaaggcagcccaggccaatgtcagaatcggagacgtagtcttatcgatcgatggaatcaacgcccagggtatgacccatttagaggcccagaacaagatcaagggctgcactggtagcctcaacatgactttacagagggcctctgctgccccaaagccggagcccgttcctgtgcagaagcccaccgtgacttctgtttgctcagagacctcacaggaactggccgagggtcagcgcagggggtcccagggagacagtaagcagcagaacggccctgtgcccagaaaaatccccccacggaaacatatcgtggagaggtacacagagttttatcacgtgccaactcatagcgacgcgtctaaaaagaggctcattgaggacaccgaggattggcggccaagaacaggtactacacaaagcaggagcttcagaatcctcgctcagattacaggcactgagcacctgaaggaatctgaagccgacaacaccaaaaaggccaaggagaagattcccctgcatgtgttcagtcctaagtatacgaaactgcgtgattggcatcacgaggtcagcgccagggcactgaatgttcaatag

SEQ ID NO: 30017 - DNA, 645 bp, synthetic construct
  misc_feature 1..645: note = Description of Artificial Sequence: Synthetic coding sequence
  source 1..645: mol_type = other DNA
atgtcgaattacagcgtgtcgcttgtgggcccagcaccctggggctttagattacagggcggaaaagacttcaatatgcccctaactatctccagccttaaagacggtggtaaagccgctcaggcaaacgtccggattggtgatgtggtcctgtccatcgatggaatcaacgctcagggcatgacgcacttggaagctcaaaacaaaattaagggctgtacaggatctctgaatatgactctacagcgtgcctccgcggcacccaagccggagcctgtgcccgtgcagaaggtgacccagaaacgcgaatcccggagctctcgtcgcactgcccctggcctacctcctagaaaacacattgtagagagatacactgagttctaccacgtgcccactcatagcgacgcctcgaaaaaaagactcatcgaggataccgaagattggcgcccacgcacaggcacaactcagtcccgttctttccggatcttggcacagatcactggaacagagcatctcaaggaatccgaggcagataataccaagaaggccaaggagaaaatccctctccacgtgttcagtccaaagtatacaaaactccgtgattggcatcacgaggtcagcgcaagagccctgaatgttcagtag

SEQ ID NO: 30018 - DNA, 1425 bp, synthetic construct
  misc_feature 1..1425: note = Description of Artificial Sequence: Synthetic coding sequence
  source 1..1425: mol_type = other DNA
atggcttataacaaagcccctagacctttcggtagtgtgtcttcccctaaagttaccagcatcccatccccaagctcagcatttacgcctgctcacgctacaacgtcctctcacgcaagcccgtcacctgttgctgctgttacccctcccctgtttgctgcttctgggctgcacgctaatgcaaacctctccgcggaccaatcgccaagtgccctcagcgctggcaaaactgctgtaaacgtccccagacaacctacagtaacatctgtttgttcagaaactagccaggagttggctgaaggccaaagaagagggtcgcagggggatagtaaacagcaaaacggccctccccgtaagcacatagtggaacggtatactgagttctaccacgtacccacccatagcgacgcaagtaagaagcgattaatagaagataccgaggattggagacctcgcaccggaaccacccaaagccgctctttccgaattctagcgcagatcacagggacggaacatctgaaggagtcagaggccgacaacacaaagaaggctaataactcacaggaacctagcccacaactagcctcctcagttgctagcacaagatctatgcctgagtctctggactcaccaaccagcggaagaccaggggtaaccagcttaaccgctgccgctgccttcaagcccgtcggcagcacaggcgtgattaaatcaccatcatggcagcggcctaatcagggtgttccttctacaggcagaattagcaacagtgcgacctacagtgggtctgtggcaccagccaatagcgctctgggccagacgcagccaagtgaccaggacactttagtgcagagagccgagcacatacctgccggaaagaggactcctatgtgcgcacactgcaatcaggtgattagagggccatttctcgttgccctggggaaaagttggcaccctgaagagtttaattgcgctcactgtaaaaacacaatggcttacataggcttcgtggaggaaaaaggggcactatactgcgagctatgctatgagaagttcttcgccccagaatgcggacgctgccagcgcaaaatactcggagaggtcatttccgcgctgaaacagacatggcatgtgtcatgtttcgtctgtgtagcttgcgggaagcccatacgtaataatgtgttccacttggaggatggagaaccatactgtgagaccgactactatgcgcttttcgggaccatatgtcacggttgtgaattccctattgaagctggagacatgttcctcgaggccttggggtatacatggcatgacacctgctttgtgtgcagcgtgtgctgtgagagcttggaaggacagacctttttctccaagaaggataaacctctttgtaaaaaacacgctcactctgtgaatttttag

SEQ ID NO: 30019 - DNA, 411 bp, synthetic construct
  misc_feature 1..411: note = Description of Artificial Sequence: Synthetic coding sequence
  source 1..411: mol_type = other DNA
atgagcaattactcagtaagcctcgtagggccagccccttggggtttccggctgcagggcggaaaggattttaatatgccattgacgatcagctccgctggggttcagtggcggaacttgggatctccccagcccccaagcccggagtttaaacggtttagctgtttaagcttgcctagttcttgggattaccgtcacgtgcctcccaggctcgctaactttgtgttcttggtcgagacaaaattcccgtatgtgggtcaggccggtctcgagctgcccactagcggcgatctccctactagtgcatcacagtccgctaaaataacaggcgtgagtcacagggcatggcctaccttgttttacactttgctgttcttcgccacaatctacccagaaattatactgtactag

SEQ ID NO: 30020 - DNA, 669 bp, synthetic construct
  misc_feature 1..669: note = Description of Artificial Sequence: Synthetic coding sequence
  source 1..669: mol_type = other DNA
atggactcatttaaagtggtcctggaaggcccagccccatggggtttccggctgcagggaggcaaagacttcaacgtccctctctcgatctctcgcctgacacccggaggcaaagcggcacaggccggtgtggcagtgggggactgggtcttgtcaatcgatggggagaatgcgggttccctgacccacattgaggcccagaataagattagagcatgcggcgaaaggttatccctgggcctgagtagggcacaaccagtccaaagcaagcctcagaaggcctcagcccctgccgctgatcctccaagatacaccttcgcgccatcagtgtctctgaacaagaccgctcgaccattcggagccccaccgccagccgactctgcaccccagcagaatggtcaacccttaagacctttggtgccggacgcttccaagcagaggttgatggagaataccgaggactggagaccaaggccaggcaccgggcagtctcgctctttcaggatcctggctcacctaacaggcaccgaattcatgcaagacccggatgaagaacatctcaagaagagcagagaaaagtacgttttagaactccagtccccacgttacacgaggctgagagattggcaccaccagcggtctgctcacgtactgaatgtccaatcatag

SEQ ID NO: 30021 - DNA, 1374 bp, synthetic construct
  misc_feature 1..1374: note = Description of Artificial Sequence: Synthetic coding sequence
  source 1..1374: mol_type = other DNA
atggattcgttcaaggtcgtgttagaagggcctgcaccttggggtttccgcctccagggaggcaaggattttaacgtcccactgagcatctcaagactcacaccgggagggaaagcggctcaggccggagtagcagtgggcgactgggtgctctctattgacggagagaacgctggatccctgacccacatcgaagcccaaaacaagattagggcctgcggcgagaggctgtcattaggcctgagtagggcacagccggtgcagagcaaaccacaaaaagcaagtgcgcctgctgcggaccctcccagatacacttttgccccttccgtaagcctcaataaaacagctcggcctttcggggctcccccacctgccgatagcgcccctcagcagaacggccagccactccgacccctggtgcctgatgccagtaagcagcgcttgatggaaaatactgaggattggaggccaagacccggtactggtcagtcacggtcttttagaatcctcgcccatcttaccggtaccgagtttatgcaagaccccgacgaagagcacttgaagaaaagttcacaagttcctcgaacagaagcccctgcacctgcctcctccacccctcaggaaccttggcctggtcccactgccccttcccctacatcacgccctccttgggctgtagaccccgcttttgccgaacgctatgcccctgacaagacgagtacggtcctgacccgccactcgcagcccgcaaccccgacccctttacagtcaaggacatctatcgtgcaggctgccgctggcggagtaccgggaggagggtctaataacggtaagactcccgtttgtcatcagtgccacaaggtgatcaggggcaggtaccttgtggctctcggtcacgcctatcatcctgaggagttcgtctgctcccaatgcggaaaagtgctagaggagggtggtttcttcgaagaaaagggggctatcttctgccccccatgctacgacgtgaggtatgctcctagctgcgccaagtgtaagaaaaagataaccggtgaaataatgcatgcactgaaaatgacatggcatgtgcactgctttacctgcgcagcttgcaaaacaccaatacgcaatcgggctttctacatggaagaaggcgtcccgtactgtgaacgggactatgagaaaatgttcgggaccaaatgtcatgggtgtgattttaaaatagatgctggtgatcgcttcttggaggccctgggcttttcttggcatgacacttgtttcgtgtgtgctatctgccaaattaatctcgaggggaaaacgttttactctaagaaggacagacctttgtgtaagtcccacgctttctcccacgtctag

SEQ ID NO: 30022 - DNA, 864 bp, synthetic construct
  misc_feature 1..864: note = Description of Artificial Sequence: Synthetic coding sequence
  source 1..864: mol_type = other DNA
atggactcattcaaagtggtgctggaaggacctgccccttggggtttcagactgcagggaggtaaggacttcaatgtgcccctatccatcagtcgactcacacctggaggcaaggcagcgcaagcaggcgtggctgtgggcgattgggtactgtccatcgacggggaaaatgccggaagtttgacccacattgaagcccagaataaaattcgggcttgtggagagcgactaagcctcggtctttctagagcacagccagtgcagagtaaaccccagaaggcctctgccccagctgctgatccacctcgctatactttcgcaccgagtgtatctttgaacaaaaccgctcgcccattcggcgctcctcctcccgctgactcagcgcctcagcagaatggccagcccttgaggccacttgtgccagacgccagtaaacaaaggctcatggagaacaccgaagactggcgcccaagacccggaacagggcagtcccgttccttcaggattctagctcacttaacgggtaccgagtttatgcaggatcctgacgaggaacatctcaagaagagccggccataccgccctcagccataccaaccgccagctttgggatgcgggccttgtgtgtgcagagccctatgtcccggacagaacgagcacagcgccgatcccgcacagcctgcgggacacgctcacgcagcagcggagccccatttgcactgtgctggatcatgcaggcggggagctcgaagaggacagcagcagagacaggattctagagtttctccggttccccagggtcatccaggaccattgccgggaggagcgggtcctagggtgccgccaggtggtgtgtgcgtatag

SEQ ID NO: 30023 - DNA, 1272 bp, synthetic construct
  misc_feature 1..1272: note = Description of Artificial Sequence: Synthetic coding sequence
  source 1..1272: mol_type = other DNA
atggattcttttaaagtcgtgctcgaagggcctgccccttgggggtttcgactccagggcggaaaggatttcaacgtgccattgtcgatatccagactcacccctggcggtaaagccgcacaggccggagtggccgtaggagactgggttctgtcgatcgacggggagaatgctggtagtctgactcacatagaggcacagaacaaaatccgggcatgtggagaacggttaagtctcgggctgtcacgcgctcagcctgtccaatctaaaccacagaaggtgcaaacccccgacaagcagcccctgaggcccctggtcccagacgcctccaagcagcgcctgatggaaaatacagaagattggagaccccgtcccggaactggtcagagtcggtccttccgcattttggcacacctgacgggtacggagtttatgcaggacccagacgaagaacatctgaaaaagagcagccaagtgccacgtacagaagctccagcaccagcctctagcaccccccaagagccctggccgggtcctactgctcctagccctacatccaggccaccatgggccgttgatccggcttttgcggaacggtatgctcctgataaaacgtccacagtgcttacgcggcattcccagcccgcaacccccacacctcttcagtccaggacgtcgatcgttcaagccgcagctgggggagtgcccggtggcggtagtaataacggaaaaactccagtgtgtcaccaatgtcacaaggtgattcggggacgatatctggtcgcccttggtcacgcctatcatcccgaagagttcgtgtgctcacagtgcgggaaagtgctcgaagaaggtggtttttttgaagaaaaaggcgcaattttctgtcccccatgctacgacgtgaggtatgccccatcttgtgctaagtgcaagaagaagatcacgggcgaaatcatgcacgcgttaaaaatgacgtggcatgtgcactgtttcacctgcgccgcatgcaaaacccccatacgaaatcgtgctttttatatggaggagggtgtaccctactgtgagcgggactacgagaagatgttcgggacaaagtgccatggatgtgacttcaagatcgacgctggagaccgctttcttgaggctctcggatttagctggcacgatacttgtttcgtctgcgctatctgtcaaatcaatcttgaaggcaagaccttctacagtaagaaggaccggcctctgtgtaagagtcacgcctttagtcacgtgtag

SEQ ID NO: 30024 - DNA, 522 bp, synthetic construct
  misc_feature 1..522: note = Description of Artificial Sequence: Synthetic coding sequence
  source 1..522: mol_type = other DNA
atggactcatttaaggtagtcctggaggggcctgcaccttgggggtttaggctgcagggcggaaaggatttcaacgttcctttgtcaataagccgccttacaccaggcggaaaggccgcacaggctggtgtagctgtgggggattgggttttatccattgacggggagaacgccggatcccttacccatattgaagcccagaataaaattcgcgcatgtggggaacggctcagcctgggactttctcgggctcaacccgtgcaaagcaagccacagaaggcttccgcgccagcagcagatcctcccagatacacatttgccccatccgtaagcctgaataaaacggccaggccttttggcgcaccgcctcctgccgactccgcaccacagcagaatggccagcctttgaggcctttggtgcccgatgcttcgaaacagcgattaatggagaataccgaggattggaggccacgccctggcactggccaaagccgctccttcaggatcctggctcacctgtag

SEQ ID NO: 30025 - DNA, 273 bp, synthetic construct
  misc_feature 1..273: note = Description of Artificial Sequence: Synthetic coding sequence
  source 1..273: mol_type = other DNA
atggattcttttaaggtcgtgctcgaaggacctgcgccttggggcttcaggctgcaaggcggtaaggactttaatgtccctctgtcgatttctcgcctgacccctggcggtaaggcagcccaggccggtgtcgctgtaggagattgggtgctgagcattgacggcgagaatgccggttccctgacccacattgaagctcagaacaaaatacgagcctgcggagagaggctatcacttggcctatccagggcgcagcccgtccagtctaagtag

SEQ ID NO: 30026 - DNA, 492 bp, synthetic construct
  misc_feature 1..492: note = Description of Artificial Sequence: Synthetic coding sequence
  source 1..492: mol_type = other DNA
atggccgacgaggaaaaactgccgcctggctgggagaagcggatgtctagaagttctgggagagtgtattatttcaaccatataactaacgcaagccagtgggaacgacccagcgggaactcctcttctggaggcaaaaatgggcaaggggagcctgctcgggtgcggtgtagtcatctgctcgtcaagcattcccaatcccgacgaccttcctcatggcgccaggaaaagattacccggactaaagaggaggcgttagaactgattaatggttacattcagaaaataaaaagcggagaagaagacttcgaatctctagcgtcccagttcagtgactgctcttccgctaaggccagaggtgacctgggggcatttagcagggggcaaatgcagaagccattcgaagacgccagtttcgccctcagaactggggagatgtctggacctgtgttcacggactccggcattcacataatcctgcgaacagagtag

SEQ ID NO: 30027 - DNA, 138 bp, synthetic construct
  misc_feature 1..138: note = Description of Artificial Sequence: Synthetic coding sequence
  source 1..138: mol_type = other DNA
atgcaaaagcccttcgaagacgcttccttcgctttgagaacaggtgagatgtctggcccagtgtttactgacagtggcatccacattatcctcagaaccgagtgttggcgacagacaagaggtcccaactgtttttag

SEQ ID NO: 30028 - DNA, 438 bp, synthetic construct
  misc_feature 1..438: note = Description of Artificial Sequence: Synthetic coding sequence
  source 1..438: mol_type = other DNA
atggcagacgaagagaagctcccaccagggtgggaaaagcgaatgagtcgatcctccggcagagtttattactttaatcacattaccaatgcgagccagtgggagcgaccatctggaaattcgtcttccggcggtaagaacggtcagggagaaccagccagggtacgttgtagccacctgcttgtgaagcactcccagtcccgcagaccaagcagctggagacaagagaaaatcacccgcactaaagaagaggccctcgaactgattaatggatacattcagaaaattaaatccggcgaggaggatttcgaaagtttggcatcacagtttagtgattgctccagtgccaaggcacgcggagaccttggcgcattcagtagaggagcccaggggatggggctgacaagactgggggacccataccaccccgagggctag

SEQ ID NO: 30029 - DNA, 561 bp, synthetic construct
  misc_feature 1..561: note = Description of Artificial Sequence: Synthetic coding sequence
  source 1..561: mol_type = other DNA
atgaccatggttgacactgagatgcccttttggcctacaaacttcggcatttcgtccgtcgacctcagcgtcatggaggaccacagtcattcgttcgatattaagcccttcacgactgtagatttcagttcaatctccaccccccattatgaggacatccccttcaccaggaccgaccctgtggtggccgactacaagtatgatcttaaattacaggagtaccaatccgctataaaagtggagcccgctagtcctccgtactacagtgaaaaaacacaactgtacaataaaccacatgaggagccgagcaactccctgatggccatcgagtgtcgtgtgtgcggggacaaagcctccggcttccactatggcgtgcacgcctgcgagggatgcaaagggtttttcagacgcacaatccgactgaagctgatctacgatcgttgcgatctaaattgcagaatccacaagaagtcacgcaacaaatgtcagtactgtcgctttcagaaatgcctggcagttggaatgagtcacaacgaggagctgcaaaaggatagttattag

SEQ ID NO: 30030 - DNA, 1752 bp, synthetic construct
  misc_feature 1..1752: note = Description of Artificial Sequence: Synthetic coding sequence
  source 1..1752: mol_type = other DNA
atggggggactcgaaaaaaagaagtacgagaggggctccgccacaaattacatcaccagaaacaaggccaggaagaagcttcagctcagcttggccgattttaggcggctgtgtattttaaaggggatctatccgcatgaaccaaaacataaaaaaaaagtgaacaaaggttccaccgctgctaggactttttacctcattaaagatatcagattcctgctgcacgaaccgattgtcaacaagtttcgtgaatacaaagtctttgtgagaaagttaagaaaggcgtacggtaagtctgaatggaataccgtcgaaagactcaaggacaataagcctaattacaaattggaccacattatcaaggagcggtacccaacattcattgatgccttacgagacctcgatgacgcgctcagcatgtgcttcctttttagcacttttcctcggaccgggaagtgccatgttcagaccatccaattgtgtcgccgtctgaccgtcgaatttatgcattatattatcgccgcaagggccctgcggaaggtctttctctctataaagggaatttactaccaggctgaagttctcgggcagccgattgtctggattacaccttatgctttttcccacgaccacccgaccgacgtcgactatcgtgtgatggcgacctttaccgaattttacaccacattactgggcttcgtcaacttccggctgtaccaactgctgaacctgcactatccaccaaagctcgaagggcaggcccaagcggaggctaaggctggggaagggacctacgctttagactccgagtcttgcatggaaaaacttgctgccctctccgcaagcttggctcgagtggtggttcccgctaccgaggaggaagctgaagtcgacgagtttcctacagatggggaagaggaccgcagaaaagagctggaggctcaggagaaacataaaaaacttttcgaagggctgaaattctttctgaatcgcgaagtgccaagggaggcactggccttcatcattaggtcattcggaggcgaggtgtcttgggacaaatccctatgtattggagcgacctatgacgtgacagacagccggataacgcaccaaatcgtcgatagaccaggccaacagacctcggtgattggcagatgttacgttcagccgcagtgggtctttgattctgtgaacgccaggttgctgctccccgtggccgaatacttcagcggcgtacagctgccaccccacttgagtccctttgttaccgagaaagaaggagattacgttcccccagagaaactcaagctgcttgccttacagcgcggagaagaccccggaaatttgaacgagagcgaggaggaggaggaagaagatgataacaacgaaggggacggcgatgaagaaggtgaaaacgaagaggaggaggaggatgcggaagcaggttccgagaaagaagaagaggcgagactcgccgctctagaagaacaacgaatggagggtaagaagccaagagtgatggccggtacccttaagctcgaggacaaacagcggctggcgcaggaggaagaatccgaggctaagaggctggccatcatgatgatgaaaaagcgcgaaaagtatctgtatcagaagatcatgttcgggaagcgaagaaaaatcagagaagcaaacaaacttgccgaaaagagaaaagcccatgacgaggccgtgagatccgaaaaaaaagcgaaaaaggcacggccagagtag

SEQ ID NO: 30031 - DNA, 1767 bp, synthetic construct
  misc_feature 1..1767: note = Description of Artificial Sequence: Synthetic coding sequence
  source 1..1767: mol_type = other DNA
atgggaggactcgagaagaaaaagtacgagcgaggcagtgccaccaattacatcactaggaacaaagccagaaagaagttgcaactgtctctcgcagatttccggagactgtgtatcctaaagggaatctacccacacgagccaaagcacaaaaaaaaagtaaataagggctccacggcggctagaacgttctatctgattaaagacatcagatttctgctgcacgagcctattgtgaacaagttcagggaatataaggtatttgtgaggaagctgcgcaaggcttatggcaagtccgagtggaacactgtggaacggctgaaggacaacaaacccaactacaagctagaccacattatcaaggaacgctaccctactttcattgacgcattacgtgacctcgacgatgcgctctcaatgtgcttcctcttttccacttttcctcgaactgggaagtgtcacgtgcagaccatccagctctgtaggaggcttacagtggaatttatgcattacatcatagccgcacgagccttacgtaaagtgttcctatcaatcaagggcatatattatcaggcggaggtgctggggcagcccatagtgtggatcacaccttacgccttctctcacgaccatccaaccgacgttgactatcgggtcatggcgacctttactgagttttacactaccctgttggggttcgtgaatttccggctgtaccagttgcttaacctgcactatcctcccaagttggaagggcaggcacaagccgaagccaaggccggagagggaacctacgccctagattccgagagctgcatggagaagctggctgcactgagcgcgtctctggcaagagtcgtcgtacctgctactgaggaggaagccgaagttgacgaattccctaccgacggcgagatgtcagcccaggaagaggatcgaaggaaggagctggaggctcaagaaaagcataaaaaactctttgagggcctaaagttctttctcaatcgcgaagtccctagagaagcattggcgtttattattcggtccttcggcggagaagtgagctgggataaaagcctgtgtatcggggctacttatgacgtgacggattcccgcattacccaccagatcgtggaccgccctggccagcaaacaagcgtgatcggcaggtgttacgttcagccccaatgggtctttgactcagtgaatgcaagacttctcctgcctgtcgccgagtacttttccggcgtgcagcttccccctcacctcagccctttcgttactgaaaaagagggagattacgtgcctcctgagaagctgaagctcctggccctgcagcggggagaagatccaggaaatctcaatgaatccgaagaagaagaggaagaagatgataataatgagggagatggcgacgaagaaggagagaatgaagaggaagaagaggatgcggaagcagggagcgaaaaagaagaagaagccagactagcggcactcgaggagcagcgcatggagggcaaaaagcccagggtcatggcgggaactctgaagctcgaagacaaacagcggttggcgcaggaggaggagtcagaggcaaaacgattggccattatgatgatgaaaaagcgggagaagtacctttaccagaaaatcatgtttggtaaacgaaggaagatccgagaggccaataaattagcagagaaacggaaggctcacgacgaggcggtgaggtccgagaaaaaagccaaaaaggcacggccagaatag

SEQ ID NO: 30032 - DNA, 1350 bp, synthetic construct
  misc_feature 1..1350: note = Description of Artificial Sequence: Synthetic coding sequence
  source 1..1350: mol_type = other DNA
atgtgctttcttttcagcacgttcccccgtacaggcaaatgccacgtgcagacaattcaactctgccgacggctgacagtagaatttatgcattacatcattgctgctagggcactgaggaaagtttttctgtcaattaaagggatctattatcaggcagaggtgctagggcagccaatagtgtggattaccccttatgcatttagccacgatcaccccactgacgtagactaccgggtgatggccacgttcacagaattttataccacactgctcggcttcgtcaatttccggctgtatcagctgctcaacctgcactacccacctaagcttgagggacaggcgcaggccgaggcaaaagcgggagaaggaacgtatgccctggactctgaatcctgcatggagaaattggcggctctgtccgctagcctggcaagagtcgtagtgcccgcaacggaagaagaggccgaggttgacgagttccctaccgacggagagatgtccgcccaggaagaggatagacgtaaagagctcgaggcccaggagaagcacaagaaactgttcgaaggcctcaagttcttcctgaacagagaggtgcccagggaggccttagccttcattatacggagttttgggggtgaagtctcttgggacaaaagtctatgcatcggcgcaacatacgatgtcactgactcccggatcactcaccaaatagtggaccgcccagggcagcagacaagcgtcatcggaaggtgctatgtgcaaccccagtgggtgttcgacagcgtgaacgccaggctgctgctgccagtggctgagtacttttccggcgttcaactgccaccgcacctttcgcccttcgtgacggagaaggagggggactacgtcccaccagaaaagctgaagctacttgctctccagagaggagaagacccaggaaaccttaacgagtctgaggaagaagaggaagaagacgataacaatgagggtgatggtgatgaggagggtgagaatgaagaagaagaggaggatgcagaggccggaagtgagaaggaggaggaggccaggctggccgcactcgaggagcagcgcatggagggtaaaaagccacgcgttatggccggtaccttaaagctggaagacaaacagcgccttgcgcaagaggaggaatctgaagccaagcggttggccattatgatgatgaaaaagcgggagaagtacctatatcagaaaattatgttcggaaagcggcgaaagatcagggaagccaacaagttggccgagaagagaaaagcgcacgatgaggctgtgcggagcgaaaaaaaagcaaagaaggcacggccagaatag

SEQ ID NO: 30033 - DNA, 1350 bp, synthetic construct
  misc_feature 1..1350: note = Description of Artificial Sequence: Synthetic coding sequence
  source 1..1350: mol_type = other DNA
atgtgttttttgttcagcacctttcctaggaccggcaagtgtcacgtccagaccatccagttgtgccgaagactcactgtcgagttcatgcattacattattgcggctagagcactacgtaaagtctttttaagcataaagggaatttattatcaggcggaggtcctcggtcaaccaattgtttggatcactccttacgccttcagtcacgaccaccccacggatgtggattatagggtcatggccacgtttaccgaattttatacaacactactgggctttgttaacttccgattgtaccaactgttgaatctacactaccccccaaagttggaagggcaggcacaagccgaggccaaagctggcgaaggtacttacgcactggacagcgaatcatgcatggaaaagttggccgctctctcagccagcttggcccgtgtggtcgtgcccgcaactgaggaagaggccgaagtggatgagtttccgactgacggggagatgtcagcacaagaagaggacagacggaaggagttagaagctcaagaaaagcataaaaagctattcgagggattaaagtttttcctaaaccgggaagtccctagggaggctctcgctttcatcattagaagtttcggtggagaggtgagctgggataaaagcctgtgtataggagcaacttatgacgtcactgacagtcgtattacacatcaaatcgtggatcggcctggccaacagacgtccgtgatcggacgatgttacgtgcaaccacagtgggtctttgacagtgtgaatgctcgactgttgttgcccgtcgccgaatacttcagcggagtgcagttgcctccccacctgagcccctttgtcaccgagaaggaaggcgactacgttccacccgaaaagttgaagcttctggcgctgcagcgcggagaggatcccggtaacctgaatgaatctgaggaagaggaagaggaggacgataataatgagggggatggggacgaggagggtgaaaacgaagaagaagaagaggacgccgaggcaggatcagaaaaagaggaggaagccaggctggccgctctggaggaacagaggatggagggaaagaaaccaagagtgatggctggcactttgaagctggaggacaagcagcgcctggcccaagaggaggaatctgaggcgaaaaggctagctatcatgatgatgaagaaacgagaaaaatacctgtaccagaagatcatgtttggtaagaggcgtaaaatcagagaggctaataaattagcagaaaaacgtaaagcacatgatgaggctgtgaggtcagagaagaaggctaagaaggctcgtcctgagtag

SEQ ID NO: 30034 - DNA, 5154 bp, synthetic construct
  misc_feature 1..5154: note = Description of Artificial Sequence: Synthetic coding sequence
  source 1..5154: mol_type = other DNA
atggagccagccgctgcagccactgtccagcgtttacccgaactgggaagagaggatcgtgcatccgcccctgcagcagccgctgctgctgcggcagctgctgctgctgcggctgcagcacttgcggctgccgctgggggtggcaggagtccggagcccgcactgactcctgctgcgcctagtggcggaaacggttccggctctggcgcaagggaagaagcccctggcgaagcacccccaggaccactccctggcagagccggtggagccggacgtagaagaagacggggagcccctcagccaatcgcgggtggagcagcccctgtgcccggagcagggggaggcgctaattctctgttgcttcgtagggggcgacttaagagaaatttgtctgcagctgccgctgccgcatcctcttccagcagctcatccgcagctgcggcttctcactctcctggggctgcagggctcccagcatcctgctcagccagcgcgtcactgtgtacgagatctctggacaggaagacccttttactcaaacacagacagacactgcagttgcagccttctgaccgggactgggtgcggcaccaactgcaacgtggatgtgttcacgtcttcgataggcacatggcaagcacatacctgcgccctgtcctctgtaccctcgatactactgccggtgaagttgcagcccgactgcttcagctgggacacaagggaggaggcgtggttaaagttctcggacagggaccaggcgctgccgctgcccgagagcccgctgagcctccccctgaagccggtcccagactcgccccacctgagcctcgagacagcgaggtgcctccagctcgcagtgcgcctggggcattcggcggtccccctcgagcccctcccgctgaccttcccctccccgtggggggaccaggtggatggagccgacgggcttctccagctccatcggactcttcccccggtgaaccgttcgtggggggacccgtttcctccccaagagcaccgagaccagttgtttctgacacagaatcttttagtctgagcccctcggctgaaagcgtgtctgatcgccttgatccttattcttcagggggaggatcctcgtctagctcggaagagcttgaagctgatgctgcaagtgcacccacaggcgtgcctggccagcctcggaggcctggccatccagcacagccactgccactaccacagacagcctccagcccacagccacagcagaaggcaccaagagcgatcgacagcccaggaggagcagtccgggagggctcatgtgaggaaaaagccgcagccgctgttgcaccaggcggtctccaaagcactcccggtcgctctggggttactgctgagaaggccccacctcccccacctccacccactctctacgtgcagctgcacggtgagacaactaggcggctggaggccgaggagaaaccactacagattcagaatgactacctgtttcagctgggttttggcgagctgtggagagttcaggaggagggcatggactcggagattggatgcctaatccggttttacgcgggaaagccacatagtacaggatctagcgaaaggatacaactgagtgggatgtataacgtgcgtaaggggaagatgcagttgcctgtcaacaggtggactagacgtcaagtgattctctgtggcacatgtcttatcgtttccagcgtgaaggacagtctgacgggcaaaatgcatgtcctgccacttataggcggaaaagtagaagaggttaagaaacaccagcactgtctggcgttctcttccagcggcccacaaagtcaaacttattacatctgcttcgacacatttactgaatatttaaggtggctaagacaggttagtaaagttgcctctcagcggataagtagtgttgacctcagctgttgtagccttgagcacctgccggctaatctcttctattctcaggatctgactcatttgaatttaaagcagaatttcctgagacagaatccaagtcttccagccgcacgaggtttgaacgagctacagcgatttacgaagttgaagagccttaatctgtccaacaaccatctcggtgatttccccctggctgtatgctccatcccaacattggccgagctgaatgtatcgtgtaacgcgcttaggagtgtcccggcagctgttggtgtgatgcacaacttgcaaacatttttgctggacgggaactttctccagagcttgcctgcagaactggaaaacatgaagcaactaagctacctgggtttaagcttcaacgagtttacagatattcctgaagtgcttgagaagctcacagccgtggacaaactgtgcatgagtgggaactgtgttgagactctgcgacttcaggctctacggaagatgcctcacattaagcacgtcgaccttcgcctgaacgtgattcgaaagctaattgctgacgaagttgactttttgcagcatgttacacagctagatctgcgcgacaataagcttggggacctcgacgccatgatttttaacaatatcgaagtgctccactgcgagcggaaccagctcgtcaccctagatatttgtgggtactttctgaaagcactgtacgccagtagtaatgagcttgtgcagctggatgtctaccctgtcccaaattacttatcttatatggacgtaagcagaaaccgactggagaacgtaccagaatgggtgtgcgagtctaggaagttggaagttctcgacattggtcataatcagatatgcgagctgccggctagactgttttgtaatagcagcttgcgtaaactgttagctggccataatcagttggccaggctgcctgagcgcctcgaaagaaccagcgtagaggtcctcgatgtgcaacataaccagctgctggagcttcctccgaacctactgatgaaagctgatagtttaagattcctcaacgcgagcgccaataagctggagtcgctccccccagctacactgagtgaggagaccaattctatcctgcaggagctatacttgactaataatagcctgaccgacaagtgcgtgcctcttctcacaggccaccctcacctgaaaatcttgcacatggcctataatagactgcaaagtttcccagcatcaaaaatggccaagctcgaggaactggaggagatcgatctgtctggaaataaactgaaagctattccgaccaccattatgaactgtcgcaggatgcatacagtgattgctcactctaactgtatcgaagtgttccctgaggttatgcaactgcctgagatcaagtgcgtggatctgtcatgtaatgaactatccgaagtgacccttcccgagaatctcccacctaagctccaagagttggacctcaccggtaacccacgcttagtcctggatcacaagactctcgaactgttgaacaacatccgatgctttaaaattgatcaaccctctacaggcgatgcctccggtgcccctgctgtttggtcgcacgggtacactgaggcttcgggagtgaaaaataagttatgtgtcgccgcactgagcgttaacaacttctgcgataatagggaggccttatatggagtgtttgacggagaccggaacgtggaggtgccgtacctgctgcaatgtaccatgtccgacatcctcgccgaggaactgcagaaaactaaaaacgaggaggaatacatggtgaacacttttatcgtcatgcaaaggaaactcggcactgccggacaaaagctgggaggggcagccgttctctgtcatatcaagcatgatcccgtggatcccggaggatcattcacgctcacttccgccaacgtgggcaagtgtcaaacagtgctctgcaggaacgggaaacccctgcccctcagtcggtcctatatcatgagctgtgaggaggagttaaaaagaattaaacaacacaaggctatcattactgaagacggcaaagttaatggcgtgactgagtctacaaggattctgggctatacgttcctgcacccaagcgtggtcccacgtcctcatgtgcagtctgtgctcctgaccccgcaggacgagttctttatccttgggtcaaaagggctctgggattcactatccgtcgaggaggcagtggaagctgtcaggaacgtccccgatgctctagccgcagctaagaagctttgtaccctggcccagtcctatggctgtcatgacagcatttctgccgtggtggtgcagctgtccgtcacagaggattcattctgctgctgcgagttgagcgccggtggcgctgtgccccctccttctcccggaatctttcccccttcagtcaacatggtgatcaaggatcgccctagcgacggactgggggtgccatcctcatcatcaggcatggccagcgaaatcagctcggagctctcaaccagcgaaatgagctcggaagttggttccactgcaagcgacgagcctccccctggggctctgtctgagaactctcccgcatatccctccgagcagagatgtatgctgcaccctatctgtcttagtaattcctttcagcggcaactgagttcagccaccttctcctctgccttcagcgataacggacttgactcggatgatgaagagcccatagaaggcgtgtttactaacggctccagagtggaggtagaagtggatatacattgtagccgagctaaggagaaagagaagcagcagcaccttctccaagtacctgccgaagcttctgacgaaggcattgtgatctccgcgaacgaggatgagcctggtctgccacggaaagccgatttttccgcggtggggaccataggacgcagacgagcgaatgggtcagtcgcacctcaggaaagatcacataatgtgatcgaggtggcgacagacgctccgctgagaaaacccggaggatactttgccgcacctgcccaaccagacccagatgaccaatttatcatcccgccagaactggaagaggaggtgaaagaaatcatgaagcaccatcaggagcaacaacaacagcagcagccgccaccaccccctcagctgcagccacagttgccacgccattatcagttagaccagctgcctgactattatgataccccgttatat

SEQ ID NO: 30035 - DNA, 3618 bp, synthetic construct
  misc_feature 1..3618: note = Description of Artificial Sequence: Synthetic coding sequence
  source 1..3618: mol_type = other DNA
atggatagcgaaatcggctgtctcatccgcttttacgccggaaagcctcactctaccggaagcagcgaaagaatccagctgtcggggatgtataacgtgagaaagggaaaaatgcagttgccagttaatcggtggactagacgccaagtgatcctgtgtgggacttgcctgatcgtttcatccgtgaaggactctctgacaggcaagatgcacgtcttgccactgataggtggaaaagtcgaggaggtaaagaagcatcagcactgcctggccttctcttccagcgggccacagtcccagacttattacatctgttttgatacgtttaccgagtatcttagatggttgcggcaggtgtccaaagtagccagccagcggatctcatccgtggatctgagctgctgctcgctcgagcacctgcccgcaaatctgttttactcacaggatttaacccatctaaacctcaagcagaactttctaagacagaacccttctctccccgcagccagggggcttaacgagctgcagcgtttcactaagctcaaatccctcaacctcagcaataatcatctgggggacttcccactggctgtctgctccatcccaaccttggcggagctcaacgtcagttgtaatgctctgagaagcgtgccggctgctgtcggggtgatgcataacttacagacatttcttcttgatggtaacttcttacagtctttacctgcggagctagagaatatgaagcaattatcctatctgggcctgagctttaacgagtttactgacattccagaggtcctcgaaaagctgacagccgtcgataaattatgcatgagcggcaattgtgtcgagaccttgaggctgcaggccctgcggaagatgcctcacatcaagcatgtggatctacggctgaacgtgatcagaaagcttattgccgatgaggttgacttcctccagcacgtcacacaactcgacttacgggataacaagctaggtgacctggatgccatgatcttcaacaatattgaggtgctccattgtgaaaggaatcaactcgtgacgttagatatctgtgggtacttcctcaaggccctgtatgcgtcatccaatgagctggtgcagctggacgtctatccagttccaaactatctgtcatacatggatgtgagccgaaacaggctcgaaaatgtccctgagtgggtgtgcgaaagcaggaagctggaggttctcgatattggtcataaccagatctgcgagctgccagcaagactgttctgcaactctagcctgagaaaactgctggctgggcacaaccagctggcaaggctgcccgaacgacttgagcgcacgtcggttgaggtcctggatgtgcaacacaatcagcttctggagctgccgccaaatttgctgatgaaggcagacagtttgagatttctcaacgccagcgctaacaaacttgagtcccttccaccagctacgttgagcgaggagactaactccatcctgcaggagctgtatctgactaataactctttgaccgacaagtgtgtcccactgctgaccggccacccccatctgaagatcttacacatggcgtacaaccgcttacaaagttttccagcttcaaagatggccaagcttgaggagttggaggaaatcgaccttagtggcaacaagcttaaggcgatccccacaaccataatgaattgtcgtaggatgcatacggtgatagctcacagcaattgtatcgaagtttttccggaggtcatgcagttaccagagattaagtgtgtcgacctgagctgtaacgagctttccgaggtgaccctgccggaaaatctcccccctaagctgcaggagcttgacctcacagggaatccccgactggtccttgatcacaagacactcgagctccttaataacattcgatgctttaaaattgatcagccatctacaggcgacgccagtggagcacccgctgtgtggtcccatgggtataccgaagccagcggggtgaagaacaaactgtgcgttgcggcactgtctgtgaacaacttctgcgataatagggaagccctctatggagttttcgatggggatcgaaacgtagaagttccttatttgctgcagtgcaccatgagtgacatactcgcagaagaactgcaaaaaacaaaaaatgaagaagagtacatggtgaacacatttattgtcatgcagcggaaactggggactgccggacaaaaacttggaggagctgcggtgctgtgtcacattaaacacgatcctgtggatccgggaggcagttttacccttacttcagccaacgtcggaaagtgccagaccgttctctgtaggaacggaaagcctcttccactttccagatcctacatcatgtcttgtgaagaggagcttaaacgcattaagcagcacaaggcgatcatcacagaagacggaaaagtaaatggagtcactgagtccactaggatcctcggttatactttcctccatccttctgtagtgccaagaccgcacgttcagagtgtgctcctgacaccgcaggacgagtttttcatccttgggtccaaaggcctgtgggactccttgagcgtggaggaagcagtggaggctgtgaggaatgtccccgatgcacttgcggctgccaaaaaattatgtacattggcccagagttatgggtgtcacgactcgattagcgctgtggtcgtccaactgagcgttactgaagatagtttttgttgctgtgaactgtcagctggtggtgccgtgccgccaccttctcctgggatatttcctccgtccgtgaacatggttatcaaagataggccctccgatgggctcggggtgcctagcagctcatctggaatggcttccgagataagttccgagctctctaccagtgagatgtctagcgaggttggatccactgctagtgatgaaccaccccctggcgcattgtctgagaactcgccagcctatccctccgaacagaggtgtatgctccaccctatttgcctgtccaactcttttcaacggcaactgagctcagccacgttttcctcagcttttagtgataatggcctcgatagcgatgacgaagagccaatagagggggtgtttaccaacggcagcagggttgaagtagaagtggacatccattgtagcagggctaaggagaaggaaaagcaacaacaccttttacaggttcctgccgaggcttcggatgagggcattgtgatctccgccaatgaagacgagcctggccttccgaggaaagcggacttttctgccgtgggcactattggtcggcgtcgggcaaacgggagcgtggcaccgcaagagcgcagccacaacgtcattgaggttgcaaccgacgcgcctctgagaaagcctgggggatacttcgccgcacccgcacagcctgaccccgatgatcagttcattatccctcctgagcttgaggaagaagtcaaggaaattatgaagcatcatcaggagcagcagcagcaacaacagcccccaccgccaccccagctgcaaccgcagctgccgagacattaccagttggatcagcttcctgactattacgacaccccactctag

SEQ ID NO: 30036 - DNA, 2379 bp, synthetic construct
  misc_feature 1..2379: note = Description of Artificial Sequence: Synthetic coding sequence
  source 1..2379: mol_type = other DNA
atgcacatcctgcccctggtcggcggaaaaattgaagaggtcaagagaagacagtacagcctagctttcagctcagctggagcacaggctcaaacataccatgtgtccttcgagaccctggctgagtaccagaggtggcagcgtcaagcaagcaaagtggtgtcccagcggattagtaccgtggacctgtcctgttattctcttgaggaagtgcctgaacacctcttttacagtcaagatatcacatacctcaacctgcgtcacaattttatgcaattggagaggccgggaggattggatactctgtataagttctcacagctgaagggcctcaacttgagccacaataagctcggtctcttcccaatactgttgtgcgagattagtacactaaccgagctgaacctgtcctgtaacggcttccacgacttacccagccaaattggtaacctgcttaatctgcagaccctgtgcctggacggcaatttcttaactacacttccagaggaactggggaatctgcaacagctgtcttccctcgggatctcctttaataacttcagtcagatccctgaggtttatgagaaactaacgatgctggaccgggtggtgatggcaggtaattgcctcgaagtgcttaacctgggtgtcctgaacaggatgaatcacattaaacacgtagacctgagaatgaaccacttgaaaactatggttatcgaaaacttagaggggaataagcacattacacatgtggatctgcgagacaaccgcttgaccgatctcgatctgtcctccctctgctccctcgagcaactgcactgcggacgaaaccagcttagagaactgaccctgagcggcttctccctgcggaccctctacgcctctagtaatcgacttactgccgtcaacgtctatccggtgccatccctgctcaccttcctggatctttcacgcaacctgctggagtgcgtgcccgattgggcttgtgaagctaagaaaatcgaggttctagatgtttcctataacctcctaactgaagtccccgtgcgcatactcagcagtttgagcttgcgaaagctgatgttggggcacaatcacgtgcagaacctgccaaccctcgtcgaacatattcccctggaggtcctcgatctgcagcacaatgcactgacccggcttcctgatactttgttctccaaagccctcaacctgagatacctgaatgccagcgcaaactcattggagtcactcccatctgcttgtacaggagaggaatcacttagcatgctacagctactgtacctcactaacaacctactgactgaccaatgcataccggtcctggtgggacacctccacctgcgaatcctgcacctggccaacaaccagctccagacgttcccagcgtccaagctgaacaaactggaacagctggaggaattaaatctttcggggaacaagctcaagacgatccctacaacaattgcgaattgtaagcgtttacacaccttagtggcacacagcaataacatcagcattttcccagaaattcttcagctaccacagattcagttcgtcgatctgtcctgcaatgacctcactgaaattctgattcccgaggctctgcctgcaaccttacaggatctggaccttaccggtaacaccaatctcgttctagagcacaagaccttagacatatttagtcacattactaccctgaaaatcgaccaaaagcccctccccacaactgacagcactgtcacctctaccttctggagccacggactggctgaaatggcgggacagagaaacaaattgtgcgtttctgcattggccatggatagctttgccgaaggggttggggctgtttatggcatgttcgatggagaccggaatgaagaactgcctaggctgctccaatgtaccatggccgacgtgctcctggaggaggtacaacagagcaccaacgacactgtgtttatggctaacaccttcctggtttctcatcgcaagctgggcatggcgggtcagaagctgggctcgtctgcactcctgtgctatattcgccctgacactgctgacccggcatcaagctttagcctgactgtggctaacgttggaacttgtcaggcagtactgtgcaggggaggcaagcccgtgccgctgtccaaagtgttcagtcttgagcaagatccggaggaagcccagcgagttaaggaccaaaaggcaatcatcaccgaggtacccgaggatctcaaagagttccaaactactgatatccccgtgcatcactgtaattttagggccgtgcttggttgcttgtgtagcgcatccgtgcttggctcctacgcaggaccagccccaaggtggagaagaacgtag

SEQ ID NO: 30037 - DNA, 3972 bp, synthetic construct
  misc_feature 1..3972: note = Description of Artificial Sequence: Synthetic coding sequence
  source 1..3972: mol_type = other DNA
atgaagcggaatggttcacggaattgtctgaaccgacggtcacgcttcggcagtagggaaagagactggctcagggaagacgtaaagcggggatgtgtctacttgtacggcgctgacacaacaacggccaccactacaacaactacaagctcatcaagcagctcctcttccagttccagcgacctgcacttagtcttatgcaccgtcgagacccccgcatcagagatttgtgccggtgaaggaagggagtcactgtatctacagctgcacggagacctggtgaggagactggagccaaccgagagacccctgcagatcgtttacgactacctgtccagactgggctttgacgaccctgtcaggattcaggaagaggcaacaaatccagacctggggtgcatgatccgcttctatggtgagaagccttgtcacatggatcgactggatcggattttgctctcagggatttataacgtcaggaaaggcaaaacacagctacacaagtgggcagagcggctagtggtgttatgtgggacatgcctcatagtgtcttccgtcaaggactgtcagacaggaaaaatgcacattctgcccctggtcgggggaaaaatagaggaggtgaagcgtcgccagtactctttagccttttcatccgctggggctcaggctcagacgtatcacgtatccttcgaaacactggccgagtatcagcgctggcagcgtcaagctagcaaggtggttagccagagaatctccaccgtggacctctcatgttacagcctggaagaggtgcccgagcacttgttctatagccaggacatcacttacctgaatttgcgccataattttatgcagttagaaagacctggaggtctagacactctttacaagttctctcagctgaaaggcctcaatctctctcataataaacttgggttgtttccgatcctgttatgcgaaattagcactttgacagaactgaatttgtcttgcaacgggtttcatgacctgccttcccaaattggtaacttgctcaatctgcagacactttgtttggacggcaacttcttgaccaccctcccagaggaactggggaatctccagcagctgtcttccttgggcatttcattcaacaatttctcccagattccggaggtgtacgagaaactcaccatgttggatcgggtagtcatggcgggaaactgtttggaagttcttaatctgggcgtgttgaacaggatgaaccacatcaagcacgtagatctgcgaatgaaccatcttaagaccatggtgatcgaaaacctggaagggaacaagcatattacccatgtcgaccttagggacaacagactgacagatcttgatctgagctccctgtgcagtttggaacagttgcattgcgggagaaaccaactcagagagttaaccttatctggcttctccctgcggaccttgtacgctagtagcaacagattaaccgccgtgaacgtataccctgttccatccctgctgactttcctcgatctgtccagaaaccttctcgagtgcgtcccagattgggcatgcgaggctaaaaagatagaggtgctggatgtctcttacaacctcctgaccgaagtgcccgtgaggatcttgtcaagtctgtctcttcgcaaactcatgttagggcacaatcacgtgcagaacctgcccaccctagtggagcacatccctctggaggtcctcgatctacaacacaacgcgctgacgcgccttcccgacacactgttttcgaaagccctcaacctgcgatatctcaatgctagtgcgaactcattagagtctctgccttcagcctgtactggggaagaatcgctgtcgatgcttcagctcttgtatttgacaaataacctgcttaccgaccagtgtattcctgttctggtgggccatcttcatctcagaattttgcatctagcgaacaaccagctgcagacgtttccagcaagtaaactcaataagctggagcaattggaagagctcaacctatccggaaacaagcttaaaaccatcccaacgaccatcgctaactgcaaacggttgcacaccctggtcgcccacagcaacaatatcagtatctttccagagatcctgcagctgccacaaatacagttcgtggacctgagctgtaatgacctgacagaaattctgatcccagaggctctgccggctaccctgcaggacctcgacttaactggcaacactaacctggtgttagaacataaaacacttgacatcttctcccacatcaccaccttaaagattgatcagaagccattaccaaccactgacagtacagtgacttctacattctggtcccacgggttggccgagatggcgggtcagcggaacaagctatgcgtgagtgccctcgctatggattcattcgccgaaggcgttggggcagtgtacggcatgttcgatggagatagaaatgaagaactacccagactgcttcagtgcacgatggcagacgtgctgctcgaagaggtgcaacagagtacgaacgataccgtcttcatggctaacactttcctggtctcacatagaaagttgggtatggcagggcaaaagctcgggagtagcgccctcctctgctacatccggcctgataccgccgatcccgcttcttcattcagcctgaccgtggctaatgtcggtacttgtcaagctgtcctgtgcagaggaggcaaaccagtacccctgtcaaaggtcttctctctggaacaggacccggaggaagcacagcgggtgaaagatcaaaaagcgatcatcaccgaagataacaaagtcaacggggtgacctgctgtacacggatgctggggtgcacttacttgtacccttggattttgcctaaaccacacatctcatctacaccgctgaccatccaggacgagctcctgatactgggcaataaggctttgtgggagcatttgtcctacacagaggccgtgaatgcagttcgacacgtgcaggaccctctggcggctgctaagaaactatgtactcttgcgcagagttatggatgtcaggacaatgtcggcgcaatggttgtgtatctgaacattggcgaagagggatgcacatgcgaaatgaacgggttaactttgccgggaccagtgggctttgcttccacaactaccatcaaagacgctcctaagcccgcaaccccttcatcctcaagcggcatcgcgagtgagttctcttcggagatgtcaactagcgaggtgtcatccgaggttggctctacagcaagcgacgagcataatgcaggaggcctcgacaccgctttgttaccccgtcctgaaagaaggtgtagcctccaccccacgcctacctccggtttattccagcggcaaccctcttcagccaccttttcttctaatcagtccgacaacggactcgattctgacgacgaccaacccgtggagggtgtgatcacgaatggcagcaaggtggaggtggaggttgatatacactgttgtcgtgggcgagacctggaaaacagtcctcctctgatcgagagcagtccgacgctgtgttctgaggagcatgccagaggcagctgttttggaatccgaagacagaacagtgtgaacagcggcatgctgttgccaatgagcaaagaccggatggagctgcagaaatccccctccacaagctgcctttatgggaaaaagctgtccaacggttctatcgtccccctggaggacagtctcaatctgattgaagttgccaccgaagtgcccaagcggaagacgggttatttcgctgcccctactcagatggagccagaagaccagtttgtggtcccgcacgatttggaggaggaagtaaaagaacagatgaaacagcaccaagatagtcggttggagcctgagcctcatgaagaagatagaactgagcctccggaagaatttgacacagcgctctag

SEQ ID NO: 30038 - DNA, 2871 bp, synthetic construct
  misc_feature 1..2871: note = Description of Artificial Sequence: Synthetic coding sequence
  source 1..2871: mol_type = other DNA
atgaaacgcaatggtagccgaaattgtctcaatcggagatccaggttcggcagccgcgagcgggactggctgcgtgaggatgtcaaaagaggatgtgtctacttgtatggggcagacactacgacggctactaccactactacgacgagtagcagttcctcatcctcgagctcgtccagtgatttgcacttagtactgtgcacagtcgagacacccgcttcggaaatctgcgctggggaaggacgagaatctctttatcttcaactccatggcgacctagtgcggcgactggagcccacagagcgaccgttgcagatagtttacgactatttaagtaggctgggcttcgatgaccctgttcggattcaagaggaagctacaaaccccgacctgggatgcatgatccgcttctacggcgagaagccatgccacatggatcggcttgatcggatactgctttccggcatatacaatgtccgtaaagggaaaacacagctgcataaatgggcggagcggctggtggttctctgcggcacatgcttaattgtctcttcagtcaaggactgccagacaggtaagatgcatatcctgcccctggtcggcggaaagattgaggaggtcaagcgacgccagtatagcctcgcgtttagttccgcaggcgctcaggctcagacatatcacgtgtctttcgaaactctcgcagagtatcagcgctggcagcggcaggccagcaaggtcgtgtctcagaggattagcacagtggacttaagttgctactccctggaggaggtgccggaacatctgttctactcacaagatattacatatctgaatctgcgccacaacttcatgcagctcgaacgccctgggggtcttgacaccttgtataagttttcgcagttgaagggactgaatctgagccacaacaaacttggcctgtttcctattctgctgtgcgaaatctcgactctgaccgaactaaatctgtcttgcaacggtttccacgatttaccatctcaaatcggtaacctgctgaacttgcaaacgctgtgtctggatgggaatttcctgaccactctaccagaggagctaggcaacctgcagcagctctcttcactcggcatcagcttcaacaatttcagtcagattccggaagtatacgaaaagctgaccatgcttgaccgcgttgtgatggcaggaaactgcctggaggtacttaacctgggagtactgaatcggatgaaccatatcaaacacgtagacctgcgcatgaatcatctcaagactatggttattgaaaacctcgagggaaacaaacacataacgcacgtggatcttcgcgataaccgcctcactgacctggatctctcatccttgtgtagtttggaacagctccattgcggccgaaatcagttgcgtgagttgaccctgtcgggcttttctctgagaacactctatgcatcttccaatcggctgaccgctgtcaacgtttatccggtcccttctctcttgaccttccttgatttaagtcggaacctgctggagtgtgtgccagactgggcgtgtgaggccaaaaagatagaggttttggatgtgagttataacttgctgaccgaagtacctgtacgcatcctaagcagtctgtcccttcggaagttaatgctgggacacaaccatgtgcagaacttacccacgctggtggagcatatacctctggaggtcctcgacctgcagcataatgcactaacccgacttccagatactctattcagtaaagctctgaacctgagatacctgaatgcttcagccaactcattggaatctctgcctagtgcctgcacaggggaggagtccctgtccatgctgcagctcttgtatttgacaaacaacctcttaaccgatcagtgtatccccgtactggttgggcatctgcacctccgcatcctgcacctcgctaacaaccagctacaaacctttcccgctagcaaactcaacaaactcgagcagctcgaagagctgaacctcagtggcaacaagctcaaaacaatcccgactacaattgcaaactgcaagagacttcataccctcgtagctcactcaaataatatcagtattttccccgagatcctgcaactcccccagatacaatttgttgacctgagctgcaatgatttgaccgagatcctcatccccgaggccttaccagccaccctccaggatctggacctcacgggtaacactaacttagtgctggagcacaagactctggacattttttcccatatcaccactctcaagattgaccaaaagcccttaccaacaacggattcgacagtgacctccaccttttggtcccacgggctagccgaaatggctggacaaaggaataagctctgtgtaagcgcattggcgatggactcttttgcagagggcgtgggcgcagtgtatgggatgttcgatggtgacaggaacgaggagcttccacgactcctgcagtgtactatggcagacgtcctgctcgaagaagtccaacagagcactaatgacactgtgtttatggcaaacacttttttggtgtctcacaggaagctaggcatggctgggcagaagctgggatctagcgcgctcctgtgctatattcggcctgataccgctgaccccgcaagttcattcagtctcaccgtcgccaatgtggggacatgtcaggcagtactatgcaggggtggcaagccggttcctttgagcaaagtgttcagcctggaacaagatcccgaggaggcccagagagtaaaggaccagaaggcgatcatcacggaaaattgggtcttgaatcagaaacacctccaggattttcccggagaggataaatag

SEQ ID NO: 30039 - DNA, 3771 bp, synthetic construct
  misc_feature 1..3771: note = Description of Artificial Sequence: Synthetic coding sequence
  source 1..3771: mol_type = other DNA
atgaagagaaacggaagtcgaaactgcttgaaccgcagatcacgctttggctcccgagagcgcgactggcttcgcgaagacgtcaagcgaggatgtgtctacctttatggcgctgacaccactactgcaaccactacgaccaccacgtcatctagttcttcaagctcttcaagctcttctgacctgcacctggtgctatgtacagtggagacccctgccagcgagatctgtgctggagagggcagagagtctttatacttacaattgcatggagatcttgtacgccgtctggagccaacagagaggcccttacaaatagtctacgactacctgagtcggttgggtttcgacgatcctgtgaggatacaggaggaggctaccaatccagaccttggctgtatgattcggttctacggggaaaagccgtgccatatggacagactagaccgaatccttctgtctggcatctacaacgtgaggaagggaaagacacaacttcataagtgggcggagaggctggtcgtgctgtgtggaacctgcctgatagtcagctccgtcaaggactgccaaaccggcaagatgcatattctccccctggtgggtggaaaaatcgaagaagttaagagacgtcagtactccttagcgttctcgtcagctggggcacaggctcagacctaccacgtgtcttttgaaaccttagcagaatatcaaagatggcagagacaggcaagtaaggtggtgtctcagaggatttcaacagtggatctgtcctgctatagcctggaggaggtcccagagcatctcttctactctcaggacattacctacctgaacctgcgccataatttcatgcagctggagcgtccaggaggcctggacacattgtataagttcagccagcttaaaggactgaatctctctcacaataagctgggcctcttcccgatcctgctatgcgaaattagcaccctgactgaactaaatctgtcttgcaatggatttcacgatcttccgagtcagattgggaacttgctgaacctccagactctgtgcctggacgggaatttcctaacgaccctgcctgaagagctgggcaatctgcagcaactgtcaagcctcgggatttcatttaacaacttttcgcaaattcctgaagtatacgaaaaacttacaatgctggaccgagtcgtcatggccggaaattgtttggaagtgctcaatctgggtgtgctgaaccgcatgaatcacattaaacatgtggatctacgaatgaaccacctcaagactatggtgattgaaaacctggaaggaaataagcatataacccacgtggatctcagggataaccgactgaccgacctggatctcagttctctgtgctctctggaacagcttcattgcgggagaaatcaactgcgtgagctgactctctccggatttagcctgcggaccctgtacgctagctccaataggcttacggccgtaaacgtgtaccccgtgccatcgctgctgacctttttggatctgagtcggaatctactggaatgtgtcccagattgggcctgcgaagctaaaaagatcgaggtgttagacgtgtcctataatttactgactgaggtcccagtaagaatcctgagctccctgtcactgaggaagttgatgttaggccacaaccacgtccaaaatctgcccaccctggttgagcacatcccattagaggtgctggacttgcagcataacgccctcacccggttgcccgatactctgtttagcaaggccttaaataagctgaacaagctggaacagttagaggagctcaatctatcaggaaacaaactgaaaactatccctacgaccatcgctaattgtaaaagactgcatacactggtagcacatagtaataacatttctatctttccagagattctgcagcttccacagatccaattcgtggacctgtcgtgcaacgatctgaccgaaattttgatcccagaggcccttcctgcaactctgcaggacctggacctgacagggaatactaacttagtgctcgagcacaaaacccttgatatctttagtcacattaccacactgaagatcgatcaaaagcctcttcctacaacggattccaccgtaacaagcaccttctggtcccatggcctcgccgagatggccggacagcgcaataagctttgcgtgagtgcactggccatggatagtttcgcagagggggtgggagccgtgtatggcatgttcgacggtgataggaatgaagaattgcctcgcctgctacagtgcacaatggccgacgtcttactcgaggaggttcaacagtctactaatgacactgtctttatggcaaacacattcttggtttcacaccgcaagttaggcatggcaggccagaagctgggttcgtctgccctgctctgctatatcagaccagacacagctgaccctgcctcttccttctcactgaccgtggctaacgtgggcacttgtcaggccgtattgtgccgcggtggtaaacccgtccccctgtcgaaagtcttttccctcgagcaggaccctgaagaggcccagcgcgtcaaggatcagaaggccattataaccgaagataataaggtgaacggtgtaacttgctgtactcggatgctaggctgtacatacctttacccctggattctccccaagccccatatctcttcaactccactgacaatccaggacgagctcctgattctaggcaacaaggccctttgggagcatctgtcctacacagaggctgtgaacgcagttcgacacgtccaagacccattagccgcagcaaagaagctgtgtactcttgctcaatcttacggctgtcaagacaacgtgggcgctatggtcgtttacctcaacatcggcgaggagggatgcacttgcgaaatgaacgggctgacactccctggccctgtgggatttgcctccaccaccaccatcaaagacgccccaaaacccgcaacgccttcctcttcttccggtattgctagcgaattctcctctgagatgagcactagcgaggtgagtagtgaagttggttctaccgctagcgatgaacacaacgcaggcggactcgacaccgctttgctgcctaggcctgaacgaaggtgttcgctgcaccccacaccaacgtccgggctcttccaaaggcagccctcatcagctacatttagctctaaccaaagcgacaatggcctagatagtgatgatgatcagcccgtggagggggttataactaacgggtcaaaggtggaagtggaggtggatattcattgttgtaggggcagggatcttgagaacagcccgccactgattgaatctagccccaccctgtgcagcgaagaacatgccaggggtagctgtttcgggattagaaggcagaattccgtaaattctggcatgctgctacctatgtccaaagatcgaatggaacttcagaagtcaccaagtacttcatgtctgtatgggaaaaaactctccaacggctctattgtccccctcgaggatagccttaacctgatagaggttgctaccgaagttcctaagcgcaagactggatatttcgcagctccaacacagatggagcctgaggatcagttcgtagtgcctcacgatctggaggaagaggttaaagagcaaatgaagcagcaccaagattctcggcttgagcccgagccacatgaggaagaccggacagagcccccagaagaattcgataccgctctgtag

SEQ ID NO: 30040 - DNA, 1272 bp, synthetic construct
  misc_feature 1..1272: note = Description of Artificial Sequence: Synthetic coding sequence
  source 1..1272: mol_type = other DNA
atgaagaggaatgggagccggaactgcctcaaccgtcgatctcggtttggttcccgtgaacgagactggctaagagaagacgtcaagagaggatgcgtatatctttatggggcagatactactaccgccaccaccacaacaaccacaagttcctctagctcaagcagttcctcatcatctgacctgcaccttgtattgtgtacagttgaaacgccagcttccgagatctgtgctggagaaggacgagagagcctctacctgcagctccatggagatttggttcgtcgcttggagcccacagagaggccattacagatcgtttatgactacctgtcgagactcggcttcgacgacccagttcgcattcaggaagaagccactaaccctgacctcgggtgtatgatccgtttctatggcgaaaagccatgccacatggataggctggatcgcattcttctcagcggaatctataacgtgaggaagggtaagacacagctgcacaaatgggctgagcggctagtggtgctctgtggcacatgcctgatcgtctctagcgtcaaagactgccagacaggcaagatgcacattctgcctctcgtcgggggaaaaatagaggaagtaaaaaggcgccagtacagcctagctttctcttccgcaggagcccaagcacaaacataccacgttagctttgaaactttggctgaataccagagatggcagcgacaggcaagcaaagtggtgtcccaacggatttccaccgtcgacctgtcatgctactccctcgaagaggtgccagagcaccttttttactcccaagatataacttatctcaatctgcgacacaatttcatgcagctcgaaaggcccggtgggctggacactctgtacaaattctcccagctgaagggccttaacttgtcacacaacaaattgggcctgttcccgatccttctgtgtgaaatctccacgctgacggagctgaacctgagttgtaacggattccatgaccttcccagccagatcggtaatctacttaatttgcagaccctgtgtcttgacggaaattttctaaccacgctaccggaggaactcggcaatctacaacagctaagcagtctggggattagcttcaacaacttctcacaaattccagaggtgtatgagaaacttactatgctggaccgagtggttatggcgggaaattgcctcgaggtgctcaatctgggcgtgcttaataggatgaatcacattaaacatgtggaccttaggtag

SEQ ID NO: 30041 - DNA, 501 bp, synthetic construct
  misc_feature 1..501: note = Description of Artificial Sequence: Synthetic coding sequence
  source 1..501: mol_type = other DNA
atggcaggtcagaggaataagctttgtgtgagcgctctggcaatggacagttttgccgagggagttggcgcagtttacgggatgtttgatggcgatcgcaatgaggagttgccaaggctcctgcagtgcactatggctgacgtgctgctcgaagaagtccagcagagcactaatgacacggttttcatggcaaatacctttctggtgtcacaccgaaagctgggaatggcgggtcagaaactgggctcaagcgctttactttgttacattcggccagacacggcagaccccgctagtagcttctcactgactgtggcaaacgtcgggacttgccaggctgttctgtgtcggggaggcaagccagtacccctcagtaaggtctttagcctggagcaggaccctgaggaggcacagagagtgaaagatcagaaagccatcatcacggaaaattgggtgctcaatcagaagcacctccaggattttcctggggaagacaagtag

SEQ ID NO: 30042 - DNA, 3972 bp, synthetic construct
  misc_feature 1..3972: note = Description of Artificial Sequence: Synthetic coding sequence
  source 1..3972: mol_type = other DNA
atgaagagaaacggatcaagaaattgcttgaatagacggtctagatttggcagcagggaaagggactggctcagagaggatgttaagcgtggctgcgtctatttgtacggcgcagacacgactaccgccacaaccacaaccacaacgagtagtagctcttctagctccagctcttcgtcagacttgcatcttgtgctctgcacggtcgaaactcccgctagtgaaatctgcgctggagaaggacgtgagtcactgtatcttcagctgcacggagatctcgtacgccgattggagccaaccgaacggcctttacagattgtgtacgattatctctcccggttaggcttcgacgaccctgtgcgcatacaggaggaagccacgaatcctgatttggggtgtatgataaggttctacggcgagaaaccatgtcacatggatcgtctagataggatcttactcagcgggatctacaacgttcggaaaggcaagacacagctgcacaagtgggcagagcggttggtggtgctttgtggaacatgcctgattgtctcttcggttaaggattgccaaacaggcaagatgcacattctgccactggtgggagggaaaatcgaagaggtcaagcgcaggcagtatagcctcgccttcagcagcgcgggagctcaggctcagacataccatgtgagtttcgagaccctggcggagtatcagcgatggcagcggcaggcaagtaaagtggtgtctcagaggatctccacagtggacctgtcatgctatagtctcgaggaagttcccgagcacttgttctatagccaggatataacatacctgaacctgagacacaactttatgcagttggaacgcccaggcggactggataccctgtacaaattctctcagctgaagggcctcaatctaagccataataagcttggcctctttccgatattactttgtgagatttcgactctgacagaacttaatctgagctgtaatggcttccacgatttacccagccaaatcggcaacctcctcaacctgcaaactttatgcctggacggcaattttctgaccactctcccggaggagctcggcaatctccagcagctctccagcctggggatttctttcaataatttttcccagattccagaagtgtacgaaaaactaacgatgctggatcgagtggtgatggctggaaactgtctggaagtactgaatcttggagttctgaaccgaatgaaccatattaaacacgtggatctgagaatgaaccacctcaagacgatggtcattgaaaacctagaaggtaacaagcatataacccatgtggacctgcgcgacaatcgacttacagacttggacctgtcctctctgtgctccctagaacaactccactgcggacgcaaccagcttcgggagctgaccctctccgggttttcactccggacattgtacgcctcatcaaaccggctgacagcggtgaacgtgtacccagttccgtcgctgcttacctttttggacctgtcacgtaatctgctggagtgcgtgcccgactgggcatgtgaggccaaaaaaatcgaagttctagacgttagctataatctactcaccgaagtccctgttcggatcctgtccagtctcagtctcagaaaactcatgttgggccataatcacgttcagaacctgcccactctcgttgagcatattcctctggaagtgcttgatctgcagcataatgccttaacccgcctgcctgacactctgttctccaaagcactcaatctaagatacctcaatgcctctgctaatagtctcgaatctctcccatccgcctgtactggagaagagtcacttagcatgctgcagttactatacttgactaacaacctgttgactgaccagtgtatccccgtgctggtggggcacttgcaccttcgaattctgcatctcgccaataaccaattgcagaccttccctgcgagcaaactgaacaagctcgagcagctcgaggagctgaacctatcaggaaataagttgaagactatccccacgacaattgcaaactgcaagcgccttcacacactggtggcccactcaaataacatttcaattttccctgagattctgcagttaccccagattcagttcgtggacctcagttgtaatgaccttaccgaaattctgattcccgaagcattgcccgctaccctccaggacctggacctgacgggcaatactaatttagtgctggaacacaagacactggatattttttcccacattactaccctcaagatcgaccaaaagccactcccaacaacggattccacggtcaccagcaccttttggtctcatggacttgcagagatggctggccagagaaataagctttgtgtatctgccctggcaatggacagctttgctgagggcgtgggcgcagtgtatggaatgttcgatggggataggaacgaggagcttcccagattgctgcaatgcaccatggccgatgtgttactcgaagaggttcaacagtccaccaacgacactgtcttcatggctaacacatttctcgtatcccatcgtaaactgggcatggccggacagaaactgggtagctccgcactgctgtgttacattcgccctgacaccgccgatcccgctagttccttctctctcacagtagccaatgtaggaacctgccaggctgtgctgtgtagaggcggtaagcctgttccgctgagcaaggtgttctctctggagcaggacccagaagaagctcagcgagttaaagatcaaaaggccattatcactgaagacaacaaggtgaatggggtgacctgttgtacgcgcatgcttggatgcacatacctgtacccatggattctgcctaagccccacattagctccactcccctaactatccaagatgagctccttatcctgggtaacaaggccctgtgggagcatctcagctataccgaggccgtgaacgctgtgaggcatgtccaggaccccctggccgcagctaaaaagctttgcacccttgcccagtcatatgggtgccaggacaacgtcggcgcaatggttgtgtacttaaacatcggagaggaggggtgtacctgtgaaatgaatggtctgaccctccccggtcccgtgggatttgcgagcaccactaccatcaaagatgcaccaaaaccagccacaccctcttcatcttccggtattgcgtcagaatttagtagtgaaatgagcacttctgaagtttctagtgaagtgggttcaactgctagcgatgagcataatgccggaggtttagacaccgctctccttccaaggccggaaaggagatgctcacttcacccaacaccaacctccgggctgttccagcggcaacccagcagcgctaccttctccagtaaccaaagtgataatggcctcgactctgatgatgaccagcccgtggaaggcgtgattaccaatggatcaaaggttgaagtggaggtggatatacactgttgtagggggagagacttagagaattctcctccattgattgaatcctcgccaaccttgtgtagtgaagagcatgcacggggtagctgcttcggtatccgcaggcagaactcagttaattccggcatgctgctacccatgtctaaggatcgtatggaactgcagaagtccccgtctacctcctgcctttacgggaaaaagctgtctaatggcagtattgttcccctggaggattcgctgaatttaatagaggtggccaccgaggtacccaagcggaaaacgggctatttcgcagcacctacacaaatggagcccgaagaccagttcgtggtaccacacgatttagaagaagaagtcaaggagcagatgaagcagcatcaggattctcgcctcgagcctgagcctcacgaggaagaccgcacggaacctccagaggagtttgacacagccctctag

SEQ ID NO: 30043 - DNA, 1212 bp, synthetic construct
  misc_feature 1..1212: note = Description of Artificial Sequence: Synthetic coding sequence
  source 1..1212: mol_type = other DNA
atgaccgccatcatcaaggagatcgtgagtaggaataagagacggtatcaggaagatggcttcgacctcgacctgacatatatatatcccaatataatcgccatgggtttccctgccgaacgcctggagggtgtgtaccgcaataacatagacgatgtcgttagattcctagactctaagcataaaaaccactacaaaatctacaatctgtgcgcagagcggcactacgacacagcgaaattcaactgccgcgttgcgcagtatccatttgaagaccacaaccccccacagctggaactgatcaagccattttgtgaagacctggaccagtggttgtcagaggacgataatcacgttgccgcaattcactgcaaagcaggcaaaggtcgcactggcgtcatgatttgtgcttacctgctgcacagaggcaagttcctgaaggcacaggaggcactggacttttacggcgaagtgcgcacacgcgacaaaaagggagttaccatcccaagccagaggcgatatgtgtattactactcatatctgcttaaaaatcaccttgactatcggcctgtcgcacttctgtttcataagatgatgtttgaaactatacccatgttctcagggggaacctgtaacccgcagttcgtcgtgtgccagctgaaagtgaagatttattcttcaaactcgggtccaacgagacgcgaagataagtttatgtatttcgagtttccacagccgttacctgtgtgcggggacatcaaagtcgaattctttcataaacagaacaaaatgctgaagaaggataagatgtttcatttttgggttaacacattctttattccgggaccggaggaaacatccgaaaaagtcgaaaatggaagcctctgcgatcaggagatagattctatttgttccatcgagagagcagataacgacaaagaatacctcgtactgacactgaccaaaaatgatctggataaggctaacaaggacaaagccaaccgttacttctctccgaattttaaagtgaaactctatttcacgaagaccgttgaggagccatccaaccctgaggcaagcagcagcacgagcgtcacccctgacgtctctgataatgaacccgaccattaccgctatagtgacactacggacagcgatcccgaaaatgaaccttttgacgaggaccaacacacccagattacaaaggtgtag

SEQ ID NO: 30044 - DNA, 531 bp, synthetic construct
  misc_feature 1..531: note = Description of Artificial Sequence: Synthetic coding sequence
  source 1..531: mol_type = other DNA
atggggaaagccgctgcagctgtggcctttggcgcagaagtcggtgtgcgcctggcactgttcgcagcatttctggtaaccgagttattgcccccatttcagaggttgatacaaccggaagaaatgtggctatacagaaatccttacgtggaggcagagtactttccaacgaagcccatgttcgttatcgcctttctctcacccctgtcactgatctttctggcaaagttcctcaagaaagcagatacacgggattctcggcaggcatgcctggctgcctccttggctctggcgctcaacggcgtgttcactaatacgatcaagctcattgtcggcagaccgagacctgacttcttttacaggtgttttcctgacgggttggctcactcagatctcatgtgcaccggagataaggacgttgttaatgagggtaggaaatcctttccgagcggacactctagctgtatgaacatcatctggacattaccatatgcctgctttcatattattgaatttaacttagaaagttag

SEQ ID NO: 30045 - DNA, 651 bp, synthetic construct
  misc_feature 1..651: note = Description of Artificial Sequence: Synthetic coding sequence
  source 1..651: mol_type = other DNA
atggggaaggctgccgctgcggtcgcctttggcgctgaagtgggggttagattagccctcttcgcagcatttctagtgacagaactgctgcctcccttccagcggctcatccagccggaagaaatgtggctgtatcgcaatccatatgtagaggctgaatactttcccaccaagcctatgttcgtgattgccttcctgtcccctctgtccctgatattcctggctaagttcctgaaaaaggcagatacccgggacagccggcaggcatgtttagcggcatctctggccctggcactgaacggcgtgttcaccaacacgattaagctcatagtgggcaggccacgaccggattttttctatcgatgcttccccgatggccttgcacactctgatctgatgtgtacgggggacaaggacgtcgtcaacgaaggacggaaatcattcccttccggccattccagcttcgccttcgcaggcctggcatttgcaagcttttatctagctggtaaactgcattgcttcaccccccagggtcgagggaaaagctggcggttctgcgcattcctgtctcccctgctgttcgcagccgtaatcgctctgtcaaggacatgcgactacaaacatcactggcagggtcccttcaagtggtag

SEQ ID NO: 30046 - DNA, 795 bp, synthetic construct
  misc_feature 1..795: note = Description of Artificial Sequence: Synthetic coding sequence
  source 1..795: mol_type = other DNA
atgggaaaggcagctgccgcagtggccttcggagctgaggtgggcgttagactcgccctttttgccgcttttctagtcaccgaactgctccctcctttccagcgcctgatccaacccgaagaaatgtggctgtacagaaatccctacgtcgaagcagagtacttcccgactaagccaatgttcgtgatcgcgtttttgagccctttgtctctgatcttcctggcgaagtttctgaaaaaggcggacacaagagattctcgccaagcctgtttggccgcatcactagcgctggcgctgaatggggtgtttactaacaccatcaagttgatcgtggggagaccaagacctgactttttctaccggtgtttccctgatggacttgcacattctgatctgatgtgcaccggagataaggatgtcgtaaatgaggggagaaagtctttcccatcgggccatagttccttcgcctttgccggactggcttttgcaagtttctacttggctgggaaattgcattgttttactcctcagggtagaggtaagtcatggagattctgcgctttcctctcaccccttcttttcgccgcagtcatcgcgctgagcagaacatgcgattataaacaccactggcaggacgtgttggttggaagcatgattggaatgacgtttgcatatgtatgctatcggcaatactaccctcctctgaccgatgctgaatgccacaagccatttcaggataagctagtcctttctacagcccagaagccaggtgattcctactgtttcgacatttag

SEQ ID NO: 30047 - DNA, 1086 bp, synthetic construct
  misc_feature 1..1086: note = Description of Artificial Sequence: Synthetic coding sequence
  source 1..1086: mol_type = other DNA
atgcacggcgattatacactgacactccggaaaggaggcaacaacaaactgataaagatctttcaccgcgatggtaagtatggattctccgacccgctgacattctcttccgtggtggaacttattaaccactaccgaaacgaaagtctggctcagtataatcccaaattggacgtgaagttgctgtaccctgtctctaagtaccagcaggaccaagtcgtgaaagaagacaacattgaagcagttgggaagaagcttcacgaatataatactcaatttcaggaaaagtcccgggagtatgacaggctatacgaggaatacacccggacgtcacaggagattcagatgaaacgcacggccatagaggcatttaacgaaactataaaaatcttcgaagaacagtgccagacgcaggagcgctactcaaaagagtatattgagaaattcaagcgtgagggcaatgaaaaggagatccagcgtattatgcataactacgacaagctaaagagccgaatctctgagattattgattcccggaggcgactggaagaggacttgaagaagcaggccgcagaatacagggagattgataagagaatgaactcaatcaaaccggacctgattcagttgcggaaaacccgtgaccagtatcttatgtggcttactcagaagggagtgagacaaaaaaaactgaacgaatggttgggtaacgagaacaccgaggaccaatacagcttagtggaagatgacgaggacctcccgcaccatgatgaaaaaacgtggaatgtggggagcagtaacagaaacaaggctgaaaaccttttgagaggtaaaagggatggtacgtttctggtacgggaatctagcaagcaaggttgctatgcatgcagcgttgtcgtggatggcgaagtcaaacattgcgtaatcaataaaactgctaccggatatggattcgctgaaccctataacttgtatagctccttaaaggagctcgtgctacactatcaacatacatccctagtccagcataatgattctttgaacgtcacacttgcttatcccgtttacgctcagcagagacgctag

SEQ ID NO: 30048 - DNA, 3207 bp, synthetic construct
  misc_feature 1..3207: note = Description of Artificial Sequence: Synthetic coding sequence
  source 1..3207: mol_type = other DNA
atgcctcctcgcccatctagcggagaactctggggcattcatctgatgcccccacgcattcttgtggaatgtctgttgcccaacgggatgatcgttacgttagagtgtctgcgagaggctaccttgattactattaaacatgagcttttcaaagaggccaggaagtacccgcttcaccagctgttgcaagatgagtcttcttacatcttcgttagcgtcactcaggaagccgagagggaggaatttttcgacgagacccgtcgcctgtgtgacttgcggctgtttcagccattccttaaggtgattgaacccgtgggaaatcgtgaagagaaaattctgaatcgtgagatcggtttcgccattggtatgcccgtgtgtgagttcgacatggtgaaggacccagaagtgcaggacttcaggcggaatatcctgaatgtatgtaaggaggccgttgatctgcgcgatctgaattcgccacacagtcgtgccatgtacgtgtatccacccaacgtggagtccagcccagagctcccaaaacatatttacaacaaattagataaaggacagatcatcgttgtgatttgggttatcgtgagtccaaacaatgataaacagaagtataccctcaagattaatcacgattgtgtgcctgagcaagtgatcgctgaggctatacgaaaaaagacacgcagcatgctgctcagttccgagcagctgaaactgtgtgtgctggaatatcagggaaagtatatactgaaagtgtgtggatgcgacgagtactttctggaaaagtatccacttagtcaatacaaatacatccggtcttgcattatgctgggacgaatgccaaatctgatgctaatggcaaaagagtccctgtactcccaactgccaatggactgctttaccatgccttcgtatagcagacgcatcagcacagcgaccccatacatgaacggagagacctccaccaagagtttgtgggtgataaatagcgcactcaggatcaagattttgtgtgcaacctacgtgaatgttaatatccgggacatcgataaaatctatgtacgtacgggaatctaccatggcggtgagcccctgtgcgataatgtcaatacccagagagtgccttgtagcaacccgaggtggaatgagtggctaaattacgatatatatatccccgatctccctagggcagcccgactttgtctttctatttgtagtgtaaaggggaggaagggggctaaggaggagcattgtccgctggcctggggaaatattaatttgttcgactatacagataccttagtcagtggcaaaatggccctgaatctttggcccgtgccccatggtctagaggatttgttgaacccaattggtgttaccgggtcaaatccgaacaaggaaactccatgcctggaactggaatttgactggtttagtagcgtcgtcaaattccctgacatgagtgtgatcgaggagcacgccaattggagcgtgtcacgagaggcaggcttcagctatagccatgcaggcctgtccaatagactcgcacgcgataacgaattacgtgagaatgacaaggaacagttgaaggctattagcactcgggatccattgtccgagatcactgagcaagagaaagacttcctgtggagccaccgtcattactgcgtcaccatccctgagatcttacctaagctgctcctatcggtgaagtggaactctcgggatgaggttgcacagatgtactgtctcgtcaaagattggccacccattaagcctgaacaagccatggagctgctggattgtaattatcccgacccgatggttcgcggattcgccgtgagatgcttggagaagtatttgacggatgacaagctctcccagtatctgatccaactagtgcaggtcctgaagtatgaacagtatctggataacctgcttgtgaggttcctactgaagaaggcccttaccaatcagagaattggacatttctttttctggcacttaaagtcggaaatgcataacaagacagtttcgcagcgtttcggactcctgcttgaaagctattgtcgcgcatgcggaatgtacctcaagcacttgaatcgacaggtagaagcaatggagaaacttatcaatttaaccgacatcttgaagcaagaaaaaaaagatgaaactcagaaggttcagatgaaattcctggttgagcagatgagacggccagacttcatggacgcccttcagggattcctatccccacttaacccggcacatcagcttggaaacctccggctggaggaatgccgcataatgagctcggctaagaggccgctgtggttaaattgggaaaacccggatatcatgagtgagctactgtttcagaacaacgaaatcattttcaaaaacggagacgatctgcggcaggacatgctcactctgcagattatccgcattatggagaatatctggcagaatcaaggattagatttgagaatgctgccctacggctgcctgagcattggcgattgcgttggtcttattgaagtggtcagaaactcccatacgattatgcagatccagtgcaagggcggactcaagggggcactgcagttcaattctcacaccctacaccagtggcttaaggacaagaacaagggcgaaatatatgacgctgcaatcgatctcttcacaaggtcttgcgctgggtattgtgtggcaaccttcattctcggaattggagatcgtcacaacagcaatatcatggtaaaagatgacgggcagctttttcacattgacttcgggcattttctggatcataagaagaagaaattcggctacaaacgcgagcgcgtccctttcgtgcttacgcaggatttcctgattgtcatctcaaaaggcgcacaagagtgtaccaaaacccgggaattcgagaggtttcaagaaatgtgctacaaggcctatctggctatccggcagcatgccaacctgttcataaacctgttcagtatgatgcttggtagcggtatgcccgaactacagagctttgacgacattgcgtatatccgcaaaactcttgccctcgataagacagaacaggaggctctggaatacttcatgaagcagatgaacgacgcacaccatggcggatggaccaccaagatggattggatcttccacactattaagcagcatgctctcaattag

SEQ ID NO: 30049 - DNA, 357 bp, synthetic construct
  misc_feature 1..357: note = Description of Artificial Sequence: Synthetic coding sequence
  source 1..357: mol_type = other DNA
atgccacctaggccctcctccggggaattatggggtattcatctaatgccacctaggattcttgtggaatgtctgctcccaaatgggatgatcgtgactctcgagtgcctgagggaagcaacccttatcacaataaagcatgagctcttcaaggaggccagaaagtacccattgcatcagcttctgcaggatgagtcctcctatattttcgtgtccgtcacccaggaggccgaacgagaggagtttttcgacgaaactaggcgtctctgcgaccttcgtctgtttcagccctttctcaaggttatcgaacccgtgggtaatagagaggagaagatcctaaatcgggagatcgggtag

SEQ ID NO: 30050 - DNA, 66 bp, synthetic construct
  misc_feature 1..66: note = Description of Artificial Sequence: Synthetic coding sequence
  source 1..66: mol_type = other DNA
atgcctccaagaccttcttccggagaactgtgggggattcatcttatgcctcccaggatcctgtag

SEQ ID NO: 30051 - DNA, 3213 bp, synthetic construct
  misc_feature 1..3213: note = Description of Artificial Sequence: Synthetic coding sequence
  source 1..3213: mol_type = other DNA
atgtgtttttcctttataatgcctcccgctatggcagatatcctggatatttgggccgtcgattcgcagatcgcgagcgatggctctattcccgttgatttcttgctgcccactggaatctatatacagctggaagtgccaagggaagctactattagctatatcaagcagatgctgtggaaacaggtgcacaactacccaatgtttaatctgctgatggacatcgattcatacatgttcgcctgcgtcaaccagactgccgtgtacgaagagctggaggacgagacacggcgactctgcgacgttcgacctttcctacccgtgctgaagctcgtgacaaggtcatgtgatccaggtgagaagctggatagcaagatcggagttctcataggaaagggactccatgaatttgacagcctgaaagatccggaagttaacgaattccggcgaaaaatgcgcaaattctcggaagagaaaatactgtcactcgttggcttgtcttggatggactggttaaaacagacctatccgccagaacatgagccgtccatccctgaaaacctggaagataaactgtatgggggtaaattgattgtggcagttcattttgagaactgccaagacgtgttttctttccaggtgtctccaaacatgaaccctatcaaggtgaacgagctggccatccagaaacggctgacaatccacgggaaagaggatgaagtttccccatatgactacgtcctgcaggttagcggaagagtggaatatgtctttggcgaccaccccctgatccagtttcagtatatcagaaactgtgtgatgaaccgcgcactgccgcattttattttagtggaatgttgtaaaatcaagaagatgtatgagcaggagatgatcgcaatcgaggccgctattaacagaaatagctccaatcttcctctgccgctgcctcctaagaaaacaagaattattagtcacgtatgggaaaacaacaatccatttcagatcgtgttagtgaagggcaataaactgaatacagaagaaactgtcaaggttcacgtgagggcagggttgttccacggcaccgagcttctctgtaagacaatagtgtcgtccgaagtctcaggaaagaatgatcacatctggaatgagcccctggaatttgacattaacatctgtgacttgccgaggatggctcggctgtgcttcgccgtgtacgctgtgctagacaaggtgaaaaccaaaaaaagcacaaagacaataaatccatcaaaatatcagactataagaaaggccggtaaagtccactatccagtggcctgggtgaacacgatggtattcgattttaagggacagctgcgcaccggagatatcattctacattcttggtcatcctttccagacgagctcgaggagatgcttaacccgatggggactgtgcagacaaatccttatactgaaaatgccactgctctgcatgtcaagttccctgaaaacaaaaaacagccgtactactatccgccttttgataaaataatcgagaaagcagctgaaatagccagctctgactccgccaacgtgagcagcaggggcggtaagaagtttctccctgtgttaaaggagatcctcgaccgcgatcccctaagtcagctctgcgaaaacgaaatggatctgatatggactcttcgccaggattgtagggagatctttccacagagtctccccaagttgctgctcagcatcaagtggaacaaattggaagacgtggcacaattacaggctctcctccaaatctggccaaaactccctccgagagaagccttggagctcctcgacttcaattaccccgatcagtacgtgagagaatacgcagtgggatgtctcaggcagatgtctgacgaggagttatcccagtaccttctgcaattggtacaggtactgaagtatgaaccatttctcgactgcgccctctctcggttccttctagaacgggctctgggcaatcgccgaatcggccaattccttttctggcacctgcggagtgaggtgcatattccggctgtttcagtccagtttggcgtgatcttagaagcctattgccgaggcagtgtgggacatatgaaagttctgtctaagcaagtggaggcgctgaacaagcttaaaaccctgaattcgctcataaagcttaacgccgtaaagctgaatcgagcaaaggggaaagaggcaatgcatacctgtttgaagcagagcgcttatcgggaggccctaagtgacctgcagagtcctctaaacccctgtgtgattctgtcagagttatatgttgaaaaatgtaagtatatggattctaagatgaaaccactgtggcttgtttataacaataaggtgtttggcgaagactcggtaggggtgatcttcaagaacggagacgatcttcggcaggacatgctgacgcttcagatgctgagactaatggatctgttgtggaaggaggctggactcgatctcagaatgctcccctatggttgtcttgctaccggagatcgatccggcctaatcgaagtcgtgtctacttctgaaaccattgccgatattcagttgaacagctctaacgtggctgcagccgcagcttttaacaaagacgctctcctaaactggctgaaggaatacaattcaggcgacgacctggatcgcgcaatcgaggaatttacactgtcctgcgccggatattgcgtggccagctacgtgctggggatcggcgaccggcactcagataacatcatggtcaaaaaaaccgggcagttatttcatatcgattttggccacatcttgggcaattttaaatctaaatttggaattaagcgggagcgcgtgcccttcattttgacttatgactttatccacgtgatccaacaaggaaagacaggcaacacagagaaattcggtcggttcaggcagtgttgcgaagatgcctacctcatactgcgaagacatggcaacctgttcattaccttgttcgccctcatgcttaccgctggcctgcctgaattaaccagcgtgaaggatatccaatacctcaaggattcgttagccctggggaaatccgaagaagaggcactgaagcagtttaaacagaagttcgacgaagcgctgcgtgagtcctggacaacaaaagtgaattggatggcccatacggtgcgaaaagattatcgatcctag

SEQ ID NO: 30052 - DNA, 303 bp, synthetic construct
  misc_feature 1..303: note = Description of Artificial Sequence: Synthetic coding sequence
  source 1..303: mol_type = other DNA
atgtgcttctctttcattatgcccccagcgatggccgacattctcgatatttgggcagttgacagtcagattgcctcagacggtagcatccccgtcgatttcctgctcccgacaggtatctacatccagctggaagtaccgagggaggcaacaatctcttacattaaacagatgctgtggaaacaggtccataattaccccatgtttaatttattaatggatattgacagctacatgttcgcctgcgtaaatcaaaccgccgtttacgaagaactggaggatgaaacaaggaggttatgctag

SEQ ID NO: 30053 - DNA, 171 bp, synthetic construct
  misc_feature 1..171: note = Description of Artificial Sequence: Synthetic coding sequence
  source 1..171: mol_type = other DNA
atgtgtttcagttttatcatgcccccagccatggctgatattctcgatatttgggcagttgattcacaaatcgcgtccgatggaagcattccggtcgattttctgctaccaaccggcatctatatacagctagaggtgccgagagaagccaccatatcatacattaagtag

SEQ ID NO: 30054 - DNA, 3213 bp, synthetic construct
  misc_feature 1..3213: note = Description of Artificial Sequence: Synthetic coding sequence
  source 1..3213: mol_type = other DNA
atgtgcttctcatttattatgccccctgccatggctgatattcttgatatctgggccgtggattcacaaatcgccagtgacggcagtatacccgtggattttctgctacctaccggaatctatatccaacttgaggtgccacgagaggcaacaatttcatacatcaaacagatgttgtggaaacaggtgcacaactacccaatgttcaacttgcttatggacatcgacagttatatgtttgcatgtgttaatcagacagccgtctacgaggagttagaagacgagacccggagactgtgcgacgtacggcctttcctaccagtgctgaaactagtgacaagatcttgtgatcccggtgagaagctcgattctaaaattggggtgctgattggaaagggcctgcatgaatttgacagtcttaaagaccccgaggtcaatgagtttcggagaaaaatgagaaagttctccgaagaaaaaatcctaagcctcgtgggcttgtcatggatggactggctcaagcaaacttacccgcctgagcacgagccaagcattcccgagaacctggaggacaagctttacggcggtaaactgatagttgccgtacattttgagaactgtcaggacgttttcagctttcaggtgtcccccaatatgaatcctatcaaggtgaacgaactggccatccaaaaaaggcttacaatccacggtaaagaagatgaagtcagcccctatgactacgtactgcaagtgtcagggagggtggaatatgtgtttggggaccaccccctgatacagttccagtacattagaaactgcgtcatgaacagggctttaccacatttcattctcgtggaatgttgcaaaatcaagaagatgtatgaacaggagatgatcgccattgaggcagccatcaacaggaattccagcaacctgcctctcccactcccacctaagaagactagaatcatatctcatgtgtgggagaataacaatcccttccagatcgtccttgtcaagggaaataagttgaatactgaggagaccgtgaaagtgcacgtgcgagcaggactctttcacggcactgaattattgtgtaagacaattgtttccagtgaggtgtctggaaagaatgatcacatctggaacgagccccttgagttcgacatcaacatctgcgacctgccaagaatggccaggctgtgtttcgcggtgtacgcagtacttgacaaggtgaaaactaaaaaaagcacaaagacgattaatccttccaaatatcagaccattcgtaaagctggaaaggttcattatcccgtggcgtgggttaataccatggtcttcgacttcaaggggcagctgagaacgggggacattatactgcacagctggtcatcttttcccgatgaactcgaagagatgctgaacccaatgggcacagtccagacgaacccttataccgaaaatgctacagcgctacacgtgaaatttccagagaacaagaaacagccgtactattacccaccctttgacaaaattatcgaaaaggccgctgagattgcgagcagcgactcagccaatgttagcagtagaggtggcaagaaatttctgcctgtcttaaaggagatcttagaccgggatcctcttagtcagctgtgcgaaaacgagatggaccttatttggacactgcgccaagattgtcgggagatcttcccgcaaagtttacctaaactgttactgtcaattaagtggaacaagctcgaggatgtggcacagcttcaggctctcctccagatttggcctaagttgcccccacgcgaggccctggagttactggattttaattaccccgatcagtacgtccgcgagtatgctgtggggtgtcttagacagatgagcgatgaggagctatcccagtacctcctgcaactagttcaggttttaaagtacgagccgtttctggactgcgccttaagccgatttcttctggagagagctctgggcaatagacgcatcggacagttcctgttttggcatctacgcagcgaggtccacatcccagctgtgtcagtgcagttcggtgtaatcctggaagcctattgtagaggctcagtgggacacatgaaggtactcagtaagcaggtggaggcccttaacaaactcaagactctgaactccctgattaagttaaacgctgtgaagttgaatagagccaaaggcaaagaggccatgcacacctgcctcaagcagtctgcatatcgcgaagctctcagcgacctgcagtcgccactgaacccctgtgtgattttgagcgaactttatgtcgagaaatgcaagtacatggattccaaaatgaagccgctctggttggtctacaataacaaggtgttcggggaggattctgtgggagtgattttcaagaacggagatgatctccgccaagatatgctcaccctgcagatgttgcggttgatggaccttctttggaaggaggccggtctcgatttgaggatgctaccttacgggtgtctggccaccggtgaccgcagtggcttgatcgaagtcgtgtccacaagcgagaccattgcggacattcaacttaactcttctaatgttgctgccgctgcagctttcaataaagatgcactcttgaactggctgaaggagtacaattcaggagacgatcttgatagagcgatcgaagaatttactctctcttgtgccggatactgcgtagccagctacgtgctcggaataggtgatcgccactcagataacattatggttaaaaaaactggtcagctgttccacattgatttcggccatatcttagggaacttcaaatctaaattcggcatcaaaagagagagagttcccttcattctcacatacgatttcatccatgtcattcagcagggtaaaacggggaatacagagaaattcggcagattccgacagtgctgcgaagacgcatatttaattcttcgaagacacggcaacctatttatcacactgtttgcacttatgttgaccgcaggactgcctgagttgacatccgtgaaggacatacagtaccttaaagatagcttggccttgggcaagagtgaggaggaggcactcaagcagtttaaacagaaattcgatgaggcgctcagggaaagttggactaccaaggtgaattggatggcccatactgtccgtaaggactataggtcttag

SEQ ID NO: 30055 - DNA, 396 bp, synthetic construct
  misc_feature 1..396: note = Description of Artificial Sequence: Synthetic coding sequence
  source 1..396: mol_type = other DNA
atgtgcttttcctttattatgcctcctgctatggccgacattcttgatatatgggcggtagattctcagattgcgtcagatggctctattccagttgatttccttctgccgacaggtatatacatccagcttgaggtacctagggaggccacaatatcgtacattaaacagatgctgtggaagcaagtgcacaattatccaatgtttaacctgctgatggacatcgacagttatatgtttgcatgcgtaaaccagaccgcagtctacgaggaactggaagacgagaccagacggctgtgcgatgtccggccattcctgcccgtgctgaaattagtcacacgatcctgtgatcctggggagaagcttgactccaagattggggtgctcataggctag

SEQ ID NO: 30056 - DNA, 2109 bp, synthetic construct
  misc_feature 1..2109: note = Description of Artificial Sequence: Synthetic coding sequence
  source 1..2109: mol_type = other DNA
taggtgagggccggactcttccatggcactgaactcttatgcaagaccatcgtatcttctgaagtgtcaggaaaaaatgaccatatctggaatgagccccttgaatttgacattaatatctgcgatctgccaaggatggcaaggctgtgcttcgctgtctatgctgtgctcgataaggtgaagacaaaaaaaagtactaagacgataaacccgtctaagtaccaaaccatcagaaaagccggaaaggtgcactacccagttgcgtgggtcaatacaatggtgttcgactttaaggggcagctgcgcactggggacattatcctgcacagctggtctagctttcccgacgaacttgaggagatgttgaacccaatggggaccgtccaaacaaatccctacacagaaaatgccaccgctctccacgtgaaattccccgagaacaaaaagcagccctattactatccccctttcgacaagtctcgcggtggcaaaaagtttctgcccgttttgaaggagatccttgacagagatcctcttagccaactgtgcgagaacgaaatggacttaatatggacacttagacaagattgtcgcgagatcttcccgcaatcgctgccaaaactactgctgagcatcaagtggaacaagttagaggatgtggcgcagctccaggccttgctccagatctggccaaagctccccccaagggaggccctggagcttctggatttcaattaccccgaccaatacgtcagggagtacgccgtagggtgcctgaggcagatgagtgatgaagagctgtcccagtacctgctccaactcgtgcaggttctgaagtatgagccctttttggactgtgccctgtccagattccttctggaacgcgcactcgggaacagacggatcggtcaatttctgttttggcacctgagatctgaagtgcatattccagctgtaagcgtgcagtttggggtcattctggaggcatattgtcgaggctctgttggccacatgaaagtcttgtccaagcaggtggaggcgctgaacaagttaaaaactctgaacagcctgatcaagctgaacgctgtcaagctcaaccgtgccaaaggaaaagaggcaatgcacacatgtctgaaacagagtgcctaccgcgaggcattgagcgacctccagtcccctctgaacccctgcgttattctctctgagctgtatgtggaaaagtgcaaatacatggacagcaaaatgaaacctctgtggttggtgtataataataaggtgttcggagaggattctgtgggggtgatctttaaaaatggcgacgacctgagacaggatatgctcacattacagatgctccgactgatggacctgctttggaaggaggccggactggatctaaggatgctaccttatggttgtctcgccacaggggaccgcagtgggttgatcgaagtggtctccaccagtgaaacaattgcagacattcagctgaatagttcgaacgttgcagctgccgcagcgtttaataaggacgccctgctgaactggctgaaagaatacaatagtggcgacgatctcgaccgagcgattgaggagttcaccctgagctgcgcagggtattgtgtcgcctcttacgttttggggatcggggacagacatagtgacaacataatggtgaaaaaaaccggacagctttttcatattgactttggacacatactcggaaacttcaagagtaaatttggcattaagagggagcgagtgccctttatcctgacttacgattttattcacgtgattcagcagggtaagacgggaaacaccgaaaagtttgggaggtttcgacagtgctgtgaagatgcgtatctgatcctgcgtcggcacggtaatctgtttattaccctctttgccctgatgctcaccgccggactgcccgagttgacatcagtgaaagacatccagtatctgaaagactcactggctctcggtaagtctgaagaagaagctttgaaacaattcaagcagaaatttgacgaggcactgagggagtcatggacgaccaaggtgaattggatggcacataccgtccgaaaggattacaggtcctag

SEQ ID NO: 30057 - DNA, 1566 bp, synthetic construct
  misc_feature 1..1566: note = Description of Artificial Sequence: Synthetic coding sequence
  source 1..1566: mol_type = other DNA
atggatctcatctggacattaagacaagactgtagagaaatctttcctcagtctctgcctaagctcctgttgtctataaagtggaacaagcttgaggatgtggcacagctgcaagctttactgcagatatggcccaaattgccacctcgggaggccctcgaactgttagacttcaactacccagaccaatatgtacgcgagtacgcagtggggtgtcttcgacagatgtctgacgaagagctatctcagtacctactgcaactcgtccaggtcctgaaatatgaacctttcctggattgcgccctctcccgattcctgcttgagagagcgctgggaaacaggaggattggacaatttctgttttggcatctgagatctgaagtgcatatcccggcagtgtctgtccagttcggggttattctcgaggcatactgccgcggttccgtgggacacatgaaggtcttgagcaaacaggttgaagccctgaataaactgaaaaccctgaactccctgattaagctgaatgctgtgaagctgaaccgggcaaagggtaaggaggctatgcatacatgtctgaaacagtccgcctaccgcgaagccttgtccgatctgcagagtccccttaacccatgtgtaattttgtccgaactgtacgtggaaaagtgtaagtacatggatagtaaaatgaagcccctgtggttggtgtataacaacaaagtgttcggtgaggactccgtaggcgtcatatttaagaatggtgatgtttgcttcccgttagacttgaggcaggacatgttgaccttgcagatgctgcggctcatggatctgttgtggaaagaagctggcttggatctgcgcatgcttccatatggttgtctggccacaggggaccgaagtggcctaatagaagttgtatcaactagcgaaacaatagctgacattcaactgaacagtagtaatgtggcagctgcagcagcatttaacaaggacgcccttttaaactggctcaaggaatacaactcgggagacgacctggatagagccatcgaagaattcaccctttcctgcgcaggctactgtgtggcgagttatgtgcttgggattggggatagacattccgacaatataatggtgaagaaaacgggccaactgttccacattgacttcgggcatatcctgggtaatttcaagagcaaattcggcatcaagagggaaagggtgccctttattctgacatatgattttattcacgtcatacaacaaggcaaaacgggcaacacagagaagtttggtagattcaggcaatgctgcgaggatgcctacctcatcttgagaaggcacggcaatctgtttataaccctgttcgcgctcatgctgaccgccggtctgccagaactgacctcagttaaggacatccagtacttgaaggacagcctcgcactcggcaaaagcgaggaagaagcccttaagcaatttaaacagaagtttgacgaggccttgagggaaagctggactactaaagtgaactggatggcccatacagttagaaaggattaccgcagctag

SEQ ID NO: 30058 - DNA, 3207 bp, synthetic construct
  misc_feature 1..3207: note = Description of Artificial Sequence: Synthetic coding sequence
  source 1..3207: mol_type = other DNA
atgccgccaggggttgactgtccaatggaattctggaccaaagaggaaaaccagtctgttgtggtggacttcttgcttcccaccggggtctacctgaactttccagtgagccgtaatgccaatctgtcgacaattaaacagttgctgtggcatcgcgctcagtacgagcctttatttcatatgctttcagggcctgaagcctatgtctttacatgtatcaatcagacggccgagcaacaggaactggaagatgaacaacgaaggctttgtgacgtgcagccctttctcccggttctgcgtctggtcgctagggagggcgacagagtaaagaagctcatcaacagccagatttccctgctgataggtaagggtttgcacgaattcgattctctttgtgatccggaggtgaatgactttagagccaagatgtgccagttctgcgaagaagcagccgctcggaggcagcagctgggctgggaagcctggctacagtacagtttcccactccaattagagccatctgctcagacctggggcccaggcactctccggctgccaaatagagcgctcctcgtgaacgtcaaatttgaaggatctgaggaatcgtttacttttcaggtgtcaaccaaagacgttcccttagctctgatggcttgtgcactgcggaaaaaggctaccgttttccgtcagcccctcgtcgaacagcccgaagattacaccttgcaggtcaacggcagacacgagtatctgtacggatcctaccccttatgccagtttcaggtgcagaaacctcgggcaaaacctccaccaatacccgctaaaaaaccaagtagcgttagcctctggtcccttgagcaaccatttcgcatcgagctcatccagggcagtaaggttaacgccgacgaaagaatgaagttggtggtccaggctgggctgttccatggcaatgagatgctgtgtaaaacagttagctcgtctgaagtgtctgtttgctcagaacccgtctggaaacaacggctggagttcgacattaacatctgtgatctgcctcgtatggccagactttgcttcgccctgtatgcggttatcgagaaagctaaaaaggcacgttcaacaaagaaaaaaagcaaaaaagccgactgtccaatcgcatgggcaaacctgatgctttttgactataaggatcagctcaaaaccggggaacgttgcctgtacatgtggccctccgtccccgacgagaagggcgaactcctcaacccgaccgggacggtgcgatccaaccctaatacagatagtgccgctgctcttttgatatgtttaccggaagtcgcaccacatcccgtttattaccctgccttggaaaagctgcccggagggatgcttctcgcatctagggagtggcgccctgagctgctttggatgaggcttcacgcagaggactcagcccctagccggatgattggggtagcgatgcctggtcttggcgtcctgcccggactggttcaggccccaggagatgcagagtgcagcagactcttacagattctggaactggggcgtcactccgagtgtgtgcacgtaaccgaggaggaacaactccagctccgggagattcttgagcgcaggggctccggggagctctatgagcacgaaaaggacttggtgtggaaactgaggcacgaagtgcaggaacactttcccgaggctcttgccaggctgctcttggtgaccaagtggaacaagcacgaagatgttgcacaagatgccctgcctgccgtgtcatggcccgaattacccgtcctgagtgctttagaactactggatttttcatttcccgattgtcatgtggggtcttttgctataaagtccttacgcaaactgacggatgacgaactgttccagtacctgctgcaacttgttcaagtccttaagtatgagagctatctcgattgtgaactcaccaagtttcttctggatcgcgcacttgctaaccggaaaatcggacattttctcttctggcacctgcgatccgaaatgcacgtcccctctgtagcacttaggttcgggttgattctggaagcctattgtagggggagcactcaccatatgaaagtgctcatgaagcagggcgaagcactgagcaagttaaaagccctgaatgatttcgtgaaactgtcatcccagaagacacccaagcctcaaactaaagagctaatgcacttgtgtatgaggcaggaggcgtacttggaagcccttagccacttacagagccccctggatccatcaaccctgctggctgaggtgtgcgtggagcagtgcacatttatggatagcaagatgaagcccttatggattatgtactccaatgaagaagccggttctggcggatcagtggggatcattttcaagaacggcgatgacttacgccaggacatgcttactctacagatgatccagctgatggatgtactgtggaaacaggaaggactggatctacgaatgaccccctatggctgtttgcccacaggagataggaccggactgattgaagttgttctgcgttcagacacaattgccaacattcaattaaacaaatctaatatggcagccactgcagccttcaacaaggacgcccttctaaattggctgaaatcgaagaatcctggggaagccttggacagagccattgaagagttcactctctcatgcgccggatactgcgttgcgacttacgtccttggtatcggtgacagacattccgataatattatgattcgggaaagtggacagcttttccacatagattttggacacttcctggggaatttcaaaaccaagttcggcatcaaccgagaaagggtgccatttatcctgacctacgattttgtgcacgtcatccagcagggcaaaacaaataacagcgagaaatttgagagattcagaggatattgcgagcgagcatacaccatattgaggcggcacgggctgctttttctgcatcttttcgctctaatgcgcgctgccggattgccggagctttcctgtagcaaagacatccagtatctgaaagactctttagccctcggcaagacagaagaagaggctctcaagcatttcagagtgaagtttaacgaagccctgcgcgaaagctggaaaactaaagtcaactggctggctcataatgtgtccaaagataacagacagtag

SEQ ID NO: 30059 - DNA, 3207 bp, synthetic construct
  misc_feature 1..3207: note = Description of Artificial Sequence: Synthetic coding sequence
  source 1..3207: mol_type = other DNA
atgccccctggcgtggactgtcctatggagttctggaccaaagaagaaaatcaatcagtagtcgttgactttctactgccaacaggagtgtacttaaattttcccgtgtcccgtaatgctaatctgagtactataaaacagctactgtggcatcgcgctcagtacgaacccctgtttcatatgttatctgggcctgaagcgtatgtgttcacctgtataaaccaaaccgctgagcagcaagagttggaagacgaacagcgtcgcctatgtgatgtgcaacccttccttccggtgctgcggttagtggccagggaaggtgaccgagtgaagaagttgatcaactctcagattagcctgctcattggcaagggccttcatgagtttgattccctgtgtgaccccgaggtgaacgatttccgggctaagatgtgtcagttttgcgaggaagccgctgccagaagacaacagctaggttgggaggcttggttacagtatagctttcccctgcagctggagccatctgcgcagacatggggaccaggcaccttgagactaccaaacagggcgctgctcgttaatgtgaagtttgaaggctccgaggagagctttaccttccaggtatcaactaaagatgtgcccttagctctaatggcatgtgctttaagaaaaaaagccaccgtctttcgccaaccactggtggaacagccagaagattacacccttcaagtcaacggacggcacgagtatctgtacgggagctacccgctttgtcagtttcaggtccagaaaccccgtgccaagccccctcccatacctgcgaagaagccctcttccgtttcattatggagtttagaacagccttttcgtattgaattgatccagggatccaaagtgaatgccgacgagcggatgaagctcgtggttcaagccggtctgtttcacgggaacgagatgctatgcaaaactgtttctagttccgaggtgagcgtgtgctccgagccggtttggaagcaacgactggagtttgacattaacatctgtgacctccctcgaatggcacggctgtgctttgcattgtatgccgtgatcgagaaggcaaaaaaagccaggtcaactaagaagaagagtaagaaagccgattgtcccattgcatgggcgaatctcatgctgtttgattataaagaccagttgaagacaggtgaaagatgtctatatatgtggccatccgtcccggacgagaagggggaactgctcaatcctacggggacagtaagaagcaacccaaatactgattctgccgctgcactcttaatatgtctgccagaggtagcccctcaccccgtctactaccctgcgttagagaaactaccagggggaatgctcctagcatctcgggagtggcgccctgaactcctgtggatgcgcctgcacgccgaagattccgcgccttcgagaatgataggagtggccatgccaggactgggcgtgcttcctggcttagtgcaagcccctggcgatgctgagtgtagtcgactcctccagatcctcgaactgggaagacactctgagtgtgttcacgtgacagaggaggagcagctacaactccgcgagatcctggagcggcgaggctccggtgaactatacgaacacgaaaaagacctggtgtggaaattgaggcacgaagtccaggaacacttccccgaggccctagccaggttgcttctggtgacaaaatggaataagcacgaggacgtcgcccagatgctctacctgctgtgtagctggcctgagttacccgtgctgtctgcgcttgagcttctggatttttccttccctgattgccatgtcgggtcttttgctattaaatcactgaggaaattgacagatgacgagctgtttcagtatttgctgcagttggtacaggtcctcaagtacgagtcctacctggattgtgagctgactaaatttctgttagacagagcactcgctaatcgcaagattggccattttttgttctggcacctccgtagcgaaatgcacgtgccatccgtggctttgagattcggtttgatcttagaggcctattgccggggatcaactcatcacatgaaagttctaatgaaacagggggaagcattgtccaagctgaaggctctaaatgatttcgttaaactttcttcccagaaaacacctaagcctcaaaccaaggagctgatgcatctatgtatgagacaagaagcttacctagaagcactgtcacacctgcaaagcccactcgaccctagtacgctgcttgccgaggtgtgtgtggaacagtgcacttttatggacagcaagatgaagcctctatggattatgtactcaaacgaggaggctggcagtgggggatcagtcggcatcatctttaaaaacggtgatgacctgagacaagatatgttgacactgcaaatgatacaactgatggacgtgctgtggaaacaggagggcctcgacctcagaatgaccccttatggatgtcttcctacgggcgatcgcacaggtctaatcgaggtggtactgcggagtgacactatagcgaacatccaactgaataaatccaacatggctgctactgcagcgttcaacaaagacgccctgttgaactggctgaaaagcaagaatcctggggaagccctagaccgcgctatcgaggaattcaccctgtcttgtgccggatactgtgtcgccacctacgtcctgggcatcggagacagacacagtgacaatattatgatacgggagagcggacagttgttccatattgacttcgggcacttcttagggaacttcaaaaccaaattcgggattaaccgggagcgcgtgccttttattctcacatatgatttcgtccacgtgattcaacagggaaagactaacaattcagagaagttcgagagatttcggggttactgcgagcgcgcttacacgattctgagaaggcatggtctgctgtttctccacctgttcgcgctgatgcgcgcagccggactgcctgagctgtcatgctcaaaagacatacaatatctaaaagactcccttgcactaggtaagacggaggaggaggctctgaagcattttcgggtgaagttcaatgaggctctgagagaatcttggaagactaaggttaattggttagcccacaatgtgtccaaagacaatcgccaatag

SEQ ID NO: 30060 - DNA, 3135 bp, synthetic construct
  misc_feature 1..3135: note = Description of Artificial Sequence: Synthetic coding sequence
  source 1..3135: mol_type = other DNA
atgccgcctggagtcgattgtcccatggagttttggactaaagaggagaaccagtccgtggttgtcgactttctcctgccaacaggggtgtacctgaactttcctgtttcaagaaatgccaacttgtctaccatcaagcagctcctgtggcatagagcacagtatgaaccactctttcatatgctgtcgggccctgaagcctacgtcttcacctgcatcaatcaaacggcggagcagcaggaactggaggacgagcagaggaggctctgcgacgtacagccttttcttcctgtactgagattggtcgctagagagggcgatagagttaagaagcttatcaatagccagataagtctgctgatcggcaaagggctgcatgagttcgatagcctctgtgatcccgaagtgaacgactttagggctaagatgtgccagttttgtgaggaggctgccgctagacgccagcagctagggtgggaggcttggctacaatattcattccctctacagctggaaccaagcgcgcaaacatggggcccaggcacactgagactgcctaaccgagccctgctggtgaacgtcaagttcgaggggagtgaggagagttttacctttcaagtttcaaccaaggacgtgccactcgcgctgatggcctgtgcactcagaaaaaaagccaccgtgttcagacagcccttagtcgaacaaccggaagattacacattgcaagtgaatgggagacatgaatatttatacggaagctatcctctttgtcaattccaatacatctgttcgtgcctccattctggcctaacgccgcacctgactatggtccattcctcatccatcctggccatgagagacgagcagagtaaccctgcgcctcaggtccaaaaacccagagccaagccacctccgatccccgctaaaaagcccagctctgtctctctgtggtcgctcgaacagccgtttagaatcgaattaattcagggtagcaaggtgaacgcagatgaacggatgaaattggtggtgcaagcgggattgttccacgggaacgaaatgctttgcaagaccgtaagctcttctgaggtctcagtttgcagtgagccagtctggaagcagcggctggaattcgacatcaacatttgcgacctgcctcggatggcaaggctttgctttgccctgtatgccgtcatcgagaaagctaagaaggctaggtctaccaagaagaaatcaaaaaaggccgattgtcccattgcatgggctaatttgatgctcttcgattacaaagaccagctgaagaccggagagaggtgcctctacatgtggcctagtgtgcccgacgagaagggggaactcttgaatccaactgggacagtacgctcgaacccgaatacagattccgcagccgcattgttaatatgcttgcccgaagtagccccacaccctgtctattaccctgccctcgaaaaaatcctcgagttaggcagacatagcgaatgcgttcacgttactgaggaggaacagctacagctgagagagatactggaacggcgtgggtcaggagagctttatgaacacgagaaggacctggtgtggaaactgcggcacgaagttcaagagcatttccccgaggctttggctagacttctcctggtcacgaagtggaacaagcacgaggatgtagctcagatgctgtatctcctgtgcagctggccagaattgccggtcttgtcagctctcgaactgctcgatttttccttccccgactgtcacgtaggttccttcgccataaagtccctgagaaagctcacagatgacgaactgttccagtacctgcttcaactagtgcaggtccttaagtacgagtcctacctggactgtgaactcaccaagttccttctggatcgggctctggctaatcgaaaaataggccacttccttttctggcacttgaggtccgagatgcatgtgccctccgtcgcattgcggttcggactcatcctcgaagcttactgtcgcggaagcactcaccacatgaaagtgctcatgaaacagggtgaagcactctcaaagctcaaagccctgaacgacttcgttaaactttctagccagaaaacccccaagcctcaaacaaaagaactgatgcacttatgtatgaggcaagaggcgtatcttgaagcactttctcacctgcagtccccgcttgatccttctactctgctggccgaggtgtgtgtagaacagtgtacgtttatggattctaaaatgaagccgctgtggatcatgtatagcaacgaggaagcagggtctggtgggtccgtgggtatcattttcaagaacggggacgatctgagacaggacatgctgacattgcagatgatccagctgatggatgttctgtggaaacaagaaggactggatttaagaatgactccatatggctgccttccaacaggggaccggacaggcctaatagaggtggtcctcaggtccgataccatcgccaacatccagctaaacaagtccaacatggccgcaactgctgccttcaacaaggatgccctcctgaactggctcaaatctaagaatccgggtgaagccctagatcgtgctatcgaggaatttacgctgtcctgcgcaggttattgcgtggccacctacgtgctcggcatcggggatagacactcagataatatcatgattcgtgaatccggacagctttttcacattgattttggccatttcctgggcaacttcaaaacaaagtttggcattaaccgcgaaagggtgccattcatcctcacctatgacttcgtgcacgtcattcagcagggcaagacaaacaactccgaaaagtttgaaaggttcagaggttactgtgaacgggcatataccattctgcgccgacatggtttactgttcctgcacctgtttgctttgatgcgcgctgccggactgccggagttgagctgctccaaggatatccagtacctcaaggactccctcgccctaggtaaaacggaggaggaagccctcaaacacttcagagtgaaatttaacgaagcactgagagaatcatggaagacgaaagtcaattggctagcacacaatgtgagtaaagacaaccgtcagtag

SEQ ID NO: 30061 - DNA, 3207 bp, synthetic construct
  misc_feature 1..3207: note = Description of Artificial Sequence: Synthetic coding sequence
  source 1..3207: mol_type = other DNA
atgcctccaggcgttgactgccctatggagttttggaccaaagaggaaaatcagtcggttgtcgttgattttcttttgcccacaggggtatacctgaattttccagtgagtagaaatgctaacctgtctaccatcaagcagttgctgtggcatagggcccagtatgagcccctgtttcacatgctgtccgggccagaagcctacgtgttcacatgcataaatcagactgctgaacaacaagaactggaagacgagcagcgtaggctgtgtgatgtgcaaccctttctgcccgtcttgagactagtcgcccgagaaggggatagagttaagaagctgattaattcgcaaatctccttactaatcggcaagggattgcacgaatttgatagcctctgcgacccggaagtgaacgactttcgggctaaaatgtgtcaattttgcgaggaggccgcagcgaggcgtcaacagctgggctgggaggcttggctacaatacagcttccctttgcagctggagccctccgctcaaacctggggtccagggaccttaaggctgccaaacagagctctgctcgtgaatgtcaaattcgaagggagcgaagagtcattcacgttccaggtgtccaccaaagatgttcccctggctctgatggcgtgcgctttgcgcaaaaaagccaccgtgtttcggcaacccttggtggaacagccagaggactacaccctccaagtgaatggacgacacgagtacctgtacgggagctaccctctgtgccaattccaagtgcagaagccacgcgcaaaaccaccacctattccagctaaaaaaccctccagcgttagtctatggagtctggagcagcccttccgaatagaactgatccagggttccaaggtgaacgccgatgagaggatgaagctcgtagttcaggccggactgtttcatggaaacgaaatgctatgcaaaacagtaagctcttctgaggtttctgtttgttccgaaccggtatggaaacaaagactggagttcgacatcaacatttgtgacctccccagaatggcccgactgtgctttgccctgtatgccgttattgagaaagccaagaaagcccgaagtactaaaaagaagtctaaaaaggcggactgcccaattgcctgggccaacctgatgctcttcgactacaaagaccaactgaagaccggagagagatgcctctatatgtggcccagcgtccctgatgaaaaaggagagctactgaatccaaccgggaccgttcgcagcaaccctaatacagactcggccgctgccctccttatttgcctacccgaagtcgcccctcaccctgtttactacccagctctggagaagctacccggaggtatgctgctggcttccagagaatggcgaccagaactcttgtggatgcgtctgcatgccgaagactcggccccaagcagaatgatcggggtcgcaatgcctggcctgggagtactccctggtctggtgcaggccccaggggatgccgagtgttcacgcctgttgcagatcctcgagcttggcagacatagcgaatgcgtgcatgtcactgaagaggaacagctccagctgcgggaaattctcgagcggaggggttccggggaactctacgaacacgagaaagaccttgtgtggaagcttcggcacgaagttcaagaacattttccggaagccttggctaggctgttattagtcaccaaatggaataaacacgaggatgtggcgcagatgctttatctactctgtagctggccggagcttcccgtgttgagcgctctcgagctcctggacttctccttccccgattgtcatgttgggtctttcgctattaagagtctgcggaaactgacggacgatgagttatttcagtacctgttgcaattggtgcaagtgctcaagtacgagagctacctcgactgcgagctaacaaaattccttcttgacagagccctggctaaccgaaagattggccacttcctgttttggcacctgagatctgaaatgcacgtaccctcagttgcgcttaggttcggcttgatccttgaagcatattgcagaggttccactcatcatatgaaggtgctgatgaagcagggggaggcgctgagcaagcttaaggcactgaatgattttgttaaactcagttcgcagaagacgccgaagccccagacaaaagagctgatgcacctatgcatgcgccaggaagcctatctggaggccctcagccacctgcagtcaccattagacccatccacgttacttgccgaagtgtgtgtggaacagtgtaccttcatggattctaagatgaaacctctttggataatgtatagcaatgaggaagccggttcaggtggcagcgttggcattatcttcaagaatggagatgacttaaggcaggacatgctcacgctgcaaatgattcaactaatggatgtgttgtggaagcaggaaggcttggatctccgcatgacaccttatgggtgcctccccacaggggatcggactggactgatcgaagttgtcttacgctcagatacgattgcgaacattcaattgaacaaatccaatatggcagccaccgctgctttcaacaaggacgcattgttaaattggttgaagtccaagaaccccggagaggctctggaccgcgctattgaggagttcactctgagttgcgccggttactgcgtggcaacctacgttctcggcattggcgaccggcattcagataacattatgatccgtgagtctggtcagttattccacattgactttgggcattttctggggaattttaagaccaaattcgggatcaatcgggagcgggtcccatttatcctaacatacgatttcgtgcatgtaatccaacaaggcaaaactaataacagcgagaaattcgagagattcagaggctattgtgagagagcttacacgatccttagacggcatggactgctctttctgcaccttttcgcccttatgcgcgctgctggcctgcctgagttgtcatgtagtaaagacattcagtatttaaaggatagcctggcgttgggaaaaactgaggaggaagcattgaagcatttccgggttaaattcaacgaagctttaagggaatcttggaagacaaaagtgaattggctcgctcataacgtaagcaaggacaacagacagtag

SEQ ID NO: 30062 - DNA, 960 bp, synthetic construct
  misc_feature 1..960: note = Description of Artificial Sequence: Synthetic coding sequence
  source 1..960: mol_type = other DNA
atgatccccgagtccagtgaactggttgtccaggctgggctgttccatgggaatgaaatgctctgcaagactgtaagttcatcagaggtgtcggtctgctcggagcccgtgtggaaacagcggctggagttcgacattaatatctgtgaccttccaaggatggcccgactatgctttgccctctacgccgtgattgaaaaggccaagaaagccaggtccactaagaagaaatctaagaaagctgactgtcctattgcctgggctaatctcatgctcttcgactacaaggaccaactgaaaaccggcgagcgctgcctctacatgtggccatctgtacctgacgaaaagggtgaactcctgaaccctacagggacagtcaggtcgaaccccaatactgattcagcggctgctctattgatttgcttacccgaggtggccccacatccagtatactaccccgctcttgaaaagattctggagctaggtcgccatagcgaatgcgtacacgtaacagaagaggaacaactgcagttgcgggagatcctggaacggagagggagtggagagctctatgagcacgagaaggacctggtgtggaagttgagacacgaggtccaagaacactttcccgaggccctggctaggctgctgttagtcactaagtggaataagcatgaggacgtagcccaaatgctctacctgctctgtagttggccggaactgcccgtcctcagcgccctggaacttttggacttctccttcccagattgccacgtaggttcttttgccataaagtctcttaggaagctaaccgatgatgagctcttccagtatctactccagctggttcaggttctaaagtacgaatcttacctcgactgtgaactgacaaagtttctcttagatcgagcgcttgccaacaggaagatcgggcattttttgttctggcatctccgctag

SEQ ID NO: 30063 - DNA, 3309 bp, synthetic construct
  misc_feature 1..3309: note = Description of Artificial Sequence: Synthetic coding sequence
  source 1..3309: mol_type = other DNA
atggaactggagaactataagcagcctgtggtccttcgcgaagacaactgccgtcgtcgtcggaggatgaaaccccgatctgccgcagcttccctctcatcaatggagcttattcccatcgaatttgtcctccctacctcccaaaggaaatgcaagtcacccgaaacagccctactgcacgttgcaggacacggaaacgtggagcagatgaaggcccaagtgtggcttagagccttagaaacttctgtcgcagcggatttttaccatagattggggccacaccatttcctgctgctatatcagaaaaaaggccaatggtatgaaatctacgataaataccaggtcgtgcaaactctggactgcttacgttattggaaggctacgcacaggtcccccggacaaattcatttagtccagcgccatcccccatccgaagaaagccaggcctttcaacgtcagttaacagctctgatcggttacgatgtgactgacgtgtcaaacgtgcacgatgacgagctggagttcacacgacgcggactggtgaccccaaggatggctgaggtggcttccagagaccccaagttatacgctatgcatccatgggttaccagtaagccgcttcccgagtatctgtggaagaagatcgccaataattgcatttttatcgtcattcatcgctcaacgacatctcaaacgatcaaggtgagtccggatgacactccaggcgctatcctgcagtctttctttactaagatggccaagaaaaagagtcttatggacataccagagagccagtcagagcaggactttgttctgagggtatgcgggcgagatgagtaccttgtgggggagactcccataaagaatttccagtgggtgagacactgtcttaaaaatggcgaggaaattcatgtggtgttagacaccccccctgaccctgctctggacgaagtgaggaaggaggagtggccccttgttgacgattgcaccggcgtgactggataccacgagcagttaacgatccacggaaaagatcatgagtctgtgttcactgtatccctctgggactgtgatcgaaagtttagagtgaagatcagaggtatagatatccccgtcctgccgcgaaatacagacctgactgtcttcgtcgaagccaatattcaacatgggcagcaagttctgtgccagcgacgaacgtcaccaaagcctttcacagaggaagttttatggaatgtgtggctcgaatttagcattaaaatcaaagatcttccaaagggcgctttgctgaatctccaaatttactgcggtaaggcacctgcactctcgagtaaggcttccgccgagtcaccctcatccgagagtaagggcaaggtgcagctgctttattatgtgaatttgcttctcatcgatcacagattcctgctgcggaggggcgagtatgttctgcacatgtggcagatttccggcaaaggcgaagatcagggatcctttaatgccgataaacttactagcgccaccaacccagacaaggagaactcaatgtctatctctatattactggataactactgccacccaattgctcttcctaaacaccaacctaccccagatccggagggcgacagggtcagagcagagatgcctaatcaactgaggaaacagctggaggctatcattgctactgacccgctcaaccctctcacagcagaggacaaggaacttctttggcattttcgctatgagtcgctgaagcatcccaaagcatatcccaagctgttctcttctgtcaaatgggggcaacaggagatcgttgctaaaacgtaccagctgctcgcacggagagaggtctgggatcagagtgcactggacgtgggacttaccatgcaattgctcgactgcaatttttcagatgaaaacgtccgggctattgccgtacagaagctggaatccctggaggacgacgacgtcctacattatctgctccaacttgttcaggccgtgaaatttgaaccataccacgactcagcgctggccagatttctcctgaagcgtggcctgagaaacaaacggattgggcacttcctcttctggttcctaaggagcgaaattgcccagtcacggcactatcagcagcgttttgccgtgattttggaagcttatctgagagggtgtggaaccgctatgctgcatgactttacgcagcaggtgcaagtgatcgaaatgctacagaaggtcaccttggatattaagtccctttccgcggaaaagtacgatgtgtccagccaggtaataagtcagctcaagcagaagctcgagaacctgcagaattcacagctccctgagagctttcgagttccttatgaccccggactcaaggccggtgccctggccatcgaaaagtgcaaggttatggcttctaagaagaagccgttatggctggagtttaagtgtgcagaccctactgccctctcaaacgaaaccatcggaattatcttcaaacatggcgatgatcttcggcaggacatgctgatcctgcagatcttacggatcatggaatctatttgggagacagagagcctggacctgtgtctgttaccctacggctgtatcagcaccggagacaagataggtatgatcgaaatcgtcaaggacgctacaacgatcgccaagatccagcagtcgacagtgggtaatactggagcgtttaaagacgaggtgctaaaccattggctaaaggagaagagcccaacagaggagaagtttcaggctgctgttgaacgatttgtgtatagctgcgccggttattgtgtcgctaccttcgttctcggcattggcgaccggcataacgataacattatgattaccgagacaggaaaccttttccatatagacttcggccacatcctgggcaactacaaatcctttcttggaattaataaggaacgtgtcccgtttgtgttaacgccagacttcctctttgtgatgggaactagtgggaaaaaaaccagtcctcatttccagaagttccaggatatttgtgtgaaggcgtatttggcattaagacaccacacaaatctgttgatcatcttgtttagcatgatgctgatgactggaatgccccagctgactagcaaggaagatatagaatacatccgagacgcactgacagtcgggaagaatgaagaagacgctaagaagtactttctggaccagatcgaggtctgtcgagataagggatggactgtgcaatttaactggttcctgcatctcgttctcggcatcaagcagggcgagaaacactcggcctag

SEQ ID NO: 30064 - DNA, 3309 bp, synthetic construct
  misc_feature 1..3309: note = Description of Artificial Sequence: Synthetic coding sequence
  source 1..3309: mol_type = other DNA
atggagctcgagaattataagcagcctgtagttctgcgggaagacaactgccgcaggcggagacggatgaagccacgcagcgcagccgcatcattgagcagtatggagctcatacccatagagtttgtgctgccaacatcacaacggaagtgcaaatctcctgagactgctctgttgcacgtggcaggacatggtaatgtagagcaaatgaaagcccaggtgtggctcagggcattggagaccagtgtggccgcagacttttaccacagactggggccacatcattttctgcttttataccagaagaagggacagtggtatgagatttacgataagtaccaagtcgtgcagactctggattgtttgcgatattggaaagctacacacagatcacctggacagatccacttggtgcagaggcatcccccatcagaagagagccaagccttccagcgccagttgacagcactcattggctatgacgttactgatgtgagcaatgtgcacgacgacgagctggagttcacgaggaggggcctggtgacaccccgaatggcggaggtggcttctagggacccgaaactgtatgcaatgcacccgtgggtaacttctaagcccttgcccgaatatttgtggaagaagatcgcaaacaactgtatctttatcgtaatccacaggagcactactagccagacaattaaagtgagccctgatgatacgccaggcgcaattttacagtcatttttcacgaaaatggccaagaagaaaagtctcatggatatacccgaatcacagtcggagcaagattttgtgctacgcgtgtgcggtcgagatgagtacctcgtgggggagaccccgattaagaatttccaatgggttaggcactgcctgaaaaacggcgaggagatccatgtcgtcctcgatactcctccagaccccgctctggacgaggtgaggaaggaagaatggccactggtcgatgattgcacaggggtaaccgggtatcatgagcagcttaccattcatggaaaggatcacgaatccgtctttacagttagcctgtgggactgcgataggaagttcagagttaagatcagggggatcgacatccccgtcttacctcggaacactgaccttacggtcttcgtggaggcaaacatccagcacggtcagcaggtattatgccagcggaggacgtcccctaagcccttcaccgaggaggtgctgtggaatgtgtggctcgagttctctataaaaattaaggatctgccgaagggagctctactgaatctgcagatatactgcggcaaggcacctgcactctcttcaaaggccagtgctgaatccccatccagcgagtccaagggaaaagttcagctcctgtactacgtcaatctgctgttaatcgatcaccgtttcctcctgcgcaggggagaatatgtcctgcatatgtggcagatctccgggaagggcgaggaccaggggtcttttaatgctgacaagcttacaagtgccaccaacccagacaaagaaaattcgatgagtatttcaatcctcctggacaattattgtcacccaatagcgcttccaaagcaccagcctacacctgacccggagggagacagagtccgggcagagatgccaaatcagctccggaaacagttggaggctattatcgccaccgaccctctgaaccccctcaccgcagaggataaggaattgctgtggcacttcagatacgaatccctgaagcatcctaaggcctaccccaagctattttctagcgtgaagtggggtcagcaggagatagtagcgaaaacctatcagctacttgccaggcgggaagtgtgggatcagagtgcgctagatgtgggcttgaccatgcagttgctggactgcaacttttcggacgaaaatgtcagggctattgcagttcaaaagcttgaatccctggaagacgacgatgtactgcattacttactgcagctagtccaggctgtgaagttcgagccataccatgactccgctttggcgaggtttctgctgaagcggggattgcggaacaagagaattggccactttttgttctggttcctacgatctgaaatcgctcagtcgcggcactaccagcagcgttttgcggttatactcgaagcatatctgcgtgggtgcggcactgccatgctccacgattttactcagcaggttcaggtcattgaaatgctgcagaaagtaaccctggatattaagtcattaagtgccgagaaatatgacgtttcctcacaagtaatttcccagctgaaacaaaagctcgaaaacctacagaacagccaactgcctgagagttttagagtgccatacgatcccggactgaaagctggcgcactagccatcgagaagtgtaaagtgatggccagtaaaaagaaacctttgtggttggaattcaaatgtgccgatcccacagctctttctaacgaaaccatagggattatcttcaagcatggcgatgatctccgtcaggacatgttaattctccagatactccggatcatggaaagtatctgggaaacggaaagcttagacctgtgtttattaccttacggttgcatcagcacgggagataagatcggcatgatagagatcgttaaagacgccacaactatagctaagatccagcagtctacggtgggcaacacgggtgcctttaaggacgaagtgctgaaccactggctcaaagagaagagcccaaccgaggaaaaattccaagccgctgtcgaacggttcgtgtactcatgcgcaggctactgcgttgctaccttcgtactcggtataggagaccgacacaatgacaacatcatgatcactgagaccgggaatctttttcacattgacttcggacacatcctgggtaactacaaaagcttcctcggcatcaacaaagaacgcgtcccgttcgtactaacacccgatttcctgttcgtaatggggacatcaggtaagaaaacctcaccacacttccagaaatttcaggatatttgcgtgaaggcatatctcgccctgcggcaccataccaacttgcttatcatcttgttctctatgatgcttatgacagggatgccccagctgacatcaaaagaggatattgagtatattcgcgacgctctgacagtcggtaagaacgaggaggacgccaagaaatacttcctcgatcagattgaagtttgccgggataagggctggactgttcagttcaactggttcctgcatctcgtcctggggataaaacagggggaaaaacattccgcctag

SEQ ID NO: 30065 - DNA, 3309 bp, synthetic construct
  misc_feature 1..3309: note = Description of Artificial Sequence: Synthetic coding sequence
  source 1..3309: mol_type = other DNA
atggaacttgagaactataagcaacccgttgtactgagggaagataactgtagaaggcggagaagaatgaagccaagatctgcggcagcctccctgtctagcatggagctaataccaattgagttcgttcttcctactagccagcgtaagtgtaaaagtccagagaccgccttgctgcatgttgccggtcatggcaatgtggagcagatgaaagcgcaggtctggctacgcgcactggaaacttccgttgccgcagacttctatcaccggctgggcccacatcattttctactgctgtatcaaaagaaaggtcaatggtacgaaatttacgacaagtaccaggtcgtccagactctggattgcctgcgatactggaaggccactcacaggagtcccggacagatccatcttgtccagagacacccaccatctgaagagtcacaggccttccagcgccaactcacggccctgatcggatacgacgtgacagatgtgtctaatgtgcacgatgacgagctggagtttacccgcagaggacttgttaccccccgtatggccgaggtggcctccagagatccgaagttatacgccatgcacccttgggtgaccagtaaacctctgcccgaatatctgtggaaaaaaatcgccaataattgtatctttatagtgattcatcgctcaaccacctcccagacaatcaaagtgagccccgacgatacccctggggcaatactccagagcttttttacaaaaatggctaagaagaaatcattaatggacatcccagaaagccagtccgagcaggactttgtcctccgggtttgtggccgagatgaatacttagtaggagagacacctatcaagaatttccagtgggtaagacactgcttgaagaacggagaagagattcacgttgttcttgacactccccctgaccccgcattagatgaagtgaggaaggaagagtggccgctggtcgacgattgcactggggtcacaggctatcacgaacagttgaccattcatggtaaagatcacgaatctgtttttaccgtgagtctgtgggactgtgatcgaaaattccgcgtcaagattagaggcatagacatccccgttctgccccgaaacactgatctgaccgtctttgtagaagctaatatacaacatggccagcaggttctgtgtcagcgcagaacaagtccgaaacccttcaccgaggaggtactttggaacgtgtggctagaattttcaatcaaaataaaagatttaccgaagggggcactcctgaatctacagatttattgcggaaaggcccctgccttatcaagtaaggctagtgccgagagccctagcagtgagtctaaaggaaaggtgcaactgctttactacgttaacctgctccttatagaccatcgcttcctcctgcggagaggggagtacgtactgcatatgtggcagatctcggggaagggcgaggatcaagggtctttcaatgcagacaagttaacctccgccacaaatccagacaaggagaacagtatgtctatatctatccttctggataactactgccatcccattgccctgcccaaacaccagcccaccccggatccagagggcgatagggttagagcggagatgcccaatcaactgcgcaaacagctggaggccatcattgccaccgaccccctgaacccactcacagccgaggacaaggagctgctatggcacttcaggtatgagtccttaaaacatccgaaagcctatcctaagctgtttagtagcgtgaaatggggccagcaggaaatcgtggccaaaacatatcagctgctcgctagaagagaagtttgggatcagtcagcactggatgtgggccttactatgcagctattggattgcaatttctccgatgaaaacgttcgtgccatcgccgtacagaagctagagtcacttgaggatgacgatgtgcttcactacctcctccagctcgttcaggccgtgaaatttgagccataccatgacagcgccctggcccgatttttgttaaaaaggggtcttaggaataagagaatcggccacttcttattctggttcctgaggagcgagatagctcagtcaagacactaccaacagagattcgctgtgatcttggaagcatacctgagagggtgcggtaccgccatgctccacgattttacgcagcaagtccaagtgatcgagatgctccaaaaggtcacacttgacatcaagtccttatcagccgagaaatacgatgttagtagtcaggtcatttctcagctgaaacagaaattggagaatctccagaatagccaactgcccgaaagctttagggtcccatacgatcccggactcaaagctggcgctctggccatcgagaagtgcaaagtgatggcttccaaaaagaagccactgtggctggagttcaaatgtgcagatccgactgccctgagtaacgagactatagggatcatttttaagcacggcgacgatctacggcaggacatgctgatactgcagatcttgcggatcatggagtcaatttgggagactgaatctctggacttgtgcctcttaccgtatgggtgcatcagcacaggagataagattggcatgattgaaatcgtcaaggacgcaactaccatcgccaaaatccaacagagcaccgttggtaataccggcgctttcaaagatgaagttctgaaccattggctaaaggaaaaatccccgactgaagaaaaattccaggcagctgtcgaacgatttgtgtatagctgcgctggctattgcgttgctacttttgtccttggaattggcgatcgtcataatgacaacatcatgatcacagagaccggcaatctgttccacatagactttggtcacatcctgggcaactacaaaagctttcttggcattaacaaggagagggtacccttcgtgctaacaccggattttcttttcgttatgggtaccagcggaaaaaagacctccccccacttccaaaagttccaggacatatgcgttaaagcctaccttgcacttcggcatcatacaaatctgctgatcattctcttcagcatgatgctgatgacagggatgccacaattaaccagtaaggaggatattgagtatataagggacgctttaacggtgggaaaaaatgaggaggatgctaagaagtatttcctggaccaaattgaggtctgccgtgacaagggatggacggtccaattcaactggttcttgcatttagtgctcggcattaaacagggtgagaagcatagcgcatag

SEQ ID NO: 30066 - DNA, 5061 bp, synthetic construct
  misc_feature 1..5061: note = Description of Artificial Sequence: Synthetic coding sequence
  source 1..5061: mol_type = other DNA
atggctcagatctcttctaattctggcttcaaggagtgcccaagttctcacccagaacctacacgcgcaaaagacgttgataaggaggaggcattacagatggaggcagaagccttggccaagcttcaaaaagaccgccaggtgaccgacaatcaaagggggtttgagctctcctccagcacacggaagaaagctcaagtatacaacaagcaggattatgatctgatggtgtttccggagtcagatagtcagaagcgcgctcttgatatcgatgtggagaagctgacccaggccgaactggagaagctgttactcgatgacagtttcgaaactaagaaaacccctgtgttaccggttactccaatcctttctccatctttcagcgcacaactctattttaggcctacaatccaacgcggacagtggcccccaggacttcccggtccctcaacctacgcgctcccgtccatctacccgtccacctatagcaagcaggctgctttccagaacggcttcaatcctcggatgcctaccttcccttctaccgagcctatctatctaagcctgcctggtcagtcaccctatttcagctaccccttaactccggctaccccatttcatccacagggttcattgccaatctacagacccgtggtcagtacagatatggcgaaactatttgacaaaatcgcctctacaagcgaattcctaaaaaacggaaaggctcgtaccgacctggagataacagactccaaagtctccaaccttcaggtaagtccaaaaagcgaagatatttccaaatttgattggttggatctggatcctttgtccaaaccaaaggtggacaacgtggaagtcctcgatcatgaggaggagaaaaatgtatcgtcactgctcgctaaagacccatgggatgcggttctcctcgaggaaagatctaccgccaattgccatctggaaaggaaggtgaatgggaaatccttatcggtcgccactgtcactagaagtcagagcttgaacatccgcacaacccagctggcaaaggcacagggccatatatcgcagaaagaccctaacggaacttcatctctgcctaccggcagttcacttctgcaggaagtcgaggtccagaatgaagagatggctgccttctgccgcagcatcacaaaactgaaaacaaaatttccatatacaaaccatcggacaaaccctgggtacctcctgagtccagtgacagcccagcggaacatctgtggggaaaatgcttcggtcaaggtgagcattgatattgagggcttccagttgccagtcaccttcacttgcgacgttagcagcaccgtggagattattattatgcaggcattgtgttgggttcacgatgatttgaaccaggtggatgtaggatcttacgttctcaaggtctgtggtcaggaggaagtgttgcagaataaccactgcttaggctcccacgaacacatccagaactgtaggaagtgggacaccgaaatccgcctccagctgcttactttttcagctatgtgccagaatctggcccgaaccgctgaagacgacgagactccagtcgacttaaacaagcatctgtaccagattgaaaagccttgtaaagaagccatgaccaggcacccagtggaagaattattagattcctatcacaaccaggtggaactcgctctccagattgagaatcagcaccgcgctgtagatcaggtcattaaggcggtacgcaagatatgctctgccctggatggtgtggagaccctggcgattacggagagcgtgaagaagctcaagcgagcggtgaatctcccccgatccaagacagctgatgtgacaagcctttttggaggggaggacacttccagatcttcgactagaggctcgctgaacccggagaaccctgtccaggtgagcataaaccagctgaccgcagctatctacgatctgttgcggctgcatgccaatagtggtaggagtccaactgactgcgctcagagttcaaaatctgtgaaggaggcttggacaaccaccgaacagttgcagtttaccatctttgcggctcacggtattagctctaattgggtgagtaattacgagaaatactacctgatttgctccttgtcccacaacggaaaagaccttttcaagcccattcagtctaaaaaagtcggaacctataaaaatttcttctacttaatcaagtgggatgaacttattatttttcctattcagataagccagctgcccctcgagtcagtactccacctcacactgttcggaatcctcaaccagtcatcaggcagttcccctgactctaataagcagagaaagggaccggaagccttggggaaggtgagtctgccactcttcgatttcaagcgctttttgacatgcggcacaaaactgttgtacttatggacgtcctcacacacaaacagcgtgccaggtaccgtcaccaaaaagggatacgtgatggaacggattgttctgcaggtcgacttcccgagtcccgcttttgacattatttacacaacgccccaggtcgatcggtcaattatccagcagcacaatctggagactctcgaaaacgatattaagggcaaattgctggacatcctccacaaagattccagcctcgggctttctaaagaagataaagctttcctgtgggagaaacggtattactgcttcaagcacccaaactgcctgccaaagatcctggcaagtgcaccaaattggaagtgggtcaacctagctaagacttattcactgttacaccaatggccggcactgtaccccctcatcgcccttgagctgcttgattccaaattcgctgatcaggaagtgaggtctctcgcagtgacctggatcgaagccattagcgacgatgagcttacagatctcctgccacagttcgtacaggccctgaaatatgaaatctatctcaactccagtctagtccagttccttctgagccgagccttgggaaacatacagatcgcccataatctctattggctcctgaaggatgccctgcacgacgttcagttttcaacgaggtatgagcacgtgctcggtgctctgctgtctgtgggagggaagcggttgagagaagagctcctgaagcagacgaagctggtccagttattaggaggcgttgcagaaaaagtccgccaagcttctggatcagcaaggcaggtggttctccagcggagcatggagcgcgttcagtcatttttccagaaaaacaagtgtagactgccattgaagcccagtctggtcgccaaggaactcaatattaagagctgcagcttcttctcttcaaacgccgttcctctcaaagtgactatggtcaatgcggatccgatgggcgaggaaattaatgtgatgttcaaggttggtgaggatctgcgccaggacatgctggcccttcagatgataaagatcatggataaaatctggcttaaggagggtctggatctgcgcatggtgattttcaagtgcttaagcacaggtagggatcggggaatggtggaactggtgccagcctccgacaccctacggaagatccaggtcgagtacggggtgaccggttcctttaaggataagcctctggctgagtggctccgaaagtataatccctctgaagaagagtatgaaaaggcttccgagaatttcatctactcatgcgctggctgctgcgtggccacctacgtcctgggcatatgcgatcgccacaacgataacattatgctccgatcaaccgggcacatgttccacattgactttggcaagttcctgggtcacgcccagatgttcggttccttcaaaagagatcgtgcaccctttgtgctcacaagcgatatggcgtacgtcatcaatgggggagagaagcccactataaggtttcagttattcgtggacctttgttgtcaagcgtacaacttgataagaaaacagacgaatttattcctcaatctcctgtcccttatgattccatctggtctgcctgagctgacctccatccaagacctcaaatatgtgcgggatgccttgcaaccgcagactacggacgccgaggcaactatctttttcacccggctgattgagtcgtccctgggttccatcgctaccaagtttaatttctttattcataatttggcccagttgcggttcagtggccttccctccaatgacgaacccattctaagtttctcccctaaaacatactccttccgacaagacggcaggattaaggaggtgagcgtgtttacgtatcataaaaagtataacccagacaagcactacatttatgtagtgcgcatcctccgggagggacagatcgagccatcgtttgtgttccgaactttcgatgaattccaggagttgcataacaagctctccataatttttcctctctggaaactgccaggattcccgaatcgcatggtactgggccgtacgcacatcaaagacgtcgccgctaagcgcaagatcgaactaaacagctacttacaatctctgatgaacgcgtccactgatgttgctgagtgcgacctagtttgtactttcttccacccgctgttaagggatgagaaggccgaagggattgcaaggtcagctgacgccggatccttctctccaacccctggccagatagggggtgctgtgaaactgagtatatcctatcgcaacgggactctctttatcatggtaatgcatatcaaggatctggtgaccgaggacggggcagaccccaatccctacgtgaaaacttatctactgccagacaaccataagacctccaagcgtaagactaagataagtcgcaagacccgaaatcccacatttaatgaaatgctggtatactccggctattcaaaggaaactctcagacagagagaactgcagctgtcagtgttgtcagccgagagcctgagggaaaatttcttcctcggaggagtgacactcccgcttaaagattttaacttgtcaaaggagactgttaaatggtaccagctgaccgcggctacctacctctag

SEQ ID NO: 30067 - DNA, 393 bp, synthetic construct
  misc_feature 1..393: note = Description of Artificial Sequence: Synthetic coding sequence
  source 1..393: mol_type = other DNA
atggcacagattagctctaactcaggatttaaagagtgccctagctcacacccggaacctactcgcgctaaggacgtggacaaagaagaggccctccagatggaggccgaggccctggctaaactccagaaggacaggcaagttaccgacaaccaacggggatttgaactgtcaagctctacccgcaaaaaggctcaagtgtacaataagcaggattacgatctaatggtcttcccggagagtgactcccaaaaacgagctctggacatagacgtcgaaaagttgacacaggcagagctagaaaagctgttactcgacgatagtttcgaaacgaaaaagactccagtattgccggttactccaatattgagccccagttttagtgcacagtag

SEQ ID NO: 30068 - DNA, 1452 bp, synthetic construct
  misc_feature 1..1452: note = Description of Artificial Sequence: Synthetic coding sequence
  source 1..1452: mol_type = other DNA
atggcccaaatctcaagcaattctggtttcaaggagtgcccctctagtcaccccgagcccacaagagccaaggacgtcgataaggaggaggcacttcaaatggaggcggaagcactggcgaagctacaaaaagaccggcaggtgacagataaccagagagggtttgaactgtctagcagcaccaggaaaaaggcacaagtgtataacaaacaggattacgacctcatggtgtttcctgaatctgacagccagaagcgggcactggatattgacgtcgaaaagctcacacaagctgagttggaaaaactgctgctcgatgacagtttcgagactaaaaagacacctgtgttacctgtgaccccaatcctatcccccagcttttccgctcagctttatttcaggcctaccattcagcgtggacagtggccccctggcttacctggtcccagtacttatgcccttcccagcatctacccttctacgtattccaaacaggccgcattccagaatggcttcaaccctagaatgcccacttttccttctacagagccaatttaccttagcctccctggtcagagtccatacttttcctacccccttacgcctgccacccctttccatccgcagggttcgctcccgatttatcgacccgtggtgagtacagacatggctaaactgtttgacaagattgcatctacttcagagtttctgaagaatggcaaagctagaacagatttggaaatcacggacagcaaggtctctaacctgcaggtcagccccaagtccgaggatatttccaagttcgactggctcgacttggacccactcagcaaacctaaggtagacaatgttgaagtcctggatcatgaagaggagaaaaacgtcagctccctcctagccaaagatccatgggacgctgtccttctggaggaaaggtctacagccaactgccatctcgagaggaaagtcaacggcaagtctctgtcggtggcgacggtcacccgaagtcaatcactgaacattcgtaccacccagctggccaaagcgcagggtcatatttctcaaaaggaccctaatgggaccagctcgctcccaacaggatcatccttgctccaggaggtggaggttcagaatgaagaaatggctgcattttgcagatctataacaaagttgaaaaccaagtttccctacacgaaccacaggaccaaccccggttatctcttaagccctgtgactgcccagcggaatatatgcggggagaacgccagcgtcaaagtcagcatcgacattgaagggttccagttgcctgtaacatttacttgtgatgtctcgtcaacagtagagataattattatgcaagcactgtgttgggtccacgacgatctcaaccaggtcgatgtgggcagttatgttttaaaagtgtgtggtcaggaggaggtgttgcagaaatag

SEQ ID NO: 30069 - DNA, 3921 bp, synthetic construct
  misc_feature 1..3921: note = Description of Artificial Sequence: Synthetic coding sequence
  source 1..3921: mol_type = other DNA
atggcagctttctgtaggtcgataacaaagttgaaaacaaaattcccctacaccaatcacaggaccaacccgggttacctgttaagccctgtgaccgcccaacgcaacatctgcggtgagaatgcctcggtgaaggtgagtatcgatatagaaggcttccaactaccagtgacattcacatgtgacgtctcctccaccgtcgaaatcatcatcatgcaggccctgtgctgggttcacgatgacctgaaccaggtggatgtgggctcttacgtgctgaaggtgtgcggacaggaggaggtgctacaaaacaatcactgtctaggctcccatgaacatatccagaactgcaggaagtgggacaccgagatacgactgcagctgctcactttttcagctatgtgccagaacctagcacggacggctgaagacgacgagactcctgtggatctcaataaacatctctaccaaatcgagaagccttgcaaggaggcgatgacacgacacccagtggaggaattgctggattcttatcacaaccaggtggagctggctctccaaatcgagaaccagcatcgcgctgttgaccaagtgataaaagcagtgcggaaaatctgttcagcactcgacggcgttgagaccctcgcaataaccgaatccgtgaaaaagcttaagcgtgccgtcaatctcccccgatcaaaaaccgcagatgtgacttctctgttcggtggcgaggatacgtccaggtcatcaacacgcggatctttgaatcccgaaaaccccgtgcaggtttctataaaccagttgacagccgctatatacgacctgctcagactgcatgccaacagcggtcggtcacctacagattgtgctcagagtagcaagagtgtgaaggaagcctggacaactacagagcaactccaattcactatctttgccgctcatggcatcagttcaaattgggtgagtaactatgaaaaatactacttaatttgctccttgagtcataacggtaaggatctcttcaagcctatccaatccaagaaggtcggaacttacaagaattttttttacctcatcaagtgggatgaattgatcattttccctatccagattagtcagttgcccctcgagagcgtactgcacttgaccctattcgggatcctaaatcagagttccggcagtagccccgattctaataagcagcgcaagggcccagaagcgttagggaaagtcagcctgcctctgttcgactttaagcgctttctcacatgcggtacaaagctcctctacctgtggacttcaagccataccaactcagttcctgggaccgtgactaaaaagggctatgtgatggagcgcatcgttctacaggtggacttccccagcccggcatttgatatcatttacaccactccgcaagtggatcgcagcatcatacagcaacacaatctggaaactttggaaaacgatatcaagggcaagctgctggatattctccacaaggattccagccttgggctgtctaaggaagacaaagccttcctgtgggagaagcgctactactgttttaagcacccaaattgcctgccgaagatcctggcgagtgcccctaactggaaatgggtgaatctggccaaaacatactctctgctgcatcagtggccagctctgtatcctctcattgccttggagctcttggattctaagtttgctgatcaagaagtgagatctctcgctgtcacatggatcgaggctataagcgacgatgagcttaccgacctgttgcctcagtttgtgcaagccttgaaatatgagatatatctcaactccagtctcgtccagttcctgctgagccgcgctttaggcaacattcagatcgcgcacaacctgtattggctactcaaggacgcgctgcatgacgtgcagtttagcacgaggtacgaacacgtgttgggagccctcttgtccgttggaggaaagaggctgcgtgaggaactgcttaaacaaaccaagcttgtccagctgctcggaggagttgctgaaaaggttaggcaagccagtggttccgccagacaggtggtactccagcggagtatggaacgtgttcaatccttttttcagaaaaataaatgccgcctgcctctgaaaccgagtctcgtggcaaaggagcttaatatcaagtcctgcagtttctttagctctaacgctgtcccactgaaggtaaccatggttaacgcagatcctatgggcgaagagattaacgtcatgtttaaggtgggtgaagacttgcgacaggatatgttagctttacagatgataaagatcatggacaaaatttggcttaaggagggcctcgatctacgcatggtaatattcaaatgtctgtcaactggtcgagaccgcggaatggtggagctcgtgcccgcatccgataccctgaggaagattcaggtagagtatggagtcaccggaagctttaaggataagcctctggctgaatggcttaggaagtataatcccagtgaagaggagtacgagaaggcttccgaaaacttcatctactcctgtgcaggctgttgtgtggcgacatatgttctgggaatctgtgacagacacaacgacaacatcatgctgcgttcaaccggccatatgtttcacatagatttcggcaagttcctggggcatgcacagatgttcgggtcctttaaacgcgacagagcacctttcgtcctgacatctgatatggcctacgttatcaacggaggggagaagcccacgatccggtttcagcttttcgtggacctctgttgccaagcttacaatctcatcagaaagcagactaatctgtttctgaatctccttagcctcatgataccgagtggcttgccagaactgacttcaatacaggacctaaagtacgtgagagacgcacttcaacctcagacaactgacgccgaggctaccatcttttttactcgattgattgagagtagtctcggatccattgccactaagttcaacttctttatccataacctggcccagttacgcttcagcggcctcccttctaatgatgaaccgattctttctttttctcccaagacgtactctttccgacaggacggccgaattaaggaagtgtctgtctttacctaccacaaaaaatataatccagacaagcattatatctatgtggtcagaatcctgcgggaaggccagattgaaccaagctttgtctttaggacctttgatgagtttcaggagctccacaataagcttagcatcattttcccactctggaagctccctggcttcccaaacagaatggttctagggagaacccacattaaggacgtcgcagcaaagcgtaagattgagctgaacagttatctccagtccctgatgaacgcttcaaccgatgtggccgagtgtgacctggtgtgtactttttttcacccactgttgcgggatgaaaaagccgaaggaatcgccagaagtgctgatgctgggtctttttctcccaccccgggacaaatcggcggagctgtaaaactgtctatctcataccgaaacgggacactattcattatggtcatgcatattaaggatctggtcactgaggatggagcggatccaaacccctacgttaaaacctatttattgcccgataatcacaaaacatccaaacgcaagactaagataagcaggaagacccggaatcctaccttcaatgaaatgttagtttacagcgggtattctaaagagacccttcggcagcgagagctgcagctgtctgtgttgtctgccgagagcttaagagagaacttctttctcggaggagtgacccttcctctcaaagatttcaacctaagcaaagaaacagtgaagtggtatcagctcaccgccgctacctacctgtag

SEQ ID NO: 30070 - DNA, 1947 bp, synthetic construct
  misc_feature 1..1947: note = Description of Artificial Sequence: Synthetic coding sequence
  source 1..1947: mol_type = other DNA
atggcacagatctcaagtaactctgggtttaaggagtgcccttccagtcatccagaaccaacaagagcaaaggatgtggacaaagaggaagcgctgcagatggaggcagaagcacttgctaagctgcagaaggaccggcaggtcaccgacaatcaacgcggattcgaactgtcgtcctctaccagaaagaaagcccaggtctataacaagcaggattacgacctgatggtctttccggaaagtgatagtcagaagcgtgccttggacattgacgtcgagaaactaactcaggccgagctggagaagttgctgctagatgacagtttcgagacgaagaaaacaccagtgttgcctgtgacgcccatactgtcaccttcctttagtgctcaactgtatttccggccaactatccagcgcggtcagtggcctcctggcctgcctggcccaagcacctacgcccttcctagcatatacccttcaacctattcaaagcaggcagccttccagaacggctttaaccccagaatgcccactttcccttctaccgagcccatttacctgagtctgcccggacagagcccctacttctcgtaccccctcacacccgctacccccttccacccacaggggtctcttcccatttacagacctgtggtaagcacagacatggcaaagctctttgacaaaatcgccagtactagcgaatttttgaagaacggcaaagctcgcaccgacctggagatcactgatagcaaagtgagcaacttacaagtgagtcctaagtccgaggatataagcaaattcgactggctcgatctggacccattaagtaaacccaaggtggacaacgtggaagtccttgaccacgaagaggagaagaatgtgagctcgctcctggctaaagacccgtgggacgcagttttactcgaagagcggtccacagccaattgccatctggagaggaaggtcaacggcaagtccctatccgttgccaccgtcacccgcagccagtccttaaatatccgcaccacgcaactcgcaaaggcccagggacacatttcccagaaggatccaaacggtacttcttcgcttcccacaggatcctcacttctgcaagaggtcgaagttcaaaacgaggagatggctgcattctgtcgctctatcactaagttaaaaacaaaatttccatatacaaaccacaggactaatcctggctatctgctgtctcccgtgaccgcacagaggaatatttgcggagagaacgccagcgtaaaggtctctattgacatcgaaggtttccagcttcccgttacctttacctgcgatgtgagttccacagtagagatcatcataatgcaggctctatgttgggtgcacgacgacttgaaccaggttgacgtcggcagttacgtgctaaaggtttgtggacaagaggaagtgctgcagaacaaccactgcctgggctctcacgaacacatccagaactgccgaaagtgggatactgagattcgtttgcagctcctgacttttagcgcgatgtgtcagaacctcgctagaacggccgaggacgacgagacaccagtagatctgaataaacatctttaccaaatcgagaaaccgtgtaaggaggcgatgactcggcaccccgtggaagaactgcttgattcatatcacaatcaggtggagctcgccttgcagattgaaaaccagcatagagcggtagatcaggtgatcaaggccgtccgaaaaatctgcagtgccctggacggagtggagactctcgctatcaccgaatctgtaaaaaagctgaagcgagcagttaacctgcctagaagcaagacagccgatgtcacctctctctttggcggagaggacaccagccgaagttctacccggggtagccttaaccctgagaacccagtgcaagtgtcaattaatcaactgtag

SEQ ID NO: 30071 - DNA, 2664 bp, synthetic construct
  misc_feature 1..2664: note = Description of Artificial Sequence: Synthetic coding sequence
  source 1..2664: mol_type = other DNA
atgggagaggctgagaagtttcattatatctactcatgtgacctagatatcaatgtgcagttgaagatcggttctctggaaggaaaaagagagcagaagtcgtataaggcagtcctggaagatcctatgctgaaattttctggattgtaccaagaaacctgctctgacctatacgtcacctgccaagtgtttgcagaggggaaacctctagccctgcctgtacgaacttcttataaggcgttctccactcggtggaactggaacgagtggttaaagttgccagtcaaataccccgacctgccaagaaacgctcaggtagcattgaccatttgggacgtgtacggccctggaaaggccgtgccagtggggggtacaacagtgtctctctttggcaagtacggcatgtttcgccagggcatgcatgatctaaaggtttggcccaacgtagaggcagacgggagtgagcccacaaagactcccggacggacctccagcaccctgtcggaggatcagatgtcacgtctcgctaagcttaccaaagcccatcggcagggccacatggtgaaagtcgactggctggacaggctgactttccgtgaaatcgagatgattaacgagagtgaaaagcggtccagcaatttcatgtacctgatggtggaatttaggtgtgtaaaatgcgatgataaagagtatggtatagtctattacgagaaagacggagacgagtctagtccaatcctgaccagcttcgaactggtcaaggtgcctgatccccagatgtcaatggagaacctggtggagagtaaacaccataaactggcccgttccctcaggtcaggcccttccgatcatgatctgaaacccaatgctgctacacgcgatcagctgaatattattgtttcctatcctcccaccaagcaactgacgtacgaagaacaagatctcgtttggaagttccggtattacctcaccaaccaggaaaaggcactcactaagttcctcaagtgcgtaaattgggatcttccacaggaagccaaacaggcactcgaattgctcgggaaatggaagcccatggatgtggaagacagcttggaactgctatcttcacattacactaacccaaccgttagaaggtacgccgttgcccgtctgaggcaggcagacgacgaagacctcctgatgtatcttcttcagctcgtgcaggccttgaagtacgagaatttcgatgacataaagaacggcctggaacccaccaagaaggacagccaaagctctgtctctgagaatgtgagcaattccggcatcaactccgcggaaattgattcctcccagatcataacttcccccctaccatctgtgtccagtcccccaccggcatcaaagacaaaagaggtgcccgacggggagaatctggagcaggatctgtgcacctttctcatctcacgggcatgtaaaaactcgactctcgctaactatctttactggtacgtaatcgtggaatgcgaagatcaggatacccagcagcgcgaccctaaaacacacgaaatgtatctgaatgtaatgcgcaggtttagccaggccctgctcaagggggacaagagcgtaagagtaatgagatccctgctagccgctcagcagacctttgttgataggctggtgcatttgatgaaggccgtccagcgggaatctgggaatcgtaaaaagaaaaatgaacggctccaagctctactcggcgataatgaaaaaatgaatctttctgatgtggaactcatccctctgccacttgaaccccaggtgaagatcagaggcattattccagagaccgccacactgtttaaatctgcactcatgccagcccagctgtttttcaagacggaggacggtggaaaatatcccgttatcttcaagcatggcgatgatctgagacaggaccaacttatactacagatcatcagcctcatggataaactgttgcgcaaggagaacttagacctgaaactgacaccatacaaggtccttgccacctctacaaaacacggattcatgcagtttattcaatccgttcccgtagcggaagtactggacacagagggcagcatccagaattttttcagaaagtacgctccgagtgaaaacggcccaaatggcatcagtgcggaggtgatggatacttacgttaagtcctgcgccggatattgcgtaatcacatacatacttggcgtaggagacaggcatcttgataatcttctactgacgaagactggcaaactgtttcatattgacttcggctacatcctaggtcgggatccaaaacccctcccaccgccaatgaaactgaataaagagatggtggagggaatgggtggtacgcagagtgagcagtatcaggagttcaggaagcagtgttatactgcattccttcacctccgcagatattcaaacctgattctgaacttgtttagcctgatggtggatgcaaatattcctgatatagcgctggagcccgataaaactgtgaagaaggtacaggataagtttaggctcgacctgtctgacgaggaagccgttcactatatgcaatcactcattgacgagtctgtacacgccctcttcgccgctgtggtggagcaaattcataagttcgcacagtactggaggaagtag

SEQ ID NO: 30072 - DNA, 2475 bp, synthetic construct
  misc_feature 1..2475: note = Description of Artificial Sequence: Synthetic coding sequence
  source 1..2475: mol_type = other DNA
atgggggaggctgagaagttccactacatttatagttgcgaccttgatattaatgtccaactcaaaatctggaacgaatggttgaagctgcctgttaagtacccagacctcccacgcaatgctcaagtggctctgaccatctgggacgtgtacggtcccggaaaagctgttcctgtgggagggacaaccgtctcattatttggcaagtatggaatgtttcgtcaggggatgcacgatctaaaagtgtggccaaatgtcgaggccgatggcagcgaacctacaaaaacacctggtcgcacatcgtcaacattaagcgaagaccagatgtctcgactggcaaaacttactaaagcacaccgacaggggcacatggtgaaagtggattggctggatcggctcacattcagagaaatcgagatgattaacgagagcgagaagcgctcaagcaatttcatgtacctaatggtggaattccggtgcgtgaagtgtgatgacaaagagtacggaatagtttactatgagaaagacggcgatgagagctccccaattctgacttcgtttgagcttgtgaaggtcccggaccctcaaatgtccatggagaatctggtggaatcaaaacatcacaagcttgcaaggtccctccgcagcggcccaagcgaccatgacctgaagcctaacgccgctacccgagaccagctgaacattatcgtgtcataccctccaactaagcagctgacctatgaggaacaggatttagtctggaagtttaggtattatttgacaaatcaggaaaaagcattgactaaattccttaagtgcgtgaactgggatttgcctcaagaagcgaaacaggccctggaactactggggaaatggaaaccaatggatgtggaagactcactggaacttttgagcagtcactacaccaaccccacagtccggaggtacgctgtggctagactgcggcaggccgacgatgaagaccttcttatgtacctgctgcaactggtgcaggctttgaaatatgagaattttgacgatatcaagaatggtctcgaacccaccaagaaagactctcagagctcagtctctgaaaatgtgtctaactctggaatcaattccgccgagatagactctagtcagatcattacatcccccctccctagtgtctcaagtccaccacctgcatcaaaaactaaagaagtacccgatggagaaaatctcgaacaggacttgtgcacctttttgatcagtagggcgtgtaagaatagcaccctcgctaattatctctactggtatgtgatcgtagaatgcgaggatcaggatactcagcagagagatccaaagacacatgagatgtacctcaatgtgatgagaagattctctcaagctctgctgaagggcgacaaatcagtccgggtgatgaggtcccttttggccgcacagcagacattcgtggatagactcgtgcatctaatgaaagccgtgcaaagagaaagtggcaaccgtaagaagaaaaatgagaggctgcaggcccttctaggagacaacgagaagatgaacctcagtgatgtggaactgattcccttgcccctggagccccaagtgaagattagaggcatcatccctgaaacagccacactctttaagagtgccctcatgcccgcacaacttttcttcaaaacagaagatggcggtaagtacccggtgatctttaagcacggagacgatctcaggcaggaccaactgatccttcagattatatcgttgatggataagttgctgcggaaggaaaacctggacttgaaactgactccatacaaggtgttggctacctcaaccaaacacggtttcatgcagttcatccaatcggtcccagtggccgaagtcctcgataccgaaggttctattcagaatttcttccggaaatacgcccctagcgaaaacggcccaaacggaatctccgcagaggtaatggacacatacgtgaagtcctgtgctggctactgtgtgatcacctacatcttgggagtcggtgataggcatttggacaacttattactcaccaaaaccggcaagttgttccatattgattttggctacatcctcggtagggaccccaagcccctgcctccccctatgaaactcaataaagagatggtggaggggatgggaggtacacagtccgagcagtaccaggagtttaggaagcagtgctacaccgccttccttcatctacgacggtacagcaacctcatcttgaacttattttccctgatggtagacgcaaacatcccggatatagctttggagccagataagacagtaaaaaaggtgcaggacaaatttagactggatttgtcagatgaggaggccgtgcattacatgcaatctttaatagatgagtctgtccatgctctgtttgccgctgtggtggagcaaatccataagtttgcccaatattggaggaagtag

SEQ ID NO: 30073 - DNA, 2175 bp, synthetic construct
  misc_feature 1..2175: note = Description of Artificial Sequence: Synthetic coding sequence
  source 1..2175: mol_type = other DNA
atgtcggccgagggataccaatatcgagcactgtacgattataaaaaagaaagggaagaggacatcgacttacacctcggtgacatacttacagtaaacaaaggttctctggtagcactgggcttctctgatggacaggaggctcggccagaggagattggatggcttaacggctataatgaaactacaggagagcggggtgactttcctggaacctacgttgagtacatcggaagaaaaaagatctcacctcccacacccaagccacgacccccacggccactgcccgtggcgcctggaagctccaagactgaagctgatgttgagcagcaggctctcaccttgcctgacttggccgaacaatttgcacctcccgacatcgcgcctcctcttctcattaagctcgttgaggccatagagaagaaggggctagagtgcagcaccctctataggacacagtcctcttcaaacctggcagagctgaggcaactgttagattgtgatactccctctgttgacctggaaatgatcgacgtacacgtactcgctgacgcttttaagagatatttgctcgatctacctaacccagtaatcccagcggcagtgtactctgaaatgatttcattggcgccagaggtacagagttccgaagagtatatccagctcctgaagaagctgattaggtccccatctatcccacatcagtactggctaacacttcagtacctgctgaagcatttttttaaactgagccagacttcttccaagaaccttttgaatgccagagtcctatctgagattttcagccccatgctcttcaggtttagcgccgctagcagcgacaatactgaaaaccttattaaagtaatcgagattctgatttcaacagaatggaatgaaaggcagccagcgcctgccctgcctcccaagcctcccaagcctacaacagtggctaacaatggtatgaataacaatatgtccctgcaagacgccgagtggtactggggagatatctctcgggaagaagtgaatgagaagctaagagacacagcggacggcacattcctggtgagagatgcttctaccaagatgcacggcgattacacgctgactctgcgcaagggaggcaacaacaagctaatcaagatttttcatagggacggcaaatacgggtttagcgaccctctgacattcagtagcgttgtagagctgattaaccactatagaaacgagagtttggcccagtacaatcctaagttggacgtgaagctgttgtacccggtgtcaaagtatcagcaagaccaggtggtaaaagaggacaacattgaagccgtgggcaagaagcttcatgagtataatacccaatttcaggagaagagccgcgaatatgaccggttatatgaggaatacacacgcacaagtcaggaaatccagatgaagcggacggcaatagaggctttcaacgagactatcaagatttttgaggagcagtgccagactcaggaaaggtatagcaaagagtatatcgaaaagttcaaaagagagggcaacgaaaaggaaatccagcggattatgcataattatgacaaattaaagtcgaggatctctgagataattgatagcaggcgcagactggaagaagacttgaaaaaacaggcagccgagtatagggagattgataaaaggatgaattcaattaagccggatcttatccaacttcgaaaaacaagagatcaatacctgatgtggttgacccagaaaggggtgcggcagaagaagctgaatgaatggttgggtaacgaaaatacagaggatcaatattccctggtcgaggatgatgaggacctgccacatcacgatgaaaagacgtggaatgttggcagctccaatcgcaacaaggcagagaatctgcttagaggaaagcgtgacggtacgtttctcgtccgagaatctagtaaacagggatgctatgcctgttcggtcgtggtagacggggaggtgaagcactgtgtcattaacaaaactgccaccggctatggttttgctgagccctacaacttgtattccagtctgaaggagctggtcctgcattatcagcacacctccctggtgcagcataatgacagcctgaatgttacactggcctatccagtgtatgcgcagcaacgtagatag

SEQ ID NO: 30074 - DNA, 1275 bp, synthetic construct
  misc_feature 1..1275: note = Description of Artificial Sequence: Synthetic coding sequence
  source 1..1275: mol_type = other DNA
atgcataacctccaaactctgccaccaaaacctcctaagcctactactgtggcgaataatggaatgaataacaatatgtccttgcaggatgctgagtggtattggggcgacatttccagagaagaagttaacgagaaattaagagacacagcggatggaacattcctggtaagggacgccagcacaaagatgcacggcgattataccctcactctgcgaaaaggaggcaataacaagcttatcaagattttccaccgtgacggaaagtatggatttagcgacccgttgacatttagctcagttgtggaactgataaaccactaccgaaacgagagcttagcccaatacaaccccaagctggacgttaaactgttgtatcccgtgtcaaagtatcagcaggatcaggtggtcaaagaagataatatcgaagccgtagggaaaaagctccatgagtacaacacgcagttccaggaaaagagccgtgagtacgatcggctgtatgaagaatacacacgaacaagccaggaaatccagatgaaaagaacggccatcgaagcgttcaatgagacgattaagatctttgaggaacagtgccagactcaggaacggtatagcaaggaatatatcgagaagtttaagagagagggaaacgagaaggagattcagaggattatgcataattatgacaagttgaagagcagaatttccgagatcattgactccaggcggaggctggaagaggacctgaagaagcaggccgcagaataccgggagatcgacaagaggatgaattcaatcaagccggacctgattcaattaaggaagacgagggatcaatatcttatgtggctaacccagaaaggggttaggcagaagaaattaaacgagtggctggggaacgaaaacaccgaagaccaatactcacttgtggaggatgatgaggatctcccacaccatgatgagaagacttggaacgtgggctcctccaacaggaataaggctgaaaatctgctgcggggaaaaagggatgggacgttcctcgtccgagagtccagcaaacaggggtgttatgcctgtagtgtcgtggtcgacggtgaggtgaaacattgcgtgatcaacaagaccgctaccgggtacggattcgccgaaccgtacaacctgtactcttcactgaaggagttagtgttgcactaccagcataccagcctggtgcagcataacgattccctgaatgtgactcttgcctaccctgtctacgctcagcagcgccgttag

SEQ ID NO: 30075 - DNA, 1365 bp, synthetic construct
  misc_feature 1..1365: note = Description of Artificial Sequence: Synthetic coding sequence
  source 1..1365: mol_type = other DNA
atgtacaatactgtgtggaatatggaagatttggaccttgaatacgccaaaacagacatcaattgtggcaccgatctgatgttctatattgaaatggatcctccagctctgccgccaaagccccctaagccaactactgtggcaaacaatggtatgaataataatatgtccctgcaagacgccgagtggtactggggggacattagtcgggaagaagttaacgagaagctaagagacacagcagacggtaccttcctggttcgcgacgccagcaccaagatgcacggcgattacacactgaccctgaggaaaggcggtaataacaagttaatcaaaatatttcatagggacggtaaatacggcttttcagaccccctgacgtttagcagtgtcgttgagctcattaatcattaccgcaatgaatcactcgcacagtataatcccaaactagatgtcaaattgctctatcccgtctccaaataccagcaggatcaagtggtaaaggaagacaatatcgaggcagtgggcaagaagctgcacgagtacaatacccagttccaagagaaatccagggaatacgaccgtctgtacgaggagtacaccagaactagccaggaaattcagatgaaaagaacagccatcgaggcattcaacgaaaccataaagatctttgaagagcagtgccagacccaggagcgatatagtaaggaatacatcgaaaaattcaagagggagggcaacgagaaagagattcagaggataatgcacaactatgataaactgaaatctcgcatcagcgaaataatagatagccgtcgcaggctggaagaagatctaaagaagcaggccgctgaatatagagaaattgataagcgaatgaattcgataaagcccgacctcattcagttgcgcaaaacccgagatcaatacttgatgtggctgactcagaagggcgtgaggcagaaaaaactaaatgagtggctgggtaatgagaataccgaggaccagtacagcctggtcgaggacgatgaagatctccctcatcacgatgagaagacttggaacgtcggcagttctaatcggaataaggctgaaaatctcttaagaggcaaacgcgacggaacttttcttgtgagggaatcctcaaaacagggctgttacgcgtgttctgttgttgtggacggggaggtgaagcactgcgtcattaataagaccgcgacaggctatggattcgcggagccgtacaacctctactcgagtttgaaggaactcgtgctccactatcaacatacaagcttagttcagcacaatgactccctaaatgtgactcttgcttaccctgtctacgcccagcagcggcgatag

SEQ ID NO: 30076 - DNA, 2199 bp, synthetic construct
  misc_feature 1..2199: note = Description of Artificial Sequence: Synthetic coding sequence
  source 1..2199: mol_type = other DNA
atgagtgcggagggttaccagtatcgggctctttatgattataagaaagaaagggaagaagatattgacctgcatcttggtgacattctgacggtgaacaagggttctctggtcgctttggggttcagtgatgggcaggaggccaggcccgaggagattggctggttaaacggatacaacgagacaactggagagcgaggcgacttccctggtacatatgtggaatatatagggaggaagaagatctcccctcctactcccaaacctcgaccacctaggcctctgccagtcgccccaggatcgtcaaaaacagaggcggacgttgagcaacaggccctcacattgcccgacttagcagaacaatttgcacctccagatatagcacctcccctcttgataaaactggttgaagcaatagagaagaaggggctggagtgtagtaccctgtaccgtacccaatctagcagcaacctcgctgagctcaggcaactgctggattgtgacacaccaagcgtggacctggagatgatcgacgtgcacgtgctcgccgatgcttttaaacgatatctgctggacctccccaatccggtgatacctgcggctgtgtattccgagatgatatctctggctcctgaggttcaaagcagcgaggaatacatccagctcttaaagaagctgatccgcagtccttctattcctcaccagtactggctgacattgcagtacctcctgaagcatttttttaagctttctcagacttcctctaagaacctcttgaacgctcgcgttctttccgagatctttagccctatgctttttcgtttttccgcagcctcttctgacaataccgagaatttgattaaagtgattgaaatcctgatcagcacagaatggaatgagagacaacctgcacccgcattaccccctaagccccctaagccaacaacagtggcaaataatggtatgaacaacaacatgtccctccaggatgcagagtggtactggggtgacatcagtagagaagaggtaaacgagaaacttagagacaccgccgatggcactttcctagtgagggatgcgtccacaaaaatgcacggggattacaccctgaccctccggaaagggggaaacaacaaactgatcaagatctttcaccgcgatggaaaatacggcttctctgacccacttacattctctagcgtcgttgaactcatcaaccactatcggaatgagtcattagctcaatacaaccctaagctagacgtgaagctcctgtatcctgtgagcaagtatcagcaagatcaggtggtgaaggaagacaacatcgaagccgtggggaagaagctccacgagtataacactcaattccaagagaaatcccgcgagtatgatcggctgtatgaggagtacaccaggacatcacaggagatccagatgaagcgcacagctatcgaggcctttaacgagacaatcaagatcttcgaggaacagtgtcagacccaggagcgatattccaaagagtatattgaaaagttcaagagagagggcaacgagaaagagattcagaggatcatgcacaactatgacaaactcaagtcccggatcagcgaaattatcgactcaaggagacgcctggaggaagatctaaaaaaacaggcagccgaatatcgggagatagataaacgcatgaattctattaaacctgacttgattcagctgcgaaaaacacgcgatcagtatttaatgtggctcacacagaaaggggtacgccagaagaagctcaatgagtggttaggtaacgaaaataccgaagaaaactttctcagctgcctgccctctcagtactcattagtggaggatgacgaggaccttccccatcacgacgaaaagacctggaacgttggctccagcaatcggaataaggctgagaatctcctaagggggaagcgagacggcaccttcctcgttcgtgagagctcaaaacaaggttgctacgcctgtagcgtcgttgttgacggggaagtgaagcattgcgtcatcaacaaaacagcaacaggctacggattcgcagaaccttataatctctactctagtttaaaggagctggtgctgcactatcagcacacatcactggtccagcataacgactccctgaatgtgactctggcctatccagtctatgctcaacaacggagatag

SEQ ID NO: 30077 - DNA, 2175 bp, synthetic construct
  misc_feature 1..2175: note = Description of Artificial Sequence: Synthetic coding sequence
  source 1..2175: mol_type = other DNA
atgagtgccgaagggtaccagtaccgggcactatacgattataaaaaagagcgagaggaggatatcgaccttcacctcggcgatattttgaccgtcaacaaaggatccctggtggctctgggatttagcgacggacaggaagcccgtccggaagaaatcgggtggttgaatggctataatgagacaactggggaacggggagacttccctggtacgtatgttgaatacatcgggagaaaaaagatcagtccaccaactcccaaaccacgccctcccagacctctgcccgttgccccaggctcttctaagaccgaggcagatgtggagcagcaggccctgacactgccagacctcgcagaacaattcgccccacctgacattgcaccacctcttctgatcaaacttgtggaggccatcgaaaaaaaaggactggaatgttctacactgtacagaacacagtctagttcaaatctggcagaactccgccagttactggactgtgacaccccctccgtggacctcgagatgatcgatgtgcacgtgctagcagatgctttcaagcggtatctactcgatcttcccaatcctgtgattccagctgctgtatactccgagatgattagtctggcccctgaggtacagagcagcgaagaatatatccagttactgaaaaagttgatccggtccccttctattcctcatcagtactggctcacattgcaatatcttctgaaacatttcttcaagctgagccaaacaagctccaagaacctgttaaatgctcgcgtgttaagcgagatattctctcctatgctattccgatttagtgcagcttccagcgacaataccgaaaacctgatcaaggttattgaaattctgatcagtaccgagtggaatgaaaggcaacctgccccagcccttccaccgaagcctcctaaaccaactaccgtcgctaacaacgggatgaacaacaatatgagtctgcaagatgccgaatggtactggggagatatcagcagggaagaggttaatgagaagctgcgcgacacggccgacggcacattcttagtccgcgatgcatcgaccaagatgcacggcgactatacactgaccctaagaaaagggggtaacaataaactgatcaaaatatttcaccgcgacgggaagtacgggtttagcgatcccctaaccttcagttccgtcgtggagcttataaaccactacaggaatgaatccttggcccagtacaatcccaagttggacgttaagcttttgtacccggtttccaagtaccagcaggaccaggtcgtgaaagaagacaacattgaggctgtgggtaagaagcttcacgaatataacacgcagtttcaagaaaagagcagagaatacgacagactgtacgaggaatatacaaggaccagtcaggagatccagatgaaaaggactgccatagaggccttcaatgaaacaatcaagatattcgaggaacaatgccaaacccaggagaggtactcgaaggaatatatcgaaaaattcaagcgagaagggaacgagaaggaaattcaacgcatcatgcacaattacgacaaactgaagtctaggatctcggaaattattgatagccgcaggcggctagaagaagatctcaaaaagcaggccgcagaataccgggagatcgacaagagaatgaatagtattaaaccggatttgatacagctaaggaagacccgcgatcagtacctgatgtggctgacccaaaagggtgtgaggcagaaaaaactcaacgaatggctgggcaatgagaacacagaggaccagtactccctggtggaggatgatgaagatctaccacaccatgacgaaaaaacatggaacgtgggaagcagtaatcggaacaaagccgaaaacttgctgaggggcaaacgcgatggaacctttctggtccgcgaatcaagcaaacagggctgttacgcctgttcagtggtcgtagatggggaagtaaaacactgtgtaataaataaaaccgccaccggatacggattcgccgaaccatacaatttgtactcctctctaaaagaacttgtccttcactatcagcacacctcactggtgcagcataatgacagcctgaacgtgaccctagcataccctgtctacgctcaacagcgtcggtag

SEQ ID NO: 30078 - DNA, 414 bp, synthetic construct
  misc_feature 1..414: note = Description of Artificial Sequence: Synthetic coding sequence
  source 1..414: mol_type = other DNA
atgcatggggattatacactcaccctccgaaaaggcggaaataataagctcattaaaattttccaccgcgacggtaagtatggcttctcagaccctcttaccttttcttccgtggtggaactgattaaccactacaggaatgagtctctggcacagtacaaccctaaactggatgttaagctgttatatcccgtctccaagtaccagcaggaccaagtggtgaaggaagataatatcgaggctgtagggaagaagcttcatgagtataatacccagtttcaagagaagtcccgtgagtacgacaggctgtacgaagagtacacacggacaagccaggagattcagatgaagcgaactgctattgaggccttcaatgaaaccatcaagatcttcgaagagcaatgccagacctag

SEQ ID NO: 30079 - DNA, 2175 bp, synthetic construct
  misc_feature 1..2175: note = Description of Artificial Sequence: Synthetic coding sequence
  source 1..2175: mol_type = other DNA
atgtccgcagaagggtatcaataccgggctctatatgattacaaaaaggaaagagaggaagacattgatctgcatttaggcgatatattaaccgtgaacaagggtagtctggtggctctgggctttagtgacggccaagaggctcgacccgaagagatcggctggttaaacggttataatgagaccactggtgaaagaggcgatttcccaggcacatacgtggaatacattggacgcaagaagatctccccgccaacccccaagcccaggccacccagaccactgcccgtggctccaggatcctccaagaccgaggctgacgtggagcagcaagcactcacattgccagacttggcagaacagtttgccccacctgacatcgcgccaccactgctgattaaactggtggaagccatcgaaaagaagggcctggaatgttcaactctgtaccgcacccagtccagctcgaaccttgccgagctgcggcagctgctcgactgcgatacacccagcgtcgatttagaaatgatcgacgtgcatgtgctggcagacgcattcaagaggtatctgctggatctgcctaaccccgtgattcctgccgcagtgtatagcgaaatgatttccctggccccagaagtacagagtagcgaagagtacatccagctgctgaaaaaactcataagatcgccgtccatcccacaccagtactggcttactttgcagtacctgttaaaacatttctttaaactcagccaaacctcaagcaagaacctgcttaacgccagggttctctctgaaattttcagccctatgctgttcaggttttctgcggcaagctccgataacacagaaaacctgattaaagtgatcgaaatacttatctctaccgagtggaacgagcgtcagcctgcgcctgccctaccgcctaagccccctaaacccaccacagtagctaacaatggaatgaacaacaatatgtctctacaagatgccgagtggtactggggggatatctctcgtgaagaggtaaatgagaaattgagggacacagcagacggtacattcctggtgcgagatgcgtctacgaagatgcatggggactataccctcacactccgcaagggtggcaacaacaaactcattaaaatctttcatagagacggtaagtacgggtttagtgatccattgactttctcatccgtcgtggaactcatcaaccactatagaaacgagtcactggcgcaatataatcccaagctggacgtcaagctgctctatccagttagtaagtaccagcaggaccaggtggtcaaggaggataacattgaggccgtgggtaagaagttacatgaatataatacccagtttcaggaaaagtcacgagaatacgacaggttgtacgaggaatatacaaggactagccaagaaattcagatgaaacggaccgccatcgaagcattcaatgagaccatcaagatttttgaagaacagtgccaaacccaggagcgctactccaaggaatacatagaaaaattcaagcgggagggcaatgagaaggagatccagcgaatcatgcataactacgacaaactgaaatcacggatttcggaaattatcgatagtaggcgcagactagaggaagacctgaaaaaacaggctgctgagtatcgagagatcgacaaaaggatgaactctattaagccagatcttattcagctgagaaaaacaagagatcagtatctgatgtggctgacgcagaaaggtgtcagacagaaaaaactgaatgagtggcttgggaacgagaataccgaggaccagtattccctggtcgaggacgacgaagaccttcctcaccacgacgagaaaacctggaatgtgggttcctccaacaggaacaaggctgagaacctgttgcggggaaagagggacggcacatttctcgtacgagagagttctaagcagggctgctacgcgtgctcagtggtcgttgacggcgaagtgaaacattgtgttatcaataagaccgccaccggctacgggttcgcagagccttacaatctctactccagtctgaaggaactggttcttcattaccagcacacctcactggtccagcacaacgattccctgaatgtgacccttgcatatcccgtgtacgcacagcagcgaaggtag

SEQ ID NO: 30080 - DNA, 1224 bp, synthetic construct
  misc_feature 1..1224: note = Description of Artificial Sequence: Synthetic coding sequence
  source 1..1224: mol_type = other DNA
atgctatttgacaaggtgaaggctttcagcgtgcagctcgacggcgctacggcgggtgtcgagcctgtgttttccggtggccaggccgtggcaggccgagttctcttagaattatcttctgcagctcgcgttggcgctttgcgcctcagagctcggggtcgcgcacatgtgcattggaccgaatcaaggtctgccggatcaagtactgcttacacgcagtcctactccgagagggtcgaggtggtgagccatagggccacgcttttagcacccgacactggtgagaccactactctacctcctggaaggcacgagttcttgttcagcttccaattgccccctactctggtcacttcttttgagggcaaacacggcagtgtgcgttattgtattaaggccaccttacacagaccctgggttcccgctcgaagagcaagaaaagttttcacagtgattgaaccagtggacattaacaccccagctctgctggccccacaggccggtgcacgggagaaggtcgccaggagctggtactgcaatcggggactggtttcgctatccgccaagattgataggaagggatacactcctggggaagtaataccggtcttcgcagaaatcgataacggttccacccgtcccgtcctgccgcgagcggcagtggtccaaactcaaacattcatggcgagaggcgcacgtaagcaaaagcgagcagttgtcgcgtctctggccggagagcccgtgggacctggccagcgcgcactatggcaaggaagggcccttcgtatacctcctgtgggcccatcaatccttcactgcagagttctgcatgtggattatgccctcaaggtgtgcgtagatatcccaggcacatccaaactgctgttagagttgcctcttgttatcggaactattccattacacccctttggttctcgatcaagctcggtcggctcacatgcaagtttcctgctggattggaggctgggtgctctgcctgagagaccggaagctcccccagagtacagcgaggtcgtggcagataccgaggaagcagccctcggacaaagccctttcccccttccccaggaccccgatatgtccctggaggggccattcttcgcttatatccaggagttcagatacagaccgccacctctgtactcagaggaggatcctaatcccttgcttggtgacatgcggcctagatgcatgacttgttag

SEQ ID NO: 30081 - DNA, 1386 bp, synthetic construct
  misc_feature 1..1386: note = Description of Artificial Sequence: Synthetic coding sequence
  source 1..1386: mol_type = other DNA
atgtataacactgtatggtctatggatcgggatgacgcagactggcgggaagtgatgatgccttattctacagagctaattttttatatcgagatggaccccccagctctcccacccaaaccccctaaaccaatgacatctgccgttcctaatgggatgaaagactccagcgtgtcacttcaggatgctgagtggtactggggcgatatcagcagagaagaagtgaacgacaagttgagagatatgcctgacggcaccttcctggttcgcgatgcaagcactaaaatgcaaggcgactacacattgaccctgcgcaaagggggaaacaacaagcttattaagatataccatagggacggtaagtatggattctccgaccccctcacctttaactcagtcgtagagctgatcaatcattaccaccacgaaagccttgcccagtacaatcccaaattggatgtgaaactgatgtaccctgtctcccggtatcagcaagatcaactggtgaaggaggacaatatagacgctgtggggaagaagctccaggagtaccattcccagtaccaggagaaatccaaggagtacgaccggctgtacgaagagtataccaggacttcccaggagatccagatgaagaggactgcgatcgaagctttcaatgaaactattaagatttttgaggagcagtgccacacacaggagcagcactccaaagagtacattgaacgcttccgcagagaaggcaacgaaaaggaaattgagagaattatgatgaactatgacaagctgaagtcaagactgggcgaaattcacgacagcaaaatgagattggaacaagacctcaagaaccaggcattggacaaccgtgagatagataagaaaatgaatagcatcaaaccggacctgattcagttgcgaaaaatacgggaccagcacctggtgtggctgaatcataaaggagtgagacagaaaaggctcaacgtgtggctgggaatcaagaacgaggacgccgatgaaaactacttcatcaatgaagaggacgagaacctgccccattacgatgagaagacttggttcgtggaagacataaacagagtccaggctgaggacctgttatacggcaagcctgacggtgcctttcttatacgggaaagctctaagaagggttgttatgcgtgctcggtggtggctgatggagaggttaaacattgtgtaatatatagcaccgcgagggggtacggttttgccgagccttataatctttactcaagcctcaaggaattagttttacattaccagcagacgagcctggtccagcacaatgacagtctgaatgtccgcctggcttaccccgttcacgcccagatgccaagtctctgccggtag

SEQ ID NO: 30082 - DNA, 1101 bp, synthetic construct
  misc_feature 1..1101: note = Description of Artificial Sequence: Synthetic coding sequence
  source 1..1101: mol_type = other DNA
atgtacaacaccgtttggtccatggaccgcgatgatgcggactggagagaagtcatgatgccgtacagcactgagctcattttctacattgaaatggacccacctgcagcggaagtgaatgacaaattgcgagatatgcccgacgggactttcctggtgagggatgcatcaactaagatgcagggagactacacactaacattaagaaagggcggaaataataaacttattaagatatatcatagggacggtaagtacggctttagcgaccctctcaccttcaactcagtggtggagctaataaatcactaccatcacgagtctctcgcgcaatacaaccccaagctcgacgtaaaactcatgtatccagtttcaagatatcagcaggatcagctggtgaaggaggataacatcgacgctgtaggtaagaagctccaggaataccattcccagtaccaagagaagagcaaggaatatgatagactctatgaagaatatacacgtacatctcaggagattcagatgaaaaggacagcaattgaagcctttaacgagacaataaagattttcgaagagcaatgccatactcaagagcagcattcgaaggaatacatcgaacggtttaggcgcgagggtaatgagaaggagatcgagcggtggctgaaccacaagggtgtccgtcaaaaaaggctgaatgtgtggctggggattaagaatgaagatgcagacgagaattacttcatcaacgaagaggacgagaacttaccgcattatgacgaaaaaacctggttcgtggaggacatcaatagagtacaagccgaggatctgctgtatgggaagccggatggcgcattcctgatccgggaatctagtaagaagggctgctacgcctgttccgtggtcgcagacggcgaagtcaaacactgtgtgatatactctactgcaagagggtacggtttcgctgaaccatataatctgtacagctcgcttaaagagctcgtactgcattaccagcagacctccttagtgcagcataatgacagcctgaacgtccgcctggcctatccggtgcacgctcagatgccttcactctgccgttag

SEQ ID NO: 30083 - DNA, 1209 bp, synthetic construct
  misc_feature 1..1209: note = Description of Artificial Sequence: Synthetic coding sequence
  source 1..1209: mol_type = other DNA
atgtacaacacagtttggagcatggaccgagatgacgcagattggcgtgaggtcatgatgccctactctacagaattgattttctacattgaaatggacccacccgcactcccaccaaagcccccaaaacccatgacaagtgcggtgcccaatgggatgaaggacagttccgtgtccctgcaagatgccgagtggtactggggtgatatcagccgggaagaagtgaacgacaaacttagggatatgccggacggcacttttctggtccgcgacgcaagtaccaaaatgcagggtgactatactctgacgttgcgtaagggcggaaacaacaaacttattaagatctatcaccgggacggaaagtatgggttttcagaccctctgacctttaattccgtggtcgagctaataaatcattatcatcatgaatctctcgctcagtataatcctaagctggatgttaaactgatgtaccctgtgagtagataccagcaagatcagctggtcaaagaagacaacattgatgcagtggggaagaagctgcaggaatatcattcacaatatcaggagaagtcgaaagagtacgacagactgtacgaggagtacacgcgaaccagccaagaaatacaaatgaagcgcacagcaatcgaagcttttaacgagaccattaagattttcgaggaacagtgccatactcaggagcagcactccaaagagtatattgagaggtttcggagggaaggcaatgagaaggaaatcgagaggtggctgaaccacaaaggcgtgagacaaaaaagacttaacgtctggctcggaattaagaacgaggatgcagatgagaattattttattaacgaggaggacgagaacctacctcactacgacgaaaaaacatggtttgtggaggacataaatcgggtccaagccgaagatctgttatatgggaagccagacggagcctttttaatcagggagtcatctaagaagggctgctatgcctgtagcgtggtggccgacggtgaggtgaagcactgtgtcatctactccacagccaggggttatgggtttgccgaaccctacaatttgtatagctccctgaaagagctcgtgcttcactaccagcagaccagcttggtgcagcataacgacagcctgaatgtgcggcttgcttacccggtacatgctcagatgccctcgctgtgtaggtag

SEQ ID NO: 30084 - DNA, 1386 bp, synthetic construct
  misc_feature 1..1386: note = Description of Artificial Sequence: Synthetic coding sequence
  source 1..1386: mol_type = other DNA
atgtacaacacagtctggagcatggatcgcgatgacgccgattggcgggaagtcatgatgccttattcgactgagctgatcttctatatcgagatggatcccccagctctcccacccaagccccctaagccaatgactagcgccgtcccaaacgggatgaaggacagcagtgttagtctgcaggacgccgaatggtactggggcgacatttccagagaggaggtcaacgataaattgagggatatgcctgatggcacttttttagtgagagatgcaagcactaaaatgcagggtgattacaccttgaccctacgaaaagggggaaataacaagctcattaagatttatcatcgcgatggtaagtacggcttttctgaccccctgacgttcaactccgtggtggagctcatcaatcactaccaccatgagagcctcgcccagtacaatcctaaattagatgtaaaactgatgtaccccgtctcacggtaccagcaggaccagttggtgaaggaggacaacatcgatgccgtaggaaaaaaactgcaggagtaccactcacagtatcaggaaaaatccaaggagtacgaccgattgtacgaggagtacacccggaccagtcaggagatacaaatgaagcgcactgccatcgaggcgtttaacgaaaccattaagatttttgaggagcaatgtcacacacaggaacaacactctaaagaatacatcgaaagattccggcgagagggtaatgaaaaggagatcgagagaattatgatgaattacgacaaacttaaatctaggctcggcgagattcacgattcaaaaatgagactggaacaggacctgaaaaaccaggccctcgacaatcgcgagatagacaagaagatgaattctattaagccagatctcatccagctaaggaagatacgcgaccagcacctggtttggctgaaccataaaggagtccgacagaaaagactgaatgtgtggttagggatcaagaacgaggacgcagacgagaattactttatcaatgaagaggatgagaatctgccacactatgatgagaagacttggtttgtcgaagatatcaacagggtgcaggctgaggacctcctctacggcaaacccgatggagcctttctgatccgcgagagttccaagaaaggctgctacgcgtgttcagtggttgctgacggcgaggtcaaacactgcgtgatctattcaacagcaagagggtatggctttgctgagccctacaatctctacagctcgttgaaggaactggtgttgcactatcaacagacctcactggtgcaacataatgattcattgaacgtgaggttggcctacccggttcacgcacaaatgccctccctgtgtcgctag

SEQ ID NO: 30085 - DNA, 1386 bp, synthetic construct
  misc_feature 1..1386: note = Description of Artificial Sequence: Synthetic coding sequence
  source 1..1386: mol_type = other DNA
atgtataatacagtatggagtatggaccgagacgacgccgactggagggaggtgatgatgccttactctacagaattaatattctacatcgagatggatcctcccgctctgccccctaaaccccctaagcctatgacctccgcagttcccaacggcatgaaagattcttccgtgtcattacaggatgccgagtggtactggggcgacatcagtagggaagaggtgaacgacaagctgcgggacatgcccgacggaaccttcttggtgagagatgccagcaccaagatgcagggtgattacacactcacgctaaggaaggggggaaacaacaagctaatcaaaatatatcatcgggacgggaagtacggtttcagcgaccctttgacgttcaactcagttgttgagctcatcaatcactaccaccatgagagtctggctcagtataatcctaagctcgacgtgaagctgatgtatccggtgagccgttaccagcaggaccagcttgtgaaggaagacaatatagacgcggtcggtaaaaagttgcaggagtaccatagccagtatcaagagaagagcaaggagtacgacagactttacgaagaatatactcggaccagtcaagagattcagatgaagagaacagccatcgaggcctttaatgaaacaatcaagattttcgaagagcagtgccacacacaggaacagcactccaaggaatacatagagagatttcgtcgagaaggaaatgagaaagagatcgagaggatcatgatgaattatgataagctgaaatctagactgggcgagattcacgactccaagatgcgccttgaacaggatctgaagaaccaagcgctcgacaatcgtgaaattgataaaaaaatgaatagcatcaagcccgatctgatccagcttcgcaaaatacgtgaccagcatctcgtatggttgaaccacaagggcgtacgccagaagcgcctgaacgtttggttggggataaaaaacgaggatgccgacgaaaactatttcattaacgaagaggacgaaaacctgccccattacgacgagaagacatggttcgttgaagacattaatcgggtgcaggccgaggatctgctctatggaaaacctgacggagcatttctgattagagaatcttcaaagaaaggctgctatgcctgtagcgtggtggcagacggcgaagtgaaacactgtgtgatttacagcaccgccaggggctacggatttgcggaaccctataatttgtacagttctctgaaggagttggtccttcattatcagcagacttctttggtgcaacacaatgacagcttgaacgtgagacttgcctatccagtgcacgcccagatgccatctttatgccggtag

SEQ ID NO: 30086 - DNA, 1209 bp, synthetic construct
  misc_feature 1..1209: note = Description of Artificial Sequence: Synthetic coding sequence
  source 1..1209: mol_type = other DNA
atgtataacactgtatggtccatggatcgcgatgacgctgattggagggaagtgatgatgccgtactcaacggagttgattttttatattgaaatggaccccccagccctgccacctaaaccgccaaagcccatgacttcagctgtgccaaacggtatgaaagactcatccgtgagcctgcaggacgccgaatggtactggggagacatctctcgcgaagaggtcaatgacaagttgagagatatgccagatggcacatttctcgtgcgcgatgcatccactaagatgcagggcgactacacactgacactacgtaagggaggcaataacaaactgatcaaaatctaccaccgcgatggcaaatatggattctccgacccactgactttcaactctgtagtagagttaatcaatcactatcatcacgagagcctggcacagtacaacccgaagttggatgtgaagctgatgtaccctgttagccgctatcagcaagaccagttagtgaaggaagacaatatcgacgcagtaggcaagaaactgcaggaataccactcgcagtatcaggagaagagcaaagagtacgatagactctatgaggagtacacgagaactagccaagagatacagatgaagcgtacggccattgaggcgttcaacgaaacgattaaaatttttgaagagcagtgtcacacccaggaacagcatagcaaagagtacatcgagcggtttcggagggaaggaaacgaaaaagaaattgagcgttggctgaatcataaaggtgtacgccagaagagactgaacgtgtggctgggtataaagaatgaagacgctgacgaaaattatttcatcaatgaggaagatgaaaatcttccccattacgatgagaaaacctggttcgttgaagacattaatcgggtgcaggcagaggatctcctctatggtaagcccgatggtgcctttctaattagagaatcatccaagaagggatgctatgcgtgctcagtggtggctgatggggaggtgaaacattgcgtgatatactcaacagctaggggctatgggttcgcggaaccctacaacctttattcatccctcaaggaactggtgctgcattaccagcagacatcgctggtgcaacacaacgattcactgaacgtcagacttgcatatccagtgcacgcccagatgcccagcctttgcaggtag

SEQ ID NO: 30087 - DNA, 621 bp, synthetic construct
  misc_feature 1..621: note = Description of Artificial Sequence: Synthetic coding sequence
  source 1..621: mol_type = other DNA
atgtataacacagtctggtcaatggacagagacgacgctgattggagggaggtgatgatgccatacagcaccgaactcatcttctacattgaaatggaccccccagctctgcccccaaagccgccaaagcctatgacctctgcggttcccaacggaatgaaagactcttctgttagcctacaggacgcggaatggtattggggcgacatttctcgcgaagaggtgaacgacaaactgagggacatgccggacggaacctttttggtgagggacgcctccacaaagatgcaaggtgattatacccttaccctaagaaagggcggaaacaataagttgataaaaatctatcacagggatgggaaatatggatttagtgatcccctcacctttaattccgtggtcgagcttatcaaccactaccaccatgagagcttggctcaatacaaccccaagctggatgttaagctgatgtaccccgtgagtagataccagcaagaccagttggtgaaagaggataatatcgacgcagtcggtaaaaaactgcaagagtatcactcacaatatcaggagaagagtaaggagtatgataggctgtacgaagagtacacccggaccagctag

SEQ ID NO: 30088 - DNA, 1524 bp, synthetic construct
  misc_feature 1..1524: note = Description of Artificial Sequence: Synthetic coding sequence
  source 1..1524: mol_type = other DNA
atggggccaagccgcctggtccgcggacccaggcctcagggcatgcgttctccctataggcgtccaggcatgggatggcctagacccagattccccaggatgtttaagtgctctaggcgccgatatcagcaggggctgcgcggacgaacggcctcctcagctgctataaacccagccacccgggctatgggaataaacaacactcatacagacaccacaatcgtctggatctttcctccacaggccctaccccctaagccaccaaaacctatgacttctgctgtgcccaatggaatgaaggactccagcgtttcattgcaagacgccgagtggtattggggcgacatctcaagagaagaggtgaacgacaaactccgggacatgccggatggaacttttttggtccgcgatgcgtcgactaagatgcagggggattatactttaaccttgcgaaaaggaggcaacaacaagctgataaagatctaccaccgggatggcaaatatggttttagcgacccgttgacttttaactcagtggtcgaactcattaatcattaccaccacgaatcactcgcacagtataaccccaaattagatgttaagctgatgtaccccgtgagcaggtaccagcaggaccagttggttaaggaagataacatcgatgctgtgggcaagaaactgcaagaatatcactcccaatatcaggagaaaagtaaagagtacgacagactctatgaggagtacacccgcacttcccaagaaatccagatgaagcgcaccgccatcgaggctttcaacgaaacgatcaaaatatttgaagagcagtgccacacccaggaacagcacagtaaagaatacattgagcggttccggagggagggcaatgagaaggaaattgagcgaatcatgatgaattatgataaactgaaatcacgattgggtgagatccacgactctaagatgcgcctggaacaggatctgaaaaatcaggccctcgataacagagagattgataaaaagatgaacagcataaaaccagatctgatccagctgcggaaaatccgggatcaacacttagtctggctgaaccacaagggcgtcagacagaagaggctgaatgtgtggcttgggatcaaaaacgaagacgccgacgagaattattttatcaacgaggaggatgaaaatctcccacattatgatgaaaagacatggtttgtagaggatataaatcgggtgcaagccgaggatctgctttacggcaaacccgatggcgctttcctgattcgggaatcctcaaaaaaagggtgctatgcatgttccgttgttgccgatggggaggtcaaacattgcgtgatttacagcacggccaggggttatggtttcgcagagccctataacctgtattctagcctgaaggagctggttctacattaccaacagacctccctggtgcagcacaatgactctctaaatgtgaggcttgcctaccccgtgcatgcacaaatgccctcgttgtgtcgatag

SEQ ID NO: 30089 - DNA, 2643 bp, synthetic construct
  misc_feature 1..2643: note = Description of Artificial Sequence: Synthetic coding sequence
  source 1..2643: mol_type = other DNA
atgcaaccaggtgctaccacatgtaccgaggatcggatccagcacgccctcgagcgatgtctgcatggactgtccttaagtcgaagatccacatcctggagtgcgggtctgtgcctgaattgttggagcttgcaggagctcgtaagccgggacccgggtcacttccttatactgctggagcagatcctccagaagaccagagaagttcaggaaaagggcacttatgatttactcaccccactagccctgctcttttattctaccgtgctttgcacaccccatttcccccctgattctgacctgctgctgaaggccgcatccacttatcacagatttcttacctggccagtcccttactgttctatctgccaggaattactgacattcatcgacgccgaactaaaggcgcctggcatatcttatcagagactggttagagctgagcagggcctacctatccgcagccatagaagctcaaccgtgaccgttctgctgttaaatcctgttgaggtacaagcggagttccttgcagtcgccaacaagctgagcactcccggtcacagtccacactccgcctatacaaccctgttgctccatgccttccaagctacattcggagctcactgtgatgtgcctgggcttcactgtcggttacaggcgaagactctcgctgaactggaggacattttcacagaaacagccgaggcacaggaattggcctccgggatcggtgacgccgcagaggctagaaggtggctgcgtacgaaactgcaggccgttggcgaaaaggccggatttccgggtgtgttagatactgcgaagccgggaaagctccacacaatcccaatccccgttgctaggtgttatacctactcctggtcccaggatagcttcgatatcctacaagagatcctgctgaaggagcaagaattactgcaacctggaattcttggggacgacgaggaggaggaagaagaagaagaggaggttgaagaggacctggaaacagatggacattgcgctgagagggatagtcttctgtccacgagcagcctcgctagccacgacagtaccctgtctctggcttccagccaggcttctggcccagcactcagcaggcatttgcttacttccttcgtgtccggcctgagcgatggaatggactcagggtacgtggaggattcggaggagagctcatcagagtggccttggcgccgtggctcgcaagagaggcggggtcatcgtcgacctggccaaaagtttatacgcatctacaagctgtttaagtccacatctcagctggtccttagaagagactccagatccttggaagggagtagcgataccgcccttccccttagaagagctggaagtctgtgcagccctttagatgaaccagtgagcccgccttcccgtgcacagaggtctaggagtttgccccagccaaagctgggaacccagctgccttcttggctactggccccagcctctcggccacaaaggcgacgcccatttctcagtggcgacgaggaccccaaggcctctactctccgcgttgttgtctttggttcagaccggatttccggaaaggttgccagggcctactctaatctgaggaggttggagaataacagaccactccttactcgtttctttaaactgcagttcttttatgtgccagtgaaacgctcccatggaacttcccctggcgcttgtcccccacctcggagccagaccccctcccctccaacagattctccgagacacgcaagccctggcgagctgggcacaaccccttgggaggagtccacaaacgacatctctcactacctgggcatgcttgacccctggtatgaacgcaatgtgctgggcctgatgcatctgcctcctgaagttctctgccaacagtctctgaaggctgaagcgcaggcactagagggttccccgactcagctacctattctggccgatatgctgttgtactattgtcgatttgccgcacgtccggtgctcctgcaagtgtatcagaccgaactgacttttattacaggagagaagacaactgaaatcttcatccatagcctcgagttgggccacagcgcagccactagggctatcaaggcttcaggtccgggatctaaacgactggggatcgacggggaccgggaggctgtgcctctcaccctgcaaataatctactccaagggagcaatcagtggtagatcccgatggtcaaacctggagaaggtgtgtacttcggtcaatctgaacaaggcctgtaggaaacaagaagaactggactccagcatggaggccttgacccttaatttgacggaggtcgttaagcggcagaattcgaagagcaagaaggggttcaatcagataagcacgtcgcaaatcaaggtggacaaagtgcagataattggctctaatagttgcccgttcgccgtttgcctggaccaggacgaacgcaaaatcttgcagagcgtggtgcgctgcgaagtctcaccctgttataaaccagagaagagcgacctgtcaagccctcctcagactcctccagacttgcccgctcaggcagctccagatctctgttcactgttgtgccttcccatcatgactttttctggggctctgccctag

SEQ ID NO: 30090 - DNA, 2643 bp, synthetic construct
  misc_feature 1..2643: note = Description of Artificial Sequence: Synthetic coding sequence
  source 1..2643: mol_type = other DNA
atgcagccaggagctactacctgcaccgaagacagaatacagcacgcactggagcgctgtctacatggactatcattgtcaagacgaagtacctcctggagcgccggactgtgccttaactgctggtcactgcaagaacttgtatcccgggatcctggtcacttcctgattttgctggagcagattctgcaaaaaacccgcgaagtccaggagaaggggacctatgatctgcttactcctctcgccctcctgttttactctactgtgttgtgtaccccccacttcccccctgatagtgacttactgctcaaggctgcttcaacctaccatcggtttctgacctggcctgtgccttactgtagcatctgccaagaactcctcaccttcatagacgccgagctaaaggctccaggaatctcctaccagcgcctggtgcgcgcagagcagggtttgcccattcggagtcataggagttcaaccgtgactgtcctcctccttaaccctgtcgaagttcaggcagaatttctcgccgttgccaataaactgtctacaccgggtcacagcccccactcagcctataccacactcctcctgcatgccttccaggctaccttcggggctcactgtgacgtgcccggtctgcactgccggctccaggctaaaacgctagctgaactggaagacatttttactgaaactgccgaggcccaggagctggctagcggtatcggagatgccgcagaggcaagacgctggttgcgcaccaaacttcaggccgtgggagaaaaggccggatttccaggggtgctggatactgccaagcctggaaaacttcatactatacccatacctgtggccagatgctacacttatagctggtcacaggatagcttcgatatcttacaggagatcctgttgaaggaacaggagttgcttcagcctggaattctaggcgacgacgaggaggaggaggaggaagaggaggaggtggaggaggatctggaaacagacggtcattgcgcagagcgggactcactgctgtctacatcttcactcgcgtcacatgactccaccttgtcactggcgagctcacaggcctccgggccagctctatctcgccatctattgacatcttttgtctcgggactgtcggatgggatggattccgggtatgtcgaggattcggaggagtcgagctctgaatggccctggaggcgaggtagtcaggagcgacgaggccaccggagaccgggtcaaaagttcatccggatttacaaactatttaaatcaactagccagctggtgctccgtcgtgatagccgatccctcgagggttctagtgataccgcgctgccactccgtcgcgcagggtccctgtgcagcccactggatgagccagtgtcaccaccctcacgagctcaacgcagccggtcactgcctcagcctaaactgggcacacagctgccatcatggctattagcccctgcatcccgccctcagcggcgtagaccctttctgtctggagacgaagacccaaaagccagcaccctccgtgtagtggtttttggaagcgacaggatcagcggaaaggttgccagagcctactcaaatctgaggcgcctcgagaataataggccccttctcactcggttcttcaagctccagttcttttacgtgcctgtgaaaagatcacacgggacctcccccggtgcatgtccacctcccagatcccaaactcctagcccccctacagatagcccaagacacgctagccccggagagctcggaacgaccccgtgggaagagagcacgaatgacatttcccactaccttggaatgctggatccatggtatgaacgtaacgtgctgggactgatgcacttgccacctgaagtgctgtgccagcagagcctgaaagccgaggcccaagccctggagggatcccccacccagctgccaatcctcgccgatatgttgctatactattgtcgcttcgccgctaggcccgtgttgcttcaggtgtatcaaacagaactaactttcataaccggtgagaagactaccgagattttcatacactccctggagctgggacactctgccgctacacgggctatcaaggcttctggacctggaagcaagaggctggggattgatggggaccgtgaggctgttcccctcaccttgcagattatttactcgaagggcgcaatatctggtagatctcgatggtctaatttagagaaggtctgtacctccgtaaatctcaacaaggcctgcaggaagcaagaggagttggattctagcatggaagcgttgacgctgaacctcacagaagtcgttaagaggcagaactccaagagcaaaaaaggcttcaatcagatttccacatcccagatcaaagttgataaagtgcagatcatcggaagtaactcctgcccatttgccgtttgcttggaccaagatgaacggaaaatccttcaaagcgttgttcgctgtgaagtgtctccctgctacaagcccgagaagtctgacctcagctcacccccacaaaccccacctgacttgcctgctcaagctgccccagacttatgttctttactgtgtctcccaatcatgacgttctctggcgctctcccatag

SEQ ID NO: 30091 - DNA, 447 bp, synthetic construct
  misc_feature 1..447: note = Description of Artificial Sequence: Synthetic coding sequence
  source 1..447: mol_type = other DNA
atgaaactgcttgtcttggccgtgttgctcaccgttgccgctgcagattcaggcatcagccccagagcggtgtggcagtttaggaagatgatcaagtgtgtaattccaggtagcgatcctttcctggaatataacaactacggttgctactgcgggctgggcggaagcggaacccccgttgacgaacttgacaaatgctgtcaaacgcacgataactgttacgaccaggccaaaaaattggacagttgtaaatttctcctggataatccttatacacacacctattcgtactcctgttctggttcggctatcacgtgttctagtaagaacaaggagtgtgaagcgtttatttgtaactgcgacaggaacgcagcaatatgtttttcaaaggcaccatataataaggctcataaaaacctggacaccaaaaaatattgtcaaagctag

SEQ ID NO: 30092 - DNA, 435 bp, synthetic construct
  misc_feature 1..435: note = Description of Artificial Sequence: Synthetic coding sequence
  source 1..435: mol_type = other DNA
atgaagacactgctgctgctcgcggtgattatgatctttggattacttcaagctcacggaaaccttgtcaactttcaccgaatgataaagctgaccactggaaaggaagctgcactgagctacggattttacggctgccattgcggtgtgggcggaaggggcagccccaaggacgcaacggacagatgctgcgttactcacgattgctgctataaacgactggagaaacggggatgcggaaccaagtttctgagctacaaattttccaactctgggtctcgcatcacatgtgctaagcaggactcatgccggtcccagctttgcgaatgcgacaaggcagcagccacctgcttcgcaagaaataagacaacctataataagaagtaccagtattactcaaacaagcactgcaggggaagcacacctaggtgctag

SEQ ID NO: 30093 - DNA, 435 bp, synthetic construct
  misc_feature 1..435: note = Description of Artificial Sequence: Synthetic coding sequence
  source 1..435: mol_type = other DNA
atgaagacgctgctgctgctggctgtgatcatgatcttcggcttgctgcaagcacacggtaatctcgtgaatttccataggatgatcaagctaactactggcaaagaagcagcactgagttatggattctacggctgccattgcggagtgggtgggcgaggcagccccaaggacgccaccgatagatgctgcgtgactcatgattgttgctacaagcgactcgagaagaggggatgtggaacaaagtttctgtcttacaagttctctaattccggttctcgtatcacgtgtgccaagcaggattcgtgtagatcccaactttgcgagtgcgacaaggccgctgctacatgttttgccaggaacaagacaacctataataaaaagtaccagtattacagcaacaagcactgccggggtagcacccccaggtgctag

SEQ ID NO: 30094 - DNA, 438 bp, synthetic construct
  misc_feature 1..438: note = Description of Artificial Sequence: Synthetic coding sequence
  source 1..438: mol_type = other DNA
atggagttagccctcctgtgtggcctggtagtcatggcaggcgtcatccctatccagggaggaatcttgaatctgaacaagatggtgaaacaggttaccggcaagatgcccatcctctcatactggccctatgggtgtcattgcggcctcgggggacggggtcaaccgaaagatgccacggactggtgttgccagacccacgactgttgctacgaccacctcaagacccagggatgctctatttacaaggattattaccgctataacttctcccagggaaatatccactgctccgacaaggggtcttggtgtgagcaacagttatgcgcttgcgataaggaagtggcattttgtctgaagagaaatctggatacctaccaaaaaaggctgaggttctattggaggccgcactgtcggggtcaaacccccggttgctag

SEQ ID NO: 30095 - DNA, 429 bp, synthetic construct
  misc_feature 1..429: note = Description of Artificial Sequence: Synthetic coding sequence
  source 1..429: mol_type = other DNA
atgaagtcgccccacgtgttggtcttcctctgtcttcttgttgctctggtcacaggcaatctggtgcagttcggagtgatgattgaaaaaatgacgggtaaatccgccctgcagtataacgactacggctgttactgcggcataggcggatcacattggcccgtggatcagaccgactggtgttgccacgctcatgactgttgctacggaagactagaaaaacttggttgcgaacccaagcttgaaaagtatttgtttagcgtatccgagcgcggtatcttctgtgccggtagaaccacttgccagcggttgacttgtgagtgcgacaaaagggctgcactgtgtttccgtaggaatctgggcacatataataggaagtatgctcactacccgaacaaactgtgcaccggcccaacccctccatgttag

SEQ ID NO: 30096 - DNA, 636 bp, synthetic construct
  misc_feature 1..636: note = Description of Artificial Sequence: Synthetic coding sequence
  source 1..636: mol_type = other DNA
atggctgatggggctaaagctaatccgaaaggcttcaaaaaaaaggtcctggaccgatgcttcagcggatggcgcggaccacgctttggcgcaagttgcccatcaagaacatcccgcagttcactgggcatgaaaaagttctttacagttgcgatcctggcagggagcgtgttgtcaactgcacatggctctctgcttaatctgaaagctatggtggaggccgttacaggccgatccgcgatcctctctttcgtcgggtacgggtgctattgtggactgggcggacggggtcagcccaaggatgaagtggattggtgctgccacgcccacgattgttgctatcaggagttgttcgaccaaggatgtcatccatacgtggaccactacgatcataccatagagaataatactgagattgtttgtagcgacctcaacaagacggaatgcgacaaacaaacctgtatgtgcgacaagaatatggtcttgtgtctcatgaatcagacctaccgagaggaatatcgcggttttttgaacgtttattgccaggggccaacacccaactgttctatttatgaaccaccacccgaagaagtgacttgtagtcaccagtcccctgcccctcccgcacctccctag

SEQ ID NO: 30097 - DNA, 936 bp, synthetic construct
  misc_feature 1..936: note = Description of Artificial Sequence: Synthetic coding sequence
  source 1..936: mol_type = other DNA
atgccggcaccccgtgcacctcgcgcattagccgcagccgctcctgcgtccggaaaagctaagctcacccacccaggtaaagccattctggctggaggactggcaggcggtatcgagatatgcatcacctttccgacagagtatgtcaagactcagctgcaactcgatgaacgatcacacccacctcgatataggggtattggcgactgcgtgagacaaaccgtgcggtcgcacggtgtgttgggcttgtacagaggcttgtcatctctgttgtatgggagcattcctaaggctgctgtgcggtttgggatgttcgaattcttgtctaatcatatgcgggacgcccaagggcgattggatagtacacgcggtttgttgtgcgggctgggcgctggcgtggcggaagcggtagtggtggtgtgcccaatggagacaattaaagtcaaatttattcacgaccagactagccctaatccaaagtatagaggattctttcatggcgtcagggagattgtacgcgagcaaggcctgaagggcacttatcaaggtctgacagccacggttctgaagcagggcagcaaccaggccattcgtttcttcgtcatgacctcactcagaaattggtaccgaggcgacaaccccaataagccaatgaatccacttatcacaggagtgtttggcgctatcgctggcgcagcctccgtattcggtaatacaccactcgacgttataaagacacgcatgcagggactggaggcacacaaatatcggaacacatgggactgcgggctgcagattctgaaaaaagagggattgaaggctttttacaaaggcactgtgccacgtttgggtagggtgtgtctcgatgtagctattgtgttcgttatttacgatgaggttgtcaaactcctcaataaagtgtggaaaacagattag

SEQ ID NO: 30098 - DNA, 2250 bp, synthetic construct
  misc_feature 1..2250: note = Description of Artificial Sequence: Synthetic coding sequence
  source 1..2250: mol_type = other DNA
atgtcttttattgacccttatcaacacattattgtggagcaccagtactcccacaagttcaccgtggtagtccttagagccacaaaggtcacaaaaggcgctttcggggacatgctcgacacccctgatccctacgtggagctgttcatttcaacaacgcctgattccagaaaacgaactagacatttcaacaatgacattaacccagtttggaacgaaacatttgagtttatcctggacccaaaccaggaaaatgtactagagatcacgttgatggacgccaactacgtgatggatgagacgcttggcaccgccacctttaccgtaagctcaatgaaggtgggcgagaagaaagaggttcccttcattttcaatcaggtcacagagatggtgcttgagatgtccctcgaagtatgttcgtgtcctgatcttcgattctccatggctctttgcgatcaggaaaagactttcaggcagcagcggaaggaacatatacgcgaatccatgaagaaactcttaggccctaagaacagtgaagggctgcattctgcaagggatgtgcccgtggtggccattctggggagcggtgggggtttccgtgctatggtggggttcagcggtgtcatgaaggctctgtacgaatccggcatactggactgtgccacctacgtcgcaggactgtccggctccacttggtacatgtctactctgtactcacacccagatttccctgagaaggggccagaggagatcaatgaggagctaatgaagaatgtgtctcacaatcctctgctgttgctgacaccccaaaaggttaaaagatacgtcgaaagcctgtggaaaaagaaaagtagtggccaacctgtgacgttcaccgatatctttggaatgctgattggcgaaactctgatccacaatagaatgaacaccaccctgagctctttaaaggagaaagtgaacaccgctcagtgtcccctgcccctcttcacgtgcctgcatgtgaagcccgacgtgtcagagttgatgttcgccgactgggtggaattcagcccatacgagattggaatggccaaatatggcacctttatggcaccagatttgtttggctccaagttcttcatggggactgttgtgaagaaatatgaggaaaatcctttacatttcctcatgggcgtgtggggttccgctttctcaattctcttcaaccgagtgctgggggtaagtggctctcagtcccggggaagcaccatggaggaggagctagaaaacattaccacgaagcacattgtgtccaatgattccagtgatagtgatgatgaatcacatgaaccaaaggggacggaaaatgaggacgccggttccgactatcagagcgataatcaggcttcctggatacaccgcatgatcatggcccttgtgagtgattccgcccttttcaatacccgagagggaagggcagggaaggtacataatttcatgctggggcttaatctgaatacatcataccccctatcccccctcagcgatttcgcgacacaggacagctttgacgacgacgagctcgatgccgcagtcgccgatcctgatgagttcgagcggatctacgagccactagacgtgaagtccaagaagatacatgtggttgatagcggcctcactttcaacctgccttatccactaatactgcggcctcagcgtggagtggatctgattataagctttgattttagtgctaggccttccgattcttcgccaccatttaaggagctgcttctggcggagaagtgggccaaaatgaacaagctacccttccctaagatcgacccatacgtgtttgaccgggagggcctaaaagagtgctatgtgttcaagccaaagaatccagatatggagaaagattgccctacaatcattcatttcgtgcttgctaatattaattttaggaaataccgtgcgcctggagtcccccgtgagactgaggaagaaaaggaaattgccgactttgatatcttcgatgaccctgagagccctttcagtacatttaacttccagtacccaaatcaggctttcaagagactgcatgacctcatgcattttaacacactgaataatatcgatgttatcaaggaagctatggttgaaagtattgagtatcgcaggcagaatccctctcgttgttcggtcagccttagcaacgtggaggctcgcaggttcttcaacaaagagtttctctccaaacccaaggcttag

SEQ ID NO: 30099 - DNA, 150 bp, synthetic construct
  misc_feature 1..150: note = Description of Artificial Sequence: Synthetic coding sequence
  source 1..150: mol_type = other DNA
atgagctttatcgacccctaccagcacatcattgtagagcaccaatattcccacaagttcactgtagtggtgttgagagcaaccaaagtcacgaaaggagcctttggggacatgccaaaggtgaccaaaggggcttttggggacatgtag

SEQ ID NO: 30100 - DNA, 2070 bp, synthetic construct
  misc_feature 1..2070: note = Description of Artificial Sequence: Synthetic coding sequence
  source 1..2070: mol_type = other DNA
atgtcgttcattgatccctatcagcacatcatcgtcgagcaccaatactcccataaatttaccgtcgtcgtcctgagggcgactaaggtcactaagggagccttcggcgatatgctcgacacgccagacccctacgtcgagctgtttattagcactacccccgacagccgcaaacggactcgtcatttcaacaatgacattaaccccgtttggaacgagactttcgagttcattctagaccctaaccaagagaacgtcctagagattacgctaatggacgctaactacgtgatggatgagacccttggtacagccacattcaccgtatctagtatgaaggtgggggaaaagaaggaagtgcccttcatctttaaccaggtgcccgtggtagcaatccttggctccggcggaggcttcagggcgatggtgggctttagtggtgtgatgaaggcattgtacgagagcggcatcctggattgtgcaacctacgttgcaggactgtccggctctacttggtacatgagcaccctgtactcacatcccgattttcccgagaaagggccagaggagattaatgaggagctgatgaaaaatgtttcacacaacccccttcttcttttaactccacagaaggttaagcgttatgtggagtcactttggaaaaagaagagctccggacagcccgtcactttcaccgatatttttggaatgcttattggcgagaccctaatccacaatcgcatgaacaccactctttcaagccttaaagagaaggttaatacagcacagtgcccgctgcccctgtttacctgcttgcacgtgaagcctgatgtgagtgagcttatgtttgcggactgggtggaattttcaccatatgagatagggatggccaaatacgggacatttatggccccagatctgttcggcagtaagttctttatgggtaccgttgtcaagaaatatgaagaaaaccccctccacttcctaatgggggtttgggggtccgcattttccattctgttcaatcgagtgttaggcgtgagtgggtctcagtccagaggaagcaccatggaggaggaacttgaaaacatcacgacgaagcacatcgtgagcaatgactcctctgatagtgacgacgaaagccatgaacctaaggggaccgagaatgaggacgccggttccgattaccaatctgataatcaagcctcctggattcaccgcatgattatggccctggtcagtgatagtgctctttttaatacccgagagggaagggccggaaaggtccataactttatgttgggactcaaccttaacacctcataccctctgtcacccctttctgatttcgctactcaagattcctttgacgacgatgagctcgacgccgcagtggccgaccctgacgagttcgaaagaatctacgagcccctcgacgttaagagcaagaagatccatgtcgtcgacagtgggctcactttcaacctgccttacccccttattctccgccctcagaggggcgtggacctgatcatctccttcgacttctctgccagaccgtcggattcttctcccccattcaaggagcttctattggccgaaaagtgggctaaaatgaataagttgccgttcccaaaaattgatccctatgtgtttgaccgagaggggctcaaagagtgctatgtgtttaaaccaaaaaatccagacatggaaaaggattgcccgacaataatccattttgtgctggctaacattaactttcgaaagtaccgagcccctggcgtgccccgtgaaaccgaggaggagaaagaaatcgctgacttcgacatattcgatgaccccgagagcccgtttagtacgttcaattttcagtaccccaaccaggcattcaagcggttgcatgatttgatgcatttcaatacacttaataatatagacgtcattaaagaggcaatggtggagtccatcgagtaccgaaggcaaaacccatcacgctgttccgttagcctgtccaatgtcgaagctaggagattctttaacaaggagttcctctctaagcccaaagcctag

SEQ ID NO: 30101 - DNA, 2346 bp, synthetic construct
  misc_feature 1..2346: note = Description of Artificial Sequence: Synthetic coding sequence
  source 1..2346: mol_type = other DNA
atggctgtagccgaagtgtcccggacttgcctcttgaccgtgcgggtccttcaggcccaccgtttaccgtccaaggacctagtgaccccatcagattgctacgtgaccctgtggttacccaccgcatgttcacaccgccttcaaaccagaactgtgaaaaacagctcctcccccgtttggaaccaatccttccacttccggatacacaggcaactgaagaatgtcatggagttgaaggtgttcgaccaagatctggtaacaggggacgaccccgtgctctctgtgctgtttgatgcaggtaccctgcgggctggcgagtttaggagagagtcattttctctcagtccccaaggggaggggagactcgaggtggagttcagactccagagtctcgcagataggggcgaatggctggtgagcaacggagtccttgttgccagagagctttcgtgtcttcacgttcagctggaagagaccggagatcagaagtcttccgagcatcgcgtgcagctggtggtacctggcagctgcgagggtcctcaagaggcctctgtgggaactggaactttccggttccactgcccagcttgttgggagcaagagctgagcatccgccttcaggacgctccagaggaacagctgaaggccccactgagcgctcttccgtcaggacaggtagttaggctggtcttcccaaccagtcaggaaccactcatgagggtcgaactcaagaaagaggcgggtctgagagaactggcagtccgactcggcttcggaccatgcgctgaagaacaggctttcctgtccaggcgtaagcaagttgtggctgccgcacttagacaggcattacagctggatggggacttacaagaggatgagatccccgtagtcgccattatggccacgggcggtggcattagagctatgacatcgctgtatggtcagctggcaggccttaaggaactaggcctgctcgattgcgtgtcttacatcacaggagcttcaggctccacttgggctctggctaatttgtacgaggatccagagtggagccagaaagacctggcgggtcccaccgaacttttgaaaacacaggtgaccaaaaacaagcttggcgttctggccccttcccagcttcagaggtaccgccaagaactagccgagcgtgccagattgggctatccctcgtgctttaccaatctctgggcactcattaacgaagccctactgcatgatgaacctcatgatcataaattgtctgaccagcgcgaggccctcagtcatggccaaaaccctttgcctatctactgcgcattaaacacgaaaggtcaatctttgacgacatttgagttcggggaatggtgcgagttcagcccctatgaagtcggttttccaaagtatggagccttcatcccatcagagctgttcggctccgagttctttatgggccagctcatgaagcggctcccagagtcccgtatctgtttcctcgagggcatttggagcaacttgtatgcagcgaatctccaggacagcctgtattgggcctctgagccatctcagttttgggatcgctgggtaagaaaccaggctaacctcgataaggagcaggttccgctgctaaagattgaggaaccaccttcgaccgcgggacgtatagcagagttcttcacggacttgctgacgtggcggcctcttgcacaggccacccataatttcctgaggggacttcattttcacaaagattatttccagcatcctcatttcagcacatggaaagccactacattagatggcctgcctaatcaactaaccccaagcgagccccacctctgcttgctggacgtggggtacctaatcaatactagctgcctccctctactgcaaccaaccagagacgtcgatctcatcctgagcctggattataacctacatggggcatttcagcagctgcagcttttgggcaggttttgtcaggaacagggtatcccttttccgcctatcagcccctcccctgaagaacagttgcagccaagagaatgccatacattctcagacccgacctgtccaggcgctcccgcagtgctgcacttcccgctagtttctgacagtttccgagagtattccgcccctggcgtacgccgaacccctgaggaagccgctgcaggggaagtgaatttgagttctagtgatagtccataccactataccaaagtgacctactctcaggaagacgtcgacaaactacttcatctcactcactacaatgtgtgtaacaaccaagaacaacttctggaggccttaagacaggccgtgcagaggaggaggcagcggaggcctcattag

SEQ ID NO: 30102 - DNA, 417 bp, synthetic construct
  misc_feature 1..417: note = Description of Artificial Sequence: Synthetic coding sequence
  source 1..417: mol_type = other DNA
atgaaggggcttctgcctctggcctggtttctggcctgctctgtccctgctgtccagggaggtttactggacctgaagtcgatgattgagaaggtcacgggaaagaacgccctgaccaactacggtttttacgggtgctattgcggttggggaggcagagggaccccgaaagacggcaccgactggtgctgttgggctcatgatcactgctacggtcgcttggaagaaaaggggtgcaatatacgaacccaatcttataagtaccggttcgcgtggggcgtggtgacatgcgagcccggtccattctgccacgtcaacctctgcgcatgtgacagaaagctggtatactgtctgaaacgcaacctgaggtcgtataaccctcagtaccaatatttccccaatatattatgctcctag

SEQ ID NO: 30103 - DNA, 2421 bp, synthetic construct
  misc_feature 1..2421: note = Description of Artificial Sequence: Synthetic coding sequence
  source 1..2421: mol_type = other DNA
atgcagttctttgggaggcttgtcaataccttttccggcgtaacaaacctgttttccaatccattcagggtgaaggaggttgcggtagccgactacacatcctctgatagggtgagagaagaagggcagctgattctgttccagaatacgcctaaccgtacctgggactgcgtactcgtaaacccaaggaacagccagtcagggtttcgcctgttccagctcgagctggaggctgatgctctggttaatttccatcaatacagttcccagctccttccattctacgagagttcgcctcaagtgcttcatactgaggtgctgcagcacctcactgacctcatacgcaatcacccatcttggagcgtagcccacctggccgtggagctgggaattcgagaatgttttcaccactctagaatcatatcgtgtgcaaactgcgccgaaaatgaggaggggtgcacccccctccatttggcctgtaggaaaggcgatggggaaatcctggtcgagctcgtgcagtactgccacactcagatggacgttaccgattacaaaggagagactgtctttcattacgcagtgcagggggataactcccaggtcttacaactgctgggcagaaacgccgttgctgggttaaatcaggttaataaccagggcctgactcccctccacttagcgtgtcagctgggaaaacaggagatggtgagggtgcttctgctgtgtaatgctaggtgtaatatcatgggaccgaatgggtaccctattcattctgctatgaaattcagccaaaaaggctgcgcagagatgataatcagcatggactcatctcagatccacagtaaggatccgaggtacggtgcaagccctctgcactgggcgaaaaacgcagagatggctagaatgctgctcaagcgtgggtgcaatgtcaattccacaagctccgcagggaatacggcgctgcatgtggccgtcatgcggaatcgcttcgactgcgccattgtcctactcacccatggtgcaaatgcagatgctcgaggggaacatggtaatacccctctgcacctggctatgagcaaggacaacgtagagatgatcaaagctctgattgtattcggggctgaagtcgacaccccgaacgatttcggcgagaccccaacttttcttgcctccaagatcgggaggctggtgacccgcaaggcgattctgacgcttctgaggaccgtcggagccgagtattgtttcccgcctattcacggcgtccccgcagagcagggcagcgccgctccccaccatccctttagccttgagcgggcacagcctcctccaataagcctgaacaacctggagttgcaggatctcatgcacatctctagagcccgaaagccagctttcatcctcggcagtatgcgcgacgagaaaagaacccatgatcacctgctgtgcttggacggaggtggggtgaagggcttaattatcatccagctgctcattgcaatcgagaaagcgagcggggtcgccactaaggatctcttcgactgggtggcaggcacttcaaccgggggtattttggccctggctatccttcactctaagtctatggcctacatgcgcggtatgtacttccggatgaaggacgaggtgttcagaggctctagaccatatgagagcggccctctggaagaatttctcaaaagggaatttggagagcacaccaaaatgactgacgttaggaaaccaaaagtgatgctgacgggcacgctttctgatcgtcagccagccgagttgcatctgttccggaactatgacgctcccgagaccgtacgcgagcctagattcaatcagaacgtcaatctgcggcctcctgctcaaccctctgaccagctggtgtggcgggctgccaggagttcaggcgctgccccaacctacttcagacccaatggtagatttcttgatggcggactgctggctaacaatcctactttggacgctatgaccgagatccacgaatataatcaggacttgataagaaaagggcaagccaacaaggtcaaaaaactttctatcgttgtgagcctgggcactgggcgaagcccacaggtaccagtgacttgcgttgatgtctttagacccagcaatccttgggagttagcaaaaactgtatttggtgcaaaagaactgggaaagatggtcgtggactgctgcaccgaccccgacggccgagccgttgaccgagccagggcctggtgtgaaatggtagggattcagtatttcaggctaaaccctcagctagggactgacattatgctagatgaagtcagtgatactgtcctggtgaatgctttatgggaaaccgaggtgtacatttacgaacatcgggaagagttccagaaactgatccaattgctactgtccccctag

SEQ ID NO: 30104 - DNA, 1284 bp, synthetic construct
  misc_feature 1..1284: note = Description of Artificial Sequence: Synthetic coding sequence
  source 1..1284: mol_type = other DNA
atgcagtttttcgggaggcttgtcaataccttttctggagtgaccaatctgtttagcaatccattcagggttaaggaagtagccgtcgccgactacaccagctccgatcgcgtccgcgaggagggtcagttgatccttttccaaaatactccaaaccgcacatgggattgcgtattagtcaacccaagaaacagccagagcggcttcaggtgtgccaattgcgctgagaacgaagaaggctgtacgccgctccacctcgcctgtaggaagggcgatggggagatattggtggaattggtgcagtactgccacacccaaatggatgtgacggattataaaggagaaaccgtgttccattatgcagttcagggggataactcccaggtattgcagctgttggggcgaaatgccgttgccggtctgaaccaagtgaataaccagggcttgactccccttcacttagcctgccagctcggtaagcaggaaatggtgagagttctgttactttgcaacgccagatgtaacataatgggcccaaacggctaccctatccattcagccatgaaatttagccaaaagggctgcgctgagatgataatctcgatggattctagccagatacattccaaggatcccaggtatggagcttctcctctccattgggcaaaaaatgcagaaatggcgcgaatgctcctcaaaaggggctgcaatgtaaatagcacgagctcggctggcaatacagccctccacgtggctgtcatgcgcaatagattcgattgcgccatagtgctgcttacacacggcgctaatgctgacgccaggggggagcatgggaataccccacttcacctggcaatgtccaaggataacgttgagatgatcaaagctctcatcgtgtttggcgctgaggtcgataccccaaacgactttggcgaaacccccacctttctggcaagcaaaattggacggctagtcactaggaaagccatattgacccttttacgaacggtgggtgccgagtattgcttcccgccaattcacggggtcccagccgaacaggggtcagcggcacctcaccacccctttagcctcgagcgtgctcagccaccgccaatttccttgaacaacttgggttcccacccaagccaggccggttggtgggcttggggggctgcctctgatggcaccacaggaagccatgcacacctgactggaccagaggcctcagtacaccctggactgcatgagggccgagaggccgatcgccagaacatggaatcctag

SEQ ID NO: 30105 - DNA, 2259 bp, synthetic construct
  misc_feature 1..2259: note = Description of Artificial Sequence: Synthetic coding sequence
  source 1..2259: mol_type = other DNA
atgcagtttttcggacggcttgtgaatacattcagcggcgtgacgaacttgtttagtaaccctttccgcgtcaaagaagtagctgtggctgattatacctccagcgatagggttcgtgaagaagggcagctcatcctatttcagaatacccctaaccggacctgggattgtgtgctcgtgaaccccagaaactcacagtcagggtttcgcctgtttcagctggagcttgaagctgatgccctcgtcaattttcaccaatattcttctcagctactccccttttatgagtcatctccccaggtgctgcataccgaggtactgcagcacctgaccgatctaatccggaatcatcctagctggtcagtggctcatctagccgtggaactcggaatccgggaatgtttccatcattctcgaattatatcttgtgcaaattgcgctgagaacgaggagggctgtacccctctccacctggcctgtcggaaaggtgatggggagatcttggttgaattagtgcagtactgccatacccagatggatgttaccgactacaagggcgagacagtcttccattacgccgtgcaaggcgataactctcaggtgctgcagcttctaggtcgcaacgcagtggccggactgaaccaggttaacaatcaaggccttactcccctgcatttggcatgccagttaggaaagcaggagatggtaagagtgttgctgctgtgtaacgctcgatgtaacataatgggccctaacgggtatcccatccactccgcaatgaaattttcccagaagggctgtgccgaaatgatcatctctatggactcatctcagattcactcaaaggaccccagatacggggcatcacccctccactgggcgaaaaatgcagagatggcgcgaatgcttcttaagaggggatgtaacgtcaactcgacatcctccgctgggaatactgccttacacgttgccgtgatgcgcaaccgtttcgactgtgctatcgttctgctgacacacggggctaacgccgatgcgaggggagagcatggaaatactcccttacatctggcaatgtcaaaagacaatgtggaaatgatcaaggcgctaattgtgttcggggctgaggtggacacaccaaacgatttcggggagacaccaaccttcctggccagcaaaattgggcgtcagcttcaggatttaatgcacattagccgggctaggaaacccgcatttatcctgggcagcatgagggacgaaaaaaggacacacgaccatctactctgtttggatgggggtggcgtgaaaggcttaattattatccaacttctgatcgctattgagaaagcttctggagtggccacaaaagatctcttcgactgggtcgcagggacaagtactgggggaatcctggctctagcgatactgcattccaagtccatggcatacatgagaggcatgtatttccgtatgaaagacgaagttttcagaggtagccggccatatgaatccgggcctctcgaggagtttcttaagcgcgaatttggcgagcacaccaaaatgacagacgtccgaaaaccgaaggtgatgctgaccgggacactgagcgacagacagccagccgagcttcatctatttcggaattacgatgctcccgaaacagtacgcgagccaagattcaaccagaacgtgaatctgaggcccccagctcagccaagtgatcagctggtgtggagagccgcacgctcttccggggctgcacccacttactttcgtccaaacggcaggttcttagatggcggactgcttgcaaacaaccctactctcgacgccatgactgaaatccacgagtacaaccaggacctcattcgaaaaggccaagcgaataaggttaagaagctgtctatcgtggtgtctctcggcacaggccgaagtccacaggtgcctgtgacttgtgtggacgtcttcaggccaagcaatccctgggagctggccaagactgtgtttggtgcgaaggagctgggcaagatggtggttgattgttgcacagatcccgatggcagggctgtggaccgagctagagcctggtgcgaaatggtgggcatccagtatttccgcctgaatcctcagctgggtaccgacattatgctagatgaagttagcgacacagttcttgttaacgcactatgggagacagaggtatacatatacgagcacagagaagaattccaaaagttgatccagttactgctgtccccctag

SEQ ID NO: 30106 - DNA, 1440 bp, synthetic construct
  misc_feature 1..1440: note = Description of Artificial Sequence: Synthetic coding sequence
  source 1..1440: mol_type = other DNA
atgcagttctttggccgtctggtcaacacgttctcgggggtgactaacctgtttagtaatccattcagggtgaaggaggtcgccgtggcggactatactagtagcgaccgcgtccgcgaggaagggcagcttatcctatttcagaatacgccaaaccgaacttgggattgcgtcttggtcaacccccgtaattctcagtctgggttcaggctgttccagctcgaactggaggctgacgcgttggtgaatttccatcagtacagctcccagctgcttcccttctacgaaagctcaccacaggttctgcatacagaggtgctgcaacacttaacagatttgatccgaaatcacccctcgtggagcgtggcacacctcgccgtggagttgggtattagggagtgttttcatcattcccggattatttcatgtgctaattgtgcagagaacgaagagggatgcactcccctgcatctagcctgtcgcaaaggcgacggggaaatcctggtagagctggttcagtattgtcacacacagatggatgttacagactataagggcgagaccgtgtttcattacgcagtgcagggcgataattcccaggtacttcagctcttagggagaaacgcagtggcaggcctgaaccaggtgaataatcaggggttgactcccttacacttggcctgccagttaggtaaacaggagatggtgcgagttctactgctctgcaacgccaggtgcaacatcatggggcctaatggctacccgatccactctgccatgaagttctctcagaagggttgcgcggagatgatcatctcaatggactctagccagattcatagtaaagaccctcggtacggggcttccccactgcactgggcaaagaacgccgaaatggccaggatgctcttaaagcgaggatgcaacgtgaactccaccagctctgctgggaatacagcccttcacgtggcagtgatgcgtaaccggtttgattgtgccattgtgctgctgacccacggcgctaatgcggacgccaggggcgagcatgggaacactccattgcacctggccatgtccaaggacaatgtggagatgataaaggcccttatcgtcttcggtgccgaggttgacacaccaaacgattttggcgaaacaccaacatttctggcatccaaaattggtaggctcgtcactaggaaagcaattctgactctgctcaggaccgtcggcgcagaatactgctttccgcctattcacggagtcccagccgaacagggaagtgccgcaccacaccatccgttcagcctggagcgagcccagcctccacccataagcctgaataacttagagcttcaagacctaatgcatatcagccgggcacggaaacctgcctttatcctgggaagcatgcgcgacgagaaaagaactgacagaacttag

SEQ ID NO: 30107 - DNA, 2259 bp, synthetic construct
  misc_feature 1..2259: note = Description of Artificial Sequence: Synthetic coding sequence
  source 1..2259: mol_type = other DNA
atgcagttttttggccgactcgtaaacacattctcaggagtcacgaacttgttttccaacccattccgcgtgaaggaagtggccgttgctgactacactagtagcgatagagtgcgggaagaaggtcaactcattctctttcagaacacaccaaaccgcacctgggattgcgtgttagtgaacccccgaaattcccagagcggctttcgactgtttcagttggagctcgaagccgacgccttggtgaactttcaccaatacagttcccaactgcttccgttctacgagtcatccccacaggtgcttcacaccgaagttctgcagcacctcaccgaccttatcagaaaccatccaagctggagcgttgctcatttagctgtggaactggggatccgggaatgttttcaccactcccggataatttcatgtgccaattgtgcagagaacgaggagggctgcacccccctacatcttgcttgtcgcaagggagatggagagatcctggtcgagctggtccaatattgccatacccagatggatgtgactgattataagggcgagaccgtattccactatgctgttcagggcgacaacagccaggtgctgcaacttttaggcaggaacgccgtggccggactcaatcaggtgaacaatcaagggctaacgcctctgcacctcgcttgccagctgggtaagcaggagatggtccgagtactgttattgtgtaatgcccgatgcaacataatgggccctaacgggtatcccatccactctgcaatgaaattttcccagaaaggatgtgccgagatgataatcagcatggacagcagtcagatccattcaaaagacccgcgttatggcgcaagccctctacactgggctaaaaatgctgaaatggcacgcatgctgctcaaacggggatgcaatgtgaatagtactagctcagccggaaataccgcgctgcacgtagccgtgatgcgtaacaggtttgactgcgcaattgttcttctgacccatggcgctaatgccgacgctcgtggggaacacggcaataccccactgcacctcgctatgtcgaaggataatgttgaaatgatcaaggccttgatagtgtttggcgctgaagtggacactccaaacgatttcggcgaaacaccaaccttcctcgcatcgaaaattggacggcagctccaagacctgatgcacatcagtagggcaagaaagcctgcattcatcctgggttcaatgcgcgatgaaaagagaacacacgaccatctgctgtgcctggatggaggcggagtgaagggtttaatcattatccagttgcttattgccatcgagaaagcatctggggttgccaccaaagacttattcgactgggtggccggaaccagtactggtgggatcttagctcttgcaattctgcatagcaagtcaatggcctatatgcgtggtatgtacttcaggatgaaggacgaggtttttaggggctctcggccttatgagtctggtccgctggaggagtttcttaagagggagtttggcgagcataccaagatgactgacgtgcgaaagcccaaagtgatgcttactggaactctgagcgacagacaacccgctgaacttcacctgttccggaactacgatgctcctgaaacagttcgggagccacgatttaaccagaacgttaacctgaggccacctgcccagccttcggaccaactcgtatggcgcgcagcacggagctccggagccgctcccacctacttcagaccgaatgggagattcctagatggagggctcctggccaacaacccaacgctggatgccatgactgaaatccatgaatacaaccaggacttaatccgaaagggccaggccaacaaagtgaaaaaactgtcaatcgtcgtgtccctgggcacagggagaagtccccaggtgccagtgacctgcgtggatgtcttccgtccatcaaacccctgggagttagcgaagactgtttttggagccaaagagctaggtaaaatggtggtggactgctgtaccgatcccgatggaagagctgttgatcgggctcgggcttggtgcgagatggtcgggatccagtactttcgcctgaaccctcagctgggcacggatatcatgctagacgaggtgtccgataccgtgttagtgaatgcattatgggagactgaggtgtacatctacgagcatcgggaagagttccagaagttgatccagctcctgctcagcccctag

SEQ ID NO: 30108 - DNA, 2004 bp, synthetic construct
  misc_feature 1..2004: note = Description of Artificial Sequence: Synthetic coding sequence
  source 1..2004: mol_type = other DNA
atgcagtttttcgggcgactagtaaacacatttagtggcgtcacgaatttattttctaatccattcagagtaaaggaagtggccgtggccgattacacaagtagtgacagagtaagggaggaagggcaactaattttatttcagaacactccaaatcgcacctgggattgtgttctggttaatccaagaaacagccagtccggtttcaggctcttccaattggagttggaggcagatgctttggttaacttccaccagtatagctcacagctgggcaagcaggagatggttcgtgtccttcttttatgtaacgcgcgatgcaacattatgggaccaaacggttacccgattcattcagctatgaaattctcacagaaaggctgtgccgagatgataatttccatggacagcagccaaatacactccaaggaccccaggtatggcgcttccccactgcattgggctaaaaatgcagaaatggcgcgaatgttgcttaaacgcggatgcaatgtaaattccaccagcagcgcaggcaacaccgccctccacgtggctgtgatgcggaaccggtttgattgcgccattgtattgctcacgcacggagccaacgccgacgcccgaggtgaacacggcaacactcctctgcacctcgccatgtcgaaggacaatgtcgagatgattaaagctctgatagtatttggcgcagaagtcgacaccccaaatgacttcggagagacaccaacattcctggccagcaagataggcagacttgtgacccggaaagccattctcaccctcctgaggactgttggcgcagagtattgctttccgcctatccatggggtcccagccgagcagggttccgctgctcctcaccatccctttagcctagaacgcgctcaaccccctccaatctccctgaacaaccttgagctgcaggacttgatgcatatcagccgagcccgaaagcctgcttttatactgggatccatgagggacgagaagcggacacacgatcacttgctctgcctggacggcggaggcgtaaaagggctgatcatcattcagctgttgatcgccattgaaaaggcgtcaggggtggccacaaaggacctttttgattgggttgccggaacctccacaggtggcattcttgctctggctattcttcacagtaagtctatggcctacatgcgcggtatgtattttcggatgaaggatgaagttttccgcggatcgcgcccatacgagtcaggtcccttggaagagttcctcaagagagagtttggcgagcacactaaaatgactgacgttagaaagcctaaagtcatgctaacagggaccctgtctgacaggcagccggctgagctgcacttgtttcggaactatgacgcacctgaaacagtgagggaaccaaggttcaatcagaacgtgaatctgaggccacccgcacagcccagtgaccagctagtttggcgcgctgccagatcatcaggcgcagcacctacgtacttccgcccaaacgggagatttctggacggtggcctgttggccaataaccctactttggacgccatgaccgagatccacgagtacaaccaggatctgattcggaaagggcaagcgaataaagtgaagaagcttagtatagtagtaagtctggggaccggtcggagccctcaggttccggtcacatgcgtggacgtcttccggcctagcaatccctgggaacttgccaagaccgtgttcggtgcaaaggaactcggcaaaatggtggtggattgctgcacggacccggacggcagggccgttgatagggccagagcctggtgtgaaatggtggggattcaatactttcgactgaatccccagctcggtaccgacatcatgctggatgaagtgagcgacactgtgctggtcaatgctttgtgggagacggaagtctatatttatgagcaccgagaagaatttcagaagctgatccaactactgctttccccttag

SEQ ID NO: 30109 - DNA, 501 bp, synthetic construct
  misc_feature 1..501: note = Description of Artificial Sequence: Synthetic coding sequence
  source 1..501: mol_type = other DNA
atgcaattcttcggaaggctggttaacacattttcaggcgtgacaaatcttttttcaaacccattccgggtgaaagaagttgccgtggccgactacacatcttctgacagagttagagaggaagggcagctgatcctatttcagaacacacccaaccggacatgggattgtgtgctagttaatcctaggaatagccagagcggtttcagatgtgccaactgcgccgagaacgaggaaggctgtacaccgttacacctcgcctgcagaaagggcgacggagagattctggtggaattagtccagtattgtcacacccagatggatgtgactgactacaaaggagaaacagtgttccactatgccgtgcagggcgacaactcccaagtactccaactgctgggtcgtaacgcagttgccggactgaaccaggttaacaaccagggactgactccactccacctggcatgccaactgggcaaacaggaaatggtcagggtatag

SEQ ID NO: 30110 - DNA, 1299 bp, synthetic construct
  misc_feature 1..1299: note = Description of Artificial Sequence: Synthetic coding sequence
  source 1..1299: mol_type = other DNA
atgcagttctttggtcggctcgtgaacacattcagtggcgttaccaatctgttttctaatccattcagagttaaggaggtggcggtcgctgactatacaagctctgacagggtgcgcgaggagggtcaactcattctgtttcagaatacccctaatcggacctgggactgcgtgttggttaacccacgaaatagccaaagcggcttccggttatttcaactcgagctcgaggccgatgccctggtgaactttcatcagtactcatcacagctacttcctttttacgagagctctcctcaggtgctgcataccgaggtgttgcagcatctaacggaccttataagaaaccacccaagctggtcagtggctcaccttgccgtcgagctgggcatcagagagtgcttccaccattcccgcattatccgcgtgcgctccgctcatcaggttccaggcctgtgggagctgatttcgacccaccacgagatcgagttctcccagccacctcaggccgtacccatcgccaggagaactcgcagggccgctcacccctgcacatggcctgccgcaagagtgatgggccgttcttggtggtcgtggtgctccacagctacgttgcgttggatgtctccaaccacccgggaacggccaagctccattatgcttagccgagtgacgattcttcggtgctgtagatgcgcagaaatgatcatttctatggatagctcccagattcacagcaaagatccacgctacggagcctctccactgcattgggccaagaacgctgagatggcacgcatgctgctaaagaggggctgtaacgtgaatagcaccagttcagccggaaataccgcactacacgtggctgttatgcgcaatagatttgactgtgcgatcgtgctcctgacacacggagctaacgcggatgctaggggcgagcacgggaatacaccgctgcacctggccatgtccaaagataacgtagaaatgattaaggccctgatcgttttcggggctgaagtggataccccgaatgactttggggaaactcccactttcctcgcgtccaagataggacgcctggtaacaagaaaggcaatacttaccctgctcagaacagtgggcgctgagtattgctttccacctatccatggcgtccccgctgaacaagggtccgcagcaccccatcatcctttcagtctcgagagagcgcagccccctccaatcagcctgaacaatctggggtctcacccttcccaagctggctggtgggcgtggggggctgcgagtgatgggtag

SEQ ID NO: 30111 - DNA, 243 bp, synthetic construct
  misc_feature 1..243: note = Description of Artificial Sequence: Synthetic coding sequence
  source 1..243: mol_type = other DNA
atgcagttctttgggaggttggtcaacacctttagtggcgtgacaaacctttttagcaaccctttccgcgtaaaggaagtggcagttgccgactacacctctagcgatagggtgcgagaggagggtcagctcatattgttccagaatactccgaatagaacctgggactgcgtcctggtgaaccctcgcaacagccagtcaggtttcagattattccagttagagctcgaggcagacgcttag

SEQ ID NO: 30112 - DNA, 498 bp, synthetic construct
  misc_feature 1..498: note = Description of Artificial Sequence: Synthetic coding sequence
  source 1..498: mol_type = other DNA
atggggccactgccggtgtgtcttcccataatgctccttctcctgctcccaagtttgctcctattgctattgctccccggacctgggtccggcgaagcctcgagaatccttagagtccaccgcagagggatccttgagctggcaggtaccgtggggtgtgtgggacccaggacacccattgcctatatgaagtacggttgcttctgtggactgggaggccacggacagcctagggatgcgattgattggtgctgccatggccacgattgttgttacacacgggctgaagaagctggctgtagtcccaaaacagagagatactcctggcagtgtgtgaaccaatcagtcttatgcggacccgctgagaacaagtgccaggagctgctgtgcaaatgcgatcaggagatcgcgaactgcttagcccagacagagtataatctgaaatacctgttttacccccagttcctttgcgagcccgatagcccaaagtgtgactag

SEQ ID NO: 30113 - DNA, 498 bp, synthetic construct
  misc_feature 1..498: note = Description of Artificial Sequence: Synthetic coding sequence
  source 1..498: mol_type = other DNA
atgggacccttgcctgtgtgcttaccaattatgttgttactgcttctgccatcactgctcctcttgctcctgctgccaggtccaggcagtggtgaagccagtaggatcctgagagtccaccgccgaggcatcctggagctggcagggacagtgggatgtgtgggaccaagaacccccattgcctatatgaagtacggctgcttctgcggactgggtggccacggtcaacctagggacgccatcgattggtgttgccacggccatgactgctgctacactagggcagaggaggcaggctgttcccctaaaaccgagagatatagctggcagtgcgtgaatcagtctgtcttgtgtggtcccgctgagaataaatgccaggaactgctatgcaagtgcgatcaggaaatagcaaactgcctggctcagacggagtataacctgaagtacctgttctacccgcagtttctgtgcgagccagatagccccaaatgcgactag

SEQ ID NO: 30114 - DNA, 570 bp, synthetic construct
  misc_feature 1..570: note = Description of Artificial Sequence: Synthetic coding sequence
  source 1..570: mol_type = other DNA
atggcactgctgtccagacctgccttgacgcttctgctgcttctaatggctgcggttgtgaggtgtcaggaacaggctcagactactgactggcgggcaacactgaagaccattcggaacggagtgcacaagatcgatacatatctgaatgcggcactcgatctcctgggaggagaggacggactgtgccaatacaagtgcagcgatgggtcaaaaccatttccaaggtatggctataagccaagtcccccaaatggctgcggcagcccactgtttggggtgcacctgaatattggaatcccgagtctgactaagtgttgcaaccagcatgacaggtgttatgagacatgtggaaagagcaagaatgattgcgacgaggaattccaatattgtctctccaagatctgccgggacgtgcagaagacattgggactgacccagcatgttcaggcgtgtgagacaaccgtagagctcctgtttgactctgtgatccatttaggctgtaaaccttacctcgatagccaaagagccgcatgtcggtgccattacgaggaaaaaaccgatctatag

SEQ ID NO: 30115 - DNA, 213 bp, synthetic construct
  misc_feature 1..213: note = Description of Artificial Sequence: Synthetic coding sequence
  source 1..213: mol_type = other DNA
atggctctgctctcccggcctgccctcaccttgctgttgcttttaatggccgcagtggtccgctgtcaggagcaggcgcagactacagattggcgcgctacactgaagacaatccggaacggcgtgcataagatcgatacttacctgaacgcggcacttgacctgctgggaggggaggatggactctgccagtacaaatgctctgatgcttag

SEQ ID NO: 30116 - DNA, 588 bp, synthetic construct
  misc_feature 1..588: note = Description of Artificial Sequence: Synthetic coding sequence
  source 1..588: mol_type = other DNA
atgaagcttgccagcggtttcctagtgctgtggctgtccctgggcggtggattggcccaaagcgatacttctccagatacagaggagagttactccgattggggcttgaggcatcttcggggatcattcgaaagtgtgaactcctatttcgacagcttcctagagctgctgggcggaaaaaacggagtgtgccagtacagatgccggtacggcaaagcgcctatgcctcgccctggctacaagccacaggaaccaaatggctgcgggtcctattttctgggcctgaaggtgcctgagtccatggaccttggtatcccagctatgacaaaatgctgcaatcagctggatgtgtgctatgacacgtgtggagccaacaagtaccggtgtgatgccaaattccgctggtgtctccactccatctgctctgatctcaaaagatctcttggatttgtttcgaaagtagaggccgcatgtgactcgctcgtggatacagtgttcaatactgtctggactctgggttgcaggcccttcatgaacagccagagagctgcttgtatttgtgccgaggaagagaaggaggagctgtag

SEQ ID NO: 30117 - DNA, 3876 bp, synthetic construct
  misc_feature 1..3876: note = Description of Artificial Sequence: Synthetic coding sequence
  source 1..3876: mol_type = other DNA
atggctggcgctgctagcccttgcgctaacggatgcggaccaggcgcacctagtgatgcagaggtactgcatctgtgtagatctctggaagtgggtacagtgatgaccctcttctacagcaagaagagccagcgccctgaacggaagaccttccaggtgaaattggaaacaaggcagattacttggtccagaggagctgacaaaattgaaggcgctatcgatataagggagatcaaggaaattcgtcctggcaagacatctcgcgactttgaccgctaccaggaggacccagcattccgcccagaccagagccactgttttgtgattctctacggtatggaatttaggctgaaaactttaagtctccaggcaacttctgaggatgaggttaacatgtggataaagggactaacctggctgatggaggacacattgcaagcccctacgcctctccaaatcgagcgctggctacgaaagcaattctattcagttgatcgcaacagagaggatagaatttcggccaaggacttgaaaaacatgcttagccaggtcaattaccgagtcccaaacatgcgatttcttcgagaaaggctgacagacctagaacagcgaagtggcgacataacctacggccaatttgcgcagttgtatagaagcctgatgtacagcgcacagaaaaccatggacctcccgttcctggaggccagcaccctgcgcgctggagaacgccctgaactctgccgcgttagcctgccagagtttcagcagtttctactagattatcagggcgagttatgggccgttgatagacttcaggttcaggagttcatgttgagtttcttgcgagaccctctgagggagattgaagaaccctatttcttcctcgacgagttcgttaccttcctgttttctaaagaaaacagtgtgtggaattcccaattggatgctgtttgtcctgatacaatgaataacccgctgagccactattggatctcttcgagccataatacttacctgaccggagaccaattcagttcagaatcttcccttgaggcgtatgcaagatgtctcaggatgggatgtcgctgcatcgagctggactgttgggacggacccgacggcatgcctgttatctaccatgggcacacgttgactacaaagattaaatttagcgatgtgcttcacaccatcaaagagcatgctttcgtggcttcggaatatccagtgattctgagcatcgaggaccactgtagcatcgcccaacagcggaacatggcacagtactttaagaaagtgctaggtgacacactgctcaccaagcccgtggagatctccgcagacggattgccatcacctaaccagctgaaacgcaagattcttattaagcataaaaagctcgcagagggtagcgcatatgaggaggtgccgacctccatgatgtattccgaaaacgatatctctaattcaatcaaaaatgggatactgtacctggaggatcccgtcaatcacgagtggtacccacactattttgtcctgactagctcgaagatttattatagtgaagaaacgagctcagaccaggggaacgaagacgaagaggagcccaaggaagtctctagtagtaccgaattgcacagtaacgagaaatggttccacggaaaactcggggcaggtcgggatggacgacatatcgcggagcggctgctgaccgaatactgcatcgaaacaggagcacctgatggttctttcttagttagagagtctgaaacattcgtaggagactatacactcagtttttggaggaatggtaaagttcagcactgcaggatccattctcgacaggatgctggaacaccgaaatttttcctcacagacaatctcgtgttcgactccctttacgatcttatcacgcattaccagcaggtaccactgcggtgcaacgaatttgagatgaggttgtcagaacctgtcccccaaaccaacgctcacgagagcaaagagtggtaccatgcttcgctgacgagagcacaggcagagcacatgcttatgcgcgtgccacgtgatggggcattcctggtacggaaacgtaacgagcccaactcctacgccatcagcttcagagcggagggaaaaattaagcactgtagggtgcagcaggaagggcagacagtcatgctggggaactccgagtttgacagtctagtcgatttgatcagttactatgaaaaacatcctctgtacaggaaaatgaaactgcgctatccaatcaatgaagaagccctggagaagatcggaacggccgagcctgattacggtgccctgtacgaaggacgaaacccaggcttttacgtcgaggctaatcctatgcctaccttcaaatgcgcagtcaaggcgctattcgattataaggctcagagagaggatgaacttacatttataaagtctgcaataattcagaatgtggaaaagcaggaaggcggatggtggcgaggtgactacggtgggaagaaacagttatggttcccaagtaattatgtggaggaaatggtaaatcccgtcgcattagagccggagagggagcatttggatgagaactctccactcggggacctcctgcgaggcgtactcgatgtgcccgcttgccagatcgccattcgtccagagggcaaaaacaaccgactgttcgtgttctcaattagtatggcttcagtagcccactggtccttggacgtggccgctgacagccaagaggaattacaggactgggtgaagaagattagggaggtcgctcagaccgcagacgccagattaacagagggaaaaattatggagaggaggaaaaagatcgctctggagctgtccgagctggtggtgtattgcagacctgttccattcgatgaagaaaaaattgggacggagagggcctgttaccgggacatgagtagttttccggaaacaaaggcagaaaagtacgtgaacaaggctaaagggaagaagtttttacaatataaccgactgcagctctccagaatttaccccaagggacagcgcctcgactcatccaattacgaccctctccccatgtggatctgcggtagccagttagtcgctctcaattttcagactccagacaaacctatgcagatgaaccaagctctattcatgacaggacgccattgtggctacgtgctccagccttctacaatgcgtgacgaggcctttgatccattcgacaaatcaagtttacgcggacttgaaccctgcgccatttcgatcgaggtacttggcgctcgtcaccttcctaaaaacggcagggggattgtgtgtccctttgtggagattgaagtggcaggggcagaatacgactctacgaaacagaaaactgaatttgtggtggataacggactcaacccagtctggccagcgaagccgttccactttcaaatcagtaatcctgaattcgcctttttgcgctttgtcgtgtatgaggaagatatgttctctgaccagaactttctggctcaagccaccttccctgttaaagggctgaagaccggctatagagccgtccctctcaagaataattactccgaagacttggagcttgcgtccctgttgataaaaatcgacatcttccccgcaaaacaagagaacggcgatctgtctccattcagtgggactagtctgagggagcggggttccgacgctagcggacaactatttcacggcagagccagggagggttcttttgagtcgaggtaccagcagccatttgaagacttccggattagccaggaacacttggccgaccatttcgactcacgagagcgcagagcccctcgtagaacacgtgtaaacggtgacaaccggctgtag

SEQ ID NO: 30118 - DNA, 3873 bp, synthetic construct
  misc_feature 1..3873: note = Description of Artificial Sequence: Synthetic coding sequence
  source 1..3873: mol_type = other DNA
atggccggagccgcttcaccctgcgccaacggctgtggacctggcgctccttccgatgccgaggttcttcacctttgccggagtcttgaagtcggaactgtcatgacactattttactccaaaaaatcacaacggccagaaaggaagacttttcaagtgaaattggagactagacagatcacatggtctcgcggtgcggacaagatcgagggagccattgatatcagggagatcaaagaaattcgaccgggaaagacctcacgcgactttgatcgttatcaggaggacccagccttcagacccgatcaatctcattgctttgtgatcctctacggcatggaatttcgcttaaaaacactgagcctccaggccacctcggaagacgaggtgaacatgtggattaaaggtttgacctggctcatggaggacactttgcaggcgcctacaccactgcagatagaaagatggctccgtaagcagttttacagtgtcgataggaaccgcgaagataggatttccgctaaggacttaaagaatatgctctcccaggtcaactatcgagtcccaaacatgcgctttcttagagaacggttaacagacttggagcagagatcgggagatatcacatatggtcaattcgcccaactgtacagatcattaatgtattcggctcagaagaccatggatctgcccttcctggaggcatcaacgctgcgagctggcgagcgccctgaactgtgtcgggtaagtttacccgaattccaacaattcttgttggattaccagggggaactttgggccgttgacaggttgcaggtccaggaatttatgctttcctttctgcgggatccgctcagggagattgaggagccctatttcttcttggacgagttcgtcaccttcttgttttcgaaggaaaacagcgtgtggaactcacaattggatgctgtctgcccagacacaatgaataaccctctgtctcattattggatttcctcatcccacaacacatacctgacgggagaccaatttagcagcgaatcctcccttgaggcctacgcacggtgcttgcgcatggggtgccggtgcattgaactcgattgttgggatgggcctgatgggatgccagtgatttaccatgggcacaccctgacgactaaaatcaagttcagtgacgtgttgcacacgatcaaagaacatgccttcgttgctagcgagtaccccgtgatcctgtccattgaagatcattgttcgatcgcccagcagagaaacatggcccagtacttcaagaaggtgctaggtgatacactgctgaccaaacctgtagaaatctctgcagatggcctgcccagcccgaaccagctaaagcgaaaaattcttatcaagcataaaaagctcgcagaaggcagcgcttatgaagaggtgcccacgtcaatgatgtatagcgagaacgacattagcaattcaattaagaacggcattctctacctcgaggacccggttaatcatgaatggtatcctcattacttcgttttgacgtccagcaaaatttattactctgaagagacaagttccgatcaaggcaatgaggacgaagaagagcctaaggaagtatccagcagcaccgaacttcactccaacgaaaagtggttccacgggaagttgggagctggcagggacggccgacatatcgctgagcgacttttgacagagtattgtatcgaaacaggagcacctgacggctcatttctagtaagagaatcagaaaccttcgtgggagattataccttgagcttctggcggaacgggaaggtgcagcactgccgcatacactctcgccaagatgctggcaccccaaaattttttttgaccgataatttggtgtttgattccctctacgatttgattacccattatcagcaggtccccctgcggtgtaacgaattcgagatgcgattgagtgagcctgtgccccagaccaacgcacatgaatcaaaggaatggtatcacgcctcactcacgagggctcaggcagagcacatgctgatgagagtcccaagagatggggcatttctcgtgagaaaaaggaacgagcccaattcatatgccatttccttcagggctgaaggaaagatcaagcattgtagagtgcagcaagaaggccagactgtgatgcttggaaactctgaatttgacagtcttgttgatcttatatcatactacgaaaaacaccctttatacaggaagatgaagcttagatatcccattaatgaggaggccctggagaagattggaaccgccgaaccagactacggggctttgtacgaaggcagaaatcccggtttttatgttgaggccaaccctatgcccacctttaaatgtgctgtcaaagccctcttcgactacaaggcccaaagggaagatgagctaacattcatcaaatctgcaatcatccagaatgtggaaaaacaagaggggggatggtggcgtggcgattacggtgggaaaaagcagctgtggtttccttcgaactatgtagaggagatggtgaacccagtggcacttgagccagagcgcgaacacttagatgagaatagccccctaggagacctgctccgcggagtgctggacgtacctgcgtgccaaatcgcgattcggccagagggcaaaaacaacaggttgtttgttttcagtattagcatggcatccgtcgctcactggtctctggacgtcgccgctgatagccaagaggagctccaggactgggtgaagaaaatccgcgaagtagcacaaacggcggacgccagactgactgaaggtaaaatcatggagcggagaaaaaaaatcgccttagagttgtctgaactggtggtgtattgtcgcccagtgccttttgacgaggaaaagatcggtaccgaacgggcatgttaccgggacatgtcttcctttccggagaccaaagcagagaagtatgtcaataaagccaaagggaagaaattcctccaatacaatcgcttgcagctctcccggatctaccctaagggccagcggttggacagttctaactacgaccctctgcctatgtggatttgcggttcacagctggtggctttgaacttccagacaccggataaacctatgcaaatgaaccaagcactcttcatgaccgggaggcattgcgggtatgttttgcagccctccactatgagggatgaggcgtttgatccatttgacaaatcttcacttcggggacttgagccatgcgcgatcagcattgaagtcttgggtgcccgacacctacctaagaatggcagaggtatcgtgtgtccctttgtcgaaattgaggtggctggagccgagtatgacagtacaaagcagaaaaccgagttcgtcgtggataacggactcaatccagtctggccagctaaacccttccattttcaaatatcgaatcctgagttcgcgtttctgcggtttgtggtatatgaagaggacatgttcagtgaccagaatttcttagctcaagcaaccttccccgtaaaggggttaaaaaccggctatcgggctgtacccctgaagaacaattattccgaggacctggaactcgcctcactgctgatcaagatcgatatctttcctgccaaggagaatggtgatctctcccccttctctggcaccagcctgagagaacggggttcagatgcttctgggcagctgttccatggtcgggcaagggaggggtcttttgaaagtcgataccagcagccattcgaagacttcagaatctcccaggagcatctcgccgatcacttcgatagccgggaaagacgggctcctcgcagaacaagggttaatggggataataggctgtag

SEQ ID NO: 30119 - DNA, 3876 bp, synthetic construct
  misc_feature 1..3876: note = Description of Artificial Sequence: Synthetic coding sequence
  source 1..3876: mol_type = other DNA
atggccggagccgcttcaccatgcgccaatggatgcgggccaggggctccttccgatgcggaggtcttgcacctttgcaggagtctggaggtgggaacagtgatgactctgttctatagcaagaagagccaacggcctgagcggaaaacattccaagtgaaactcgagacccggcagataacatggagtcgcggagcagataagattgaaggcgctattgacatccgggagattaaggagatcaggcccggtaagacaagtcgggattttgatcgatatcaggaagaccctgcattcagacctgaccaaagccactgttttgtaatcctctatgggatggaattccggctgaagactctgagcctgcaggccacgagcgaagacgaagtaaatatgtggattaaaggactcacctggctcatggaagatacactccaggccccaaccccccttcagatcgagaggtggctgcgaaagcagttctattctgtcgatcgcaaccgcgaagaccgaatcagcgctaaagacttgaaaaacatgttaagtcaggtgaattatcgcgttccaaatatgaggttcctcagagagagactcaccgacttggagcagaggtctggcgatattacgtatggccagtttgcacagctgtaccgcagcctcatgtatagtgcacaaaaaaccatggacctgccatttcttgaagcatcaaccctcagggccggtgaacgaccagagctctgtcgcgtatctctgcctgaatttcagcagttcttactcgactaccagggggaactgtgggctgttgaccgactacaagtccaggaatttatgctcagtttcctgcgagatccccttagagaaatagaggagccctatttctttttggacgagttcgttactttcttgttttctaaagagaacagcgtgtggaactctcagctcgacgcagtttgtcccgataccatgaacaatcctttgtctcattattggattagctccagccataacacctatctgacaggtgatcagttcagcagtgaatcttcattagaagcttacgccaggtgcctccggatgggctgtcgctgcatcgagctcgactgttgggatggcccagatggaatgccagtgatttaccatgggcatacactgactaccaaaatcaaattcagcgatgtgcttcacacaattaaggagcacgcttttgtggcctctgagtatcctgtgatcctgtctatcgaggatcactgctctatagctcaacaaaggaatatggctcagtactttaaaaaagtactcggtgatactctgctcaccaagcccgtcgagataagtgccgatggccttccttctcctaaccagctgaagaggaagatcctgattaaacataaaaaactagccgaaggtagcgcttacgaggaggtaccaaccagcatgatgtatagcgagaacgatatctctaactcgatcaaaaatggtatcctctatctcgaggatccggtcaaccatgagtggtatccccactatttcgtcttgacttcttccaaaatttattactccgaagagaccagctccgatcagggcaacgaggacgaagaagaaccaaaggaagtttcctcttcaactgaactgcactccaatgaaaaatggttccatggcaagctgggggctggcagggacggcaggcacatcgcggagcgcctattgacggaatattgtattgaaactggggctccagatggatcttttcttgttcgagagagtgaaaccttcgtcggagattatacactcagcttctggcgcaatggcaaggtgcagcactgtaggatccattcaagacaggacgctggaacaccgaaattctttttgactgacaacttggtgttcgacagtctctacgatctgataacacactatcaacaggtacccttgcgctgtaacgagtttgagatgagactctcagagccagtgccccagactaatgcacatgaatctaaagagtggtatcatgcttccctcacgagggcccaggctgagcacatgctgatgagggtgccacgcgacggagccttcctggtccgcaaaagaaatgagcccaattcttacgccattagcttcagggccgagggtaaaatcaagcattgccgcgtgcagcaggaagggcagactgtgatgctaggcaattccgaatttgactctttggtggacctgatctcttactatgagaaacaccctctctatcgcaaaatgaagcttcgataccccatcaacgaggaagcgctggagaaaatcggtaccgctgagcccgattatggcgctctgtatgaaggtagaaaccctggattctatgtggaggccaaccccatgccaacttttaaatgtgcggtgaaagccctctttgattacaaagctcagagggaggatgaattgacatttataaaaagcgctattatccagaacgtagagaagcaggaaggcggttggtggcgcggagattatgggggaaagaagcaactctggtttccaagtaactacgttgaggaaatggttaatccagtggccctcgagcccgagcgggaacacctcgacgagaacagcccgctgggggacctccttcgcggagtgctggacgtccccgcttgtcagatcgcaatacgtcccgagggcaagaacaatcgcttgttcgtcttcagcatctcgatggcaagtgtcgcacactggagtcttgacgtggccgcagattcacaagaggaactgcaggattgggtgaaaaaaatacgtgaggtggctcagaccgctgatgcacgcctgaccgagggcaaaatcatggagcggcgaaaaaagattgcgttggagctatccgaactggtggtgtactgccgaccagtcccgttcgacgaggaaaaaattggaaccgaacgtgcttgctatagggatatgtcttccttcccagaaactaaggccgaaaaatacgtcaataaagctaaaggaaaaaaatttctccaatacaaccgcctgcagctttcgcgaatttacccaaagggccagcgccttgacagttcaaactacgatccattgccgatgtggatttgcgggtctcagttagtagcactaaactttcaaaccccagacaaaccgatgcagatgaatcaggcactgtttatgactggaaggcactgcggatatgtcctgcaaccatcgacaatgcgagatgaagccttcgatccatttgacaagtcgtctctaagaggcctggaaccttgtgctattagcatcgaggtcctgggggctcggcacctacctaagaacggccgaggtattgtttgccccttcgtggaaattgaagtcgccggagccgaatatgactctaccaagcagaagactgagttcgtcgtagacaatgggctaaaccctgtgtggccagctaagcctttccacttccagattagcaatccagaatttgcctttctacgcttcgtagtatacgaggaagacatgttcagcgatcaaaacttcctagcccaagctacatttccagtcaaggggttgaagacgggctaccgcgcagttcctctcaaaaataactactccgaagatctcgagctggcctccctcctaattaagatcgatatctttcctgctaagcaggaaaatggcgatttaagcccattctcgggcacatcactgcgcgagcgcggatccgacgcaagcgggcagttgttccacgggagagcccgagaaggaagcttcgaatcaagatatcagcagcctttcgaggactttcgaataagccaggagcacctggccgatcacttcgactcccgggagcggagagccccacgcaggactcgggtcaatggggacaatcgactatag

SEQ ID NO: 30120 - DNA, 3798 bp, synthetic construct
  misc_feature 1..3798: note = Description of Artificial Sequence: Synthetic coding sequence
  source 1..3798: mol_type = other DNA
atgtccactaccgttaatgtcgatagcctcgccgaatacgagaagtcacagattaaacgagcgctcgaactgggaacggtcatgactgtgttcagctttcgcaaatccacaccagaacgtaggacagtccaggtgattatggaaacgaggcaagtggcatggagcaagaccgcagataagattgagggttttctcgacatcatggaaataaaggaaattagaccaggaaagaacagcaaagatttcgaacgcgcaaaagctgtaaggcaaaaggaggactgctgttttacaatactgtacggaacacagtttgtgctgagtactctcagcctcgccgcagattcaaaagaggacgcggtgaactggctgagcggcctgaaaatccttcatcaggaggccatgaatgcctctaccccaaccattatagaaagttggcttcgcaaacaaatctatagcgttgatcagacgcgacgtaattcaatctctctgcgcgaacttaaaacaattctgcccctgattaatttcaaggtttcaagcgccaagttcctgaaagataagtttgttgagattggagcacacaaggatgaactgtcattcgagcagtttcatctcttttacaaaaaattgatgtttgagcagcaaaagtccattcttgatgaatttaaaaaggacagctccgtatttatattgggtaatacggaccggcctgacgcaagcgctgtgtatctgcacgatttccaaagatttctgatccacgagcagcaagagcactgggcccaggatttgaataaggtcagagaaagaatgacaaagttcattgacgataccatgcgggaaaccgccgaacccttcctctttgtagatgaattcctgacttacctgttcagcagggagaactccatatgggatgagaaatatgatgcggtcgacatgcaggacatgaacaatcctctgagccactattggatcagttcttcccataatacctacttaaccggagatcagcttcgctctgagtcatcaccagaggcctacatcagatgcctccggatggggtgtcggtgtatcgagctcgactgttgggatggccctgacggcaagccagtcatctaccatggttggactagaacgactaaaatcaaatttgatgacgtggtgcaggccatcaaggaccatgcatttgtcacatcaagcttcccagtcattctgtcaatagaagaacattgtagcgtcgagcaacaacgccacatggctaaggcctttaaggaggttttcggtgatttattgctgactaaaccgacggaggcctctgctgaccagctcccatcaccgagccagctgcgggagaagattatcatcaagcacaaaaaactcggacctagaggcgatgtcgatgtgaacatggaggacaaaaaagatgagcacaaacagcagggagaactgtacatgtgggactcaatcgatcagaagtggactcgccactattgtgccattgccgacgcaaagctgtcgttctccgacgacatcgaacagacaatggaggaggaagtcccacaggacataccacccacagagctgcacttcggggaaaaatggttccacaagaaggttgaaaagcgaactagcgctgaaaaacttctgcaggaatactgtatggaaacaggcggaaaggacggaacattcctcgtgagagagagcgagacgtttccgaatgactacacactgtccttttggcgttcagggagagtccagcattgcaggatacggtccaccatggaaggcggaacactcaagtattatttgaccgacaatctgacctttagttcgatctacgccctcattcagcattaccgagaaacccacttgcggtgtgcagaatttgagcttcggttgacagacccggtcccaaacccaaatcctcatgaatctaagccctggtattatgattctctgtcccgcggagaggccgaagacatgctgatgcgcatccccagagacggggctttcttgatcaggaaacgtgaggggagcgactcatacgccatcacctttcgcgctagaggaaaggtgaagcactgtcggatcaatagagacggcagacatttcgtgctaggaacctccgcttactttgagtcactggtcgaactggtgtcctactacgagaaacattccctttacaggaaaatgcggctgagatacccggtgactcccgaattgctggagcgctacaatatggaacgggatataaactccctctatgacgtttcccggatgtacgtagatcctagtgagataaacccctcaatgccacagaggaccgtgaaggccttgtacgattacaaggcaaagagatccgatgagctgtccttttgtaggggtgcattaatccataacgtttccaaggagcccggaggttggtggaaaggcgattacggtactagaattcagcagtactttcctagtaactatgtggaggatatttcaacagcagactttgaggagcttgaaaagcagattatcgaggacaatcccttggggtcgctctgccgtggcatccttgacctgaacacctacaacgtcgtgaaagccccacagggtaagaaccagaaaagtttcgtcttcatcctagaaccaaagcaacaaggggaccctcccgtagagttcgcaacggacagggtggaagagttgttcgaatggtttcagtctatccgggagattacatggaagattgacacgaaggaaaacaatatgaaatactgggagaaaaaccagtcgattgcaatagaactgtccgacctggttgtttactgcaaaccgaccagtaaaaccaaggacaatttagaaaaccccgacttcagagaaattcggagctttgtggagactaaggcagacagcattattcgccaaaaacctgtggaccttctgaagtacaaccagaaaggccttaccagagtgtacccaaaggggcagcgggttgattcctctaattacgatcccttccgcctttggctgtgtggctctcagatggtggcattgaacttccagactgcagacaaatacatgcagatgaaccacgctctcttcagtttgaacgggaggacaggctacgtgctgcaacccgaatctatgcgtaccgaaaagtatgacccaatgcctccagaaagccagcggaaaattctcatgactctcacggtgaaagtcctaggcgctcgccatctcccaaagctaggaaggtctatcgcctgtccattcgtggaggtggagatttgcggggcagaatatgataataataagttcaagactactgtggtgaacgacaacggtctgtcccctatctgggctcctacccaggaaaaggtaacatttgaaatttacgaccctaatttagcttttctgaggtttgtggtgtatgaggaggatatgttcagtgaccctaatttccttgcccacgctacttaccctatcaaggccgtcaaaagtggcttcaggagcgtcccactgaaaaacggttacagcgaggatatcgagctcgcttccctgctcgttttttgtgaaatgcggccagtgcttgaatccgaagaagagctctattcgtcttgtcgtcagcttagacgacggcaagaagagctgaacaatcagctgtttctctatgacacgcaccagaacttgcggaatgccaaccgcgacgcccttgtcaaagagtttagtgtgaatgagaaccaattgcagctttatcaagagaagtgcaataagcgccttcgagagaagcgtgtcagtaatagtaagttctacagctag

SEQ ID NO: 30121 - DNA, 2916 bp, synthetic construct
  misc_feature 1..2916: note = Description of Artificial Sequence: Synthetic coding sequence
  source 1..2916: mol_type = other DNA
atgtctctcaaaaatgagccacgtgttaacactagcgctctccagaaaatcgcagctgatatgagtaacattattgagaatcttgatacaagagagttacatttcgaaggggaggaagtggactatgacgtcagccctagtgatccaaagatacaagaggtctatatccctttcagtgccatatacaacactcaggggtttaaggaaccaaatatccaaacttacctcagtggttgcccgattaaggctcaggttctggaggtggagagattcacatccaccacacgcgtaccttcaatcaatttgtacactatcgagttgacccacggcgagttcaaatggcaggttaaaaggaagttcaaacatttccaggagttccatagagagctcctgaaatataaggcattcatccgaatcccaataccaacaaggcggcacactttcaggcggcagaacgtgcgggaagagcccagagaaatgccaagcctcccacggagtagtgaaaacatgatccgagaagaacaatttttgggtcgccgtaaacaattggaagactacttgactaaaatcttaaaaatgcctatgtaccgaaactatcatgcaaccacagaatttttggatatctcccagctgtctttcatccatgacctggggccaaaagggattgaagggatgattatgaaacgtagcggcggtcatcggatcccagggctcaattgctgcgggcagggcagggcttgctaccggtggtccaaaagatggttaatcgttaaagactcatttctgctctacatgaagcccgatagtggcgctattgcctttgtgctcttggtggacaaggaatttaaaatcaaagtcggtaagaaggaaaccgaaacaaagtacggtattcgcatcgacaatctttctaggacactgatccttaagtgtaattcctaccgccatgccaggtggtggggaggagcaatcgaggaatttattcaaaagcacggcactaatttcctgaaggaccacagattcggatcttatgccgcaattcaggagaacgcactggccaaatggtacgtaaatgcgaaggggtactttgaggatgtggccaatgctatggaggaggcaaacgaagagatatttattaccgactggtggctatctcccgagatttttcttaagcggcctgtcgtggaaggaaaccgctggcgcctggattgtattctcaaacgaaaagcacagcaaggcgtgcgtatattcattatgttgtacaaggaggtggaactggccctaggcataaacagcgagtacacaaagcggacccttatgcggctgcacccgaacatcaaggtgatgagacacccggatcacgtatcctctaccgtgtacttgtgggctcatcacgaaaagctggtaattatagatcaatcagtcgcttttgtgggcggaatcgaccttgcctacggccgatgggatgataacgaacatcgcctaactgatgttggatctgtcaaacgggttaccagcggcccaagcttggggtctctgcccccagccgctatggagtctatggaatccctcagactgaaggataaaaacgaacccgtgcaaaatctgccaatccagaaaagtattgacgatgtagatagtaagctgaagggtatcggaaagccacgtaagtttagtaaattttctctgtacaagcaactccaccgtcaccacctccatgacgccgactctatcagcagcattgactcaacttcttcttacttcaaccactaccgcagccatcataatctcatccacggattgaagccccattttaagctctttcatccaagctccgagtcagagcaggggttaacgcggcctcatgctgatactggaagtattagatccctgcagaccggtgtcggagaactccatggcgaaactcgtttctggcacggtaaggattactgcaacttcgtattcaaggactgggtacagctggataaacctttcgcagatttcatcgacaggtactccacgcctcgcatgccctggcacgacattgccagcgcggttcacggcaaggctgctagggacgtagccaggcactttattcaacgctggaacttcaccaaaattatgaagagtaaatataggagtctgtcctacccgttccttctgccgaagtctcagactacggcccacgaacttagataccaggtgcctggatctgtgcacgctaatgtacagctgcttcggtcagcagctgattggtcagcagggattaagtatcacgaggagagcatacatgccgcttacgtgcacgtgatcgagaatagtcggcactatatttacattgagaatcaattctttattagctgcgccgacgacaaggttgtctttaataagatcggagacgccatcgcacagaggatcctgaaggcacaccgggagaatcagaagtatcgcgtctatgtagtgattcccctgctgcccggtttcgagggagatatctccacaggaggtgggaacgccttgcaggccatcatgcatttcaattataggacgatgtgcaggggagaaaactccatcctgggacaactgaaagccgaacttggcaatcagtggatcaactatattagtttctgtggcttgcgtacgcacgcggaactggaaggcaatctcgtaaccgaactgatctatgtgcacagcaaactccttattgctgacgacaacacagtaatcattggttcagcaaacatcaacgacagaagtatgctcgggaaaagagacagcgaaatggctgtgatcgtgcaggatactgaaacagtgcccagcgtaatggatggtaaagaatatcaagctgggcgatttgccaggggcctcagactgcaatgttttagatcaaagatgacacctggagtggaagatccctag

SEQ ID NO: 30122 - DNA, 1794 bp, synthetic construct
  misc_feature 1..1794: note = Description of Artificial Sequence: Synthetic coding sequence
  source 1..1794: mol_type = other DNA
atgagcttaaagaatgagccccgtgtgaatactagcgcgctgcagaagattgcggctgatatgtccaacatcatcgagaatctcgacactagagagcttcattttgagggcgaagaagtagattacgacgtgtccccaagtgaccctaagattcaggaggtgtacatcccttttagcgcaatttataacacccaaggcttcaaggaacccaacatccagacttacctaagtggctgtccaattaaggcccaggtcctggaagtggaacgcttcaccagcactacacgtgtcccctcaattaatctgtacacaatcgagctgacccacggggagttcaaatggcaagtaaagcggaagtttaaacatttccaagaattccaccgtgagttgttgaaatacaaagccttcattcggattcccatccccacgcgacggcatacctttcggagacaaaacgtcagagaggagcctagggagatgccatccttaccacgtagctccgaaaacatgatacgcgaggaacaattcctcggccgtcggaagcaactagaggattacctgactaagattcttaagatgcctatgtatcgcaattatcatgcaacaactgaattccttgatatcagccaactgagttttatccacgatttgggccctaaaggaatcgaggggatgatcatgaaacgcagtggcggtcatcggattcccggtctgaactgctgcggccaggggagggcttgctataggtggagtaagcggtggctgattgtcaaagatagctttctgttgtacatgaaacccgatagtggggctatagcctttgttctcctcgtggacaaggaattcaagatcaaggtaggaaagaaagaaactgaaactaaatacggcatccgcattgacaatctgtctagaactctcatccttaagtgcaacagctaccgccatgccaggtggtggggtggggcaatcgaagaattcattcaaaaacacggcaccaatttcctcaaggaccacaggttcggatcttacgccgcaattcaggaaaatgcgctggccaagtggtacgtgaacgccaagggttacttcgaggatgtcgccaatgcaatggaggaggcaaatgaagagatcttcatcaccgactggtggctgtctcccgaaatttttctcaagcgcccagtcgtggagggcaatcggtggagattggactgtattctcaaacggaaggcgcagcagggtgttaggatcttcattatgttatataaggaggtagagctggcccttggaatcaattccgaatacacaaagagaaccctgatgcgcctgcaccccaatataaaagtgatgcgccatcctgaccacgtgtctagcacagtgtacctgtgggcccaccatgagaagctcgtgatcatcgaccagtcggttgcatttgttggtggtatcgacctagcctatggcaggtgggatgacaacgagcaccggctcactgacgtggggtcggtgaagagagtgacaagtgggcctagcctgggaagccttccaatacctggcccttcggtggtgtatcgccaggtctgggagtcctgcatgggtaaacctgactctggcatggagcggacgactgctatttccagtagcaaaactggatttaacttaattaatcttctcctgatttctttgaccggcaccccaagacctgggtgccccggaatgacgctgccgctccaatctacagggaggcgattggttatgtggcacgtcacttcgtccagcgccggaacgagccagaagctgtag

SEQ ID NO: 30123 - DNA, 3225 bp, synthetic construct
  misc_feature 1..3225: note = Description of Artificial Sequence: Synthetic coding sequence
  source 1..3225: mol_type = other DNA
atgtcactgaagaacgaaccacgggtaaatacaagcgccctccaaaaaatcgccgctgacatgtccaatataattgaaaatctcgacaccagagagctacatttcgagggagaggaggttgattatgatgtcagcccttccgatcctaaaatccaggaggtttatattccattctccgctatatacaatacccaggggttcaaagaacctaacattcagacttatctgtctggatgtcctattaaagcgcaggttctggaggtggagagattcacgtctaccactagagtaccttccataaacctgtataccattgagctgacccacggcgagttcaagtggcaagtcaagcggaagttcaagcattttcaggagttccacagagagctgctgaaatataaagcattcattaggatccctatcccaacccgtaggcacacctttcgacggcaaaatgttagggaagaaccccgagaaatgcccagtctgcccaggagtagtgaaaatatgatcagggaggaacagtttcttggccgaagaaagcagttggaggactatctgaccaagattctaaagatgccgatgtatagaaactaccacgcaacaactgaatttctggatatcagtcagctctccttcattcatgatttgggcccaaagggaattgagggtatgatcatgaagaggtccggcggacacagaatccccggacttaactgctgcgggcagggaagagcctgttatagatggagcaagagatggttaatcgtcaaggattccttcctgctctacatgaagcccgactctggcgcaatcgcttttgtcctgctcgttgataaagagttcaaaataaaggtgggcaagaaggaaactgagactaaatacggaatcagaatcgataacctaagtagaactctcatactgaaatgcaacagttatcgccacgcccgatggtggggaggggctatcgaggaatttatacaaaagcatggtactaactttctgaaagaccaccggtttgggtcatacgccgcaatccaagaaaatgcgctcgcaaagtggtacgtgaatgctaagggctattttgaagatgtggctaatgccatggaggaggcaaatgaagagatttttataactgattggtggctgtctcctgagattttcctgaagcggccagtcgtcgagggcaaccggtggcggctcgactgcatcttgaaaaggaaagcccaacaaggcgtgagaattttcatcatgctttataaggaggttgagctggctcttgggatcaattccgagtacactaagcggacccttatgcgactgcatccaaacatcaaagtgatgcgacaccccgaccacgtgtcttccactgtatacctgtgggcacaccacgaaaagcttgtgatcatcgaccaatcggtggcctttgtggggggaattgacctcgcctacgggaggtgggacgataacgaacaccggctgacggatgttggcagcgtgaagcgagtgaccagcggcccatccctgggctctctgccccctgctgctatggaatccatggaaagcttgcgtttaaaggacaagaacgagcctgtgcagaacctgcccatccagaagtctattgatgatgttgattcaaagttgaaagggataggtaagccaaggaaattttcgaagttttcactgtataagcaactgcaccggcaccatcttcatgatgctgattcaatttccagtatcgattctacctccagctatttcaatcactaccggtcacaccataatcttattcatggcctgaagccccatttcaagctgtttcatccttcgtccgaaagcgagcaaggtttgacaaggccacacgcagacaccggtagtatcagatcccttcagaccggtgtgggggagttgcatggagagacccgtttctggcacggcaaggactactgcaatttcgtgttcaaggactgggtgcagctggacaaacctttcgcagactttatagatcggtattcaacaccgaggatgccttggcatgacatcgcctcggccgtgcatggcaaggctgccagagatgttgcaaggcactttatacaaagatggaatttcacgaagatcatgaagtccaagtaccgctccctgtcgtacccctttttgctgcctaagtctcagaccaccgcccatgagttacgttatcaggtgcccggtagtgtccatgctaatgtccagctgctgagatccgccgctgattggtccgctggcattaagtatcatgaagaatccattcatgccgcttacgtgcacgtgatcgagaactctcggcattacatttatatcgagaaccaattcttcatctcttgcgcagacgacaaagtagtctttaataagataggggatgctattgcacagcgtattctgaaagctcaccgggagaaccagaaatacagagtgtacgtcgtcattccgctgctacccggtttcgagggggacattagcaccgggggtggaaacgcccttcaggccatcatgcactttaattacagaacaatgtgtagaggggagaattcaatcctcggccagctaaaagctgagctgggcaaccagtggattaattacatcagcttttgtgggctgcgcacacatgctgaacttgaaggcaacctggtgacagagttgatctacgtgcatagtaaacttcttatagctgacgataacacagtgattattggctcggccaatattaacgaccgcagtatgcttggaaaacgagacagcgagatggccgtcattgttcaggatactgagaccgtgccatcggtaatggacggcaaagagtatcaagccggtaggtttgccagaggcctacggctgcagtgcttccgggttgtccttgggtatttagacgaccctagtgaggacattcaggacccagtgtcagacaagttcttcaaagaggtctgggtgagcactgcagctcgaaatgccacaatttacgataaggtgtttagatgcttaccaaacgacgaagtacacaatctgattcagctcagagacttcatcaacaagcccgtgctcgccaaggaggaccccattagggccgaggaagagctgaagaagataaggggatttctggtgcagtttcctttttacttcctgtccgaggagtctctgctgccctcagtcggaacaaaggaagcgattgtgcctatggaagtctggacctag

SEQ ID NO: 30124 - DNA, 3111 bp, synthetic construct
  misc_feature 1..3111: note = Description of Artificial Sequence: Synthetic coding sequence
  source 1..3111: mol_type = other DNA
atgagcttgaaaaatgaacctcgagtcaatacatccgctcttcagaaaatcgccgctgacatgtccaacatcatcgaaaacctggatactcgggagctacattttgagggagaagaggttgactatgacgttagcccaagtgatccaaagatccaagaagtgtatatccctttctcggctatttacaatacgcagggcttcaaggagcccaacatacaaacctatctgtccgggtgtcctattaaggctcaggtgttagaagtggaacggtttactagcaccaccagggtaccaagcatcaatctgtacaccatagagctgacgcacggcgagttcaaatggcaggtgaagaggaaatttaagcattttcaggaatttcatcgcgaactcctcaagtataaagcctttatcagaatacctattcccacccgacggcacacattcaggcggcaaaacgtgcgggaagagcctagagagatgccctccttaccacgttcttccgagaatatgatccgagaggagcagtttctggggcgtaggaaacaacttgaggattatctcacaaagatcctgaagatgcctatgtaccgcaactaccacgctaccacagagtttcttgatattagccaattatcattcattcacgatctaggccctaaggggatcgaagggatgatcatgaagcgaagcgggggacacagaatcccaggcttgaattgctgcgggcaagggagagcctgctatcgttggagcaaacggtggctgatcgtgaaagacagctttctgttgtacatgaagcctgactcaggtgctatcgcgtttgtgctccttgtcgacaaagaatttaagattaaggtgggaaaaaaagagacggagaccaaatacggcattcgcattgataacctgagccgaactttgattctgaagtgcaatagttacaggcatgcgagatggtggggtggtgccatcgaggagtttattcagaagcacgggacaaattttcttaaagatcatcgctttggaagttacgctgctatacaggagaacgccctggccaaatggtatgtgaacgcgaagggttacttcgaagacgtggccaacgctatggaagaggctaatgaagaaatattcatcaccgattggtggctatctcccgagatctttcttaagcggcctgtcgttgaaggcaatagatggagactggactgtattctcaagaggaaggcacagcagggcgttagaatcttcattatgctctataaagaagttgagttggctctgggcatcaattccgaatacacgaaacggacccttatgcgtctccacccgaatatcaaagtcatgaggcaccctgaccatgtgtctagcaccgtatatctgtgggcccaccacgaaaagctggtaattatagatcagagtgtggcctttgtcggcggaatcgacctcgcctacggcaggtgggacgacaacgagcatcgtttgacagacgttggatcagtaaagcgtgtcacaagcggaccatcactgggcagtctccctcctgccgcaatggaatccatggaaagtctgagactgaaggacaagaacgagcctgtgcaaaatttgcctatacagaagtcaattgacgacgtcgattcaaagctgaaaggcatcgggaaacctcggaagttctccaagttttccctctacaaacaacttcaccgtcaccatctgcacgacgcggactctatctcctctatagattccactagcaacacgggcagcattcggagtctgcagaccggagtgggcgagctccacggagagaccagattctggcatgggaaggactactgtaacttcgtgttcaaggactgggtccagctggacaagccttttgccgattttatcgaccgctattcaacccctaggatgccatggcacgacatcgcaagtgcggtgcacgggaaagccgcacgagatgttgctagacatttcatacagcggtggaacttcactaaaattatgaagagcaaataccggtccctgtcatatccatttttactgcctaagtctcagaccacagcacacgagttgcgttaccaggttcccggatcggttcacgcaaacgtgcagttgctgcgatccgccgcagactggtcagcgggtattaagtaccacgaagaaagcattcatgccgcttacgtgcatgtgatcgagaattcgcgccactacatctatatcgaaaaccagttcttcatatcatgcgcagatgataaagtggtttttaataagatcggggatgccattgcgcagagaattttgaaggcccacagagagaatcagaagtatcgcgtctacgtggtgattcctctgctcccagggtttgagggtgacatatctaccggaggcggtaatgcacttcaggctatcatgcatttcaactaccgcaccatgtgtaggggggagaatagtatactagggcagcttaaggccgaactgggaaatcaatggattaactacatttctttttgtggtctcagaactcacgcagagttggaaggaaacctcgtgacagaattgatctacgtgcactccaaacttttgatcgcagacgataatactgtaataatcggatccgccaatatcaacgacaggagcatgctggggaaacgcgactctgagatggcagtgatcgtgcaggacaccgaaactgtcccctcagtgatggacgggaaagagtatcaggccggtagattcgcccgaggcctgcggcttcaatgcttcagagtggtcctggggtatttggacgatccatcagaggacattcaagacccagtgagcgataagtttttcaaggaggtctgggtgtccacggccgctcggaacgccaccatctacgacaaagtcttccggtgcctccccaacgatgaagtgcataatttaatccaattgcgcgacttcattaataaacccgttctggctaaagaagaccctatccgtgccgaggaggaattgaaaaagatccgtggttttcttgttcagttccctttctactttctgagcgaggagtccttactacccagcgtgggcaccaaggaagctattgtgccgatggaggtgtggacatag

SEQ ID NO: 30125 - DNA, 429 bp, synthetic construct
  misc_feature 1..429: note = Description of Artificial Sequence: Synthetic coding sequence
  source 1..429: mol_type = other DNA
atgagcctgaagaacgagccaagagtcaatacgtctgccctgcaaaagatcgccgcagatatgtcaaacatcatcgagaatctcgatactcgggaactacactttgaaggcgaggaggtggattacgacgtgtccccatccgaccccaagatacaggaagtgtacatcccatttagtgctatttataacacacaaggattcaaagagccaaatattcagacctatctgtctggatgcccaataaaggcacaggtgctagaggtggagcggttcacctctacaactagggttccaagcatcaacctgtacaccattgaactcactcatggggagttcaaatggcaggtgaagcgaaagttcaaacactttcaagaattccacagagagcttctcaagtataaagcttttatccgtattcctattccatag

SEQ ID NO: 30126 - DNA, 2580 bp, synthetic construct
  misc_feature 1..2580: note = Description of Artificial Sequence: Synthetic coding sequence
  source 1..2580: mol_type = other DNA
atgtacagtggagctgggccagccctcgctccgcctgcaccccctccgcctatacagggctacgcttttaaaccgccaccaagacctgattttggaacaagcggtcggacaattaaacttcaagccaatttctttgagatggatattcctaaaattgacatctaccactatgagctggatataaagcccgagaagtgtcctcgtagggtgaatagggagatcgtcgagcatatggtgcagcattttaagacacagattttcggagatagaaaaccagtcttcgatggacgcaagaatctctacaccgcaatgcctctacccatcgggagggacaaagttgagctggaagtgaccctcccgggagaaggcaaggacagaattttcaaggtttctattaaatgggtgtcctgtgtgagcctgcaggcattgcatgatgctttaagcggcaggttgccctccgtgccattcgagacgatccaggctttggatgttgtgatgcgacatctgcccagtatgcggtacacccccgtggggcgtagcttttttaccgcttcagaggggtgctcaaacccattaggaggcggacgggaggtctggttcggcttccaccagagcgtgcggcctagtctctggaaaatgatgcttaacatagatgtttcggctacagccttttacaaggcccaacctgtaattgaatttgtctgtgaggtgcttgatttcaagtctatcgaagaacaacagaaacctctgactgattcccagcgtgtgaaattcacgaaggagattaaaggtctgaaggtggaaatcacccattgtggacaaatgaagcggaagtacagggtctgcaacgtcactcgtaggccagccagtcaccagacctttccgttgcagcaggaatcaggccagaccgtggaatgcacggtggcccagtacttcaaggaccgccataaactcgtcctgcgttacccacatctgccttgccttcaggttggccaggaacagaagcatacttacctccctcttgaagtttgcaacattgtggcgggacagcgctgtatcaagaagctcacggataaccagacatccacaatgatcagagccaccgctcggtccgcccctgacaggcaggaagagatttccaaacttatgaggagtgcctcattcaacactgacccctacgtccgcgaatttggcataatggtgaaagacgagatgacagatgtgacaggccgtgtactccaacctcccagcatcctctatggcggaaggaataaggctatcgccacaccggtgcagggcgtgtgggacatgaggaataaacagtttcacactggtattgagattaaggtctgggcaattgcctgttttgcccctcaacgacagtgtactgaggttcatctcaaaagcttcacggagcagctccggaagatctctcgagacgctggcatgcctatacaagggcagccctgcttttgcaagtatgctcaaggggcagacagcgtcgagcccatgttccgccacctgaagaacacgtacgcaggtctgcagcttgtggtggtgatacttcctggcaagaccccggtctatgccgaggttaagagggtgggtgacacggtgctgggcatggctacccagtgtgtccagatgaagaatgtacagcgcaccaccccccagacgctgagtaacctctgtctgaagattaatgtcaaactagggggagtgaataacatcctcttgccgcagggacgtccacccgtctttcaacagccagtgatattcctgggcgcagacgtcacccacccacccgcaggagacggaaaaaaaccttcgatagctgcagtagtaggcagtatggatgcccaccccaacagatattgtgcaaccgttcgggtccagcagcacagacaggagattatacaagacctcgctgccatggtcagggaattgcttattcagttttacaaatctactagatttaaacctactcgcattattttctacagagatggggtaagcgaaggacagtttcagcaggtactgcaccacgagctcctagctattcgcgaagcctgcattaagctggaaaaagattaccagcccggaataacctttatcgtggtgcaaaaacgacaccacactaggctgttttgtacagataagaatgagagagtgggtaaaagcggcaacattcctgccggaacaacagtggatacaaaaattacacaccctaccgaatttgacttttacctgtgctctcatgcgggaatacagggaaccagtcggccttcccactatcacgtgctctgggacgacaatcgcttctcatcggacgagttgcagattctgacataccaactgtgtcacacttacgttcgttgtacaagatctgtaagtatccctgctcctgcctactacgcccatctcgtggcgtttagggctcgttaccacctggtcgataaagagcacgattctgcggagggttcacatactagcggtcagtctaatggtagagaccaccaggctcttgccaaagccgtgcaggtccatcaggacaccctgaggacaatgtattttgcttag

SEQ ID NO: 30127 - DNA, 1926 bp, synthetic construct
  misc_feature 1..1926: note = Description of Artificial Sequence: Synthetic coding sequence
  source 1..1926: mol_type = other DNA
atgttgagtgggatcgaggccgcagccggagagtacgaggactccgaactgaggtgtagagttgctgtggaagagctgtctccaggtggccaaccaaggcgcagacaggcactgaggacggcagaactgtccctggggaggaacgaacggcgagaactaatgcttcgcttacaagcccctggacccgctgggaggccaagatgcttcccgctgagggccgcacgactatttacaagatttgcggaagccggaagatcgacactgcggctccctgctcatgacacccccggtgctggcgcagtgcagctgctgctgtctgattgccccccagatcgtctgcgcagattcctgagaactttgcgactgaaactggccgcagctcccggtcctggacctgcttccgctcgagctcaattgctcgggcctagaccccgtgactttgtcaccatctctccggtgcagccagaggagcgacggttgcgggctgccacaagggtgcccgacaccacgctggtgaagcgcccagtcgagccacaggcaggagctgaaccatcaaccgaggccccaagatggcccctccctgtaaaaagattgtctctcccatctaccaagccccaattatccgaggaacaggccgctgttctcagagcagtgctgaagggccaaagtatctttttcacgggaagtgcaggtactggcaagtcctatctcctcaagcgaatccttggatcattaccccctacaggtactgttgcgactgcctccacaggtgtcgccgcttgccatataggaggaactaccctgcacgcttttgcaggcattgggtccgggcaggctccactcgcccagtgtgtcgcgctggcccagcggcctggcgtgaggcaaggttggctgaactgtcagcgtctcgttatagatgagatcagtatggtggaggccgacctatttgataaactggaagcagtcgccagggcagttagacagcaaaataagcctttcgggggaatccaattgatcatatgcggcgacttcctgcagctgccacctgtgacaaaaggctcccagccccctaggttctgtttccagagcaaatcttggaagcggtgcgttcccgtcaccttagagctgacaaaagtgtggcgccaggccgatcagacatttatctctctgctgcaggcagtgcgccttggcagatgttctgacgaggtgacacggcagcttcaggcaacagcctcacataaagtaggtagagatggtatcgtcgcaacccggttgtgcacacaccaagatgacgtggcgctgacaaacgaacgcagactgcaggagctgcccggtaaagtgcaccggtttgaggctatggattccaacccagagttggcctctacccttgacgctcagtgtcctgtgtcacagcttttgcaattgaagctgggtgcccaagtgatgctggtcaaaaacctctcggtttcacgcggtctggtcaatggggcaagaggagttgtagtagggttcgaggcagaaggcagaggcttgccccaggtgagatttctgtgcggcgtcactgaggtgatccacgccgatcgatggacggttcaagcaacaggtggacagctcctgtcacggcaacaactgccgctgcagctcgcttgggccatgtccatccacaagtcccagggtatgaccctcgactgtgtcgaaatttctctgggccgagtattcgcatctggtcaggcctatgtggcactctctcgcgctcgctccctccagggcctgcgggtcctggatttcgacccaatggctgtgcggtgcgatcccagagtgcttcacttttatgctaccctgcggagagggagatcgttaagcctggaaagtcctgatgacgacgaggctgcatccgaccaagagaatatggaccccattctgtag

SEQ ID NO: 30128 - DNA, 2124 bp, synthetic construct
  misc_feature 1..2124: note = Description of Artificial Sequence: Synthetic coding sequence
  source 1..2124: mol_type = other DNA
atgctgtccgggattgaagctgctgccggtgagtacgaagactccgagctgcgatgtcgggtggccgttgaggaattgtcccctggcggacaacctcgtcggcgacaggccctgaggacagccgaactgagtctaggccgtaatgagaggcgcgagttaatgctaaggctgcaggctcccggtcctgccggaaggcctaggtgtttccctctgagagctgcacggctgtttacccgattcgcagaggccggtagaagcaccctgagattgccagcgcatgatactcccggagcaggcgctgtgcagttgctgctaagtgattgtccaccagacaggctgcggagattcttacggacactgcgcctcaaattagcagctgcacctggacccggaccagctagtgccagagcccagctcctgggtccgaggccaagggacttcgtgacgatctctcccgtgcagccagaggaacgcaggctcagggcagcgactagagtccctgataccacgcttgtcaagaggcccgtagagccgcaggccggagctgagccaagtacagaagcacctcgatggcctctccctgtcaagaggttgtccctaccctctaccaaaccccagctgagtgaggaacaggccgctgtgctgagagccgtgcttaagggccagagcatctttttcaccggaagtgccggaactggcaagtcatatctcttaaaaagaatcctcggttccttaccccctacaggcaccgtcgctactgccagtacgggagtggccgcatgccatattggcggaacaacgttgcatgccttcgctgggatcgggtccggtcaggctccactggcccaatgcgtcgcactagcccaacgcccaggcgtccgccaagggtggctgaattgccagcggctcgtgatagacgaaatttcgatggttgaagctgatctgttcgataaactggaagctgttgcacgagctgtgagacagcaaaataaaccgttcggcggtatccagctgatcatctgcggtgacttcttacagttgccgccagttaccaagggcagtcagccccctcggttttgttttcagtccaaaagttggaaaaggtgcgtgcctgttacgcttgagttgactaaagtatggcggcaagctgaccagaccttcattagcctgctgcaggccgtaagacttggccgttgtagtgacgaggtgacacgccaacttcaggccacagcaagtcacaaggtgggtcgggatggaatcgtagctacccggttatgcactcaccaggacgatgttgccctcacgaacgaacgcagactgcaggagctcccgggaaaggtacacagattcgaggcgatggacagcaacccagagctagcttccacactggatgctcagtgcccagtctcacagctcctccagctcaagctgggcgcacaggtaatgctggttaagaatctctccgtgagtcgcggattggtgaacggcgctcggggagtagtcgtgggtttcgaggccgaggggaggggtttgccgcaggtcagattcctgtgtggagtgaccgaggtcattcacgctgacaggtggactgtccaagctaccggaggccaactcttgtccagacaacaactgcccctgcagctggcatgggctatgtcaatccacaaaagccagggaatgactttagactgtgtggagatctccttgggccgtgtcttcgcctctggacaggcctacgtggcgctttctagggcaagatctttgcagggcctccgggtgctggacttcgaccccatggccgtgcgctgtgacccacgagtccttcatttctacgctactctacgaagaggaagatccctctcgctggccgctgaagggaggggtaacgaggaccggtgcagcggttctagtattcgtgccttgggcggtgactggtgggggctgcggcttggggctgcttcaaagcagcgaaccgagttgagatgtgtgagtacagcccgtccatccttagcgcagcctagaacgaacacactgcagagcctgacaaaggaacacaagcttcagaatgtgcacccgtactttaaactcctgtttcagggaattaactcagtgtggggccattag

SEQ ID NO: 30129 - DNA, 1926 bp, synthetic construct
  misc_feature 1..1926: note = Description of Artificial Sequence: Synthetic coding sequence
  source 1..1926: mol_type = other DNA
atgctcagcggcatcgaggcagcagccggagagtatgaggattctgaactgagatgtcgcgtggcagtagaagaactgtcgccagggggtcaacctcgtcgaagacaggccctgcgtacagcagagctgtccctcgggcgaaatgagagaagggagcttatgctccggctccaagccccaggccctgccggtcggccaagatgcttcccactgagggccgcacgactcttcacgagattcgcagaagctggccgatccacgctgaggctgccagcacacgacacgcccggtgccggagccgtgcagttgctgctctcggactgcccgccagataggcttcgtagattcctccgcactttacgcctaaaattggctgcagccccaggtcccggacccgcttccgctagggctcagcttttggggccacgccctcgcgactttgtcaccatttcccccgtgcagcctgaagagagacgactgagggcagctactcgcgtacccgacaccacactcgtcaaacgccctgttgaaccgcaggccggagccgaaccctccactgaggctccacgctggcccctgcccgttaaaaggctgtccctaccgtcgacaaagccccagctctcggaggagcaagcagccgtcctgcgagccgtcctaaaaggacagtctatcttcttcacggggtcagccggtacagggaaatcctatctgctgaaaaggattctgggcagccttcctcccacaggtaccgttgccacagcctcaacgggagtagccgcttgccacatcggaggcactaccctacacgcttttgcaggcataggcagcgggcaagccccactggctcagtgcgtcgccctggcccagcgacctggggttcggcagggatggttaaattgtcagcggctggtcattgacgaaatctccatggtggaagcagacctattcgacaagttagaggccgtggcccgtgccgtccgccagcaaaacaaaccttttggaggcatccagttgataatttgcggagactttttacagctccccccagtcacaaagggatcccagccgcctaggttctgcttccagtcaaaaagttggaagcggtgtgtgccagtgacgctcgagcttaccaaggtctggcgccaggcagatcaaaccttcatcagcttgttgcaggcggtgcgcctgggccgttgcagcgacgaagtcacacggcagcttcaggccaccgcatctcacaaagttggccgagatggtatagtggcaacccggctttgcacacaccaggacgatgtggcccttacaaatgaacgcagactgcaggaattgcccggtaaggtacataggttcgaggcaatggatagcaatccggagttggcatctaccttggatgctcagtgcccagtgagccaactgttgcagctcaagctgggagctcaggtgatgctggttaagaatctgagcgtgtccaggggtttagtaaacggggctcgcggagtggtcgtgggctttgaggccgaaggaagaggcttgccccaggttcgatttctatgcggcgtcacagaagtcatccacgccgatcgatggacggtgcaggctaccggcggacagctcctgagtaggcagcagctgcccttgcagctggcttgggcaatgagcatacataagtctcagggaatgacacttgactgtgtagagatttccttgggtcgcgtatttgcaagcggacaggcctatgtcgctctatcccgcgctagatcgctacagggcctgagggtactcgatttcgaccccatggccgttcgctgtgatcctagagtactgcatttctatgcgacgctgcgacgcggtcgaagcctttctcttgagtctcccgatgacgacgaggccgcaagcgaccaagagaacatggatcccatcttatag

SEQ ID NO: 30130 - DNA, 801 bp, synthetic construct
  misc_feature 1..801: note = Description of Artificial Sequence: Synthetic coding sequence
  source 1..801: mol_type = other DNA
atgctgtccggaattgaggctgctgctggggaatatgaagattccgagctaaggtgtagggtggccgtagaggagctgagccctggcggacaaccacggaggcggcaggctctgcgcaccgcggagctctccctcgggaggaacgagcggagagaactcatgctcagactgcaggcgcctggcccagctggtcgccctagatgcttcccactgcgagccgcaagactgtttacaagatttgcggaggcaggcagatctaccctgaggctacctgcccacgataccccaggagcaggagcggttcagctgttgctgagcgactgcccccctgacagactacggagattcctgcgcaccttgaggctgaaattggcagccgcaccaggaccaggaccagccagtgcgagagcccaactgttgggtcccagaccaagggattttgtcacgatttcccccgtacagccagaagaacgcagactgcgggcagctacccgggtgccagacaccacactggtgaaacggcctgtagaaccccaggctggagcagagccatctacagaagcaccccgttggccccttcctgttaagcggttgagcctgcctagcacgaagcctcagctgagtgaggagcaggccgcagtgcttcgggctgtcctgaagggccagagcatcttttttactggcagcgccggttccgggggacgggaggaggtcggaggccagtggtggggagggattgaagagcaaggcgatctttctaacttcgccccagtacaggaacagggatcccacatatgttag

SEQ ID NO: 30131 - DNA, 987 bp, synthetic construct
  misc_feature 1..987: note = Description of Artificial Sequence: Synthetic coding sequence
  source 1..987: mol_type = other DNA
atgtcgatgttggcggagaggcgcaggaagcagaagtgggcagtggacccccaaaataccgcctggtcaaacgacgactctaagtttggacagcgaatgctagagaagatgggttggtcgaaggggaagggcctgggggcacaagaacagggtgccacagaccatatcaaagttcaggttaagaataatcacctgggtttgggcgctaccatcaataacgaagataactggatcgcccatcaagacgactttaatcagctgcttgcggagctcaatacgtgccatggccaggaaaccaccgattcctcagacaaaaaggagaaaaagtccttttccctggaggagaagtccaagatctctaaaaatcgcgttcactacatgaaatttacaaaaggtaaggatttgtccagtcgctccaagacggatctggattgtatctttgggaagaggcagtccaagaagacgcctgaaggggacgcgagcccttccacccctgaggagaacgagaccaccacaacaagcgccttcaccattcaggagtacttcgctaagcggatggctgctttgaagaacaaacctcaagtccccgtgcctggctctgacatatctgaaacacaggtagagagaaagcggggtaagaaaagaaacaaggaggcaaccggaaaagacgtggagagttaccttcagccaaaagcgaagagacataccgaagggaaacctgaacgtgccgaggcccaggaaagagttgcgaaaaaaaaatcagcaccagcggaggagcagttgcggggtccatgttgggaccagtccagtaaggcaagtgcacaggacgccggtgatcacgtgcagccccctgagggtagagatttcacgctgaagcccaaaaaaaggagagggaagaaaaagttgcagaagccagtagaaatagccgaggatgcaactctggaggagacactggtgaaaaaaaagaagaagaaagacagtaaatag

SEQ ID NO: 30132 - DNA, 519 bp, synthetic construct
  misc_feature 1..519: note = Description of Artificial Sequence: Synthetic coding sequence
  source 1..519: mol_type = other DNA
atgctcgccgagaggagaagaaagcagaaatgggctgtggatccacagaataccgcgtggagcaacgacgatagcaagtttggccaacgtatgttggaaaaaatgggctggtctaagggtaagggattaggtgcgcaggaacagggcgcaaccgaccatataaaggtccaagtgaaaaacaaccaccttggacttggcgctaccataaacaacgaggataattggattgcacaccaggatgatttcaaccaactgctagccgaattgaatacatgtcacggacaggaaacgactgactcatcagataaaaaggagaagaagtcattctctttggaggagaagtctaagatatctaaaaatcgggttcattatatgaaattcacaaaaggtcggtgtcagtccctgcattcgcggggagagaggaaccacgacaaccagcgcctgcaccatcccggagtgctttgccaggcggacggctccaccgaagagcaggctccagggtcctcctcccgggtctag

SEQ ID NO: 30133 - DNA, 525 bp, synthetic construct
  misc_feature 1..525: note = Description of Artificial Sequence: Synthetic coding sequence
  source 1..525: mol_type = other DNA
atgtcgatgcttgctgagaggagacgtaagcagaagtgggctgtggacccacaaaataccgcttggtccaatgacgattccaaatttgggcaacggatgctggagaagatgggctggtctaaaggtaaagggctcggtgcccaagaacagggcgcaaccgaccatatcaaggtgcaggttaaaaacaaccacttaggcctaggggctacaattaataacgaggataattggattgcccatcaggacgactttaatcagctcttagcagaacttaatacgtgccacggtcaggagacaactgatagctccgacaaaaaagagaagaaaagctttagcctcgaggagaaatctaaaatctcaaagaatagagtacactacatgaaattcaccaagggtaggtgccagtctttgcactcccgcggtgagcgcaatcacgataaccagcgccttcatcatcccggtgtactctgtcaggctgatggatctactgaggagcaggccccaggctcttcctcgagggtctag

SEQ ID NO: 30134 - DNA, 972 bp, synthetic construct
  misc_feature 1..972: note = Description of Artificial Sequence: Synthetic coding sequence
  source 1..972: mol_type = other DNA
atgccagtacatagtcgcggagacaagaaagagaccaatcaccatgatgagatggaggtggactacgctgagaatgagggttcctctagtgaagacgaggacacagaatcctcctctgtgtcagaggacggggattccagtgaaatggatgatgaggattgtgagcgtcgaagaatggagtgtctggatgagatgagtaatctggagaaacaattcacggacttgaaggaccagctgtataaagagaggctgtctcaagtcgacgccaagctccaggaagtcattgccggtaaggctccagaatatttggagcccctggctacattgcaggagaatatgcagatacggactaaggtggcagggatttacagagagctgtgtctggaatccgtgaagaacaaatacgagtgcgaaattcaagccagccggcagcattgtgagtccgagaagctcctgctatacgatacagtacaaagtgaattggaagaaaagatccgcaggctggaggaggatcggcattccatagatattaccagcgaactgtggaacgatgagctacagagcagaaagaagcgaaaagacccattctcccctgacaagaagaaacccgtcgtggtttccggcccatatatcgtttatatgctgcaagatctggatattttagaagactggaccacaatacgaaaagcaatggcgaccctcgggccacaccgcgtaaagaccgagcccccagtcaagttggagaagcatttacactctgctcgatccgaagaggggaggctgtactatgacggcgagtggtatatacggggacagacaatttgcatcgacaaaaaggacgaatgtccaacctccgctgttattaccactattaaccatgacgaagtgtggttcaagcgcccagacggctcaaaatccaagctctacattagtcaactgcagaagggtaagtattccattaaacattcgtag

SEQ ID NO: 30135 - DNA, 666 bp, synthetic construct
  misc_feature 1..666: note = Description of Artificial Sequence: Synthetic coding sequence
  source 1..666: mol_type = other DNA
atgcccgtgatgcgactgttcccgtgcttcttgcagctgctagcaggcctcgcgctccctgcggtgcccccacagcagtgggccctgtcggccggaaatggctcctctgaagtggaggtcgttccattccaggaagtgtgggggagatcttattgccgcgctctagagcgtctcgtggatgttgtatccgaatacccaagcgaggttgagcacatgttcagcccatcctgtgtgagcttactgaggtgcacagggtgttgtggcgacgagaacctccactgcgtccccgttgaaaccgcaaacgttaccatgcaactgctgaaaattagatcaggcgaccgccctagttacgtggaactgacgttcagtcagcacgtcagatgcgagtgcagacatagcccagggagacagtccccagatatgcctggcgattttcgagctgatgccccttccttcctcccccctcgtcgctccttgcctatgctgtttcgtatggagtggggatgtgccctcactggcagtcaatctgcagtttggcccagttcacccgtgccagaagaaatccctcgcatgcaccccggtagaaacggcaaaaaacagcagcggaagccactgcgggagaaaatgaaaccagaacgatgcggagatgcagtcccaagaagatag

SEQ ID NO: 30136 - DNA, 450 bp, synthetic construct
  misc_feature 1..450: note = Description of Artificial Sequence: Synthetic coding sequence
  source 1..450: mol_type = other DNA
atgccagtcatgagactgtttccctgctttctccagctgttggctggactcgccttgcctgccgttcccccacagcagtgggctctctctgccggaaatggttcgtccgaggtcgaagtggttccctttcaggaagtgtgggggagaagctactgtagagctctcgaaaggctggtggacgtggtctcagagtaccccagcgaagtcgagcacatgttttcccccagctgtgtgtccctcctcagatgtacaggatgttgcggggacgaaaacctgcattgtgtgccagtggaaaccgccaatgtgacgatgcagttgctgaaaattagaagtggcgaccgaccaagctatgttgaactgacttttagccagcatgtcagatgtgagtgtcggccattgagggagaaaatgaagcccgaaagatgtggcgacgctgttccaagaagatag

SEQ ID NO: 30137 - DNA, 513 bp, synthetic construct
  misc_feature 1..513: note = Description of Artificial Sequence: Synthetic coding sequence
  source 1..513: mol_type = other DNA
atgccagtgatgcgtttgttcccttgcttcctgcagctgctcgccggacttgctttgccagccgtgcctcctcagcagtgggcgctgtctgccggtaacggatcctctgaggtagaggtggttccatttcaagaggtgtgggggcgttcctactgtcgggcattagaacgacttgttgatgtggtgtcagagtaccccagcgaggtggaacacatgttctcaccaagctgtgtcagccttctgcgctgcaccgggtgttgtggggatgagaatctgcactgtgtgcccgtcgagactgcgaatgtcacaatgcagctactcaaaatcagatccggggataggccgtcctacgttgagcttacattcagccaacacgttagatgcgaatgccggccattaagagagaagatgaagcccgaacggaggcgcccaaagggacggggtaagagacggagagaaaagcagcgcccaactgattgccatctgtgtggagacgcagtacctcggagatag

SEQ ID NO: 30138 - DNA, 477 bp, synthetic construct
  misc_feature 1..477: note = Description of Artificial Sequence: Synthetic coding sequence
  source 1..477: mol_type = other DNA
atggctctggaagtactgatgctcctggccgtcctgatctggaccggagccgagaatttacatgtgaagatttcctgctctctggattggctgatggtctctgttatacccgtcgccgagtctaggaacctgtacatctttgccgacgagctccatctaggcatgggctgccctgccaaccggatacatacctacgtgtacgagttcatttatctagtgcgggattgcggtatccgaaccagggttgtctctgaggagaccctcctctttcagacagagctgtatttcaccccacgtaacattgatcacgatccccaggaaatacacctggagtgcagtacatctcgcaagtctgtctggctcacacccgtgagtactgaaaacgagattaagttggaccctagccctttcattgccgattttcagacaacggccgaggaactcggccttctttcttcctctcccaacttgttgtag

SEQ ID NO: 30139 - DNA, 1188 bp, synthetic construct
  misc_feature 1..1188: note = Description of Artificial Sequence: Synthetic coding sequence
  source 1..1188: mol_type = other DNA
atgagagctctgctggccagattgctcctctgcgttcttgtcgtctctgattctaaagggagtaatgagctgcatcaggtgccctataaatcaaagacctgctacgaaggtaatggtcacttttaccggggaaaggcgtctacagacaccatggggcgaccctgcttgccatggaactctgcgacagtgctgcagcagacatatcatgcccacagaagcgacgccctgcagctgggcttggggaaacacaattactgtagaaatcccgacaacaggaggcgtccgtggtgctacgtccaggttggattgaagcttctggtacaggagtgcatggttcacgattgcgccgatggcaagaaaccaagcagtcctcctgaggagctaaaatttcaatgtgggcaaaagacactaagacctagattcaagatcatcggcggagagttcaccacgatcgaaaaccagccatggttcgcggctatctaccgtaggcatcggggaggctcagtcacctacgtctgcggcggtagtcttatcagtccttgttgggtcatatctgccacacactgtttcatcgattaccctaagaaggaggattacattgtctacctcgggaggagcaggctcaacagcaacacacagggggagatgaaatttgaagtggaaaatctgatcctgcataaggactatagcgccgacacccttgcgcaccataacgatatcgccttgctcaagatacgaagtaaagagggacggtgtgcgcagccctcacgaactatccagacaatttgcctaccttcgatgtataacgaccctcagttcggcactagttgcgaaataaccgggtttggcaaggagaactcaacagactacttgtatcctgagcagctgaagatgaccgttgtcaagttgatcagtcatagagagtgccaacaacctcattactatggctccgaagttacaaccaaaatgctctgcgcagcggatccccagtggaagaccgactcttgtcaaggcgattcaggcggtccgctcgtctgtagtcttcagggaagaatgaccttaactggtattgttagttggggcagggggtgtgccctcaaggataaacccggagtctatactcgcgtgtcgcattttctcccctggatccgctcacatactaaggaagagaatggactcgccctttag

SEQ ID NO: 30140 - DNA, 1188 bp, synthetic construct
  misc_feature 1..1188: note = Description of Artificial Sequence: Synthetic coding sequence
  source 1..1188: mol_type = other DNA
atgagagccctacttgctagacttctcctctgcgtgctggtagtgtctgatagcaagggctctaacgagctgcatcaggtaccttataagtctaaaacgtgttacgaaggcaacggacacttttacagaggaaaagcgtccaccgataccatgggccgaccttgcctgccgtggaacagcgcaacggtgttgcagcagacctaccacgcacaccgaagtgacgcactgcaactgggtctagggaaacataattattgtcgaaatccagacaacagaagacggccatggtgctacgttcaggtcggcttaaagctgctggtccaggaatgcatggtgcacgattgtgctgatggtaaaaaaccttcctctccgcctgaagaactgaaattccagtgcggccaaaaaacgttgaggccgagatttaaaattatcggaggtgagttcaccactattgagaatcaaccctggttcgccgcaatttaccgacgccaccgtggaggcagtgtaacatatgtgtgcggcggaagtctgatatccccctgctgggttatctcagcgacgcattgttttatcgattatccaaagaaggaggactacatcgtgtacctaggccgaagcagactaaattcgaatacccagggggagatgaagttcgaagtagagaatctcatcctgcacaaggattactctgctgatacgttggcgcatcataacgatatcgccctcctgaaaattaggagcaaggagggccgttgcgcccagccctcaaggaccatccagaccatctgtctcccgtcaatgtataatgacccccaattcgggacgtcttgtgaaattactggtttcggcaaggaaaatagcactgattatctgtaccccgagcagctgaaaatgacggttgtaaagctgataagccaccgcgaatgccaacaaccacactattacgggagcgaggtcaccacgaaaatgttgtgtgctgccgaccctcagtggaaaaccgattcctgtcagggcgactccggcggtcccctggtgtgtagcctgcagggtaggatgacattaacgggtatagtgtcatggggcaggggatgcgccttgaaggataagcctggtgtgtacactcgcgtatcccacttcttgccttggatccggagtcataccaaagaggagaacggactggcattgtag

SEQ ID NO: 30141 - DNA, 1296 bp, synthetic construct
  misc_feature 1..1296: note = Description of Artificial Sequence: Synthetic coding sequence
  source 1..1296: mol_type = other DNA
atgcgggcactgctcgcaaggctactgctgtgtgtcctggtggtttccgatagcaagggtagcaacgaattacatcaagtgccctcaaattgcgattgtctcaacggtggcacttgtgtttctaataagtatttctcaaacatacattggtgtaactgcccaaagaagtttggagggcaacattgcgagatcgacaagagtaagacttgctacgagggcaatggacacttttatcgaggtaaagcgagtacagacaccatgggccgtccctgtcttccttggaactcagcaacggttctgcaacagacttaccacgcccataggtctgatgccctgcagttaggcttgggaaagcacaattattgtagaaatcccgataataggcggaggccatggtgctatgtgcaggtgggactgaagcttcttgttcaagagtgcatggtccacgactgtgccgatggaaagaagccgagttcccctcccgaggagctgaagttccaatgtggacagaaaacattacggccacgttttaaaatcatcgggggagaatttaccaccatcgaaaaccagccatggtttgcagctatttatagaaggcacaggggaggctcagtaacttatgtatgcggaggatctctcatctccccatgctgggtcatctctgccacccactgtttcatcgactatcccaagaaagaggattacatcgtgtacctgggcaggtctcgcctgaattcaaatactcaaggcgagatgaaattcgaagtagaaaatctcatactgcacaaagactacagcgctgatacactcgcacatcataacgacattgctctgctaaagatacgctccaaggaagggagatgcgcacaaccaagccgaacaatccagactatatgtctccccagtatgtataatgacccgcagttcggcacttcttgcgagattaccgggtttgggaaggaaaattccaccgactatctgtaccccgagcagctgaagatgaccgttgttaaactgatctcgcatcgggagtgccagcagccccattattatggaagtgaagtaaccacaaaaatgctgtgcgcagcagacccccagtggaagacggactcttgtcaaggcgattctgggggaccgttggtgtgtagtcttcagggcagaatgacactaaccggcattgtgtcatggggcagaggttgcgcactgaaggacaaacccggagtgtatacacgcgtatctcatttcctgccttggattaggtcccacaccaaggaggagaatggcctggccctttag

SEQ ID NO: 30142 - DNA, 1245 bp, synthetic construct
  misc_feature 1..1245: note = Description of Artificial Sequence: Synthetic coding sequence
  source 1..1245: mol_type = other DNA
atggtttttcatttaagaactaggtacgaacaggcaaattgcgactgcctaaatggtggcacctgcgtctctaataaatatttttccaacatccactggtgtaactgtcccaaaaaatttggcggacagcactgcgagatcgacaagagcaagacctgttatgaaggcaacggtcatttctaccgaggaaaagcttctaccgacactatgggccgaccttgtttaccctggaacagcgcaactgtactgcagcagacctatcacgcacataggagtgatgcactgcagctcggcctgggaaagcacaactattgcagaaaccctgacaacaggaggagaccatggtgttatgtgcaggtcggactcaagcttttggtgcaggagtgtatggtacatgactgtgccgacgggaagaagccgagctcccctccagaggaactgaagttccagtgtggccagaaaacattgcgaccgagattcaagatcatcggcggagagttcaccacaatagagaatcaaccctggtttgcggctatctataggcgacataggggagggagcgtgacctacgtatgcggcggatccttgatcagcccttgctgggtaattagtgctacacactgttttattgattatcccaaaaaggaggactatatagtgtatctgggtcgaagccgactgaacagcaacacccagggggagatgaagtttgaggtggagaacttgatcttacataaggattacagcgctgatacgcttgcacaccataacgatattgctctgctgaagatccgaagtaaagaaggcagatgtgcccagccttcccggaccattcagaccatttgtcttccgagcatgtataacgatccccagtttggcaccagctgtgagatcacaggtttcggaaaggaaaatagcactgactacctgtatccagagcaacttaaaatgacagtggttaagttgatctctcaccgtgagtgtcagcagccgcattattacggatccgaggttacaaccaagatgctttgtgctgcagacccccagtggaaaactgacagctgtcagggcgactctggaggcccactcgtctgttcgctgcaaggcaggatgactctgacaggaatcgtgtcgtgggggagagggtgtgcgttgaaggacaaacccggtgtctacacgagagtcagccatttcctcccttggatccgatcccacaccaaggaagaaaacggactggcgttgtag

SEQ ID NO: 30143 - DNA, 3984 bp, synthetic construct
  misc_feature 1..3984: note = Description of Artificial Sequence: Synthetic coding sequence
  source 1..3984: mol_type = other DNA
atggaagctccactgcagacaggaatggtgctgggagttatgatcggagccggagtagctgtggttgtgaccgccgtgctgatactgctcgtcgtgagacgactccgcgttcccaaaacccctgctccggatggtccacgttatcggtttcgtaaacgagacaaggtgcttttttatgggagaaaaatcatgagaaaggtctctcagtctactagctccctggtggatactagtgtgtcagcgactagcagacctcgtatgaggaagaaattgaagatgcttaatatcgccaaaaaaatactcaggatacaaaaggagactcccaccctgcagagaaaggagcctccccctgcagtgctggaggctgatcttactgaaggcgacctcgcaaatagtcaccttccttctgaggtgctctatatgctgaagaacgtccgggtcctgggacacttcgagaagcccctgttcctcgagttgtgtcggcacatggtgttccagcgcctcggccagggagattacgtgttccgccctgggcaaccagatgcatctatatacgtggttcaggacgggctgctggagctttgcctccctggtcctgatggcaaggagtgtgtggtaaaagaggtggtccctggggacagcgtaaattccctattatccatcctcgacgtgatcactggacaccaacatccccagagaacggtgagcgctcgcgcagccagagactccacagtcctgcgcctcccagtcgaggcttttagtgctgtgttcacaaagtacccagaatccctcgtgcgggtggtgcaaatcatcatggtacgactgcagcgagtgactttcctcgctttacacaactatctgggtcttacaaacgagctgtttagccacgagatccagccgctccggttattcccgtcccctggcctccctacccgcacaagccctgtgcgcggaagcaagcggatggtcagcaccagcgccaccgatgaacctcgagagacccccggacgaccaccagaccccactggcgcaccccttcccggtccaacaggagatcccgtgaaacctactagtctggaaacacccagtgctcctcttctatctcgctgcgtctctatgccgggtgacataagcggcctacaaggcggaccacggtccgacttcgatatggcttacgaaagggggaggatttctgtgtcactccaagaagaggcttcgggagggtccttagcagctccagcacgaactcctacccaagagcccagggaacagcctgccggtgcctgtgagtatagctactgtgaggatgagagcgccactgggggatgcccattcgggccttatcaggggaggcagacgagtagcattttcgaggctgcaaagcaagagttggccaagctgatgcggattgaggatccctcattattaaattccagagtgctgctgcatcacgctaaagcaggaacaattattgcgaggcagggggatcaggatgtcagccttcactttgtactgtggggttgcctccatgtgtatcaacgcatgattgacaaagccgaagatgtgtgcctgttcgtggcgcagccaggagagttggtcggacagttggcagttcttactggcgaacccctaatcttcactctgagagcgcaaagagattgcactttccttcgcataagcaaatcagacttttacgaaatcatgcgcgcacaaccatccgtggtgctgtcagcagctcatactgtggccgctcggatgagcccattcgtccgccaaatggacttcgctatcgattggaccgccgtagaagcaggtcgcgcattgtatcgccagggagaccgtagcgactgcacatacattgtcctcaacggaaggttacgttctgtgatccagcggggaagtggaaagaaagagcttgttggggaatatggaaggggggacttaattggggtggttgaggcccttacgagacagccaagggcaacgacggttcatgccgtgagggacaccgaattggccaaactgcctgaaggcaccctagggcatatcaagcggaggtatcctcaggtagtgacacgactcatccatctgctgagccagaagatactgggaaacttacagcagttgcagggcccattcccagccggatccgggctcggagtgccccctcacagtgagctcacaaatccagcctccaatctggccaccgtagctatactgcctgtctgtgccgaggtgcccatggtcgcttttacgttggagctgcagcatgccctgcaggctattggacccacactgctcctgaatagtgacataattcgtgccagactgggagcgtccgctctggacagcattcaagaatttcggctgagcggatggctggcccagcaagaggacgctcatcgcatagtgctgtatcagaccgacgcgtcattgacaccctggaccgtgagatgcctgagacaggcagactgcatcttgatcgtgggacttggcgatcaggagccaaccctgggccaactggagcaaatgctcgagaatacagccgttcgagctctaaaacaactggtactgttgcaccgagaagagggcgcaggcccaacccgcaccgtggagtggctgaatatgcgatcttggtgttcaggccatctccacttgcgctgtccccgaagactcttttctagacggtctcctgctaaactgcacgagctgtacgagaaagtgttcagccggagagctgataggcacagcgatttttctaggttggcacgcgtgcttaccggaaacacgatcgcactggtgctgggaggaggcggagctcgaggatgttctcatataggtgtactgaaagctctcgaggaagccggtgtcccggtcgatctggtgggtggaacatctataggcagtttcattggcgcattatacgcagaagaaagatcggcctcaaggacaaaacagagagccagggagtgggcaaaaagtatgacctccgtcctggaacccgtcctcgatctgacatatccggtgaccagcatgtttacaggttccgctttcaatcgctcaatacaccgcgtgttccaggacaagcagatcgaggacctgtggctcccctacttcaacgtgactaccgacattaccgcctcagcaatgcgggtacacaaggatggaagcctgtggcgatacgtgcgggcatcaatgacactgtccgggtatcttccgcctctatgtgaccccaaagatggacacctgctgatggatgggggttatataaataatctgccggctgacattgctcgatccatgggggcaaagacggttattgccatagatgtgggctcgcaagatgagaccgacttaagtacctatggcgatagcttgagtggctggtggctcctctggaaacgcctgaatccctgggcggacaaggtgaaggtccctgacatggccgaaattcagagtcgcctcgcatatgttagctgtgtccgccagctggaggtggtgaaaagttcttcctactgtgaatacctgcggccacccatcgattgcttcaagaccatggacttcggcaaatttgatcagatatatgatgtgggctatcagtacggaaaggctgtcttcggaggctggagtcgcggtaatgtgatcgagaaaatgttgacagaccgcaggtcgacagacttgaacgaatcacggagggctgacgtgcttgcctttccctcgtctggctttaccgacttggctgaaatcgtttcccgtatcgagcctcctacgagttacgtctcagacgggtgcgctgacggagaggagtcagattgtctgactgaatacgaagaagatgccggtcctgattgttcgcgcgatgagggaggcagtcctgagggggcatccccatccaccgcttcagagatggaagaagaaaagtccattctaaggcagaggagatgtctgccccaggagcccccagggtcagcaacggatgcgtag

SEQ ID NO: 30144 - DNA, 846 bp, synthetic construct
  misc_feature 1..846: note = Description of Artificial Sequence: Synthetic coding sequence
  source 1..846: mol_type = other DNA
atgggccatccaccactattacccctgctgctgctccttcatacatgtgtacctgcttcctggggacttcggtgcatgcagtgtaaaacaaatggggactgcagagtggaggagtgcgccctgggtcaggatctgtgtaggactacaattgtcaggctgtgggaagagggcgaggaactggagctcgttgaaaaaagctgcacacacagcgaaaagactaatcgaactctgtcctatcggaccggtcttaagattacaagccttactgaagtggtctgcggtctcgatctgtgcaatcagggcaattccggccgtgccgtcacgtatagcagatccaggtacctcgagtgcattagctgcggtagctctgacatgagctgtgagagagggcgacaccagagcctgcagtgcaggtctccagaagaacagtgcttggacgtggtgacacactggattcaggaaggcgaagaggggcgacctaaagatgatcgtcatttgagaggttgcggctaccttccaggctgtcctggatcaaacggctttcacaataatgacaccttccattttctcaaatgttgtaacaccacaaaatgtaacgaggggcctattctagaactggagaacttaccacagaatggtcgacagtgttactcatgcaaaggtaactccacacacggatgttcctctgaagaaacttttttgatcgactgcaggggaccaatgaaccagtgtctcgtggccaccggaacccacgagaggtctctgtggggctcttggctgccctgtaagtctactacagcactgcgcccaccatgctgcgaggaggcccaggcgacccacgtctag

SEQ ID NO: 30145 - DNA, 1008 bp, synthetic construct
  misc_feature 1..1008: note = Description of Artificial Sequence: Synthetic coding sequence
  source 1..1008: mol_type = other DNA
atgggccacccacccttgttgccgctgttactgttgctccacacgtgtgtgcccgcttcatgggggttgcgctgcatgcagtgtaagacgaacggcgactgtcgggtggaggagtgcgcactgggtcaggacctgtgtcgtacaactattgtaagactctgggaggaaggcgaagagctcgagctggtcgaaaagtcatgcacacattccgagaagacaaaccgtacactgtcatatagaaccggactgaagatcacaagcctaacagaggttgtctgcggtttggatttgtgcaaccagggcaatagcggcagagctgtgacttactcgcggagccgatacctcgaatgcatatcttgcggttcaagtgacatgagttgtgagaggggccgacatcagtcactgcaatgccggagccccgaggagcagtgcctggatgtggttacccattggatacaggagggcgaagagggtcggccaaaggacgatcggcacctgagggggtgtggttacctaccgggttgtccaggatccaatgggttccataataacgataccttccacttcctgaagtgctgcaacactactaaatgtaatgagggcccaatccttgaactggaaaacctaccccagaatgggcgtcagtgctattcttgtaagggcaactcaacgcatgggtgcagctctgaggagacctttctcattgactgccgcggacctatgaaccagtgtctggtggctactggaacacatgagccaaagaatcagtcatacatggttcggggttgtgctacagcttcaatgtgccagcatgcacaccttggggatgcgttcagcatgaaccatatcgacgtgtcttgttgcaccaagagcggatgcaaccaccctgatttggacgttcagtacaggtctggggcagccccacaaccaggcccagcccatctgagcttgacaatcactctgctgatgactgcaagactgtggggcggaacgctgctgtggacctag

SEQ ID NO: 30146 - DNA, 1038 bp, synthetic construct
  misc_feature 1..1038: note = Description of Artificial Sequence: Synthetic coding sequence
  source 1..1038: mol_type = other DNA
atgtcactgtttggcctgctgttgctgacctccgcactagctgggcaaagacagggaacccaggccgaatccaacctaagctccaaattccagttttcaagcaacaaggagcaaaacggagtccaggatcctcagcatgagaggataatcaccgtcagcaccaatggctcaattcactcccccagatttcctcacacataccctagaaataccgtactagtgtggaggctggtggctgtagaagagaatgtgtggatacagctgacattcgatgaacgatttggccttgaggatcctgaggacgacatctgtaagtacgattttgtggaggtggaagaacccagtgacgggaccatacttggcagatggtgcggcagcggaactgtgccgggtaagcagatttcaaagggcaaccagatcagaattcggtttgtgagtgacgaatattttcccagtgaacccggattttgcatccactacaacatcgttatgccacagttcactgaggccgtctcaccctcggttctccccccaagtgctctgcctctggatctattaaacaatgcaattactgccttttcgacactggaggaccttatcaggtatttggagcccgaacgctggcagttggacctggaagatctttaccggccaacgtggcaactgcttggaaaggccttcgtgttcggcaggaaatcccgggtggtcgaccttaacctattgacggaagaggtccgcctgtattcctgcacccctcggaacttctctgtgagcatcagggaagaactgaaacggacagataccatcttctggcccggttgccttctcgtcaagcggtgtggagggaattgcgcttgttgtctccacaattgtaatgaatgtcagtgcgtgccttccaaggtgaccaaaaagtaccacgaggttctacagctgagaccgaaaaccggagtaagagggctccacaaatcactcaccgacgtcgctcttgaacatcacgaagaatgcgactgcgtatgccggggttctacgggagggtag

SEQ ID NO: 30147 - DNA, 549 bp, synthetic construct
  misc_feature 1..549: note = Description of Artificial Sequence: Synthetic coding sequence
  source 1..549: mol_type = other DNA
atgccccagttcaccgaggcagtgtctcccagcgtcctccccccttcggccttgccactggacttgctaaacaatgcaattactgccttttcaacattagaagacctcatcaggtacttagagcccgagcgctggcagcttgatttggaagatttatatagaccgacgtggcagctccttgggaaagcctttgtgttcggccgtaagagtcgagtggtggacttgaacttgctgacagaggaagtgcgactgtatagctgcacccccagaaacttcagtgtcagcatcagagaagaactcaagcgcacagacactatcttctggcctggatgcttacttgtgaaacgttgtggcggaaattgtgcctgttgtttgcataactgcaatgaatgccagtgcgtcccctctaaggttaccaaaaaataccatgaggttcttcagttgagaccaaaaacgggggtaaggggactgcacaagtccctgacagacgtggcccttgaacatcatgaggagtgtgactgcgtctgccggggatccacagggggatag

SEQ ID NO: 30148 - DNA, 573 bp, synthetic construct
  misc_feature 1..573: note = Description of Artificial Sequence: Synthetic coding sequence
  source 1..573: mol_type = other DNA
atgatgcaatatacttggctgctgacaaaacagttcacggaggccgtttcaccctccgtattgccgccatccgctctgccacttgatttgcttaacaacgctatcacagcgttttcaacacttgaggatctcatcagatacctggaaccagaacggtggcagctggatctggaggatttgtaccggccaacttggcaacttctcggcaaggccttcgtttttggaagaaaatcaagagtggttgatctcaatttgctaacggaggaagtacggctttactcatgcaccccccgaaacttctctgtgtcaatccgggaagaactgaagagaacggacaccattttttggcccggttgcctgctggtcaaacgatgcgggggtaactgtgcctgctgtctgcataactgcaacgagtgtcagtgcgtgccatcgaaggtgactaaaaaataccacgaggtgctgcaactgcggcctaaaactggtgtgcggggtttgcataagagcctcaccgacgttgccctcgagcaccacgaggagtgtgactgcgtgtgccggggttccactggcggttag

SEQ ID NO: 30149 - DNA, 504 bp, synthetic construct
  misc_feature 1..504: note = Description of Artificial Sequence: Synthetic coding sequence
  source 1..504: mol_type = other DNA
atgagtcttttcggactgctactcctgacaagtgccctggcgggtcagagacagggcacacaggctgagtccaacctcagctcgaagttccagttttcctctaataaagaacagaacggcgtccaggacccgcagcatgagcggattattacagtttctacaaatggtagtatccactcccctagattcccgcatacgtatccacgaaacaccgtgctcgtttggagactggtggccgtggaagaaaacgtgtggattcagctgactttcgacgaacgattcggattggaagacccagaagatgatatttgcaagtacgactttgtcgaagtggaggagccatctgatggtacaatactcggaaggtggtgcggcagtggcaccgtgcccggtaaacagatctctaagggtaaccagattcgtatccggtttgtttcagatgagtattttccaagcgagccaagcaaccggggtggcaaaataatccaactccatacctcctag

SEQ ID NO: 30150 - DNA, 2217 bp, synthetic construct
  misc_feature 1..2217: note = Description of Artificial Sequence: Synthetic coding sequence
  source 1..2217: mol_type = other DNA
atgcagcccaggtgggcccagggtgccaccatgtggttgggagtgttgctgactctgctgctgtgtagttctctagaaggacaggaaaactcattcaccatcaatagcgtcgatatgaaatcacttccagattggacggtgcagaatggtaagaatttgactctccagtgcttcgctgacgtaagtactacatcccacgtaaaacctcagcaccagatgctcttctacaaggacgatgtgcttttttacaacatctcatccatgaaatcaaccgagagttatttcatcccggaagttagaatctatgatagcggcacctacaagtgtaccgttattgttaataacaaggagaaaactaccgccgagtaccaggtactcgtggaaggcgtgccctccccgagagtgacactggacaagaaagaagctatacaaggaggcatcgtgagggtcaattgctccgtgccagaggaaaaagcaccgatacacttcaccatcgagaagcttgaactcaatgagaagatggtgaaactcaaaagggagaaaaactccagggatcagaactttgtgatcttggaattcccggtcgaggagcaggatagggtgctgtcatttcgatgccaagccagaatcatctctggaatacacatgcagacaagcgaatctactaaatctgagctggtgacagtgactgagtctttctcaacacccaagttccacattagccctaccggcatgatcatggaaggggctcagcttcacatcaagtgcacaatccaagtgactcatctggcgcaggagttccctgaaatcatcatacagaaagataaggctatagttgctcataaccggcatggtaacaaggccgtatactcagtaatggctatggttgaacattcgggcaattacacatgcaaggtggagtcttcacgaatctccaaagtgagttctatagtcgtgaacatcacagagctttttagcaaaccagagttagagtcttcgttcacacacctggaccaaggcgaaaggctaaatttgtcatgctctatccccggagctccgcctgctaactttacaatccagaaagaggacactatagttagccagactcaggacttcaccaaaattgcttctaagtccgattcggggacgtacatctgtactgccggtattgacaaggtcgtcaaaaaatctaacacagttcagatcgttgtgtgtgaaatgctctctcagccacgcatttcatacgacgcccagttcgaagtcataaaaggacaaactattgaagtaaggtgcgaatccattagcggcacactccccatctcttatcagctgctcaagactagtaaagtgctcgagaatagcacgaagaacagcaatgaccctgccgtattcaaggataaccccaccgaggacgtcgaataccaatgtgtggccgataattgtcattcccatgccaagatgctctctgaggtattgagggttaaggtaattgctccagtggatgaggtgcagatttccattttgtccagtaaagtggttgaatccggagaggatatcgtccttcagtgcgctgtgaacgaaggttctgggccaatcacatataaattctacagagaaaaagaagggaagccgttttaccagatgactagtaacgccacgcaagcattctggaccaaacaaaaggccagcaaggaacaagagggagagtattattgtaccgcgtttaatagagctaatcatgcatcttctgtgccgagatcaaagatacttactgtgcgtgttattttggcaccctggaagaagggattgattgccgtcgtgatcattggtgtaatcatagccttattgatcatagcagccaagtgctacttccttagaaaggcgaaagccaagcaaatgcccgtggagatgtcccgccctgccgtgcctctcttgaactccaataacgagaagatgagtgatccaaacatggaagctaatagccactacggccacaatgacgacgtgagaaaccacgcaatgaaacccataaacgacaacaaggaacctctgaactcggacgtccagtacacggaggtacaagtcagttccgccgaaagtcataaagaccttgggaagaaagataccgagacggtctatagtgaggtgcgaaaggccgtccctgatgctgtggagagccgatattcacgaacggaaggatccctggacgggacatag

SEQ ID NO: 30151 - DNA, 636 bp, synthetic construct
  misc_feature 1..636: note = Description of Artificial Sequence: Synthetic coding sequence
  source 1..636: mol_type = other DNA
atgaggaccctcgcctgtctgttacttctcggctgcggatatctcgcccatgtacttgccgaggaagcggaaatcccacgagaagtcatcgaacgtcttgccaggtcccagatacactctatcagggatctccagaggttacttgaaatagacagtgtgggaagcgaagactctctggatacatctctcagagcacacggggtgcacgcgacaaagcacgtgccagaaaagcgtcccctgcctatccggcgtaagagatctatcgaggaagccgtcccggcagtctgtaagacccgcactgtgatttatgagattcccaggagccaagtggaccccacatctgccaacttcttgatctggccaccttgcgtcgaagtgaaacgctgcaccggttgctgcaacacttctagcgtgaagtgccagccctcacgcgtccatcaccggagcgtcaaagtcgctaaggtcgaatatgtgcggaagaagccaaaactcaaggaagtgcaagtaaggctcgaggagcatttggagtgtgcctgcgcaaccacttcactgaacccagattatagggaggaggacactggacgtccaagggagtccggaaaaaagagaaaacggaagaggctcaagcctacttag

SEQ ID NO: 30152 - DNA, 591 bp, synthetic construct
  misc_feature 1..591: note = Description of Artificial Sequence: Synthetic coding sequence
  source 1..591: mol_type = other DNA
atgcgtactctggcatgtctgttattactgggctgcgggtacctggctcacgtgctggctgaagaggccgagattcctagagaggtaattgagcggctggctagaagccaaatacacagtattcgcgatctgcagaggcttcttgaaatcgactccgtgggctccgaggactcgctggacacctcacttagagcacatggtgtccacgctactaaacatgtgcctgagaaacggccacttcctatccggagaaagcgctcaatagaggaggccgtgccagccgtctgtaaaactaggacggtcatctatgagataccccgatctcaggtggaccccacgagtgccaactttcttatttggcctccttgcgtggaggtcaagcggtgtactgggtgctgtaatacatcatcagtcaagtgccagccgtccagagtccaccataggagcgtgaaggtggccaaggtcgaatacgtccgtaagaagcctaagctgaaagaagtccaggttcgacttgaggaacacctggagtgtgcctgtgcaactacttctctgaaccccgactatcgggaggaggacacagatgttagatag

SEQ ID NO: 30153 - DNA, 162 bp, synthetic construct
  misc_feature 1..162: note = Description of Artificial Sequence: Synthetic coding sequence
  source 1..162: mol_type = other DNA
atgcggaccctcgcctgtctgctcctcctaggatgcggatacctggcacacgtgctggccgaggaagccgaaatcccgcgagaagtgatagaacgactagctagatctcagatccacagcattcgggacctacagcgactcctagaaatagactccgtctag

SEQ ID NO: 30154 - DNA, 3270 bp, synthetic construct
  misc_feature 1..3270: note = Description of Artificial Sequence: Synthetic coding sequence
  source 1..3270: mol_type = other DNA
atggggacaagccatcctgcttttctggtccttgggtgcctcttgactggcctttcgctcatcctgtgccagctgagcctgccgagtattctgccaaatgagaacgagaaggtcgtacaactgaactcatctttttcgcttaggtgtttcggcgaaagcgaagtgtcttggcagtatcctatgagtgaagaagaatccagcgacgtagagatccgcaatgaagagaacaacagcggattgtttgtgaccgttctagaagtgtcatccgcaagcgccgctcatactggtttgtacacatgttactacaatcacacccaaacagaggagaacgaattggaagggaggcacatatatatttatgttcctgaccccgacgtcgccttcgtgccattgggcatgacagattatctggttatcgtggaggatgacgattccgccataatcccttgtcggactacagaccccgaaacacccgtgacactacacaactcggaaggcgtcgtgcccgcatcatatgactctcggcaagggttcaacggaaccttcacagttggtccctatatttgcgaagctactgtcaaaggaaagaagttccagacaattccttttaatgtttacgcattaaaggctacatctgagcttgacctcgaaatggaggcactaaaaactgtctacaagtccggggaaacaatcgtggttacttgcgcagtgttcaataatgaagttgtagacttgcagtggacctaccccggagaagtgaaaggcaagggtatcactatgctggaagagatcaaagtgccctctatcaagttggtgtacaccctcacggttccagaagcaactgtcaaagacagtggcgactacgagtgtgcggctcgccaggccactagagaggtgaaggaaatgaagaaggtgacaatcagcgtgcacgaaaagggatttatcgagattaagccaacgtttagtcagttagaggctgtcaacttacatgaagtgaaacattttgtcgtagaagtgagggcatatcctccaccacgcatcagttggctgaaaaacaatctgaccctcatcgagaacctcaccgaaatcactaccgatgttgaaaagatacaagagattcgctaccggtccaagctcaaactaattagggccaaagaagaggattctggacactatactatcgtggcccaaaatgaggatgccgtcaaatcctatacatttgagttactcactcaggtcccttcttccatcctggatctggtagacgaccatcatggaagtactggtgggcagacagtacgctgcacagctgagggtactcccctgccagacatagagtggatgatctgcaaggatattaagaagtgcaataatgagacatcttggaccatcctggccaacaacgtatcaaatattattaccgagatccacagcagagacaggtcaacggtggagggtagagtgacgtttgctaaagtagaggagacgatagcggtacgctgcttggctaagaacttacttggtgctgagaacagggagctgaaactggtagccccaacactacggagtgagcttaccgtggcagccgctgtgttagtgctgcttgtcatcgtcatcattagccttattgtgttggtcgtcatttggaagcagaaaccaagatatgagatccgttggagagttatcgagtccataagtccagatggacacgagtacatatatgtggaccccatgcaacttccttacgacagtagatgggagtttccaagagacgggttagtgctgggcagggtgttgggctccggcgcattcggcaaagtagtggaagggaccgcctatggactgagccgctcgcagcctgtcatgaaagtggctgtcaagatgctaaagcccacagccagatcgagcgaaaaacaggccctgatgtctgagctcaagattatgacgcacctggggcctcacctgaatatcgtgaacctgcttggcgcatgtacaaaaagtggccctatatacatcattacggaatactgcttttacggcgatcttgtcaattacttacataagaatagggactcattcctgagtcaccatcctgagaaacctaaaaaagaactggacatttttggtctgaaccccgctgatgagtccacaagatcttacgtcatcctttcatttgagaataatggggactatatggacatgaaacaggccgacaccactcaatacgtgccgatgctagagcgcaaggaggtttccaaatactcagacattcagcggtccctttacgaccgcccagcctcatacaaaaaaaagtctatgcttgattcggaagtcaagaatctcctcagtgatgacaacagtgaaggactgacactccttgacttgttgtcattcacctaccaagtggctcggggtatggagtttctcgcctctaaaaactgcgttcaccgcgatctggccgctaggaacgttctgctcgcacaaggcaaaattgttaagatctgtgattttgggttagcccgagatattatgcatgatagtaactacgtttcaaagggttctacgtttctcccagtgaagtggatggcgcctgaatctattttcgataacctctatacgactctgtcggatgtgtggtcctatggcattttactgtgggagatcttctccctcggaggtacgccttatcccggaatgatggtggactcaacgttttacaacaagatcaaaagcggttacaggatggcaaagcccgatcacgctacctctgaggtctatgagatcatggtcaaatgctggaactctgagcccgaaaaacgtccttcattctaccatctatccgaaattgtggagaatcttctcccgggacagtacaaaaagtcttatgaaaagatccatctggattttctgaaatctgaccacccggcagtggcacggatgcgcgtggacagcgacaatgcttacatcggtgtaacctacaagaacgaagaagataaactaaaggattgggagggcggtttggatgaacagaggctctctgcggactctggctacatcatccccctccctgacattgacccagtacccgaggaggaggatctgggaaagcgaaaccgccattctagtcagacgagcgaggagtctgcaattgaaaccgggtcctcctcctccacttttataaagagagaagatgaaactatcgaggacatcgatatgatggacgacatcgggatagatagctctgacctggtggaagatagtttcctgtag

SEQ ID NO: 30155 - DNA, 480 bp, synthetic construct
  misc_feature 1..480: note = Description of Artificial Sequence: Synthetic coding sequence
  source 1..480: mol_type = other DNA
atggggacttctcaccctgcatttttagtgctcggctgcctgctcaccggcctttccctcatattgtgccagttgagtcttccttctattctcccgaacgagaacgaaaaggtcgtgcagttgaattcttccttttccttgagatgctttggagagtccgaggtgtcctggcagtaccctatgtcagaagaggagtctagtgacgtggaaatacggaacgaggaaaataactctggactgtttgtaaccgttctggaggtgtctagcgcatctgcagcacatacgggactttacacatgttactacaatcacacccagacagaagagaatgaactggaaggtagacacatctatatttacgtgcccgatccagacgtagcatttgttcctttgggcatgactgattaccttgtcatcgtggaggacgatgattcagccattataccttgtcggacaacagaccctgagacacctgtgtag

SEQ ID NO: 30156 - DNA, 477 bp, synthetic construct
  misc_feature 1..477: note = Description of Artificial Sequence: Synthetic coding sequence
  source 1..477: mol_type = other DNA
atggggacatcacaccccgcattcctggtccttggatgcctgctaactggcctgtcacttatcttgtgccagctgtctttgccatctatcctgcccaacgaaaatgagaaggtggtgcaactgaattcgtcgtttagcctgaggtgtttcggcgaatcggaagtgagttggcagtacccaatgtccgaagaggaatcttctgacgtggagatcagaaacgaagaaaataactctggtctgttcgttaccgtgctggaggtgtctagcgcttctgcggctcacaccgggttgtacacctgctactacaaccacactcaaactgaggaaaacgagctggaggggagacatatttacatttatgtccccgacccagatgtcgcttttgtcccactcggaatgaccgactacctggtgattgttgaggatgatgattctgccattattccttgcagaacaactgatcctgagactccttag

SEQ ID NO: 30157 - DNA, 657 bp, synthetic construct
  misc_feature 1..657: note = Description of Artificial Sequence: Synthetic coding sequence
  source 1..657: mol_type = other DNA
atggggacctctcatcctgccttcctggtgctcgggtgcctcctcaccggtcttagcctgattctctgccagctttctctgccctctattctcccgaatgagaatgaaaaagttgtacagctgaacagctcttttagtttacgctgcttcggggaatctgaagtgagttggcagtacccaatgagtgaggaagagtcctcagacgtagagattcggaatgaagaaaacaacagcggcctatttgtgactgtcctggaggtgagtagtgcatccgctgcccacaccggcttatacacatgttactataatcacacccagactgaagaaaacgaactggaaggcagacacatctatatctacgtgcccgatcctgacgttgctttcgtacccttaggtatgaccgattacctggtcatagttgaagacgacgactcagcgattatcccttgccgaactactgatccagaaacacctgtcacgctgcataattccgagggggttgtgccagcctcctatgattctcgccaggggttcaatggcacattcacagtggggccttacatctgtgaggctacagtgaaagggaagaagtttcagactatccctttcaacgtgtatgcactcaaaggcacgtgcatcatttcgtttctgctctag

SEQ ID NO: 30158 - DNA, 465 bp, synthetic construct
  misc_feature 1..465: note = Description of Artificial Sequence: Synthetic coding sequence
  source 1..465: mol_type = other DNA
atgggcactagccatccagccttcctggtgctcggctgtctgctcaccgggctgtccctcattctgtgccagctatcccttccaagcatactgcccaacgagaatgaaaaagttgttcaactgaacagtagtttttccctgcgctgtttcggtgagagcgaagttagctggcagtaccccatgtcagaagaggagtcctccgacgtggaaatacgcaacgaggagaacaattcgggcctgttcgtgactgtccttgaggtgtcctccgcatcagcggctcacactgggctttacacatgctattataatcatactcaaactgaagaaaacgagctagaggggcgtcacatttacatctacgtgcccgacccagatgtggcgtttgtgcctctggggatgaccgattatctggttattgtagaggacgacgatagcgccatcattccctgcagaaccaccgactag

SEQ ID NO: 30159 - DNA, 3321 bp, synthetic construct
  misc_feature 1..3321: note = Description of Artificial Sequence: Synthetic coding sequence
  source 1..3321: mol_type = other DNA
atgcggcttcctggcgcaatgcctgcactcgctttgaagggagagctattgctattatccttgctgctcctgctcgagccgcagatcagccagggattggttgttacacctcctggcccagagctggtgctcaatgtgagctctaccttcgtgttaacgtgttcaggctccgccccagtggtgtgggaacggatgagccaggaaccacctcaggaaatggccaaggctcaggacggaacgttttcctctgttctgaccctgaccaacttgactgggctcgacacaggagaatacttctgtacacataacgatagtcgagggctggagacggacgaaagaaaacgcctgtacattttcgtcccagaccccactgtaggatttttaccgaacgatgcagaagaattattcatttttctgaccgaaattacggaaattacgattccttgccgggttactgatccacaactcgttgtcacactgcacgaaaaaaaaggcgatgttgctttgcccgtgccctacgaccatcagagaggcttttcaggtatctttgaggatcgatcctacatttgtaaaacaaccattggtgatcgggaagttgactcggacgcgtactatgtgtaccgtctgcaagtctccagtattaatgtttccgtgaatgcagttcaaaccgtggtcagacaaggggaaaatatcaccttaatgtgcatcgtgattggcaatgaagtcgtcaacttcgagtggacctatcctcggaaggaatcaggtcgcctcgttgagcccgtgaccgactttctgctggacatgccctaccacatccgaagtatcctccacatccccagcgcagagctggaggactccggaacatacacgtgcaacgtcacagaatctgtgaacgatcatcaggacgaaaaagcaattaacattacagtggtggaaagtggctacgtcagattactgggagaagtcggcacactgcagttcgcagaactgcacaggagtcggacactccaggtagtgtttgaagcatatccacccccaactgtgctatggttcaaggacaaccgcaccctcggagactcatccgccggtgagatcgccctttcgacccgcaatgtgtctgaaacccgctacgtaagcgagttaaccctcgtccgagtgaaggtggcagaagcaggacattataccatgagggcattccatgaagatgctgaagttcagttatcatttcagctccaaattaatgtgcccgtgcgggtgcttgaactttccgaaagccacccagacagtggagaacagactgtgaggtgccgaggaagaggaatgccccagccgaacatcatatggagcgcctgccgtgatttaaaaagatgccctcgggagcttccgccaactctgctcggcaatagttctgaggaagagagccaattggaaaccaatgtgacatattgggaggaagagcaggagttcgaggtcgtgtccaccctgcgccttcagcacgtagatcgtcctctgtcagtgcgctgcaccctgcgtaacgcagtcgggcaggacacgcaggaagttattgttgtcccccactctctcccttttaaggtcgtcgtgatcagtgccatactcgccctggtggtactcacgatcatcagtttgataatcctgatcatgttatggcagaaaaagccaaggtacgagataaggtggaaagtgatcgagtcggtgtccagtgatgggcacgagtatatctatgtagacccgatgcagctgccatatgactctacatgggagctgccacgagaccagttggtgctgggcagaactctgggctctggtgctttcggccaggtagtcgaggccacggcacatggattgagccactcacaggcaaccatgaaggttgcggtcaaaatgttgaagtctacagctcgatccagcgagaaacaggcgctgatgtcagagctgaagattatgtcacacctcggccctcatctgaatgttgttaaccttctcggtgcctgcaccaagggaggacccatttatatcataacggagtactgcagatatggagatttggtggactatctacaccggaataagcatacctttctccagcatcactccgacaagagaagacctccttctgccgagctgtactccaatgcgctgccagtgggcctgcccttgcctagtcacgtgtcgctcacgggagaatccgacggtgggtacatggatatgagcaaagacgagtctgtcgattatgtgccaatgctggacatgaagggcgatgttaagtacgccgacatcgagtcttccaactatatggccccatatgataactacgtgcccagcgccccagaacgcacatgtcgggcaaccctgataaacgaatctcccgtgttgtcctatatggacctggtgggcttctcttatcaggtggctaatggaatggagtttcttgcctccaagaactgtgtccatagggaccttgcggctaggaacgtgttgatctgtgaggggaaactcgtgaagatctgtgactttgggctagctcgggacataatgcgggacagtaactatatatccaaaggttctacctttctgccacttaagtggatggccccagagtcgatctttaacagcctgtatactacactctccgatgtttggtcctttggtatccttctgtgggaaattttcactctgggagggacaccctatcctgagctacccatgaacgagcagttttataacgctataaaacggggttacaggatggcgcagccagctcatgcctctgatgagatctacgagattatgcagaagtgttgggaggagaaattcgagattcggcctccatttagccaactggtactgctcctcgaaagactgctgggggaaggatacaagaaaaagtaccaacaggtcgatgaggagtttctccgctctgaccacccagccattctgcgttcacaggcgcgtctccccggttttcatggtcttagatcgcctctagatacaagcagtgtactatacactgcggtgcaaccaaatgagggcgacaatgactacattatccccttgcctgatcccaagccagaagtggcggatgagggccctctggagggatctccgagcctggcaagtagcacactaaacgaggttaatacctcgagcaccattagctgtgacagcccactggagccccaagacgagcccgaaccggaaccccagctggagctgcaggtagaaccagagccggaattggaacagttacccgatagtggatgccccgcacctagagcagaggcagaagatagttttttgtag

SEQ ID NO: 30160 - DNA, 525 bp, synthetic construct
  misc_feature 1..525: note = Description of Artificial Sequence: Synthetic coding sequence
  source 1..525: mol_type = other DNA
atgaggctacctggagccatgcccgctttagcattgaaaggtgagcttctgctgctgtccctgctgttgctgttggagccccagatcagtcagggcctggtggttacccccccaggcccagaactggtgctgaacgtaagttctaccttcgttctcacctgcagtggaagtgcccctgtggtgtgggaaaggatgtcacaggagcccccacaggaaatggctaaggcccaggacgggaccttttcaagcgtgctgacgttgactaatctcacaggcctcgatacaggagaatacttctgcacacacaatgactctaggggtctggagacagacgagcggaagaggttgtatatttttgtgcccgatccaactgtggggttcttgccaaacgacgctgaggagctgttcatatttttaaccgagattacagagattactattccgtgtagagtgacggacccacaattagtggttacactgcatgaaaagaagggagatgtcgcgctccccgtgccgtatgattag

SEQ ID NO: 30161 - DNA, 2331 bp, synthetic construct
  misc_feature 1..2331: note = Description of Artificial Sequence: Synthetic coding sequence
  source 1..2331: mol_type = other DNA
gctgccagcgagccagatacggccggatctgtgcgcggtttacccacagctcattgtcctgtggtcgataatcggaccctaggtgacagcagtgccggagagattgctttgtccacacgtaacgtttcagagacacgctacgtgtccgagttaaccctcgtgcgcgtgaaagttgccgaggcaggccactacaccatgagagccttccacgaggatgcagaagtccagctcagcttccagctgcagatcaatgttcccgtgcgtgtcctggagctttctgaatcccaccccgactcgggggaacagacggtgcggtgccgcggtcgtggcatgcctcagcctaacatcatctggagcgcctgccgggatctgaaacgatgtcccagagagcttcccccaactctcttgggtaactccagtgaggaggaatctcagctggagactaacgtcacatactgggaggaagagcaggaattcgaggtggtgtccacacttcgccttcagcatgtcgaccgtccccttagtgtgcgatgtacattgagaaacgccgtcggccaggatacacaggaagtcatagtcgtgcctcactctctcccgtttaaggttgttgtgatcagcgccattctcgcgcttgtggtcttaactattataagcctgattatactgatcatgctgtggcagaagaagccacgctacgaaatacggtggaaagtgattgaatcagtgtcaagcgacgggcatgaatacatttacgtagacccaatgcagctgccctatgactccacatgggagctccccagagaccagctggtcctgggtagaaccctaggcagcggtgctttcggacaggttgttgaggctacagcgcacggcctgtctcacagccaagctaccatgaaggtagccgtaaagatgcttaaaagtacggctaggtctagcgagaaacaggccctcatgtccgagctcaagataatgtcacatttaggaccccatctgaacgtggtcaatctcttgggagcctgcactaagggaggcccaatctatattatcacagagtattgtaggtatggcgacttagtcgattacctgcatcgcaataagcacaccttcctccagcatcattcagacaaacgacgcccaccgagcgctgaactctactctaacgctttgcccgtcggcctccccctgcccagccatgtttcgctaaccggcgaaagcgatggtggctatatggatatgtctaaggacgagtccgtggactacgttcccatgctggatatgaagggggacgtaaagtacgctgatatcgagagttctaattacatggctccctacgacaactacgtgccgtcagctcctgaacgcacatgtagggccacgctgatcaacgagagtcccgtgcttagctacatggacttggtgggattctcctaccaagtagctaacggcatggagttcctggcctcaaaaaattgtgtgcacagggatcttgctgctcgcaatgtcctgatctgcgaagggaagctggtgaagatctgcgatttcggcttggcacgcgacattatgcgggacagcaattatatttcaaagggaagtacctttctgcctttaaagtggatggccccagaatctatattcaacagcttgtacaccaccctgtcggatgtgtggtcttttggcattctgctatgggagatcttcaccctgggcggaaccccctaccccgagctgcccatgaatgaacagttctataatgcaattaaacggggttatagaatggcccagccagctcacgcctctgacgaaatctatgaaatcatgcaaaagtgctgggaagagaaattcgaaatcaggccccctttctctcaacttgtgctgctactcgagagactcttaggagagggatacaaaaagaaataccaacaggtcgatgaggaattcttacggtccgaccacccagcaatactcaggtcgcaggctcgccttcctggattccatggacttaggagccctctcgatacttcttctgttctgtacacagcagtacagccaaatgaaggagacaacgattacattatccccctccctgaccctaagcccgaggtggctgacgaaggaccattggaagggtccccttctctggcctcttctaccctgaacgaggttaatacaagctctactatcagctgtgacagcccactcgaaccacaggacgagcctgaacccgagccccagttggaactacaggtggagccagagccggagctagagcagctgcctgacagcgggtgtccagcccctagagcagaggcagaagacagcttcctgtag

SEQ ID NO: 30162 - DNA, 891 bp, synthetic construct
  misc_feature 1..891: note = Description of Artificial Sequence: Synthetic coding sequence
  source 1..891: mol_type = other DNA
atggggttatcacacagcaaaacccacctcagagtcataaaagtggctccactccagaataaggaggtcgaaactccttctgcaggacgcgtggattttgcatttaatcagaacctggaagagaagaccagctatagtttggccaggctgcaggatcagaacaaagcactggagggccagctgcctcccctgcaagagaactggtatggccgatattcaactgcatcacgcgatatgtacttcgatatccccctagagcaccgggagaccagcatcatcaaaaggcacccaccacaaagactgcagaagctggagccaatcgacttacctagggtgatcactagcggtaggttactcagccagagagaagctcggacaatgcacaaagcgaaacaagtcctcgaaaagaaaatgcagacccctatgtacacaagtgaaaatcgccagtacctgcataagatgcaagtcttggaaatgatcaggaagaggcaggaagctcagatggagttaaaaaaatcccttcacggtgaagcccgtattaataaacagtctcccagggaccacaaagccaagaaaacgcttcagagcacacctaggaatgacgatcacgacctgctgacaatgcttcccgacgagattctcaataggggcccaggcaactccaagaacaccgaattcctgaagcatcaggcagttaacaactactgtccatggaagatcgggaagatggagacctggttgcacgaacaggaagctcagggccagctcctctgggatagctccagttctgactctgacgagcaaggaaaagatgaaaaaaagcccagagctctggtacggacacggactgaacggatccctttgtttgacgagttctttgaccaggagtag

SEQ ID NO: 30163 - DNA, 1734 bp, synthetic construct
  misc_feature 1..1734: note = Description of Artificial Sequence: Synthetic coding sequence
  source 1..1734: mol_type = other DNA
atgcctgagggggcacaggggctgtcacttagcaaaccttcacccagtctgggatgtggccgaagaggagaagtctgcgactgtggcaccgtatgtgaaacccggacggctcccgctgcgcctaccatggcatcaccccgagggtctggtagctccacaagcctgagtacagtaggcagtgagggggacccagcgcctggaccgaccccagcatgctctgccagccgccctgagcccctacccggaccccctattcgactgcatctgtcacccgttggcattcctggctcggcccgacccagcagattggaaagagttgcacgcgaaatcgtggagactgaacgcgcttatgtaagggatctgcgctctatcgtggaagattatctcggtcctctgctggacggcggagtgctgggcttgagtgtggaacaggtgggaactctgttcgcgaacattgaggacatctacgagttctccagcgaactcctcgaagatctggagaatagcagctcggcaggcggaattgccgagtgcttcgtgcagagatctgaggatttcgacatctacaccttgtactgcatgaattatccttcgtccctggctctgttgcgagagctgagtctaagtcccccagccgcactgtggttgcaggaacgccaggcccaactgcgccacagcctgcctctccaaagctttctgttgaaaccagtgcaacgaatcctgaagtaccatctgctgctgcaagaattaggcaagcactgggccgagggcccagggactgggggacgcgaaatggtggaggaggccatcgtgagtatgactgccgttgcttggtacataaacgatatgaaacggaaacaggagcatgcagcccgtctccaggaagtgcagaggcgcttaggtggctggaccggccctgagctctccgccttcggggagctggtgttggaaggagcctttcgcggtgggggagggggaggacccaggctgaggggcggagagaggttactgtttctcttttcacggatgcttttggtcgccaagcgaaggggactggaatacacctacaaagggcacatattctgttgtaacctgtccgtatcggagtcgcccagagaccctctgggctttaaggtatcagatctgactattcctaaacatcggcacttgctgcaggccaagaatcaggaagaaaaaagattgtggatccactgtctccagcggttgttcttcgaaaaccacccagcctcaatcccagctaaagcaaaacaggtcctgctggaaaacagtctgcactgtgccccaaaaagtaagccagtgctggagcccctcacacccccactgggttctccacgcccacgggacgcacgctcttttacccccggaaggagaaatacagcgccatctccaggcccatcggtgataaggcgcggaagaaggcaaagcgaaccagtgaaggacccttatgtgatgttcccgcaaaatgccaaacccggttttaagcacgcaggctctgagggcgagttatacccgcctgaaagccagccccctgtcagcggatccgcccctcctgaggatctcgaagacgcgggaccccctactctcgacccttcgggcacatcaatcacggaagaaatattagaacttctgaatcaaaggggcctacgggatcccggagaatctatgggcctgcaccgggcacagggcgctcctgatgcgccattccatatgtag

SEQ ID NO: 30164 - DNA, 4161 bp, synthetic construct
  misc_feature 1..4161: note = Description of Artificial Sequence: Synthetic coding sequence
  source 1..4161: mol_type = other DNA
atgcctgagggtgcacagggcctcagtttatctaagccaagtcccagcttgggttgcggaaggcgtggcgaagtgtgcgattgtgggaccgtttgcgaaaccaggactgctcctgctgcccctacaatggctagccctagggggtctggctccagcacctccttgtctacagttggaagtgaaggggaccccgcacctggcccaactccagcctgcagtgcgtcaagaccggaaccactcccgggaccacccattcgacttcatctgtcgcccgtgggcatccccggaagcgcgagacccagtaggcttgagcgagttgcaagggaaatcgttgaaaccgaacgcgcatatgtgcgcgacctgcggtctatagtggaggactacttgggaccactgttagacggaggagtgctaggcctgagtgtggagcaggtgggcaccctctttgccaatatcgaggacatttatgagttcagcagtgagctgctggaggacttggagaatagctcctccgctggcggaatcgcagagtgtttcgttcaacgatcagaggattttgacatctatacactctactgtatgaattacccttcctccctggccctcttaagggagctgtcactgtctcccccagcagccctgtggctccaagagcggcaggctcagttacgacactcattgccactccagagtttcttacttaagcctgtacagcggattctcaagtatcacctgctgcttcaagagctgggaaaacattgggccgagggtcccggtacggggggtcgcgagatggtggaagaggctatcgtatctatgaccgccgttgcgtggtatatcaacgatatgaaaagaaagcaggagcacgccgctcggctccaggaggtgcagcgtagacttggaggttggacaggccctgaactctccgctttcggggaactcgttctcgaaggcgctttcagaggaggtggtgggggtgggccaaggctgcgcggtggggaacgactactgtttttattcagccgcatgctcctggtggccaagaggagaggccttgagtatacatacaaagggcacattttttgttgtaatctctcggtgtccgagagcccaagggacccgcttggttttaaggtgagcgatttaaccataccaaaacacaggcacctgttacaggccaaaaatcaggaggaaaagcggctttggatccattgcctccaacggttgttcttcgaaaatcatccggcaagcatccccgcaaaagccaagcaagtcctgctggagaactcactgcattgcgcaccaaagagcaagccagtgttggaacctctgacaccaccactggggagccctcggcctagagatgccaggtctttcacccccggacggagaaatacggccccaagccccggaccttctgtgattagacgcggaaggcggcagtctgagcccgtgaaggatccttacgtaatgttccctcagaacgcaaagcctggcttcaagcatgccggaagtgagggggagctgtatccacctgagagccagccccctgtatcgggttccgcccctccagaggatctggaagacgccggaccccctaccttggacccaagcggaaccagtattacagaggagatcctagaactgctgaatcaaaggggtctgcgcgaccctggtccttccacccacgatattcccaagttcccaggcgattcccaggtgcctggggacagcgagacattgacatttcaggcacttccctcacgcgatagctccgaggaggaggaggaggaggaggagggactggaaatggatgagaggggaccttctccactccacgtcctggaaggcctggaatcatcaattgccgcagagatgccatccattccttgcctgacaaagatccccgacgtgcctaatcttcctgaaattccctctagatgtgagatccctgaagggtcccgcctccccagcctgagcgacataagcgacgttttcgaaatgccgtgtctacctgcaatcccatcagtcccaaacacaccgtctttgtccagcacacctactctgtcatgtgatagctggctacaggggccattacaagaaccggcagaagcccctgcgacccgccgagagcttttttcagggagcaatcctgggaagcttggtgagccaccgtcggggggaaaggccggtcctgaggaggacgaggagggtgtctcttttacagattttcagccccaagacgtcacccaacaccaagggtttcccgacgagctggcgttcaggtcttgctcggagatccggtcagcctggcaggccctggagcagggccagttggcacgcccaggcttccccgagccactgctcatcctcgaggattctgatctgggcggtgacagcgggtccgggaaggcaggcgcacctagctcagaaaggactgccagccgtgtgagggagttggccaggctctattcagagcggatccaacagatgcaacgagctgaaaccagggcctccgctaacgcacccagaaggaggcccagagttctcgcgcaaccgcagccctccccttgccttccgcaggagcaggcagagcccggtctgctgcctgccttcggccatgtgctggtatgcgagctggcattccccctcacgtgcgctcaggagtctgtgcccctgggtcccgcagtttgggttcaagccgctatcccactgtccaaacagggcggatcacctgacggccagggtttgcacgtgtcaaacctgcccaaacaggatctgcccggaatccacgtgagcgccgcaactctgttgcctgagcaaggtggatctagacacgtgcaggccccagccgctacccccctacctaaacaagagggacccctgcatctgcaagtgcctgctttgacaaccttctctgatcaagggcacccagagatccaagtgccagctactacccccctgcctgagcaccgctcccacatggtgataccggctcccagcactgcattctgtccagaacagggccactgtgccgacatccacgttcctactacccccgctctgcctaaagaaatatgctccgactttaccgtctccgtcacaacacccgtgcccaagcaggaggggcacctggatagcgagtctccaacgaatatacccctgacaaagcagggtggttcccgagacgttcaagggccagacccagtgtgtagccaaccaatacagccgctgtcttggcacggcagctccctggaccctcaagggcctggagatacactgcctccgctaccctgccacctgccagacttgcagattccaggaacctccccgctgcccgcacacggctcccacttagaccacagaattcctgccaacgcccctctctccttatcccaggaactgccagatactcaggttcctgccaccacgcctctgccattaccccaggtgttgactgacatctgggttcaggcactccctacttccccaaaacaggggagcttgcccgacatacagggcccagcagccgcacctcctctgcctgagccctcactgactgacacccaggtgcaaaaactcacaccatctctggaacagaagtccctcatagatgctcacgtacctgccgctacccccctccccgagcgcggaggaagtttagatatccaggggctgtccccaactcctgtgcaaactacaatggttctttccaaaccgggaggctccctggcctcacatgtggccaggctcgagtcctctgatctgacaccccctcactccccacctccctcctctagacagctcctagggcctaacgcagctgcactgagcaggtatctggccgcatcatacatcagccaaagcctcgctcgacgccagggacccggtggcggagcacctgccgcatctagagggagttggtcgagtgcccctaccagtcgagcttcctcaccaccccctcaacctcaaccccctcctccgcctgcgaggcgcctgtcctacgcaacaactgtcaatatccatgtcggcggtggcggtaggctgcgccctgccaaggcacaagtcagactcaatcaccccgctctgctggcatccacccaggaaagtatgggcctgcacagagcacagggcgcaccagacgcgcctttccacatgtag

SEQ ID NO: 30165 - DNA, 1734 bp, synthetic construct
  misc_feature 1..1734: note = Description of Artificial Sequence: Synthetic coding sequence
  source 1..1734: mol_type = other DNA
atgcccgagggtgcacagggcctgagcctgagcaaaccatctccgtcgcttggatgcggcaggagaggcgaggtttgcgattgtggaactgtctgcgaaacccgcaccgcccctgctgccccaacaatggctagcccaagagggtccggatcatcgacctctctaagcactgtggggtcagagggcgatcctgcccctggccctacaccagcctgttcagctagcaggcctgaaccactgcccggacctccgatccgtctccatctgtcacctgtggggattccaggctccgcaagacccagccggctggagcgcgtggctcgtgaaatcgtggagacggagcgcgcatacgtgcgcgacctgcgaagcatagtcgaagactaccttgggcctctcctcgatggcggagtgctgggcctcagcgtggaacaggtaggaactctctttgcaaatatcgaagacatctacgaattttcaagtgaacttttggaggaccttgagaatagcagttctgccggtggcatcgcagaatgctttgtacagcggtctgaagattttgatatctatactctgtactgtatgaactacccatcatcactggcccttctgcgggagctgagcctttccccacccgcagcactgtggctgcaagagcgccaggcacagttacgccatagtctcccacttcagtcctttttgcttaaaccagtgcaaagaattcttaagtaccacttgctcttacaggagttgggcaaacactgggccgagggaccgggtaccggcggtagagaaatggtcgaggaggccattgtatccatgactgccgttgcttggtatattaacgacatgaagcggaaacaggagcatgctgcgagactccaggaggtacagagaaggctaggaggatggaccggaccggagctttcagctttcggggagctggtgctggaaggcgcattccggggagggggagggggtggccctaggctgaggggtggcgagcgtctgctgtttctttttagtcgcatgcttctggtggccaagaggagggggcttgagtatacatataaaggacatatattctgttgtaacctctctgtgagtgaaagcccacgggaccccctcggctttaaggtgagtgacctaaccatacccaaacacaggcatctactgcaagccaaaaatcaggaggaaaaacgtctgtggatccattgtcttcagcggctgttctttgagaaccacccagcatctatcccagccaaagcgaaacaggtactcctcgagaatagtctacactgcgcacccaagtccaagcccgtgcttgagcccctcacacctcctctcggcagtcctagaccacgggacgcgaggtcgttcacccctggacggaggaacaccgccccatccccagggccttcagttatccgcaggggtagaagacagagtgaaccagtcaaagacccttatgtaatgtttccacagaacgcaaaacccggattcaaacatgctgggtctgagggagagctgtacccgccagaaagtcagcctcccgtatctgggtctgcccctcccgaggacctggaagacgccggaccgccaacactggacccatcaggtaccagcataactgaagaaatcctggagcttctgaaccaaagaggcctgagagatcccggtgaaagtatgggcttacaccgggctcagggagcccctgacgcgccatttcatatgtag

SEQ ID NO: 30166 - DNA, 4074 bp, synthetic construct
  misc_feature 1..4074: note = Description of Artificial Sequence: Synthetic coding sequence
  source 1..4074: mol_type = other DNA
atgccggaaggggctcaggggctcagcctgtcgaagcccagccctagtctgggttgcggaaggagaggcgaagtctgtgactgcggtaccgtctgcgagacacgtactgcacccgcagcaccaacaatggcctcacccagaggttcagggtctagtacctctcttagtactgtcgggtctgagggagaccctgctcccggacccacccctgcatgctcggccagtcgacctgagccactgcctggcccacccatccgactgcacctgtctccagtgggcattcctgggagcgcaaggccctcacgcctggagagagtggcacgtgagattgtggagaccgagcgcgcatacgtcagggatttaagatctattgtggaagactatctgggtcccttgctggacgggggtgtgctcggccttagtgtggagcaggtcgggacgttattcgctaatatcgaggacatttacgagttctccagcgagctgctggaggatctggaaaactcaagcagcgccggaggaatcgcagagtgctttgtgcaacggtcagaggactttgacatctacaccttgtactgcatgaattaccccagttctctagccctgttgcgggaactcagcttatcaccccctgctgccctgtggcttcaggaaaggcaagcccagctgcgccattccttgccactccagtctttcctactgaagcccgtgcagaggattctgaagtatcatcttctcctgcaggaattgggtaaacattgggctgaaggaccgggtactggtgggcgtgaaatggttgaggaggctatcgtgtccatgacggcggtggcatggtacattaacgatatgaaaaggaaacaggagcatgccgctcggctgcaggaggtacagcgacgactgggcggatggaccggcccagagctgagtgcttttggagaactggttctcgaaggcgcttttcgaggcggaggtggtggcggtccacggctacgtgggggtgagcgactcctctttctcttctcccgaatgcttcttgtggctaagagaagaggtctcgagtatacgtataaaggtcatatcttctgctgtaatcttagcgtatccgaaagtccacgagatcccctggggttcaaggtgagcgacctaaccatcccgaagcatcgtcatctgctccaggccaaaaaccaggaggaaaaacgactgtggatccactgcttacagcgattgtttttcgaaaaccatcccgcttctatcccagcaaaagccaaacaggtattacttgaaaattcgttacactgcgctccgaagagcaaaccagtgttggaaccgctcacaccgcctctgggttctcccagacccagagacgcacgttcctttactcccggtaggcggaacacagcgaaacctggcttcaagcacgcaggctctgagggggaattatatcccccagaatcccagccacctgtgagtggcagcgcccctcctgaagacttggaggacgcgggacccccaaccctggatccttctggaacttctattaccgaagaaatattggagctgctgaatcagagagggctgagggaccctggccctagtacccatgatataccgaagttccctggcgacagccaggtacccggagatagcgagacgctgaccttccaggcgctcccaagcagggacagttcagaggaagaagaagaggaagaggagggcctggagatggatgagcggggacctagcccactacacgtcctggagggtcttgagtcctcaatagccgcagagatgccttctattccctgtctgacaaaaatccctgacgtgccaaacctgccggagatcccctcaaggtgcgaaattccagagggctcccggctcccctccctgtcggacatatccgacgtgttcgaaatgccgtgtctacccgctatcccttccgtccccaacactcccagcttgagttccacacccaccctgagctgtgacagctggcttcagggcccattacaagagcccgcagaggctcctgctactaggagagaactgttttctggcagcaatcctgggaagttgggcgaacccccttcgggtggtaaagctggtcctgaggaggatgaggaaggagtctctttcacagacttccaaccgcaggatgtaacccagcaccagggcttcccggatgaattggcttttcgctcctgttccgaaatccgcagtgcatggcaagcactcgaacaggggcagctcgctcgtccaggatttcccgaaccactcctgatactggaggacagcgacctcggcggagacagtgggtctggcaaagcgggagccccatcatcggaacgcacagctagtagagtgcgcgagctagcaagactatattccgagagaattcagcaaatgcagcgagctgagacccgagcctctgcaaacgcaccaagaagacggcctcgcgtcctagctcagccacagcccagtccctgcttgccacaggaacaagcagaaccaggacttctccctgccttcggccatgtgcttgtctgcgagctggcctttcctctgacctgcgcacaggaatccgtgcctctcgggccagctgtatgggtgcaggccgcaattcctctgagtaagcagggaggctctcctgatggccaaggattgcatgtgtctaacctccccaaacaggacctgccgggtatccacgtaagcgctgctacgttgctccccgaacaggggggttcccgccatgtccaggctccggcagccactcccctccctaagcaggagggccctcttcatctgcaggtccctgcactcacaaccttttccgaccaagggcaccccgaaatccaggtgcccgctacaaccccccttcccgagcaccgctctcatatggtcatcccagcacccagcaccgcattctgcccagaacaggggcattgtgccgacatccatgtcccgaccacaccagcgctgcccaaggaaatatgctccgattttacggtgagcgtgaccacaccagtcccgaaacaggaaggccacctcgactcggaatcccccacgaacatcccactgaccaagcagggcggatcccgagatgtacaaggcccagatcctgtgtgctctcaaccaatacagccattaagctggcacggcagttcactcgaccctcaaggccctggcgacaccctcccacctctgccctgccaccttcctgatttacaaatacccggaacttcacctctccccgctcatgggtcccacctggaccaccggataccagcgaacgctcccttatccctgtctcaggaattgcctgatacacaggtgcctgcaaccaccccactgcctctcccacaagtgctcaccgatatatgggtccaagcgctgccaacatcccctaagcagggtagtttaccggatatacaggggccagcggcagcaccacccttgccagagccaagcctgacggatacccaggtccaaaagctcaccccgtccttggaacagaaatctctgattgacgctcacgtgcctgccgctacacctctcccagaacgagggggtagcctggacatacagggtctgagccccacccccgttcagactacaatggtactgtctaagccgggaggcagtcttgcaagccacgtagcacgtcttgaatcaagtgatcttactcctccccactccccgcctcctagcagcagacagctactgggacctaacgccgcagccttgtcaagatacctggccgcttcatacatctctcagagcttggcgagaagacagggccctggcggtggggctcctgccgcaagtcgaggctcttggtcgtccgctcccacctctagggcttcaagccctccaccccaaccacagccacccccacccccagccagaagacttagttacgccaccactgttaatatacacgtcggaggcggaggccgtctccggccagcgaaggctcaggttaggctcaaccaccccgctctcttggctagtacccaggaaagtatgggccttcacagggcccagggcgctccggacgccccatttcatatgtag

SEQ ID NO: 30167 - DNA, 597 bp, synthetic construct
  misc_feature 1..597: note = Description of Artificial Sequence: Synthetic coding sequence
  source 1..597: mol_type = other DNA
atgcctgagggagcccagggattgagtctgtccaagcctagtccgagtttgggctgcgggaggagaggggaggtgtgtgattgcggcacagtttgtgagacacggaccgcagcgccagccgcaccaactatggcctcaccaagaggctcaggatccagcaccagtctgagcacagtcgggtccgaaggagatcctgcaccaggccctactccggcttgtagcgcgagtcggccagagccactgcccggacccccaattcgtttacacctatcacctgtgggaatcccagggagcgcccgtccaagcagattagaaagggtggcacgcgaaatagtagagacagagcgggcatacgtgagagacctgagatccatcgtggaagactatctcggaccacttctggatggaggggttctcggtctatcagtggagcaagtgggcactctgttcgctaacattgaggatatctacgaatttagcagcgaattgctggaggatctggagaatagctcaagcgccggaggaatcgctgagtgctttgttcagcgctctgaagactttgacatatacaccctgtactgtatgaattacccttag

SEQ ID NO: 30168 - DNA, 3714 bp, synthetic construct
  misc_feature 1..3714: note = Description of Artificial Sequence: Synthetic coding sequence
  source 1..3714: mol_type = other DNA
atgcccgaaggcgcacagggcctgtctttgtccaagccaagtccctccctgggatgtggaagacggggtgaagtctgcgactgcggtacagtttgcgagacaaggactggcagtgctagacccagcaggctggagagggttgcccgtgagatcgtggagaccgagcgagcctacgtgagggacttaagatctatcgtggaagactacctgggccctctgctggacggaggggtgctgggattatctgttgaacaagtcggtacactgtttgctaatatagaggatatatacgagttcagttcagagttgctggaggaccttgagaactctagctccgcagggggaatcgctgaatgtttcgtgcagcgatcagaggactttgatatctacacactgtactgcatgaactacccaagctcactggccttgctgagggaattgagtctgtcccctcccgctgccctttggttgcaggaacgccaggcgcagctaaggcatagcctgccccttcagtcttttttgctcaagccggtccagcggatcctgaagtaccatctcctgttgcaggagctagggaagcactgggctgaaggcccaggtacagggggaagggagatggtggaagaggcaattgtctcaatgacagcagtggcctggtatatcaacgacatgaagcgaaaacaggaacacgctgctcgcctgcaggaagtccagagacggttaggtggctggactgggcctgaactatcagcctttggggaactggtgctggaaggcgcttttaggggaggcggaggaggaggacctagacttcgaggcggtgagaggctgcttttcctattctctagaatgctgctagtggctaaacgccgagggctggaatatacctacaagggtcacattttttgctgcaatctgtctgtgtctgaaagtccaagggatccgctgggctttaaggtaagcgacctaaccataccaaaacatcggcatttactgcaagccaaaaatcaggaggagaagagactgtggatccactgcctgcaacgcctattcttcgaaaatcatccagccagcatccctgctaaggcaaagcaagtcttgttagaaaactccctgcactgcgcacctaaatccaaacccgtgcttgagccactgacacccccactgggctctccaagaccccgagacgcccgttcctttacacctggcaggcggaatacagccccaagccctggcccttcagtgattaggagaggcaggagacaaagcgagccagtgaaggatccctatgtcatgtttccgcaaaatgctaaacctggcttcaagcatgctggatccgaaggagaactgtatccccctgagtcccagccgccagtgtcaggctcagccccacccgaggacctagaggacgccggtccaccgaccctcgacccatccggcacttcaatcacggaggagatcctagaactccttaatcagagaggcctccgggaccctggcccaagcacgcacgacatacccaaattccccggagattctcaggtaccaggagatagtgaaaccttgacctttcaggccctgccgagtagggacagttcggaggaggaagaggaagaggaagaggggctggagatggatgaacgcggaccttcacctctccacgtactcgaaggcttagagtccagcatcgcagccgagatgccatctatcccctgcctgacaaaaattcccgacgtgcctaatctccctgagatccccagtcggtgcgagatccccgaaggaagccgactcccaagtctgtctgacatatcagatgtgtttgaaatgccctgcctgcctgccattccttccgttcctaatactccttctctatcgtcaactccaacactctcctgcgatagttggcttcagggaccactgcaggaacctgcagaggcccctgccacccgtcgcgaactgtttagtggtagcaatcccggtaagctgggagaacccccaagtgggggtaaagcagggccagaggaggatgaggaaggagtcagcttcaccgattttcagccacaggatgtgacccagcaccagggtttccccgacgagctcgcgttccgctcttgcagcgagatcagatctgcctggcaggcactggaacagggccaactcgcgaggcccggatttcccgaaccgctcctcatcctggaggattccgaccttggcggagactcaggaagtggcaaggctggtgcaccctcttccgaacgcaccgcctcaagggtgcgtgagttggcgaggctgtattccgaaagaatccagcaaatgcaacgggctgaaacacgcgctagcgcaaatgctccccgacggagacccagggtcttggcacagccccagccatcaccatgcttgccccaggagcaagctgagccaggactcttacctgcctttggccacgtgctggtctgcgagttggcattccctctgacttgtgcccaggagtcagtacccctcgggccagcagtatgggtgcaggccgctatccctctgagcaagcaaggcggatcacccgacggacagggccttcatgtgtctaacctaccgaagcaggacctacccggaatacacgtctcggccgcaacactgcttccagagcaaggagggtctagacatgtgcaggctcctgccgcaactccactacccaagcaggagggtcctttacacctgcaggttcccgcactgaccaccttttctgatcagggtcaccctgagattcaggttcctgccactacccctcttcccgagcatcgcagccacatggtgattcctgccccaagcactgccttttgccctgagcagggccactgtgctgatattcatgttccaaccacacccgcactgcccaaagaaatttgctctgatttcactgtctctgtgactacccccgttcccaagcaagagggtcacttggatagcgagtctccaaccaatatcccgcttactaagcaaggagggtctagagacgtgcagggcccagacccagtgtgctcccaacctatacagcctctgtcttggcatggttcatctctcgatccacagggtcccggagacactttgccccctctgccttgtcacctcccagacctgcagattcctggtactagcccgctgcctgcacatggaagccacttggatcatcgaatcccagccaatgctcctctctcactctctcaggagctgccagatacacaggtcccagccacaacaccccttcctctgcctcaagtgttgaccgacatttgggtccaggcactgcccacttctccaaaacagggaagccttcctgacatccagggcccagcagctgccccaccgcttccagaacctagcctgacagatacccaggtgcaaaagctgactccgtccctcgagcagaaatccctgattgatgcccatgtcccggcagccactcctctgccagagaggggtggctctctggatatccaagggttgagccctacgcctgttcagacgaccatggttctgtcaaaaccagggggttcactcgcatcccatgtggctcgtaatctatgggctttcacagggcctagaggcctgctaatgccaccttcaacttgtgagcctggccatgaggcgtctcttaagcaggggttccagcccgatgccatcgatccacagaacctgacttggaagagcaggcattag

SEQ ID NO: 30169 - DNA, 1128 bp, synthetic construct
  misc_feature 1..1128: note = Description of Artificial Sequence: Synthetic coding sequence
  source 1..1128: mol_type = other DNA
atgatgaagaaaaataactctgcgaagcgtggccctcaagacgggaatcaacaacctgcgcctccagagaaggtgggttgggtgaggaagttctgtggcaaaggaatttttcgcgagatctggaaaaatcggtacgtagtactgaaaggagaccaactgtatatcagtgaaaaagaggtcaaggacgaaaagaatatccaagaggtttttgatctcagcgactatgaaaaatgtgaagagctgagaaaaagcaaatcaaggtccaagaaaaatcactcaaaatttacattagcacacagtaaacaacctggcaacaccgcaccaaatttgatatttctggccgtgtcccctgaggaaaaggaatcctggattaacgctctgaattccgccattacgcgagctaagaatcgtattttggatgaggcgtcgaccagcacctcggatggcatgcttacactggacctgatccaggaagaagatccaagccccgaggagcctacctcctgcgccgaatcctttagggttgatttagacaaaagcgtggctcagctggcgggttcgcggaggagggcggatagcgaccgcattcagccgtccgcggatagggcttcctctctttcaagaccctgggagaagaccgataagggagccacctacacaccacaggcgccaaaaaagcttacccccaccgaaaagggaaggtgcgcttccctggaagaaatattgagccagcgagatgccgcaagcgcacggaccctgcaactccgcgctgaagaaccgccaaccccagccctgcctaacccaggccagctgtcccgcatccaggacctggtggccaggaaactagaggaaactcaggagttattagccgaagtccagggcctgggagacgggaagagaaaggccaaagacccaccacgcagccctccagattcagagtccgaacaattgctcttggaaactgagcgccttctcggggaggcgtcatctaactggtcgcaggctaagagagtcctgcaggaggtccgcgagctgagagatctgtaccgccagatggatctgcagacccctgactctcacctgcggcaaacaacccctcattcccagtacaggaaaagtctcatgtag

SEQ ID NO: 30170 - DNA, 1230 bp, synthetic construct
  misc_feature 1..1230: note = Description of Artificial Sequence: Synthetic coding sequence
  source 1..1230: mol_type = other DNA
atgatgaagaagaataacagtgccaagcgtggaccccaggacggaaaccagcagcctgcccctccagaaaaggttggctgggtgaggaagttttgcgggaagggcatttttcgggaaatatggaaaaatcgctacgtggttctgaagggcgatcaattgtatatctccgaaaaagaggtgaaggacgagaaaaatattcaggaggtctttgacttgagcgactatgaaaaatgtgaggagcttaggaaatccaaaagcaggtccaaaaaaaatcactcaaaattcacgttagcccatagcaagcagccgggaaacacagcacctaatctgatattcctggcggtgagccccgaggagaaggagtcttggatcaatgccctcaactcagctattacccgtgcaaaaaacaggattctggacgaagtgacagttgaggaggatagctatcttgcacatcccacgcgagaccgggcaaagatacagcactctaggcgaccacccaccagaggtcatctgatggctgtggcctctacatccacatcagacggaatgctgactcttgatctgatccaggaagaagatcccagtcccgaggagccgaccagctgtgcagagtcatttagggttgacttggacaagagtgtggcgcagctagcagggtcccgcagaagggccgactctgacaggatacagccatcagccgatcgggctagttccctgagtcggccatgggagaaaaccgataagggcgctacatacacgccacaggcacccaagaaactgacgcctaccgaaaaggggaggtgcgcatctctggaggagattctgagccagcgcgacgctgccagtgcccgtacactgcagttacgcgctgaagaacctcctacacccgctctgcctaaccccggacagctatcacggatccaggacctcgtcgcgaggaagcttgaggagactcaggagttgctagcggaggttcagggtcttggtgacggcaagcgcaaagccaaggatccccctcggagcccgcctgacagcgagtccgagcagcttctgctggagaccgagcggttattgggggaggcaagttcaaactggtcccaggctaagcgagtgctacaggaggtgcgcgagctacgcgatttgtacaggcagatggatctccagacacccgactcccacctgcgccaaactacaccacactcacagtacaggaagtctctcatgtag

SEQ ID NO: 30171 - DNA, 681 bp, synthetic construct
  misc_feature 1..681: note = Description of Artificial Sequence: Synthetic coding sequence
  source 1..681: mol_type = other DNA
atgctgacactggacctcattcaggaagaagatccatcccctgaggagccaacaagctgtgcggaatccttcagggtcgatttggataagtctgtcgcacaacttgctgggagccgccgaagggctgatagcgaccggattcagcctagcgcagaccgcgcatcttcattaagtcgcccttgggaaaagactgataagggggcaacttacacccctcaggcacccaaaaaactgacccccacagaaaaaggacgctgtgcctccttagaagaaattttgtctcagagggatgctgctagcgctcgcaccttgcagctcagagccgaagaaccacctacgccagccctgccaaacccaggtcaactgtctcgcattcaggacctggtggccaggaaactggaagagacccaggaactgctcgcagaagtccagggattgggggacggcaagcgtaaggcgaaagatccgcctcggtcccccccagacagtgagagcgagcaattgctcctcgaaactgaaaggcttctgggggaagcatcatcaaactggagccaggctaaacgagtactgcaggaagttagggagctgcgagacctatacaggcaaatggacttacagacgccggattcacacttaagacaaactaccccccactcacaataccggaaatctcttatgtag

SEQ ID NO: 30172 - DNA, 675 bp, synthetic construct
  misc_feature 1..675: note = Description of Artificial Sequence: Synthetic coding sequence
  source 1..675: mol_type = other DNA
atgccatcaactctcccttcccccgaacctcggaccgtttcctggatgtcaacgtctctgcaggtgacagtggaggaagacagctatctcgcccacccaacccgcgatagagcaaagatacagcacagccgacgtcccccaactcgcggacatctgatggccgtcgcctccacctccacgtctgatggtatgttgactctcgacctcattcaggaggaggatccttctccagaggaacccactagctgcgcggaatcctttcgggtcgacctcgataagagcgttgctcaactggctggctcccgacggagggcagactccgatcgcattcagcccagcgctgacagggcctctagcctgtcaagaccgtgggagaagactgacaagggtgccacatacacaccccaagcccctaagaagctcaccccgacggagaagggcaggtgcgcaagtctagaagaaatactgagccaacgcgatgccgcaagcgcacggaccctgcagctacgagctgaggagccccctacacccgctctaccgaacccagggcagctgagcagaatccaggatctggtggctcgtaagctggaagaaacccaggagctgctcgctgaggtgcagggactcggcgacggcaaaagaaaggcgaaggatcctccacgcagccctccatag

SEQ ID NO: 30173 - DNA, 384 bp, synthetic construct
  misc_feature 1..384: note = Description of Artificial Sequence: Synthetic coding sequence
  source 1..384: mol_type = other DNA
atgactgcagcggcaacagccactgtcctgaaggagggcgtgttggagaagcggagcggaggcctgcttcagctctggaagaggaaacgatgcgtgctcaccgaaaggggtctccaactctttgaagccaagggcactgggggtcgcccaaaggaattgtcctttgcgcgaatcaaagcggttgaatgtgtggagagtacagggaggcacatttactttactctcgttaccgagggaggcggagaaatagacttcagatgcccgttagaagaccccggatggaacgcacagatcacccttggcctggtcaaattcaagaaccagcaggctatccagacggtacgcgctcggcagtctctgggcactgggaccctcgtcagctag

SEQ ID NO: 30174 - DNA, 384 bp, synthetic construct
  misc_feature 1..384: note = Description of Artificial Sequence: Synthetic coding sequence
  source 1..384: mol_type = other DNA
atgacggcagctgccaccgccactgtgctgaaagagggagtcctcgagaagagatcaggtggcctgctccagctatggaaaaggaaacgttgcgttctcaccgaacgcggactccagttatttgaagcgaaaggcacaggcggacggccaaaggaactgtcattcgcccgaatcaaggcagttgagtgtgtggaaagtaccgggaggcatatatactttaccttagtcacagaaggcggaggggaaatagacttccggtgccctctcgaagaccctggctggaatgcgcaaataaccctcggccttgtcaaatttaaaaatcagcaagccatccagaccgtgagggcacgccagtccctgggaacaggcaccttggtcagttag

SEQ ID NO: 30175 - DNA, 1710 bp, synthetic construct
  misc_feature 1..1710: note = Description of Artificial Sequence: Synthetic coding sequence
  source 1..1710: mol_type = other DNA
atgtctttcggcatccttaaaccagacttgcgtattgtgttcgttcacaacaaagcggtcatttggcagaagtcccgggtctcagatcataaaatggctctgatgtccgtcctgggcaccgcagtgatgaacaatatggagagcttccaatatcactctgaggagagtcagatctacctgagtggttttttgcctaaatgtgatgcggaccactcctttacgtctctgtctactcccgagagaagtttcatattcatcaattctagacctgtacaccagaaggatatactcaaactgatacgccatcactacaacctgaaatgcttaaaagaaagcacccgcctgtacccggtgttcttccttaagattgacgttcctaccgcagatgtggatgtgaacctcacgccagataagtctcaggttctgctgcagaacaaagaatcggtgctcatcgctctcgagaacttaatgaccacatgctacgggcctctgccctcaactaactcatatgaaaataacaaaaccgacgtaagcgcggcagatatagtgctgagtaaaaccgcggagaccgatgtgttgttcaataaagtggagtccagtggcaagaactactccaatgtggacacctcggtaatcccatttcagaatgacatgcataatgacgagtcagggaagaacacagatgactgtctcaaccatcagatatccatcggagacttcgggtatgggcattgcagtagcgagattagcaacattgacaaaaacaccaagaacgcctttcaagacatttccatgtctaacgtgagttgggaaaatagccagacagagtattctaagacttgtttcatttcttccgttaagcacacccagtctgagaatgggaacaaggaccacattgacgagtccggtgaaaacgaggaggaggctgggcttgagaattcatcagagataagtgcagatgaatggtcaagggggaacatcctcaaaaactctgttggcgagaacatcgaacccgtaaaaatcctcgtcccagagaagtcactgccttgcaaggtgagtaacaataattacccaattcccgagcagatgaacttaaatgaagacagttgcaacaaaaagtccaatgtgattgataataaatccggcaaagtcaccgcttatgatttgttgtccaatagggttattaagaagcccatgtctgcgtcagcactgttcgtgcaagatcataggcctcaatttctgattgagaaccctaagacttcactggaagatgccacactgcagatagaggagctgtggaagacgctcagtgaagaggaaaagctcaagtacgaagaaaaggccacaaaggatctcgagcgttataattctcagatgaagcgcgctatcgagcaggaaagtcaaatgagccttaaagatggtaggaaaaagatcaaaccaacttcagcgtggaacttagcacaaaaacacaagctgaagacttctctttctaaccagcctaagttggacgagctgcttcagagtcagatcgagaaaaggcgttcccagaacatcaagatggtgcagatacctttcagcatgaagaacttgaaaattaacttcaaaaagcagaacaaagttgatttggaggaaaaggacgagccctgtctcatccacaacctcagatttccagatgcttggctgatgacttccaagaccgagagcttctag

SEQ ID NO: 30176 - DNA, 2271 bp, synthetic construct
  misc_feature 1..2271: note = Description of Artificial Sequence: Synthetic coding sequence
  source 1..2271: mol_type = other DNA
atgtcctttgggatactcaagcctgatctgcggatcgtatttgtccacaataaagccgtgatatggcaaaaatcaagggtgagtgaccataagatggccctcatgtctgttcttggcaccgccgtgatgaataatatggagtcctttcaatatcacagcgaggagagccagatttacctctcgggcttcctgcccaaatgcgatgccgaccacagttttactagcctgagtacacctgagcgctccttcattttcatcaattcccgcccagtgcaccaaaaagacatattgaagttgattaggcatcattataacctcaaatgtctgaaggagtccactaggctctatcccgtgtttttcctcaaaattgacgtgcctacagccgacgttgatgttaacctcacgcctgacaagtctcaggtgctgctacaaaacaaagagtctgttctcattgccctggaaaatcttatgacaacctgctacggccctctgcccagcacaaacagttacgaaaataataaaacggatgtgagtgccgctgatatcgtgctctcaaagactgcggaaacggacgtgctctttaataaagtggagtcttccggcaaaaactattcaaacgtggataccagtgttatcccattccagaatgatatgcataacgacgagagcggcaagaacacggatgactgcctgaaccaccagataagcattggggatttcggctatggccattgctccagcgagatcagtaatatcgataaaaatactaaaaatgcttttcaggacatctcgatgagcaatgtgtcatgggaaaatagccagacggagtactcaaagacatgctttatctcctccgttaaacacacacagtctgagaatgggaataaagaccacatcgacgagagcggggagaacgaggaagaggcgggattggaaaattccagtgaaatttccgccgatgaatggagcagaggaaacatactcaagaacagcgtaggagaaaatatagagccggtgaagattctggtgcctgagaagtccctgccctgcaaggtttctaacaacaactaccccatccccgagcaaatgaatctgaacgaagatagttgtaataagaagtctaacgtgattgataacaagtctggaaaagtcacggcctatgacctgctttccaacagagtgattaaaaaaccaatgtctgctagtgcgttgtttgttcaggatcaccgtcctcagtttctgattgagaatcccaaaacctctctggaagatgccactctgcagattgaggagctatggaagaccctaagcgaggaggagaagctcaagtatgaggagaaagctacgaaagatctggagagatataatagccagatgaagagggccattgagcaggagtcacagatgtccttaaaggatggccgaaagaaaatcaagcctaccagcgcctggaacctggcccagaaacacaagctgaaaacttcacttagcaaccagcccaaactcgacgagctgctccaatctcagatcgaaaaacgacggtcccagaatattaagatggtccaaataccttttagcatgaagaatctaaagatcaacttcaagaaacagaataaagtggatttggaggagaaagatgagccttgccttatccacaatctccggttcccagacgcctggttgatgacatccaagaccgaagttatgctgctgaatccgtaccgcgttgaggaggcgctgctcttcaagcgcctgcttgagaaccacaagttgccggctgaacctctggaaaaaccaatcatgctgaccgaatcacttttcaatggctcccactacttagacgtcctgtataagatgaccgccgatgaccaaaggtatagcgggtcaacttatcttagcgatccgcgattgacggctaatgggtttaagataaagctgatccccggagtgagtatcaccgagaattatctggagattgaagggatggcgaattgcttacctttttatggagttgccgacctgaaggagatcctgaacgcaatcctgaacaggaatgctaaggaggtgtacgagtgcagacccaggaaagttatatcctatcttgaaggagaggctgtgaggctgagtcggcagctgcccatgtacttgtctaaagaggatatccaggacattatttataggatgaaacaccagtttggcaatgagatcaaagaatgcgtccacggcaggcccttctttcaccacctgacctacctgccagaaaccacctag

SEQ ID NO: 30177 - DNA, 222 bp, synthetic construct
  misc_feature 1..222: note = Description of Artificial Sequence: Synthetic coding sequence
  source 1..222: mol_type = other DNA
atgaaacagctgcccgcagcaaccgtgagactgctttcgagcagccagattataacatccgtggtaagcgtggtgaaggagttgatcgagaacagcctcgacgcaggtgccacaagcgtagatgtgaaacttgagaactacgggttcgacaagatcgaggtgagggacaatggggaaggcatcaaggccgttgacgcccctgtcatggctatgaagtactag

SEQ ID NO: 30178 - DNA, 585 bp, synthetic construct
  misc_feature 1..585: note = Description of Artificial Sequence: Synthetic coding sequence
  source 1..585: mol_type = other DNA
atgaagcagctgcctgcagcaactgtacgcttattaagctctagccaaatcatcaccagcgtggtctctgtcgtcaaggagctgatcgaaaactctcttgacgctggagctaccagtgtggatgtgaagctcgagaattacggtttcgataaaatagaggtgagagataatggtgaagggattaaagctgtggatgcccctgtaatggccatgaagtattatactagcaagatcaacagccacgaggatttagagaatctaacgacgtatggattccggggtgaggctctgggcagcatctgctgtattgccgaagtactgatcaccacaagaactgcagctgacaatttctctacccagtacgtcctagacgggtcaggccacatcctcagccagaaaccttctcacctgggacaggggacgactgtgaccgcactgcggctgtttaaaaacttaccagtccgcaagcagttctattccacagccaaaaagtgtaaggacgaaattaaaaaaatccaagatctgctcatgagcttcggcattctgaaacccgacctgcggattgtgttcgtacacaacaagtag

SEQ ID NO: 30179 - DNA, 2271 bp, synthetic construct
  misc_feature 1..2271: note = Description of Artificial Sequence: Synthetic coding sequence
  source 1..2271: mol_type = other DNA
atgagttttggaatcctcaagcccgatcttcggatcgtcttcgtgcacaacaaggcagtgatctggcagaaaagtagagtgtccgatcacaagatggcactcatgagcgtgctgggaacagcagtgatgaataatatggaatctttccagtaccacagtgaggagagccagatatacttgtcaggttttctcccgaagtgcgacgcggatcattcatttacgtctctgtctaccccagaaaggtccttcattttcatcaacagccgcccagtgcaccagaaggatatcctgaagctgatcagacatcactacaatctaaagtgcctgaaagaatcaactcggctctatcccgttttcttcctgaaaatagacgtccccacggccgacgtggatgtgaaccttacccccgataagagccaggttttgctccagaataaagaaagtgttctgatagcacttgaaaatctgatgacgacctgctacggtccattaccatccacaaattcgtacgagaacaacaagactgatgtctcagccgctgatatcgtattgagcaaaaccgccgagacagatgtgctgtttaacaaggtcgagtcgtccgggaagaactactccaatgtggatacgtctgtcattcccttccaaaatgatatgcataacgatgagagcggcaagaacacggatgactgcctgaaccaccaaatctccataggcgatttcggctatggtcattgtagttctgaaatcagcaacatagacaagaacactaaaaacgccttccaggacatttccatgtctaacgtctcttgggagaatagccagacagaatacagcaaaacgtgcttcatcagctctgtcaaacatacccagagtgagaatggcaacaaagaccatattgacgagtctggagagaacgaggaggaagccggactggaaaacagtagcgagatctccgccgatgagtggagcagggggaatatcctgaaaaattccgttggcgaaaacatcgagcctgtgaaaatcctggttcctgaaaagagtttgccgtgcaaggtctctaacaacaattatccaattcctgagcagatgaatctcaacgaggactcttgcaacaagaagtctaacgtgattgataacaaaagtggaaaggttaccgcttacgatctgctgtcaaatcgcgtgatcaaaaaacccatgagcgcatcagccctgttcgtccaagatcataggcctcagtttctgatcgagaatcccaaaaccagtctcgaggacgccaccctgcaaatcgaggagctgtggaagaccctgagcgaagaggagaagctgaaatacgaagaaaaggcaactaaagatctcgagagatataatagtcagatgaagagggcaatcgagcaggagagccagatgtctctgaaggacgggaggaagaagatcaaacctacaagcgcatggaacttggcccagaagcacaagctgaagacctcactttctaaccagcctaagctggatgagctgctgcagtcacagattgaaaagagacggagtcagaatatcaaaatggtgcagatccccttctctatgaagaacctgaagatcaatttcaaaaagcagaacaaggtggacttggaagaaaaggacgagccttgtctgattcacaacttgcgattcccagatgcttggcttatgacatcgaaaactgaagtgatgctccttaatccttaccgggtggaggaagcacttctttttaagcggctgctggagaaccacaaactccccgcagaaccgctggaaaagccaattatgctgaccgaatcactgttcaatggatcccactacctggatgtgctgtacaagatgaccgccgacgaccagcgctattccggctcaacttatctgagcgaccctcgccttaccgccaatggtttcaaaataaagcttattcctggcgtgtcaataaccgaaaattatctcgaaatcgaaggcatggcgaattgcttgcccttctacggcgttgccgaccttaaggaaatcctgaacgcaatcctcaaccggaatgctaaggaggtgtatgaatgtcgccctaggaaggtgatcagctaccttgaaggagaggctgttaggctcagtcggcagctccctatgtacctgagtaaggaggacatccaggacatcatatatagaatgaaacatcagttcggaaacgaaatcaaggaatgcgtgcacggtagaccctttttccatcatctgacctatctgcctgaaactacctag

SEQ ID NO: 30180 - DNA, 2799 bp, synthetic construct
  misc_feature 1..2799: note = Description of Artificial Sequence: Synthetic coding sequence
  source 1..2799: mol_type = other DNA
atgaagcagctgccagccgctactgttagattgttaagtagtagccagataattacatcagtcgtttccgtggtgaaggagctgatcgagaactccttggatgcaggagccacatccgtggacgttaagctggaaaactacggcttcgacaaaattgaggtcagagacaatggcgaaggaatcaaggctgtggatgcccctgtgatggctatgaaatattacacctccaagatcaatagccacgaggacctcgaaaacctcactacatatggctttcggggagaggctctgggcagtatttgctgtatcgctgaggtattgattaccacaaggacagccgctgacaatttctccacgcagtacgtattagacggctctggccacatcctgtcacagaagcctagccacctgggccaggggacaacagttaccgcactgcgcctgtttaaaaatctgccggttcgcaagcagttctacagtacagctaagaagtgcaaggacgagattaagaaaatccaagacctcttgatgagtttcgggatactcaaacccgacttgaggatcgtttttgtccataataaggcagtgatatggcaaaagagccgggtgagcgaccataaaatggctcttatgagtgtgttgggaactgccgtgatgaataacatggagagtttccaatatcactccgaagagagtcagatctatctgagcggattcttgccgaagtgcgatgctgaccattcattcacatctctatcgactcctgaacgttctttcatatttataaacagccgaccggtgcaccagaaggatatccttaagctgatcagacaccattataacctcaagtgcctgaaagagagtaccaggctgtatcctgtcttttttctgaaaatcgacgtccctaccgcagatgttgacgtgaatcttacacccgacaaaagtcaggtgttactacagaataaagagtcagttctgattgcactcgagaaccttatgaccacatgttacggacccctgccaagcactaacagctacgagaataataaaactgatgtgagcgccgctgacatagtgctgtcgaaaacggccgaaacggatgttctctttaataaggtggaaagtagcggcaagaattacagcaacgtggacaccagtgtgattccctttcagaatgacatgcacaacgacgaaagcggcaagaacaccgacgattgtctcaaccaccagatcagcatcggggattttgggtatgggcattgctcctcagagattagtaacatcgataaaaatacaaaaaacgcatttcaggatatctccatgagtaatgtaagttgggagaactcccagactgagtattctaaaacttgttttatatcatcagtaaagcacacgcagtccgagaacggtaataaggaccacatcgatgagtctggtgagaacgaagaagaggctggattagagaacagttctgaaatctcagcggacgagtggagcaggggtaacatactgaaaaattccgtaggcgaaaatatcgaaccagttaaaatcctggtgcctgagaaaagtctgccctgtaaagtcagcaataacaactacccaatccctgagcagatgaacctcaacgaggactcctgtaataagaaatccaacgtcattgataataagtccgggaaagtgacagcgtatgacctgctgtctaaccgcgttataaaaaagcctatgtctgcctccgcactatttgtgcaggatcatcggcctcagtttctgattgagaatcccaaaaccagtttggaggatgctacattgcagattgaggagctgtggaagacgctgagcgaggaggaaaaactgaaatacgaggagaaagcaaccaaggacttggagagatacaatagtcaaatgaagcgcgcaattgagcaggaaagccaaatgtccctgaaggatggtagaaaaaagattaagccgacatctgcttggaatttggcccagaaacataagttgaaaacctccttgagcaatcaacctaagctggacgaactccttcagtctcagatcgaaaaacgtaggtcccagaatatcaaaatggtccagatcccctttagtatgaagaatctgaaaatcaacttcaaaaaacagaataaagtcgatctagaggagaaggacgagccctgcctcattcataacctgcgctttcccgacgcatggcttatgaccagcaagaccgaagttatgctgctcaacccctatagggtggaggaggccctcctcttcaaacgactcctggagaaccacaaactgccagctgagcctttagagaagcccataatgctcacggaatctctgttcaatggcagccactatctcgatgttctttataaaatgacagccgatgatcagcggtacagcggtagcacctatctgtctgatcccaggctaactgcaaatggcttcaagataaagttaatccccggtgtgtccattacagagaactatctagagattgaggggatggccaactgtctgcccttctacggggtggccgacctgaaggaaatcctgaacgcaattctgaaccggaacgccaaagaagtttatgaatgccgaccaaggaaggttatttcttatctggagggcgaggccgttaggttatcccgccaactgcctatgtaccttagtaaggaggacattcaagacatcatctatcggatgaaacaccaatttggcaatgaaatcaaggagtgtgtccatggcagacctttttttcatcacctgacatatttgccagagacaacatag

SEQ ID NO: 30181 - DNA, 135 bp, synthetic construct
  misc_feature 1..135: note = Description of Artificial Sequence: Synthetic coding sequence
  source 1..135: mol_type = other DNA
atgaagcagctgccagccgcaacggttcgcctactgtcatccagccagatcatcacatctgttgtgtccgtggtgaaggaactcatagaaaacagtcttgatgcaggggctacgagtgtggatgtgaaactgtag

SEQ ID NO: 30182 - DNA, 2313 bp, synthetic construct
  misc_feature 1..2313: note = Description of Artificial Sequence: Synthetic coding sequence
  source 1..2313: mol_type = other DNA
atgaagcagctgcccgcagccaccgtgcgactcctgagctcaagtcagatcataacatcagtggtgagtgtcgtcaaggaactgattgagaacagtctcgatgccggagccacgagcgtggacgtcaaacttgaaaattacggatttgacaagattgaagtacgcgataacggagagggcatcaaagctgtcgatgcccctgtgatggccatgaagtactatacatccaaaatcaattctcacgaagacttggaaaaccttacaacatacggattccgaggcgaagcccttggatcgatctgctgtattgcggaggtgttgatcaccacccggacagcggcagataatttcagcacacagtacgtgttggacggctctggtcatattctttctcagaagccaagccacctcgggcagggtacaaccgtaaccgcccttaggttgtttaagaaccttccagtgcggaaacagttttattccacagccaagaagtgcaaagacgagataaagaaaatacaagacctgcttatgtcttttggcattctgaaaccagacctgcggatcgtctttgtgcacaataaagccgtgatttggcagaaatctcgcgtgagcgatcataaaatggcactgatgagcgttttaggaactgcggtgatgaacaatatggagagcttccaataccactctgaggagagtcagatttacttgagtggctttctgccaaagtgcgatgctgatcacagttttacatccctatctaccccagaacgttcgtttatcttcataaacagccgccctgtgcatcaaaaggacatccttaaattgattcgtcaccattataaccttaagtgtcttaaagagagcactcggctttacccagtcttttttctgaaaatcgacgtgccaacagctgacgtggacgtcaacctgacccccgataaatcacaggttttgttgcaaaacaaggaatctgttcttatcgcccttgagaatctgatgacaacctgttatgggcctctcccctctaccaacagctacgaaaacaacaaaactgatgtgtccgccgctgatatcgtcctgtctaaaaccgctgaaactgatgttctatttaacaaagtggagtcttccggcaaaaattacagcaacgtggacactagtgtcatcccgtttcagaacgacatgcataatgacgaatctggcaaaaacaccgacgattgtcttaaccatcagatttctatcggggactttgggtatggccactgttctagcgagatcagtaacatcgacaagaacacgaagaacgcattccaggatatcagcatgagcaacgtttcttgggagaacagtcagaccgaatacagcaagacatgtttcatcagctcagttaagcatacacagtccgaaaacggaaacaaggaccatatcgacgagtctggcgagaacgaggaggaagccggtttggagaattcttcagagatatctgcagacgagtggagtcgaggtaacattctcaagaattccgtgggagagaacattgaacctgtcaaaatactagtccctgagaaatcgcttccttgcaaagtgagcaacaacaattacccgattcctgagcagatgaacctaaacgaggacagttgtaacaagaaatccaacgttatagacaataagagcggaaaagtcacagcatacgacctcctgagtaaccgggtgataaagaagcctatgtctgcctccgcccttttcgtgcaggatcaccgccctcaatttttaatcgagaatcctaagacctctctggaggacgccacattacaaatcgaggagctttggaagactctgtcagaggaggagaagctgaacttattcaacgggtcgcactacttggatgtgctgtataaaatgacggcagacgaccaaaggtattccgggagtacatatttgagcgacccaaggctcaccgctaacggcttcaagattaagctgatcccaggtgtatccatcacagagaattacctggagattgaaggtatggccaactgcctgccattctacggggttgccgacttaaaggaaatccttaacgccatcttgaataggaatgctaaggaagtgtatgaatgccggccaagaaaggttatcagttatttggaaggggaagccgtaaggctgagccgccagctgcctatgtacctcagtaaagaggatattcaggacatcatttaccgaatgaaacaccagtttggaaacgagatcaaagagtgtgtccacggcagaccgttcttccaccacctcacgtacttacctgaaactacttag

SEQ ID NO: 30183 - DNA, 2682 bp, synthetic construct
  misc_feature 1..2682: note = Description of Artificial Sequence: Synthetic coding sequence
  source 1..2682: mol_type = other DNA
atgaagcagttgcctgccgcaaccgtgcggctgctctcatctagccagataataacatctgtggtctccgttgtgaaagagctgatcgaaaactcactggacgctggcgctacctccgtcgacgtcaagctggagaactatggattcgacaagattgaggtaagagacaatggtgaggggatcaaggcagtcgacgctcccgtcatggctatgaagtactatacatcaaagataaactctcatgaggacctcgagaatcttacaacctacggatttagaggcgaggcactgggatccatctgttgtatcgcagaagtcttgatcacgacgagaacagcggcagataacttctccacacagtacgtgctggacggatccggccatattctgtcccagaagccatctcaccttgggcagggaactaccgtcactgccctcaggctgttcaaaaatctgccagttagaaaacagttctattcgacagctaagaagtgcaaggatgaaattaaaaaaattcaagacctgctgatgtccttcggaatattgaagcccgatctgaggattgtgttcgtacacaacaaaatatatctgagtggcttcctgcctaagtgcgatgccgatcatagcttcacatctctgtctactcccgagcgtagttttatttttattaactccaggcccgtacatcagaaagatatcctgaaactaattaggcaccattataacctgaagtgtctcaaggaatcaactcgactgtatcccgtgttcttcctgaagattgatgtccccactgcagatgtggatgttaatctgacacccgacaagagccaggtgctgctgcagaataaggagagcgtgttgatcgccctggagaacctgatgaccacctgttacggacccttaccatcaaccaacagttacgaaaacaacaagacagacgtcagtgccgctgatattgtgctgtcaaagacagccgaaacggatgtactgtttaacaaggtcgaaagcagcggtaaaaactactccaacgtggacacttcagtgataccattccagaatgacatgcacaatgatgagtccggcaagaataccgacgattgcctgaatcaccagataagcattggggactttggatatggccactgctccagcgaaatcagcaacatcgacaaaaatacaaagaatgcctttcaggatattagcatgtcaaacgtgtcgtgggaaaatagccagacagagtactccaagacatgttttataagctctgtgaagcacacccagtccgagaacgggaataaggatcacattgatgaatccggtgagaatgaagaagaggccggactggagaactcttcagagatctccgctgatgaatggtctagaggtaatatattgaagaactcagtcggggagaacatagagccagtaaaaatcctcgtgccagaaaagtcattaccttgcaaggtgtctaataataattatcctatacccgaacagatgaacctaaacgaagactcttgcaataagaagagtaatgtgatcgataacaagtctgggaaagtgaccgcctacgacctgctgtctaatcgcgtgataaagaaacccatgtctgcctcagctttattcgtccaggaccatcggcctcagttcttaattgaaaacccgaagaccagcctggaggacgccacgctccagatcgaggagctctggaagaccctctctgaagaggaaaaacttaagtacgaggagaaagccaccaaggacctggagagatacaactcccagatgaagcgggcaatcgagcaagaatcacaaatgagcctcaaggatggccgtaagaaaatcaagcctacgagtgcttggaatctcgcacagaaacataagctgaagacaagcttatctaatcagccaaaattggatgaattactgcagtcgcaaatagaaaagcggagaagtcagaacatcaagatggtgcagattcccttttctatgaagaatctgaaaattaatttcaagaagcagaacaaggttgacctcgaggaaaaggatgaaccctgcctgatccataacttgcgattcccagacgcttggttaatgacaagcaaaacagaggtgatgttgctgaatccctatagagtggaggaagctctcctttttaaacgccttctggagaaccataaactccctgccgaacctctggagaagcccattatgttgacagagtctctgtttaacgggtcccactatctggatgtgttgtacaagatgacagctgacgatcagcgctactcaggttccacctatctgtctgaccccaggctcaccgccaatggcttcaagatcaagctgatccctggcgtgtctatcaccgaaaactacttagagatcgaagggatggccaattgtctcccgttctacggcgtcgctgatctgaaagagattcttaacgccatattgaacagaaacgccaaagaggtgtacgagtgccggccacgcaaagtgatttcctatctagaaggggaggccgtgcggctcagcaggcaactgcccatgtacttatcaaaagaagatatccaagatatcatctacaggatgaagcaccagttcggaaacgagataaaggaatgtgtgcatggcaggccattctttcaccatttaacctatctgccagagactacctag

SEQ ID NO: 30184 - DNA, 2589 bp, synthetic construct
  misc_feature 1..2589: note = Description of Artificial Sequence: Synthetic coding sequence
  source 1..2589: mol_type = other DNA
atggaaagggcggagtccagtagtacggaaccagccaaggccataaaacccatcgatagaaaatctgttcatcagatttgctcgggccaggtggtcttgtcactctctacagccgtcaaggagctggttgaaaacagtctggacgctggagcgaccaacatcgacctgaaacttaaggactacggggtggacctcattgaggtgagcgacaacggatgtggtgtcgaggaagaaaacttcgaggggctgacacttaaacaccataccagtaagattcaggagtttgcggacctcacacaggtggaaacatttgggttcaggggagaggccctctcttcactgtgtgcactttcagatgtaactatttcgacctgtcacgctagtgctaaagtggggacccggctcatgttcgatcacaacggcaaaattatacaaaaaacaccataccccagacctaggggaacgacagtgagcgtccaacaactgttctctaccctgccagtccgccataaagaatttcaaaggaacataaaaaaagaatacgcaaagatggtccaggtgcttcacgcctactgcatcatttccgccggtatcagagtgtcatgtaccaatcagctgggccaagggaagcgtcagccagtcgtgtgtacaggaggctctccaagcatcaaggagaacattggaagtgtcttcggacagaagcagctgcagtccctgattccatttgtgcagttacccccatcagatagtgtttgcgaagaatacggcctgagctgctccgatgccctgcacaatctcttctatatcagcgggttcatctcccagtgcacacacggagtggggaggtccagcacagaccgacaattttttttcattaatcgccgaccttgcgatcctgcaaaggtgtgccgattagtcaacgaggtctaccacatgtacaacagacaccagtatccctttgtggtcttgaatatttccgtagacagcgaatgcgtcgacattaacgtgacccctgataagcgccagatacttctgcaggaggagaagttgctgctcgcagtgctaaagacctctctcattggcatgttcgattcagacgtgaataagctgaacgtatcccagcagcctctgctcgacgtcgaggggaacttaatcaagatgcacgccgcagaccttgagaaacctatggtggagaagcaggaccaatcacctagcctgcgtaccggtgaagagaagaaagacgtgtccatatccaggctgcgcgaggccttttccttgcggcacacgacagaaaacaaaccacactcccctaagaccccagagccacgcaggtccccactgggccaaaaaagaggcatgcttagctctagtacgtctggtgccatcagtgacaagggcgttctcagaccacagaaagaggccgtcagttcatctcacggtcccagcgatcccactgatagagcagaggtcgagaaagacagcggtcatgggagtacctcggtggattcagaaggcttttccattccggatactggctcacactgttccagcgaatatgccgcttctagcccgggagacaggggatcccaggagcacgtagattctcaagaaaaggcacccaaaactgatgattcatttagcgacgttgactgtcattcaaatcaggaggacacaggatgtaagttcagggttctgcctcaaccgactaacctcgctacgcctaacaccaagcgcttcaaaaaagaagaaattttgtccagctcagacatctgtcagaaattggtgaatacgcaggatatgagcgcatctcaggttgacgtggccgttaaaattaacaagaaagttgttccactagacttttccatgagctccctggccaagcgcatcaaacagctccaccacgaggcccaacagtcagagggcgagcagaattaccgtaagttcagggcaaaaatctgtcccggagagaaccaggctgcggaagatgaactccgaaaggaaatttctaagactatgttcgctgagatggagatcataggacagttcaacctgggctttatcatcacaaagctgaatgaggatatatttattgtcgatcagcacgcgacggacgaaaagtataattttgagatgctgcagcagcataccgtgctacaaggccagagactaattgcccctcagaccctgaatctgacggctgtaaacgaggccgtccttattgaaaacctcgagatcttccggaagaacggctttgattttgtaatagacgaaaatgctccagtaaccgaacgcgcaaaactaatcagtctacctacaagtaaaaactggacttttggaccccaagatgtggacgagctcatatttatgctgagcgattcaccaggggttatgtgccgcccttcgcgggtcaaacagatgttcgccagtcgcgcttgtcgtaagtccgttatgattggtacggcactcaatacatcagaaatgaagaagctgataactcatatgggggagatggaccacccctggaactgtcctcatggacggccaactatgcgacatatcgcaaacctgggggtaatcagccagaattag

SEQ ID NO: 30185 - DNA, 1386 bp, synthetic construct
  misc_feature 1..1386: note = Description of Artificial Sequence: Synthetic coding sequence
  source 1..1386: mol_type = other DNA
atggaaagagccgagtctagcagcactgaaccagcaaaggctataaaacccatcgaccggaagtcagttcatcaaatctgctccggacaggtcgtactgagtcttagcacggcagtaaaggagctggtggaaaatagtcttgatgccggtgctaccaatatcgacctcaagctgaaagattacggtgtggatctcatcgaggtctccgataacggctgtggagtggaggaagagaatttcgagggtctgactctcaaacaccatacatcaaagatccaagaattcgctgacttgacccaggtggaaactttcgggttcagaggcgaagccttatcctcactgtgcgccttgtccgacgtgactatttctacctgtcatgcttccgctaaggtagggacccgcttaatgtttgatcataatggcaaaattatccaaaagaccccatatcccagaccaagaggcacaactgtgtccgtgcagcagctctttagcactctgcccgttcgacacaaggaattccagcggaacattaaaaaagagtacgctaaaatggtgcaggttctccatgcctattgcatcatcagcgctggaatccgagtcagctgtacgaatcagctcggtcaaggaaaacgccagcccgtcgtatgtaccgggggatcaccctcaatcaaagagaacattggctcagtgttcggccagaagcagctgcaatcgctgatcccatttgttcagctgcccccatctgactcggtgtgcgaagaatacggcctcagctgcagtgacgcccttcacaacctgttttataaaactatgtttgctgaaatggagataatcggacaatttaacttgggattcatcattaccaaactcaatgaggacatatttatcgtggatcagcacgcaacggacgaaaagtacaattttgaaatgttgcagcagcataccgtccttcaaggacagcggctgattgcaccccagacccttaaccttacagccgtgaacgaagccgtccttatcgaaaatctggagatctttagaaagaatggctttgattttgtaatcgacgaaaacgcaccagtcacagaacgtgctaagctcatcagtttgcccacctcgaaaaattggaccttcggccctcaagacgtggacgagcttatcttcatgctttccgacagtccaggggtgatgtgtcggccaagccgcgtcaaacaaatgttcgccagccgagcttgtcggaagagcgtgatgatagggaccgccctcaatacaagtgaaatgaagaaactcattacgcacatgggcgaaatggatcacccttggaattgcccccacgggagacctacaatgagacacatagctaacctgggggtgatttcacagaattag

SEQ ID NO: 30186 - DNA, 2448 bp, synthetic construct
  misc_feature 1..2448: note = Description of Artificial Sequence: Synthetic coding sequence
  source 1..2448: mol_type = other DNA
atggagcgggcagagtcttcaaggtctaagctaaaggactacggcgttgatctaattgaagtcagcgataacggctgtggagtcgaagaagagaactttgaaggactgaccctgaagcatcatacatcaaagattcaggagtttgcagatttgacccaggtcgaaacattcggctttcggggagaggccctgagtagtctctgcgctctgagtgatgtgactatttccacgtgccatgcctctgctaaagttggaacaaggctcatgttcgatcacaacgggaaaatcatacaaaaaacaccatacccacgtccacggggtacaaccgtgtccgtgcagcaactgttttccaccctccccgtcagacataaggagttccagaggaatattaagaaagaatacgcgaaaatggtgcaagtgctgcacgcgtattgtattatctctgctgggataagagtgagctgtacgaaccagttgggtcaggggaaaagacagcctgtcgtgtgtaccgggggaagtccttcaattaaggaaaatatcggaagcgtttttggccagaagcaactgcagtccctgatccctttcgttcagttgcccccaagtgacagtgtatgtgaggagtacggtctgtcctgctcggacgccctgcataatttgttttacatcagtggctttatctcccagtgcacgcatggggttggtagaagctccaccgatcgacagttcttctttattaacagaaggccctgcgatccagctaaggtatgtcgactagtgaacgaagtttaccatatgtacaatagacatcagtatccattcgtggttctgaacatcagcgtagactccgagtgcgtggatataaatgtgactcctgacaaacgccagatattattgcaagaggaaaaacttttacttgccgtactgaagacttccctgattggcatgttcgattccgacgttaacaaactgaatgtttcacaacagcccttgctggatgtggagggaaatttgataaaaatgcacgcagcggatctagagaagccaatggttgaaaaacaggatcaaagtccatccctgcggaccggcgaagaaaaaaaggacgtctcaataagtaggctgagagaggcgttcagtctgcggcataccaccgaaaataagccgcattcccccaaaacacccgagccccgaagatccccattggggcagaaacggggtatgcttagctcaagcaccagcggggctatctctgataaaggcgttttacggcctcagaaggaggccgtgtcatccagccacggaccctctgacccaacagatcgcgcagaggttgaaaaggattccggccacggtagcacttccgtcgattccgagggcttctcaataccagatactggctcgcattgttcttcagagtatgccgcttcttctccaggggacaggggctcccaggagcacgtcgattcccaggagaaagccccaaagacagatgattctttcagcgatgtggactgtcactctaaccaggaggacactggctgtaaattcagagtgttaccacagcccacaaacctcgcgaccccaaacactaaacgctttaaaaaagaggaaattttatctagctcggacatctgccagaagttggttaacacccaggacatgagcgccagtcaggtggatgtagctgttaagattaacaagaaggtcgtgcccctggacttttctatgagctcactcgccaaaaggatcaagcagctgcatcacgaagcacaacagagcgaaggagaacagaactataggaagtttcgtgcgaagatctgtcctggagaaaatcaggcagccgaagatgagttgagaaaggagatcagtaagacaatgtttgcagagatggagatcattggtcagttcaacctcggcttcatcataacaaaactcaacgaggacatattcatcgtcgatcagcacgctacggatgagaaatacaactttgaaatgctgcagcagcatacagtgctacagggacagcgcctgattgctccacagactctgaatttaaccgccgtaaacgaggcagtgctgatcgagaatctcgagatctttcgcaagaacggtttcgacttcgtcatcgacgaaaacgcaccagtgactgagcgggctaaattgatctcactacccacatccaaaaactggacttttggaccacaggatgttgatgagcttattttcatgcttagcgacagccccggagtgatgtgccggccttcacgcgtgaaacagatgtttgcatcccgcgcatgtcgaaaaagtgtgatgatcggaacggcactgaacacatcggaaatgaagaaactgatcactcatatgggggagatggaccatccctggaactgccctcatgggagacccacaatgcgtcatatcgctaacctgggcgtcatcagtcaaaactag

SEQ ID NO: 30187 - DNA, 1719 bp, synthetic construct
  misc_feature 1..1719: note = Description of Artificial Sequence: Synthetic coding sequence
  source 1..1719: mol_type = other DNA
atggagagagctgagtccagcagcactgaacccgcaaaagcgatcaaaccaatagaccgcaaaagcgtgcaccagatttgtagcgggcaggtggtgctgtcactgagcacagcggtgaaggagctagtggaaaattcattagacgccggtgctaccaacatcgacctgaagctgaaagattatggagtggatctgatagaagtgtctgacaatggctgcggggtcgaagaagagaatttcgagggtttgaccctcaagcaccacacatcaaaaatccaagagtttgctgatctcacccaggttgagacatttggctttcggggagaggcactaagctcgctctgtgctctttccgacgtgaccatctctacatgtcatgcctctgccaaagtgggaactcggctgatgttcgaccacaacgggaagataatccagaaaacaccttaccctcgtcctagagggacaaccgtaagcgtccaacagctgttctcaacccttcctgtgcggcacaaggagttccagcgaaacattaagaaagagtacgctaagatggtccaggtgctccacgcttactgcatcataagcgccggaatcagggtgtcctgcactaaccaacttggacagggtaaacgacagccggtggtgtgcacgggcggaagcccttctataaaggagaatattggaagtgttttcggacagaaacagctgcagtccttgataccattcgtgcagctgcccccaagcgactccgtttgcgaggaatacggactctcatgttccgatgctctacacaatctgttctacattagtgggttcatctcccagtgtactcacggggtggggagaagctccacagaccggcagtttttcttcataaacagaaggccctgcgaccccgctaaagtgtgccgtctcgttaacgaagtttaccacatgtacaacagacaccagtatccctttgtggttttaaacatttccgtggactccgaatgcgtagatattaatgtgaccccagacaagagacagattctgttgcaagaagagaagctcctgctcgcagtactgaagacaagcttgatagggatgttcgactctgatgttaacaaactgaacgtgagtcagcagccactcctggatgttgagggcaaccttattaagatgcacgctgccgacctggaaaaacctatggttgagaaacaggatcagtctccatctctgaggaccggcgaagaaaagaaagacgtcagcattagtagattgagggaagccttttctctgagacatacaacagagaacaagccccatagtcctaaaacacccgagcctagacggtcaccacttggccaaaaacgagggatgctgagttccagcacgtcaggcgcaataagcgacaagggcgtcctgcgcccacaaaaggaggctgtctcttcatcacatgggccaagtgatcccacagaccgtgctgaagtagaaaaagattctgggcacgggtccacctccgttgattcagagggttttagtatccccgacactggaagccactgtagcagtgagtatgccgcaagtagcccaggggatcgtggcagccaggaacacgtagatagccaggagaaggccccaaagacggacgacagcttttccgacgtcgattgccactctaatcaagaggatacaggcctgaaaacaggcccatctgaccccaggacttcaatgaactag

SEQ ID NO: 30188 - DNA, 2271 bp, synthetic construct
  misc_feature 1..2271: note = Description of Artificial Sequence: Synthetic coding sequence
  source 1..2271: mol_type = other DNA
atgtggggacgtcggagaaagctgagacggctgaacgacgtgaccatctcaacctgccatgcgtctgctaaggtgggcacgagacttatgtttgaccacaatggcaagatcattcagaaaactccatatcctaggcccaggggcaccacagtgagtgtgcaacagctgttctctactctgccggtcagacacaaagaatttcagcgcaacatcaaaaaggagtacgctaaaatggtgcaagttctccatgcttactgcattatctcggcaggtatcagagtgtcttgtacaaaccagctggggcagggtaaacgccagcctgtggtgtgtaccggagggtccccaagtatcaaggagaatatcgggagcgtttttggacagaagcaactccagtcgctgattccgtttgtgcagctcccgccatcagatagcgtgtgcgaagagtacggattaagctgcagcgatgctcttcacaatctgttttatatctcgggcttcatcagccaatgcacccatggggtcggtagaagttccaccgaccgtcagttttttttcattaatagaagaccttgtgatcctgctaaagtttgccggttggtcaatgaagtttatcatatgtataatcggcatcagtatccctttgttgtgctgaatatatcggttgacagcgagtgtgtggatatcaacgtgacccctgataagagacaaatactgcttcaggaggaaaaactgctgctggctgtgctgaaaacgtcattgatcgggatgtttgactctgacgttaataaactcaatgtgtcccagcagcctttgctggacgttgagggaaatctcattaaaatgcacgcggcagacctggagaaacctatggtggagaagcaggaccagtcccctagcttacgcactggggaagagaagaaggacgtatccatctctaggctgcgggaggcttttagtttgcgacataccactgagaataaaccccattcgcctaagacccccgagcctagaagatccccgcttgggcagaagcgcggaatgttgtcctcgagcacatccggggcaatcagcgataagggagttctcagaccacagaaggaagcagtgagttcatctcatggccctagcgatcctacagaccgcgcagaggtggagaaagattccggccacggctctacctcggtggatagcgaagggttctctatccctgacacaggatctcactgctcatccgaatacgcggcaagctcgcccggagataggggttcccaggagcacgtggatagccaggagaaggcgccaaagactgacgacagttttagcgacgtagactgccacagtaaccaggaagacacaggctgtaagtttagagtcttgccacaaccaaccaatctcgcaacccccaacactaagcgatttaaaaaagaagagatactgtcatctagcgacatatgccaaaagttggtcaacacccaggacatgtccgcgagccaagtggatgtcgctgtgaaaatcaataagaaggtcgtccctttggatttttcgatgtcgtcactggccaagcgcattaaacagctgcatcatgaagcgcagcaatcagaaggggaacagaactatcgaaaatttcgagctaaaatctgccctggagaaaatcaggccgcagaggacgaactacggaaagaaatatccaaaaccatgtttgccgagatggaaattataggacagttcaaccttgggttcataattacaaagctcaacgaggatatattcattgtcgatcagcacgccactgacgagaagtacaacttcgagatgcttcagcagcacactgtcctgcagggacaaaggcttattgcccctcagactctgaacctcacagcagtcaatgaggcggtccttattgaaaatcttgagatttttcgcaaaaatggctttgactttgtcatcgacgagaacgctccagtcacggagcgggctaagctcatctcactgcctacctctaaaaattggacctttggtcctcaagatgttgacgaactcattttcatgctctctgactccccgggtgttatgtgccggccaagtagggtaaagcagatgttcgcgtccagagcgtgcagaaagtctgtgatgatcggaacagctttgaacacctcagaaatgaaaaaactcatcacccacatgggagagatggaccatccctggaattgcccccacggacgtccgactatgaggcacatcgcgaatctgggtgtaatttcacagaactag

SEQ ID NO: 30189 - DNA, 1812 bp, synthetic construct
  misc_feature 1..1812: note = Description of Artificial Sequence: Synthetic coding sequence
  source 1..1812: mol_type = other DNA
atgtctgccgctgtgacagccggaaagctggcgagggcacccgcagaccctggtaaggccggagttcccggtgtggccgctccaggcgcacccgcagcagcccctcccgcaaaagaaatccccgaagtgctcgttgaccccaggtctaggagacgctatgtaagggggagatttctggggaaaggcggtttcgccaagtgttttgagatctcagatgccgatacaaaggaggtctttgctggcaaaattgtgccgaagagcttactactcaagccacaccagcgggaaaagatgtccatggaaatctctatccacagatcactggcccaccagcacgtggtcggattccatggcttttttgaagataacgactttgtgttcgttgtcctggagctctgccgcagaagatctctgctggagttacataaacggcgaaaggctcttaccgaacctgaagccagatactatttgagacagatcgttctgggatgccaatacctgcacagaaacagggtgatccacagagacctgaaactcggcaatctgttcctgaacgaagacctggaggttaagattggagactttggcctcgccactaaagttgagtatgacggagaaagaaagaagaccctatgtggtaccccaaactacattgctcccgaggtgttatctaagaagggacattccttcgaagttgacgtatggagcatcggatgcatcatgtacaccctgctagttgggaagccccctttcgagacctcctgccttaaggagacatatctgaggataaaaaagaacgagtacagtatccctaaacacatcaatccagtggcggcatcacttattcagaaaatgttgcagactgatccgaccgcacgccctaccattaatgagctgttaaatgacgaattcttcacaagcggatatattcccgcacggctcccaatcacatgtctgacaatcccaccacggttcagcatcgcaccctcctctcttgacccttccaacagaaaaccgctgacagttctcaacaagggcctggagaacccgctgcccgaacgccctagagagaaagaagaacccgtcgtgagggaaaccggagaagtggtggattgtcacttgtctgacatgctccagcagcttcactctgtcaatgctagtaaaccatcagaacggggactagtcaggcaagaagaggccgaggatcccgcatgcatccccatcttttgggtttccaagtgggtagattactccgacaagtatggcctagggtaccagctgtgcgacaattctgtgggggtgctcttcaacgactccactcgcctgatcctgtataacgatggagacagccttcagtacattgagcgggacgggaccgagtcctacctgaccgtgtcttcacaccctaattccctgatgaagaagatcactctgctcaagtactttcggaactacatgtctgagcacctcttgaaagccggtgctaacatcacaccccgagaaggcgacgagctagccaggctgccctatctgagaacctggttccggacccggtcagctataatcctgcatctaagtaatgggagcgtgcagataaacttctttcaggaccacacgaagttaattctatgtcctctgatggcagccgtcacttatatcgacgagaagcgggattttaggacatataggctgagcctgctggaggagtatggctgctgtaaggagttggcttcaagactaaggtacgcacggaccatggttgacaagctgttgagcagcagatctgcctccaataggctcaaagctagctag

SEQ ID NO: 30190 - DNA, 744 bp, synthetic construct
  misc_feature 1..744: note = Description of Artificial Sequence: Synthetic coding sequence
  source 1..744: mol_type = other DNA
atgtccgctgctgtgaccgccggaaaactggcacgtgctcctgccgatccaggaaaagctggagtgccgggagtggcggcacccggtgcgcctgcggctgccccacctgctaaggaaatacctgaagtgctggtggatcctcggtctcgcagacgatatgtgagaggaagattcctgggaaaagggggatttgccaagtgttttgaaatcagtgacgccgacacaaaagaggtgttcgccggaaagatcgtacccaaaagcctgctactcaagccccatcagcgagagaaaatgtccatggaaatctccattcacaggtctctggcccaccagcatgtggtcggattccatggcttctttgaggataatgattttgtgtttgtggtgttggagttgtgtcgaaggaggagtttattagagttgcacaagcgtcggaaagcactgaccgagcctgaggcccgttattacctccgacaaattgtacttggctgccagtatctgcatcgcaatcgggtaatacacagggacctgaagctgggaaacctgtttctgaacgaagacctggaggtgaaaataggagactttggtctagcaaccaaagtagaatatgacggcgaacgcaaaaagaccctctgcggcacgcccaattatattgcgccagcggtaccatgcctgcaatgtgctccccaacctcggtggcttgggagagcagcctcttctctccaagtcggagttgctgtttag

SEQ ID NO: 30191 - DNA, 1521 bp, synthetic construct
  misc_feature 1..1521: note = Description of Artificial Sequence: Synthetic coding sequence
  source 1..1521: mol_type = other DNA
atgtctatggagatttctatacacaggagcctggctcatcagcacgtggtgggcttccatggttttttcgaggacaatgactttgtctttgtagtcctggagctttgtcgcaggcggtccctcctcgaactgcacaagcgccgtaaagctttaacagagccagaagcccgatactacttgcgccaaatagtcttaggctgtcagtacctacatcggaacagggtgatccatcgagacctgaaattgggtaacctgttccttaatgaagacttggaagtgaaaatcggagattttgggctggcaaccaaggtggagtacgatggggagcgaaagaagacactgtgcggtacacccaattatatagcccctgaggtgctgagtaagaagggccattcattcgaggtggacgtctggagtatcggatgcataatgtacactcttctggttggcaaacctccttttgagacttcatgcctcaaggaaacttatcttaggatcaagaagaatgagtactcaatccccaagcacatcaatcctgtcgccgcttctttgatccagaagatgttgcagacagaccccaccgccagacctacaattaatgagcttcttaacgacgaattttttacatctggatatattccagcgaggcttccaatcacatgcttgaccatccccccacggttttctatcgctccctcgtcattagatcccagtaatcggaagccattgaccgttcttaacaagggacttgagaatccactgcctgagcgaccgagggagaaggaagagcccgtagtgcgggagacaggggaggtagtggattgccacctgtctgacatgctgcaacagcttcattcagtgaacgcctcaaaaccttccgagaggggactcgttcgacaggaggaggcagaggaccccgcttgtattcccatcttttgggtgagcaagtgggttgactatagcgacaaatatgggcttggatatcagctgtgtgacaattcagttggggtcctcttcaacgacagtacccggctgatcctgtataacgacggagactctctgcagtatatagagcgcgatggcactgagtcctatttaacggtgagcagccacccgaattctttgatgaagaaaatcacccttctaaaatacttcagaaattacatgagcgagcacctgttaaaggcaggggctaatatcaccccccgtgagggcgatgagcttgcaaggcttccgtatctcagaacatggtttaggactcggtctgctatcatcttgcacctctcaaatgggtccgtccagattaactttttccaggaccacaccaagcttatcctgtgcccactgatggcagcagtgacctatattgatgaaaagcgtgacttcaggacctatagactctctttactcgaagaatatggatgctgtaaggaattggccagtaggctgagatacgcgagaaccatggtcgataagctgttgagctcccggagcgcctccaacaggcttaaagcgagttag

SEQ ID NO: 30192 - DNA, 1941 bp, synthetic construct
  misc_feature 1..1941: note = Description of Artificial Sequence: Synthetic coding sequence
  source 1..1941: mol_type = other DNA
atggagcccgctgcaggattcttgtctccaagaccttttcagagagccgcagcagcacccgcaccacccgcaggcccaggcccacctccatccgcccttcggggtcccgaactggaaatgctggccggattaccaacatccgaccctggacgtttaatcacagacccccgaagcgggagaacatacttgaagggacgtctgctcgggaaaggaggttttgccagatgttacgaggctactgacacagagaccgggtcagcctatgctgtgaaagttatcccacagagtagagtggccaagccacatcagcgggagaagatcctgaacgaaattgagctgcaccgtgacctccagcaccgccacattgttcgattcagccatcattttgaggatgccgacaacatctacatctttttggagctgtgttcccggaagagtctcgctcacatttggaaagctcggcacactctcttggagcccgaggtgcgttattatctcaggcagatactgtcaggtctcaaatatctccaccagaggggaattctacatagggacctcaaattgggtaatttcttcataacagaaaatatggaactcaaagtcggagactttggcttggctgcaaggctcgaacccccagagcagcgcaagaaaaccatatgtggtacccctaactacgttgcacccgaggtgttgctacggcaaggacatggccctgaggccgatgtgtggagcctcggatgtgtaatgtacacgctgttgtgcggctcgccacccttcgagactgccgacttgaaagagacctatcgatgtatcaaacaggtgcattacacactacccgcatccctctctctgccagctcgccagctgttggccgcaatacttagagcgtcccctcgggatcggccatctatcgatcagatacttcggcacgactttttcactaaaggatatacgccagatagactacccattagtagttgcgtgacagtgcctgatttaacaccacccaatcccgctcggtctttatttgccaaggtgactaagagtctgttcggtcgcaaaaaaaagtctaaaaatcatgcacaggaaagggatgaggtgagtggcctcgtgagtggcctcatgcggacaagcgtgggtcaccaggatgccaggcccgaggctccggcagccagcggccctgcccctgtctctctggttgaaacagcacccgaagacagctccccccgaggaaccctcgcctcttccggcgatggcttcgaggagggactgacagttgcgacagtggtcgagtctgcactgtgtgccctgcgcaattgcatcgcctttatgcctccggctgaacaaaacccagcacctctagcacagccagagccactggtgtgggtcagcaaatgggtggactactcaaataaatttgggttcggctaccagctgtccagtcggagagttgccgtgcttttcaacgacggcactcacatggccctgagcgctaacagaaaaacagttcactacaatccgacaagcacaaagcattttagcttctctgtgggggctgtgcctagagcactgcaaccccagctgggaattctgcgttattttgcctcctacatggaacagcacctcatgaagggcggagacctgcctagcgtagaagaggtcgaagtgccagctccgcctctgcttctgcaatgggtgaaaactgaccaggccctcctaatgttgttttcagatggtactgtccaagtaaacttctacggtgaccatactaaactgattctgagtggatgggagccgctgctggtgacttttgtggcgagaaacagaagcgcttgcacctatttagcatcacaccttcgccagctggggtgtagccccgatctgagacagaggctaagatatgccttgcggcttctcagggaccggagcccagcgtag

SEQ ID NO: 30193 - DNA, 1866 bp, synthetic construct
  misc_feature 1..1866: note = Description of Artificial Sequence: Synthetic coding sequence
  source 1..1866: mol_type = other DNA
tctaggcagcggcacgcacggcctggtccaggcggtaccgagaaacccggaccaaggtgtgatgcccctgccgcttggtcactacctcccgtgtcgtgtctccggacatacctgaaggggcgactgctggggaagggaggctttgcacgttgttacgaggccacagatacagagactggctcggcatatgcagtcaaggtcataccccaaagccgagtcgcgaagccccatcagcgagagaagatactcaatgagatcgaactgcacagagacctccagcatcgacacatcgtgcggtttagtcaccatttcgaagacgccgataacatttacatcttcctggagctttgctcgcggaagtctcttgcccatatttggaaggcacggcacaccctgctggagccagaagtgcgttactacttgcgacagatattgtctggcctcaaatatcttcaccagaggggcatcttgcatcgcgatctcaaactgggcaactttttcatcactgaaaatatggaattgaaagtgggcgacttcggtttggccgctcgtctagagccgccagaacagcgaaagaagaccatctgtggaacgccgaactacgtagccccagaggttttgctgaggcagggacacgggcctgaggccgatgtatggtcgcttggctgcgtgatgtacactctgctctgtgggagccctccttttgaaacggcagatttgaaggaaacttaccggtgtattaaacaggtgcactacacactgcccgcatcactgtctctgccagcgaggcagcttctggcagctattctccgtgctagccctcgagataggcctagcattgatcagatactccgacacgatttttttaccaaagggtataccccagacaggctcccaataagtagttgcgtaacagtgcccgacctcacccctccgaatcccgctcgttctctgttcgccaaggtaaccaaatctctgttcggaagaaaaaagaagagtaagaaccatgcacaagagagggatgaggtcagcggactcgtgagtgggttgatgaggacaagcgtgggacaccaagatgctcgaccagaggctcccgcagctagtggaccggctccagtctctctggtggaaaccgctcccgaggacagtagtcctcgaggaactctcgcttcgtccggggacgggttcgaggagggactcacggtggccactgtcgttgagtctgcgctgtgtgcactgcgcaattgcatcgctttcatgcccccagctgagcagaatcctgctcctttagcacagccagagcctttggtctgggtaagtaaatgggtggactactctaataagtttgggttcgggtaccagttgtcaagtcgtcgcgtcgcagtgttattcaatgacggtacacatatggccctgagtgctaaccgcaaaaccgttcactacaaccccactagtactaaacacttttctttttcagttggggctgtgcccagagcgctccagccccagctgggaatactgaggtattttgcctcctacatggagcagcatctcatgaaggggggagatctcccatcagtcgaggaagtggaggttcctgcaccgccactcctcctgcaatgggtcaagaccgaccaggccctgctaatgctgttttctgacggtacagtccaggtgaacttttatggcgatcacacaaaacttatcctttctggatgggagcccctgttggttaccttcgtggctagaaaccggtcggcctgcacatatcttgcctcgcacctgcgccagttaggctgctcacctgatctgaggcaacggcttaggtacgccctgcgacttctccgcgacagaagccctgcctag

SEQ ID NO: 30194 - DNA, 2913 bp, synthetic construct
  misc_feature 1..2913: note = Description of Artificial Sequence: Synthetic coding sequence
  source 1..2913: mol_type = other DNA
atggccacttgtataggcgagaaaatcgaggacttcaaagtcggaaatctgctgggcaaaggtagttttgccggagtttaccgcgcagaaagcatccatacaggtctcgaggttgctatcaaaatgattgataagaaagccatgtataaggcaggaatggttcagcgtgtccagaacgaggtgaagatccattgccaactgaaacacccctcaatattggagctgtacaactatttcgaggactcaaattatgtttacctggtgctggagatgtgccacaacggcgaaatgaacagatatctgaagaaccgtgtgaaacctttttccgaaaacgaggccaggcactttatgcatcagattatcactggaatgctctatctccacagtcacgggatactgcatcgggaccttacactatccaatctccttctgactcgcaacatgaacataaaaatcgcggattttggactggccactcagctgaagatgccacacgagaagcactatacactctgcggcacacccaactacatttctcctgagattgccacaagaagcgcacatggtctcgagagcgatgtctggagcctcgggtgtatgttctacactctgttgattgggcgtccaccctttgacaccgatacggtcaagaacacgctaaataaggtcgtgctggctgactacgaaatgccgtcattcctctccattgaagccaaggatctgatacatcagctgttgcggaggaatcctgcagaccgcctctctctctcctccgtgctcgatcacccctttatgtccaggaatagctctacgaagagcaaggacttggggactgtggaagattctatagatagtgggcacgcaactatatctaccgccattaccgccagcagctctacttctatatcgggatccctgttcgataagagaagactgctgatcgggcaaccgctgccgaacaaaatgactgtttttccaaagaacaagtcttccacggatttctctagcagtggggacggaaattccttttacacacagtggggaaatcaggaaacgtcaaactctgggagaggaagggtcatacaggatgccgaggaacggccacacagcaggtacctgagacgggcatattccagcgatagatccggtacatctaactctcaatctcaggctaaaacctacactatggaaaggtgtcacagtgctgaaatgttgtcagtctcaaaacgctcaggaggcggtgagaacgaggagcgctattcaccaacggacaacaacgcaaatatcttcaacttctttaaagaaaaaaccagctcgtcctcaggcagctttgagagaccagacaacaaccaagctctcagcaaccacctgtgcccagggaagacgccatttcctttcgcggatcctacacctcagacggagaccgtgcagcagtggtttgggaatctacagataaacgcacacctcaggaagaccacggaatacgattcaattagtccaaatcgggactttcaggggcaccccgatctacagaaggacaccagcaagaacgcctggacagatactaaggtaaaaaagaattcagatgcttccgataatgcccactccgtgaaacaacaaaataccatgaagtacatgaccgccttgcacagcaaacctgagatcatccagcaggaatgcgtctttggcagcgacccgctatccgagcagtctaagacccgcggaatggagcccccatggggttaccaaaatcgcactcttagatctattacttcccctctggtggcccatcggctgaagcccattcgacagaaaaccaagaaagctgttgtctctattctggactccgaggaggtgtgtgtggaactggtcaaagagtacgctagccaggaatacgtgaaggaggtccttcagataagctcagacggaaacaccatcacaatttattaccctaatggaggacgcggattccccttggcggacagacctccatccccaaccgataatatatccagatactccttcgacaatctgccggaaaagtactggcgcaagtatcaatacgccagccgtttcgtacaactggtcaggtccaagtcacctaaaattacatactttacccggtacgccaagtgcattttgatggagaactctcctggagctgactttgaagtgtggttttacgatggtgtcaagatccacaagacagaagattttatccaggttatcgagaagacggggaagtcttacacgttgaagtccgagagcgaggtgaactcattgaaggaagagattaaaatgtatatggaccacgccaatgaaggccaccggatctgcctggctctggaatccataatatctgaggaagaaagaaagacacgctctgccccttttttcccaataataatcggccgtaagcccggatccacaagctctcctaaggcgctgtctcctcccccatccgtggactccaactatcccacacgggagcgtgccagctttaatcgaatggtcatgcacagtgctgcttcccctacacaggctcccatattgaatccatctatggtcacaaacgaagggctcggcctcacaacgactgccagcggcacagatatatcctcaaatagcctcaaggactgcctcccgaagagcgctcagctgctgaagtcagtattcgtgaaaaatgttggctgggcaacacaactgaccagtggggctgtctgggtacagtttaacgacggcagccagcttgtggtgcaggccggagtgtcgtcaatcagctacacatctcccaatggacaaactacacgatatggagagaatgaaaaactgcccgattacatcaaacagaaacttcagtgcctgagttcaattcttttgatgttcagtaatcctacacccaatttccactag

SEQ ID NO: 30195 - DNA, 2817 bp, synthetic construct
  misc_feature 1..2817: note = Description of Artificial Sequence: Synthetic coding sequence
  source 1..2817: mol_type = other DNA
atggctacctgtattggtgaaaaaatcgaggactttaaggtggggaatcttttagggaagggcagctttgctggcgtgtaccgcgctgaatcaatacacacgggactcgaagtggcaataaagatgctttacaactactttgaagatagcaactacgtgtatctcgttttggaaatgtgccataacggtgagatgaacagataccttaagaaccgtgtgaaacccttttccgagaacgaggcccgacatttcatgcaccaaatcattacaggaatgctgtacctccattcgcatgggatcctgcacagggacctgacactgtccaatctgctacttactcgcaatatgaacatcaagatcgcagacttcggcttggccacccagttgaaaatgccccatgagaaacactataccttatgtgggactcctaactacatatctcctgagattgcaacgcggagcgctcacgggctggaaagcgacgtttggtccttgggctgtatgttctacactctgcttatagggaggcccccttttgataccgacacagtgaagaataccctgaacaaagtggtgttagctgactacgaaatgccatccttcttgtccatagaggctaaggaccttatacatcagttacttaggcgtaatcctgctgaccgtctgtcattatcttccgttctggatcaccctttcatgtccagaaatagctctaccaaaagtaaggacctgggcaccgtggaagattctatcgacagcggtcacgccaccatctctactgcgatcacagcgtccagctccacatcgattagcggatccctttttgataaaagacgccttctgatcggacagcctctgccaaataagatgactgtgttccctaaaaacaaatcctcaacagacttttcgagctcaggggacggtaatagcttctacacccagtggggtaatcaggagaccagcaacagcggccgaggcagagtgatccaggacgctgaggaacgcccacactccagatacctgcgacgcgcatactcttctgatcgcagcggcactagcaactcccagtcgcaggccaagacctacacaatggagcgctgccactcggccgaaatgctgagcgtttcaaagcggtcaggcggtggcgagaacgaggaaagatatagtcccacagacaacaatgcgaatatcttcaacttcttcaaagaaaaaacctcctcatcctcagggagctttgaaaggccagataataatcaggctctgtccaatcacctgtgtccaggcaagacgccttttccattcgcggatccgactccccaaacggaaaccgtgcaacaatggttcggaaacttgcaaataaacgcgcacctacgaaaaactaccgaatacgattccatttctcccaacagagattttcaaggacaccccgatctccaaaaggacacatctaagaatgcttggacagacaccaaggtgaaaaagaatagcgacgcctcagacaatgcccattcagtaaagcagcagaatactatgaagtacatgacagccctgcactctaaacccgaaatcattcagcaggagtgcgtgttcggctcagacccattgtcagagcagagcaagacacgaggcatggagccaccatgggggtaccagaatcgtacattacggagcatcacttctcctctggtggcccataggctgaagccaatacggcaaaagactaaaaaggctgtggtgtctatcctcgattctgaggaagtgtgcgtcgaattagtaaaagagtatgcctcacaggagtatgtgaaagaagtcctccagatctcctcagatggcaatacaatcacaatatactaccccaatggtggacgcggatttcccctggctgatagaccaccatcgcccacagacaacattagtcggtacagcttcgataacctaccagagaagtattggcggaaataccagtacgccagcagatttgtccaattggtacgatccaagagtcctaagatcacttactttactaggtacgccaagtgcattcttatggagaattctccaggcgctgacttcgaggtctggttctacgatggtgtgaaaattcacaagacggaggattttatccaggtgattgaaaagacagggaagtcttatacattaaagagcgaatctgaagtgaactctctgaaagaagagatcaagatgtacatggaccatgcaaatgagggccacagaatttgtctcgctctcgaatctatcataagcgaggaagagcgcaagacaagatccgccccattctttcccattataattggacggaagccaggctccacgtcatcccctaaagcactgtccccaccacctagtgtggactccaactatcctacaagagaaagagcctccttcaatagaatggtaatgcactccgctgccagccccactcaagccccaatactaaatcctagcatggtgactaacgaaggcctgggcttaactacgaccgcatcaggtacggatattagctccaactccttgaaggactgcctccccaagagtgctcagttactaaagagcgtgttcgtgaaaaatgttgggtgggccacccaactgacaagtggagctgtttgggttcaatttaacgatggatcccagttagtcgtacaagcaggagtgtcttctatatcttatacctcacccaacgggcagacaacacgctacggagagaacgagaaactgccagattatattaaacagaaattacagtgcctgagcagtattcttctgatgttttcaaaccccacacctaactttcactag

SEQ ID NO: 30196 - DNA, 2790 bp, synthetic construct
  misc_feature 1..2790: note = Description of Artificial Sequence: Synthetic coding sequence
  source 1..2790: mol_type = other DNA
atgatcgacaagaaagcaatgtataaggcgggaatggttcagagagtgcagaatgaagtcaaaatacactgccagctgaaacacccctccatccttgagctctataattactttgaggattcgaactacgtgtatttggttctcgaaatgtgtcacaacggcgagatgaatcgatatctcaaaaaccgcgtgaagccttttagcgagaatgaggcaaggcacttcatgcaccaaatcataactgggatgctgtatctccactcacatgggatactgcaccgcgatctgaccctgagcaatctcttactgacaaggaacatgaacatcaagatagcggactttggccttgccacccagctgaagatgccacacgaaaagcactacactctgtgtgggacccccaattacatttctcctgagatcgctacacggtccgcccacgggctggagtcggacgtttggagtctgggctgcatgttttacaccctgctcatagggagaccaccctttgataccgatactgtcaagaacactctgaataaggtggtgctggcagattatgagatgccaagctttctgtcaatcgaagccaaggatctgatccatcagcttttgaggcgtaacccagccgaccgacttagtctgtcttcagtattggaccacccattcatgagccggaattcttcaaccaagtccaaggatctcggtacggtagaggactccatcgattcagggcacgcgactatttccacagctataactgcatctagctccacgagcatcagcgggagcctatttgacaagcgaagacttcttattggccagccgcttcccaacaagatgacggtcttccctaagaacaagtcaagtacagacttctcttcttccggggacggaaattccttctatactcagtgggggaaccaagagactagcaatagtgggagagggagagtgatacaggacgctgaggaaaggccccattcccgatacctgcgaagggcttactcatctgatcggtctggtacttctaactctcaatcccaggcgaagacctataccatggaacgttgccattccgctgagatgttatcagtatctaagcggtctgggggtggagagaacgaagagagatatagccccactgataataatgctaacatctttaattttttcaaagaaaaaacatcgtcctctagcggtagtttcgagcgaccagacaataaccaggccctttccaaccacctttgtcccggtaagaccccatttcccttcgctgatccaacccctcaaactgagacagtgcagcaatggtttgggaacctccaaataaacgcccaccttcgcaaaactacagagtatgacagtataagtcctaatcgcgatttccaggggcaccccgacctacaaaaagatacatccaaaaatgcatggactgacactaaggtgaagaagaactccgacgcctcggacaatgctcacagcgtcaagcagcaaaacacaatgaaatacatgacggccctccattccaaaccagaaatcatccagcaggagtgtgtgttcggatccgacccactctcagaacagtcaaagacccgtggtatggagcctccttgggggtaccaaaacaggaccttgcgttccatcaccagtccattggtggctcataggcttaaaccaatccgtcaaaagaccaaaaaagccgtggtgagtatccttgatagcgaagaagtgtgcgtggagctcgtcaaggaatacgcgtcccaggaatatgtgaaagaagtgcttcaaatatcaagcgacggaaacaccatcactatctactatcctaacggcggtcggggtttcccgctggccgatcggccaccatcacctaccgataatatatctagatattcgttcgataatctgccagagaaatattggcgtaaataccaatacgcctcccgttttgtccaactcgtccgctccaagtcacccaagattacctacttcactcggtatgcaaaatgcattctcatggagaacagtccaggggctgatttcgaagtgtggttttacgatggggttaaaatccataaaaccgaggacttcattcaagtgatcgagaaaaccggcaagtcatacacccttaagtccgagagtgaagttaacagtttgaaggaggagattaaaatgtacatggatcacgctaacgaagggcaccgaatctgtctggctcttgagtccatcatctcagaagaggagcggaagacgcgatctgctcccttttttcctataattattgggcgaaagccaggctctacaagtagtcccaaggcactgagcccccctcccagtgtagatagcaattacccgactagagagcgggcaagtttcaacagaatggtgatgcatagtgcggctagtcccacacaggcccctattctcaaccccagtatggtgactaatgaaggattgggactcactaccaccgcatccgggacagacatctcgagcaattccctgaaggattgtctgcctaagagtgcacagcttttgaagtccgtcttcgtgaaaaacgtggggtgggccactcagttaacttctggcgctgtgtgggtccagttcaatgatgggagccagcttgtggtgcaggcgggagttagctcaatcagctacacatcccccaacggacagaccacgagatacggagaaaatgaaaaacttccagactacattaaacagaaacttcagtgtctgagctccattcttttgatgttcagcaacccaacccctaactttcattag

SEQ ID NO: 30197 - DNA, 1752 bp, synthetic construct
  misc_feature 1..1752: note = Description of Artificial Sequence: Synthetic coding sequence
  source 1..1752: mol_type = other DNA
atggcagcacgccgtcggaggtccacaggcggaggtagggctcgggcattgaacgaatccaagagagtcaacaatggcaataccgcccctgaggattccagcccggcaaaaaagacccgccgttgtcaaagacaggagtccaagaagatgccagtggccggaggcaaggcaaataaagaccggacggaagacaagcaggacggcatgcccggaagatcctgggcctctaaacgcgtgagtgagagcgttaaggccctgcttttaaaagggaaagcaccagtggatcccgaatgtacagccaaagtgggtaaggcccatgtttattgcgaaggtaatgatgtgtatgatgttatgctgaatcagaccaacctgcagttcaacaacaataaatactatctgattcagctgctagaagacgatgcccagcgaaacttctcggtgtggatgaggtggggccgtgtggggaagatggggcaacactcccttgttgcctgcagcggcaacctgaacaaagctaaagagatcttccagaagaaatttctggacaaaaccaagaacaactgggaggacagagagaagttcgagaaggtgccgggtaagtatgacatgctgcaaatggactacgctaccaacacacaggatgaagaagagacgaagaaggaagagagcctgaaatctccccttaaaccagaaagccagttagatctccgagtgcaagagctcataaagctgatatgcaacgtccaggctatggaagagatgatgatggaaatgaagtacaatacaaaaaaggccccacttgggaaacttacggtcgctcagattaaggccggatatcagagcttaaaaaagatcgaggattgtattagagcagggcagcacggcagagccctgatggaggcctgcaacgaattctatacccgcattccccatgatttcggattgcggacaccaccgttgatccgaacacagaaagaactaagtgaaaagatccagctcctcgaggctctaggtgacattgagattgcgatcaagctcgttaagaccgagcttcagtcccccgagcatccccttgaccagcactatcgcaacctgcactgcgcacttaggccactggaccatgagtcttatgagtttaaggttatcagccagtatttgcagagcactcatgcccctactcattccgactacaccatgacactgctggatctcttcgaagtcgaaaaggatggcgagaaagaagccttcagagaggacctgcacaaccggatgcttttgtggcacgggtctcgcatgagcaactgggtggggatcctgagccacggactgcgaattgctccacccgaagctcctattaccggctatatgtttggcaagggtatctactttgcggatatgagcagcaaatccgcaaactattgctttgccagtcgcctgaagaataccggactgctcctgctgtctgaagtggctctcgggcagtgcaatgagctcctggaggcaaaccccaaggccgagggcctgcttcagggcaaacactccaccaaaggcctgggcaaaatggctccctcctcagctcactttgtaacgctgaacgggtccacagttcccctcgggccagcatcagatacaggcattctgaaccccgacggctatactctcaactacaatgaatatatcgtgtataacccgaaccaagtgagaatgcggtatctcttgaaagtgcagttcaattttctgcaactgtggtag

SEQ ID NO: 30198 - DNA, 1713 bp, synthetic construct
  misc_feature 1..1713: note = Description of Artificial Sequence: Synthetic coding sequence
  source 1..1713: mol_type = other DNA
atggccgctcgccgacgccgttccacaggaggaggcagagccagggcgctgaatgaatccaaacgcgtaaacaacgggaacacagctcctgaagacagttctcccgcaaagaagactcgtcgttgccagcgtcaggaatctaagaagatgccagtggctggaggcaaagcaaacaaggataggacagaggataagcaagacgagagtgtgaaggctctgctgctgaaagggaaagccccagttgatcccgaatgcaccgcaaaagttggcaaggctcatgtgtactgtgagggcaatgacgtatacgacgtgatgcttaatcagaccaatcttcagttcaacaacaataagtactacctaattcagctgctggaggacgacgcccaacggaatttctctgtgtggatgagatggggcagagtgggcaagatgggtcagcattcactcgtagcgtgctccggtaacctcaataaggccaaagaaatattccaaaaaaaattcctggacaagaccaaaaataactgggaagacagagaaaaattcgaaaaagtcccagggaagtacgatatgctccagatggattacgccaccaacactcaggatgaggaagagacaaagaaagaagaatcactgaagtctcctctgaagccagagagtcagttggacctgcgtgtgcaagagctgatcaagctgatctgcaatgtgcaggcaatggaggagatgatgatggagatgaagtataatacaaagaaggcccctctggggaaactgaccgtagctcagattaaagccggataccagtctctcaagaaaattgaagactgtattagagctggacaacatggccgtgctttgatggaagcctgtaatgagttttatacacgcatcccccacgattttggcctccgtacccctcccctaatccggacacaaaaggagttgtcagagaagatacagttgttagaggctctgggagacatcgaaatcgccataaagctggtgaaaacagaactgcagagtccagagcatccgttggatcagcattatagaaaccttcactgtgcccttaggcctctcgatcacgaaagttacgagtttaaggtgatcagccagtacttgcaatccactcatgcacccacacattcagactataccatgacattgctggatctattcgaggtggaaaaggatggggagaaagaggcctttagagaggatctgcataaccggatgcttctgtggcacggctcccgcatgtcaaactgggtcggcatattgagccacggactgagaatcgcacccccagaagctcctattacaggctacatgttcggtaagggaatctatttcgccgacatgtcttcaaagtcagccaattactgttttgccagcaggctaaagaacacagggcttctgctcctaagtgaggttgcactgggtcaatgcaacgaacttctggaggccaaccccaaagccgagggactcttgcagggcaagcactcaaccaaaggcctcgggaaaatggccccttcaagtgcccatttcgtcaccctcaatggatctaccgtccccctgggacctgcctccgatactggtattctgaaccccgatggatatactttgaactataatgaatacattgtgtataacccgaatcaggtccggatgcgatacctcctgaaggtgcagtttaacttccttcagttatggtag

SEQ ID NO: 30199 - DNA, 1623 bp, synthetic construct
  misc_feature 1..1623: note = Description of Artificial Sequence: Synthetic coding sequence
  source 1..1623: mol_type = other DNA
atgtcgctgttgttccttgccatggccccaaaacccaagccatgggtgcagacagagggaccagagaaaaagaaaggacgccaggccggtagagaagaggacccttttcgctcaacagccgaggctctgaaagctattcccgctgaaaaaaggattataagggtggacccaacatgtcccttgtccagtaacccagggacccaagtctacgaggactacaactgtactctgaatcagaccaatattgaaaacaataataacaagttctatataatccagctcctgcaagacagtaacagatttttcacttgctggaatcactgggggagagtcggggaggttggacaaagcaaaataaaccactttaccaggcttgaggacgctaagaaagactttgaaaaaaagtttcgcgagaaaaccaagaacaactgggccgaacgggaccactttgtgtcccaccccggtaagtatacactaatcgaggtacaggcagaggacgaagcacaagaagccgtggtgaaggtggatcgtggtcccgttagaactgtcaccaaaagagtccagccatgttccttggaccccgctacccagaaactgatcaccaatatcttttctaaagaaatgttcaaaaacacaatggctttaatggacctggatgtgaaaaaaatgccgctaggtaagctgtccaaacaacagattgcacgcggtttcgaagctctagaagctttggaagaggctctcaaggggccaacagatgggggacagagcctcgaggagctgagctcccacttctatacagtgatccctcacaattttggacatagtcaacctccaccgattaactcgccagagctcctacaggctaagaaggacatgctgctggtgctagctgacattgagctcgctcaggcactccaggctgtgtccgagcaggagaaaacagttgaggaagtgccacaccccttagatcgcgactaccagttactgaagtgtcagctacagcttctagattcaggagccccagaatacaaggttatccaaacatacttagagcagaccggttcaaaccaccgatgcccaaccctgcagcatatttggaaggttaaccaggagggagaggaagatagatttcaggcccactctaagctgggaaaccgcaagctcctgtggcacggcacaaatatggctgtggtggcagccattttgacttcaggcctccggatcatgccacatagcggcggaagagtcggaaagggcatttatttcgccagtgagaactcaaagtccgcgggttacgttattggaatgaagtgtggagcccatcacgtgggctacatgttcctgggcgaagtggcccttgggcgagagcaccacattaacacagacaacccaagtctgaaatcacctcctccaggattcgacagtgttatcgcaaggggccacaccgaacccgacccaacccaggataccgagctcgagttggatggccagcaggttgtagttcctcaggggcaacctgtaccatgtcccgagttctcttctagcaccttcagtcagtcagaatatcttatctaccaggagagtcaatgtaggctgagatacctgttagaagtccacctttag

SEQ ID NO: 30200 - DNA, 1602 bp, synthetic construct
  misc_feature 1..1602: note = Description of Artificial Sequence: Synthetic coding sequence
  source 1..1602: mol_type = other DNA
atggcgccaaagcctaagccatgggtccagactgagggaccggagaagaagaaaggtcgccaagctgggcgtgaggaggatccattcagaagtacagcagaggcattgaaagcaatcccggcagagaagaggataatacgagtggaccctacgtgtccgttaagcagcaaccccggtacacaggtgtatgaagattacaattgcactttgaaccagaccaatattgaaaacaacaacaataagttttatataattcagttgcttcaggattcaaaccggtttttcacctgctggaaccattggggtagagtaggagaagtgggccagagcaaaataaatcactttactcgcctagaggatgcaaagaaggatttcgagaaaaaatttagggagaagacaaagaataattgggcagagagggaccacttcgtcagccaccccggaaagtatacactgatagaagtgcaagcagaggacgaagcacaggaggcggttgtcaaagtggaccgagggccagtgaggacagtcacaaaacgggtgcaaccatgctccctggacccagctacccagaaactaattaccaacatattctcaaaggagatgttcaaaaacacaatggctttgatggatctggacgttaagaagatgcccctgggtaaactgagtaagcagcaaatagcaagagggttcgaagcccttgaagccctggaggaggcactcaagggccctaccgacggaggtcagtcattggaggaactgagctctcacttttacactgttattcctcacaactttggtcactctcagcctccacccattaatagtcccgagttgttacaagctaagaaagatatgctcctggttcttgccgatatcgaattggcccaagcactccaagcggtgtccgagcaggaaaaaaccgtggaagaagtcccgcacccgctagatcgcgattatcagctactgaaatgccagctgcagctccttgatagcggggcacctgagtacaaagtaatccagacatacttagaacagactggttcaaaccacagatgccctacgttgcagcacatctggaaggtcaaccaggaaggggaagaagatcggttccaggcacatagtaagctaggaaataggaagcttctttggcacggcaccaatatggccgttgtcgccgctatcttgacaagcggcctaaggatcatgccccactcggggggacgggtcggtaagggaatctactttgcatcagagaactccaagtccgcaggctacgtgattggaatgaagtgcggcgcacaccatgtgggctatatgttccttggcgaggtggcactaggcagagagcatcacatcaacactgacaacccaagcttaaaatccccgcctcctggcttcgacagcgtcatcgcacgcggacacacagagcctgacccaacccaggacaccgaattggagttggatggccaacaagtggttgtacctcagggccaaccagttccttgtcccgagttttctagttctaccttctctcagagcgaatatctgatctaccaggaatcgcagtgtcggctgagatacttactcgaggtgcatctgtag

SEQ ID NO: 30201 - DNA, 1602 bp, synthetic construct
  misc_feature 1..1602: note = Description of Artificial Sequence: Synthetic coding sequence
  source 1..1602: mol_type = other DNA
atggcaccaaagcccaaaccatgggtacagacggaaggcccagaaaagaagaagggcagacaggctggcagagaggaagatccttttcgctcaacagccgaggcacttaaggctatcccagcagagaagaggatcattagagtcgatcctacctgtcccctgtcgagtaatccagggacccaagtgtacgaggactataactgtactttgaaccagaccaacatcgagaataacaataacaagttttacatcatacagcttttgcaagactctaatagattcttcacatgctggaatcattggggaagagttggcgaagtaggacagtcaaaaattaaccactttaccaggctcgaggacgctaagaaagactttgagaaaaaatttagagaaaaaacgaaaaacaactgggcagagagggatcattttgtgagccatcctgggaaatacacgctgattgaagtacaggcggaagacgaggcacaggaagcggtggtcaaggtggatcggggaccagtccgaaccgtgaccaaacgagtgcagccttgcagcttggaccctgctacccagaagctgattaccaacattttttcaaaagaaatgttcaagaacactatggcccttatggatctcgacgtgaagaagatgcccctcggaaagttgtccaaacagcagattgctagaggattcgaggccttggaggcgctagaagaggccctcaagggcccaacagatgggggacaatctctggaggagttgtcatcccacttctacaccgtcattcctcacaatttcggtcacagccagccacctcccataaatagtcctgagttgctgcaggccaaaaaggatatgcttctggtgttggcagacatcgagctggctcaggccctgcaagccgtgtccgagcaggaaaagaccgtggaggaagtcccccaccccctggatcgcgactaccagctgctcaagtgccaacttcagttgttagattctggtgcccctgagtataaggtgattcagacttacctcgaacagacagggtctaatcatcgctgcccaacccttcagcacatatggaaagtgaaccaggaaggggaagaagataggtttcaggcacattccaaactcggcaaccggaaactcctttggcatgggacgaacatggccgtggtagccgcaattctgacctcgggcttgcggatcatgcctcattccggtggaagggtggggaaaggcatctactttgcctcagaaaacagcaagagcgctgggtacgtgattgggatgaagtgtggagcacaccacgttggctatatgtttttaggtgaggttgccctcggacgagaacatcacatcaataccgacaatccttcattaaaatctcccccaccaggtttcgacagtgtcatcgccaggggccacaccgagcccgaccccacccaggacaccgagttggagctcgatggtcaacaggttgtggtgcctcagggccaacctgtgccctgtcctgagttcagcagtagcactttcagccagagcgaatacctgatctaccaggagtcccaatgtcgcctgcgatacttgctggaggttcacctgtag

SEQ ID NO: 30202 - DNA, 999 bp, synthetic construct
  misc_feature 1..999: note = Description of Artificial Sequence: Synthetic coding sequence
  source 1..999: mol_type = other DNA
atggcccctaagcctaagccttgggtccagaccgagggtccagaaaaaaagaaaggccgtcaggctggtcgggaagaggatccgtttaggagcactgccgaggctctgaaagctattccagctgagaaacgcataatcagggttgatcctacgtgtccgctttccagcaaccctggcacccaggtttacgaggactacaattgtactctcaatcagacaaatatagagaacaataacaataagttttatataatccagttgcttcaggactctaatcgtttcttcacttgttggaatcactggggaagggtgggtgaggtgggccagtccaagattaaccatttcacgcgcctggaggacgccaagaaagattttgagaagaagttccgcgagaagacaaaaaataactgggcagaacgcgaccacttcgtcagtcatccaggaaagtatacccttatcgaggtgcaggcagaggatgaggcgcaggaggctgttgtcaaggtggacaggggccctgtgaggacagtcacaaaacgtgtgcaaccctgctccctggaccctgccacccagaagctcatcacgaacatctttagcaaggaaatgtttaaaaatactatggccctgatggacctggacgtaaaaaagatgcctctgggcaagctgagtaagcagcaaatcgctcgtggattcgaggctctcgaggcccttgaagaggctctaaaggggccaaccgatggcggtcagtctcttgaagagttgtcaagccatttttataccgtgattccccacaacttcggacacagccaaccacctcctatcaacagccctgagttgctccaagctaagaaggatatgctccttgtactggccgacattgagctagctcaggctttgcaggcggtttcagagcaggagaaaaccgtcgaggaagtacctcatcccctggacagagattaccagctattgaaatgtcagctccagctgcttgactctggttag

SEQ ID NO: 30203 - DNA, 5174 bp, synthetic construct
  misc_feature 1..5174: note = Description of Artificial Sequence: Synthetic coding sequence
  source 1..5174: mol_type = other DNA
atggtcatggggattttcgccaattgtatcttctgcttaaaggtcaagtatctcccgcagcagcaaaaaaaaaagctccaaacagacataaaagagaacggaggtaaattttcattctctctgaatcctcagtgcacccatattatattggacaacgcagatgtactgagtcagtatcagctgaactccattcagaagaatcacgttcacatcgctaatcccgacttcatttggaaatccatacgagaaaaacggctcttggacgttaagaactatgacccctacaaacctctggacatcacacctccgccagatcagaaagcttcgtcgagcgaggtgaaaacagaaggcctatgccccgattccgcaacagaagaggaggacactgttgagctcaccgaattcggaatgcagaatgttgaaatccctcatctgccacaggacttcgaggtggccaagtacaacacgctagaaaaggtgggaatggaaggcggacaggaggccgtcgtagtggagctgcaatgcagtcgcgactctcgcgactgccctttccttatttcatcacacttccttctggatgatggtatggagacacgtaggcagttcgccatcaaaaagacaagtgaagatgcatctgaatactttgaaaactacatcgaggagttgaagaaacagggattcctgcttcgggaacacttcactcccgaagcaactcagctcgcctcggagcagctacaggcactgctgcttgaggaagtgatgaacagttcgacactatctcaggaggtgtcagacctcgtggaaatgatctgggccgaagccctgggccacctggaacacatgctgttaaaaccagttaaccgcatttccctgaatgatgtgagcaaggccgaggggatcctcctgctggtgaaggccgcattgaaaaatggagaaaccgccgagcagttgcagaaaatgatgaccgagttttatcggctgattcctcataaagggacaatgcccaaggaggtgaacctcggattactggccaaaaaggcagacctatgtcagcttatcagggatatggtgaacgtgtgtgagactaacctgtctaaacccaaccccccatctctcgctaagtaccgcgcactgcggtgcaagatcgaacacgttgagcaaaataccgaggaatttttgagagtaagaaaggaggttctgcagaatcatcacagtaaatcaccagtcgatgttctccagattttccgagtcggcagggtgaacgagactactgagttcctttccaaactgggcaatgtccgcccattgttacatggtagccctgtgcaaaacatagttggtatcttgtgccgcggacttctccttcccaaggtcgtggaggatagaggagttcagagaactgacgtgggtaatctgggctctgggatttattttagcgactcgctttcaacctccatcaagtactcccaccccggagagaccgatggcactaggctgctgctgatctgtgatgtcgcgctgggcaagtgtatggatctgcacgagaaggattttagtcttactgaggcgccacctgggtacgactcggttcacggggtaagccagaccgcgtctgtaaccaccgatttcgaggatgacgagtttgtggtctataaaaccaaccaggtgaaaatgaaatacattatcaaattcagcatgccaggagaccagatcaaggattttcatccttctgatcataccgagcttgaggagtatagacccgagttctcaaacttctctaaggtggaagattaccagcttcctgacgccaagacatcaagcagcactaaagcaggactccaggacgccagtgggaatctcgttcctctggaagatgtccacattaaaggccgaatcattgataccgtggcccaggtgatagtctttcagacttatactaacaagtcccacgtgcctattgaagccaagtatatctttcctctcgacgacaaagccgctgtctgcggcttcgaggcctttattaatggtaagcacatcgttggtgagatcaaggagaaggaggaagcccagcaagagtacctggaggccgtgacacaaggacatggcgcttatcttatgtctcaggatgccccagatgtatttaccgtgagtgtaggcaacctgccaccaaaggcaaaagtgctaatcaagatcacttatatcacagaactgtcaattctgggcacagtgggcgtcttttttatgcctgccacagtggctccatggcagcaagacaaagccctgaacgaaaacctgcaggacactgtggagaaaatttgcattaaagagattgggaccaagcagtctttttctctgaccatgagcatcgagatgccttatgtcattgagttcatcttttccgatacccatgaactcaaacaaaaaagaactgattgcaaagctgttatatccaccatggagggaagctctctggattcttctggattttcactgcatatcggtctttcagctgcttatctcccccgtatgtgggtggagaagcacccggagaaagaatcagaggcatgtatgttagtctttcagcctgatcttgacgttgatctgcccgacttggccagcgaaagtgaggttattatctgtctagattgttcctccagcatggaaggggttaccttcttgcaagccaagcagatcgccctgcatgcactcagcttggtgggtgaaaagcagaaagtgaacatcattcagtttggaactggatataaggagctatttagctaccccaagcatataacatctaacacaatggctgcggagtttatcatgtctgccacgcccactatgggcaatactgacttctggaagactctgagatatttgagcctgctttatcccgcaagggggagtaggaacattctcctggttagtgatggccaccttcaggacgaatctttgacactgcaacttgttaagcggtctcgaccccatactcgcctgttcgcgtgcgggatcggaagtacggcaaataggcacgttctcagaatcctttcacaatgtggggcaggagtatttgaatactttaacgctaagagtaaacattcttggagaaaacagatcgaagatcaaatgacccgattatgttctccctcttgccactccgtgtcagtcaaatggcaacaactaaatcccgatgttcccgaggccctgcaggctcctgcccaggtgccttcccttttcttaaacgatcggctcctggtgtatggcttcatccctcattgtactcaagctacactgtgtgccctgatccaggagaaggagttccgcaccatggtcagtacaacagaattacagaagacgactggcaccatgatccacaaattagcggcacgggctctgatcagagactacgaggacggcatcctacatgagaacgagaccagccatgaaatgaaaaagcaaaccctgaagtccctgataatcaaactgagtaaagaaaacagcctgatcactcagtttacaagtttcgtcgcagttgaaaaacgggacgagaatgagtctccttttccagacattcccaaagtgagcgagctgatagccaaggaagacgtggattttctgccttatatgtcctggcaaggagagccccaggaagccgtgagaaatcagtccctgctggcaagcagcgagtggcccgagttgcgcctctccaagcgtaaacaccgtaagatcccgttctcaaaaagaaagatggaactgagccaacccgaggtatctgaagactttgaggaggacggcctgggcgtcctccccgctttcacatccaacttggaaagggggggtgtggaaaagctgttagacctctcttggaccgagtcttgcaagcccactgccactgagcctctctttaagaaagtatccccctgggagacatcgacctcaagcttttttcccatcttggcccctgccgtcgggtcctacttgcctcctacagcgagggcacatagccccgcttctttatcctttgcctcttatagacaggtagcctcattcggttccgctgcaccaccacgtcagtttgatgcatcccagttcagccaaggcccagtgcctggcacctgtgccgactggatcccgcaatccgcgagttgtccgaccggcccaccccagaatcctccctctagcccctactgtgggattgttttctcaggcagttccctctcgtccgcccagagcgctccactacagcacccagggggatttactacccgcccttccgccggaacgttcccagagctggacagcccccagctgcatttttctctcccaacagacccagatccaattcgaggttttggcagctatcacccttccgcatcttctccctttcattttcaacctagtgcagccagcttgactgcgaacctccggcttcccatggcttctgccctgcctgaggcactttgcagtcagtcaaggactactcctgtggatctttgccttctggaggagtctgtgggtagcctggaaggtagcaggtgtccagtgttcgcatttcaatctagtgacactgagtctgacgagctttccgaggtcttgcaggattcatgctttctgcagatcaaatgcgacactaaggatgatagtatactctgtttcctggaagtgaaagaggaggacgaaatcgtgtgtatccaacactggcaggatgcagtcccctggaccgagctgctgtctttacagacagaggacggattttggaagctgacgcccgaactcgggttgattctgaatcttaatacaaacgggctgcactccttcttaaagcagaagggaatccagtccctgggggtgaagggcagagaatgtctgctggacttgatcgccactatgctggtgcttcaatttatacgtactagactggaaaaggaaggaatagtttttaaaagtctcatgaagatggacgatgcatcaatctccagaaacattccctgggccttcgaggctattaagcaggctagtgagtgggttcgtaggactgagggccagtacccgagcatttgtcccaggctggaattgggtaacgactgggactccgcaactaagcagttgcttgggctacaacccatctcgacggtgtctcccctccacagggtccttcactattcgcagggcta

SEQ ID NO: 30204 - DNA, 1911 bp, synthetic construct
  misc_feature 1..1911: note = Description of Artificial Sequence: Synthetic coding sequence
  source 1..1911: mol_type = other DNA
atgaatccttcagctcctagctaccctatggcgtcactgtatgtgggcgatctgcatcccgatgtgaccgaagccatgctttacgagaagttctccccagcaggaccaatattgtctattcgtgtttgtcgcgacatgatcactagaaggagcctcggatacgcatacgtgaacttccaacagccggctgacgctgagcgtgccctagacacaatgaacttcgacgtgattaaaggtaagccagtgaggattatgtggtcacagcgggatccgtctcttaggaaatccggagtgggaaacatctttattaagaaccttgataaatctattgataacaaagcactgtacgatacattctccgcatttggaaatatcctttcttgtaaggtagtgtgcgacgagaatgggtccaaaggttatggctttgttcatttcgagacgcaggaggctgcagagcgcgctatcgagaaaatgaatggtatgctcctgaacgatcgcaaggtctttgtaggtagattcaaaagccgcaaagaacgcgaagcagagctcggggctcgtgccaaagagtttacgaatgtgtacatcaagaactttggagaggatatggatgacgagagattaaaagatctgttcgggaagtttgggcctgccctgagcgtgaaggtgatgactgacgagagcggaaagtccaaaggtttcgggttcgtctcatttgagaggcatgaagatgcccagaaagccgtggacgagatgaatggcaaggagctgaatggcaaacagatctacgtgggtagggcacaaaaaaaagtggaaaggcagacagaactgaagaggaagtttgagcagatgaagcaggacagaattacccggtaccaaggtgtcaacctgtatgtcaagaacttagacgacggcatcgacgacgagcgactgcgcaaagaattcagccctttcggtaccattacctctgcaaaagttatgatggagggtgggaggtctaaaggatttggttttgtgtgcttctcttcccccgaagaggccaccaaggccgtaacggaaatgaacggcagaatcgtggcaacaaagcccttgtacgtcgctctcgctcaacggaaggaggagcggcaggcccatctgacaaaccagtacatgcagcgcatggcgagcgtgcgcgcagtcccaaatcccgtgatcaacccatatcagcctgctccaccgtccgggtactttatggctgccataccccagacacagaacagagcagcttattatccgccatctcagatcgcccagcttagaccctctcctcgatggaccgcacagggcgcaaggcctcacccgttccagaatatgccgggagcaattaggcctgcagccccacgtcctccgttctcaacaatgcgcccagcttcctcccaggtgcctcgtgtaatgtctacccagcgcgtggctaatacatccactcagaccatgggcccaaggcctgcagcagcagcagctgcggctactcccgctgtacggaccgtgccacagtataaatacgccgctggagtgaggaatccacaacagcatctgaatgcacagccccaggttacaatgcagcaacctgcagtgcacgtgcaaggccaagaacctctgaccgcctcaatgcttgctagtgcccctccccaggagcagaagcaaatgttgggagagaggttgtttcccctgatccaggctatgcatccaacgctcgccggaaagatcactgggatgctgttggagatagacaattctgaactcttacatatgctcgagtccccggaatccctccgctccaaggtggacgaggcagtggccgttcttcaggcacatcaggccaaggaagcagcccagaaagctgttaattccgcaaccggtgttcctacagtttag

SEQ ID NO: 30205 - DNA, 1644 bp, synthetic construct
  misc_feature 1..1644: note = Description of Artificial Sequence: Synthetic coding sequence
  source 1..1644: mol_type = other DNA
atgaatcccagcgccccaagttacccgatggcaagcctttatgttggagatctgcatcctgacgtgaccgaggcaatgctgtacgaaaagtttagtccagccggaccaatcctgtccatcagagtctgtcgcgacatgattacccggaggtccctggggtatgcttacgtcaacttccaacaaccggcagatgccgagagagctctagacaccatgaactttgacgtcatcaagggcaaacccgtgaggataatgtggtctcagagggacccgtcgttgcgtaaatccggcgtcgggaatattttcatcaagaacctggacaagtctatcgataataaggccctgtacgacacattttcagcctttggcaacatcctgtcatgtaaggtcgtctgtgatgagaatggctctaaaggttacggttttgtccatttcgaaacacaggaagccgcagaaagagctattgagaaaatgaacggaatgcttctgaatgatcgcaaagtctttgttggacgctttaagagtaggaaggagagagaagccgagctgggggctagggccaaagagttcactaatgtctacatcaaaaactttggagaggacatggacgatgagcggctgaaagacctgttcggaaagttcggccctgccctatcagtcaaagtcatgacggacgagtcaggcaagagtaaagggtttggctttgtctcatttgagcgccacgaagatgctcagaaagcagtggatgagatgaatgggaaggaactgaacgggaaacaaatttatgttggacgcgcacagaagaaagttgagcggcagactgaactgaagagaaagtttgagcagatgaaacaggaccgcattactagataccaaggggtcaatctgtacgtcaaaaatctggatgatgggatcgacgacgagcggctccgcaaggaattttcccccttcggaacgattaccagcgccaaggtcatgatggagggaggacgcagcaaaggcttcgggttcgtgtgcttttcgtcccccgaagaggccactaaggcagttacggagatgaatggaaggatagtggccaccaagccactttacgtggcactggcccagaggaaggaagaaagacaggcacatctgaccaatcagtacatgcagcgaatggccagcgtcagggccgtgcccaacccagtcataaatccctatcagccagcccctccatctggttacttcatggcagccatcccacagacacaaaatagggcagcatattaccccccttctcaaatcgcacaactgcggccttccccaagatggaccgcccagggagcaaggcctcaccctgccgttcacgtccagggacaagaacccctgactgcttctatgttggcgtcagcccctcctcaggagcagaaacagatgctgggcgaacgccttttccccttgatccaggcgatgcacccgaccttggccggaaaaatcaccggaatgcttctggagatcgacaattccgagcttctgcacatgctcgaatcacccgaaagccttcgatccaaagtggatgaggcggtcgcagtgttacaagcccaccaagctaaggaagcagcccagaaggccgtgaatagcgcaacaggggtcccgacagtgtag

SEQ ID NO: 30206 - DNA, 129 bp, synthetic construct
  misc_feature 1..129: note = Description of Artificial Sequence: Synthetic coding sequence
  source 1..129: mol_type = other DNA
tgaatgctggagtcccctgagagtctgcgctccaaagtcgacgaggccgtcgccgtacttcaagcccaccaggctaaggaggcagcccagaaagcagtgaactcagctactggtgtgccaaccgtgtag

SEQ ID NO: 30207 - DNA, 117 bp, synthetic construct
  misc_feature 1..117: note = Description of Artificial Sequence: Synthetic coding sequence
  source 1..117: mol_type = other DNA
atgaacccgtccgcaccgagctaccctatggcctctctgtacgtcggtgaccttcaccctgacgtgactgaagctatgctctacgagaagttctcacccgcaggccctatcctgtag

SEQ ID NO: 30208 - DNA, 357 bp, synthetic construct
  misc_feature 1..357: note = Description of Artificial Sequence: Synthetic coding sequence
  source 1..357: mol_type = other DNA
atgaatcctagcgctccaagctacccgatggcttccctttatgtgggagacctccaccctgatgtaaccgaggcaatgctgtatgagaagttctcacccgctggccctattctcagtatccgtgtttgtcgggacatgattacccgacgttccctgggatacgcctacgtcaattttcagcagcccgcagatgctgaacgggctctggataccatgaatttcgatgtgattaagggtaaacccgtgaggatcatgtggtctcagcgggacccaagcctgagaaaatcgggtgtgggcaacatcttcattaagaatttggacaagagcatagataataaagccctgtacgatacttag

SEQ ID NO: 30209 - DNA, 132 bp, synthetic construct
  misc_feature 1..132: note = Description of Artificial Sequence: Synthetic coding sequence
  source 1..132: mol_type = other DNA
atgaatccctccgcaccctcataccccatggccagcctgtatgtgggcgacctccaccctgacgtgacagaagccatgctatacgagaagttctccccagctggaccgatcttaagcatcagggtgtgttag

SEQ ID NO: 30210 - DNA, 510 bp, synthetic construct
  misc_feature 1..510: note = Description of Artificial Sequence: Synthetic coding sequence
  source 1..510: mol_type = other DNA
taggcatccagccaagtgcccagagtgatgtcaacccagcgtgtagcaaataccagcacgcagaccatgggccctaggccagctgcagctgcagccgctgctacccccgctgtgcgcaccgttccacagtataagtacgcagccggagtgcggaatcctcaacagcacctgaacgcacagccacaggtgacaatgcagcagcccgcagtgcatgtccaggggcaggagcccctgacggcttctatgcttgctagcgccccacctcaagaacaaaaacagatgctgggggaaagactgtttcctctgattcaggccatgcaccctacactggctggcaagattactggtatgctgttagagattgacaactcagagttgttacacatgttagagagtccggaaagccttaggtccaaggttgatgaggcggtagcagtgctgcaggcacaccaagccaaagaagctgcacagaaagccgtgaacagtgctaccggggtgcccactgtgtag

SEQ ID NO: 30211 - DNA, 186 bp, synthetic construct
  misc_feature 1..186: note = Description of Artificial Sequence: Synthetic coding sequence
  source 1..186: mol_type = other DNA
atgaacccctctgcacctagctaccccatggcctccctctacgtaggggaccttcacccagatgtgacagaagccatgttgtacgaaaaatttagtcccgctggaccaattctcagcattagggtatgtagggacatgatcacaaggcgttccctggggtatgcatatgtgaattttcaacaatag

SEQ ID NO: 30212 - DNA, 390 bp, synthetic construct
  misc_feature 1..390: note = Description of Artificial Sequence: Synthetic coding sequence
  source 1..390: mol_type = other DNA
atgaatccttcggctccctcttatccaatggcctcactctatgttggtgacctgcatcccgacgtcactgaggccatgctgtatgagaagttttcccctgccggacccatcttgtccatccgcgtttgccgtgatatgataacacgaaggagcctgggttacgcctacgtgaatttccagcagccagcagatgccgagcgagctctggacaccatgaattttgatgtgataaagggtaaacccgtgaggattatgtggagccagcgcgaccctagcctcaggaagagcggagtggggaacatcttcataaagaacctcgacaagtcaatcgataataaagcgttgtacgatacgttcagtgcctttggtaatattctgtcctgcaaatag

SEQ ID NO: 30213 - DNA, 552 bp, synthetic construct
  misc_feature 1..552: note = Description of Artificial Sequence: Synthetic coding sequence
  source 1..552: mol_type = other DNA
atcagacccgctgccccacgtccacctttcagtacaatgcgaccggcttcgtctcaggtgcccagggttatgagtactcagcgtgtcgcgaatacaagcactcagactatgggcccacgccctgcagccgctgctgctgccgcaactcctgctgtgcgcaccgtccctcaatacaagtatgcagcaggagtgcgcaacccccagcagcacctgaatgcccagccccaggtgacaatgcaacagccagctgtgcatgttcaggggcaggagccactgacggctagtatgctcgcatctgcacccccacaagaacagaaacaaatgctgggagagcggctgttcccactgatccaggctatgcaccccacgttagcagggaaaatcactggaatgctactggagatcgacaactctgaactactccacatgctggagtctcctgagtctctgagaagcaaagtggacgaggcggtggctgtcttgcaagcccatcaagcgaaggaggctgctcagaaagctgttaacagcgccaccggagtgcctacagtttag

SEQ ID NO: 30214 - DNA, 228 bp, synthetic construct
  misc_feature 1..228: note = Description of Artificial Sequence: Synthetic coding sequence
  source 1..228: mol_type = other DNA
atgaatcctagcgccccttcctaccctatggccagcctctatgtgggagacttgcaccccgacgtcaccgaggccatgctttacgaaaaattcagtcctgcaggacctatcttgagcatccgggtttgccgggacatgatcacgagacgaagccttggttatgcctacgtgaacttccagcagccagctgacgcagaacgggcactggatacaatgaatttcgactag

SEQ ID NO: 30215 - DNA, 1008 bp, synthetic construct
  misc_feature 1..1008: note = Description of Artificial Sequence: Synthetic coding sequence
  source 1..1008: mol_type = other DNA
atgagcaagagaaaggccccacaagaaaccctgaacggcggaattaccgatatgttgacagagctggctaacttcgagaaaaacgtttctcaggcaatccataagtataacgcttatcgcaaagcagcctctgtgattgcaaaatatccacataagataaagtcaggtgctgaggccaagaagctgccaggcgttggaacgaagatcgctgaaaaaatcgacgaattcttagccactggcaaactccgcaagctcgaaaagattcgtcaagatgacacttcctcaagcatcaactttctaacacgggtgagcgggataggcccttcggctgcaagaaagttcgtggatgaggggattaagaccctcgaggatttgaggaagaacgaggataaactgaatcatcatcagcggataggcttgaaatacttcggagacttcgagaagagaatccccagggaagagatgctgcagatgcaggacatagttttgaacgaggtcaagaaggtggattcagaatacatagccacagtctgcggctcttttagaagaggcgcagagtcttccggcgatatggatgttttactaacgcacccttcatttacaagcgagagtacaaagcagcctaaactgcttcatcaggtcgtagaacaattgcaaaaagtacactttattaccgatacattgagcaaaggagaaactaaattcatgggggtctgtcagctcccatctaagaacgacgagaaagagtaccctcaccggagaatcgatatccggttaatcccgaaagatcagtactactgcggggtgctctacttcacaggtagcgatatcttcaataaaaatatgagagcccacgcgttggaaaaaggcttcaccattaatgaatatactatccggccactgggcgtgacaggggtggcaggagagcctctgcctgtggattctgagaaagatatctttgattacatccaatggaagtaccgggagcctaaggatcggagcgaatag

SEQ ID NO: 30216 - DNA, 720 bp, synthetic construct
  misc_feature 1..720: note = Description of Artificial Sequence: Synthetic coding sequence
  source 1..720: mol_type = other DNA
tgaggcgacttcgagaagcgcatccccagagaggagatgctacaaatgcaggatatagtcttgaatgaggttaagaaagttgatagcgagtacattgctaccgtctgtggaagctttcggagaggcgcagagtcttcaggcgacatggacgtattattaactcatccttctttcaccagcgagtccacaaaacagccaaagttgttgcaccaggtggtggaacagctgcagaaagtccactttattaccgacaccttgagcaaaggcgagaccaaatttatgggcgtctgccaattaccatctaaaaatgacgaaaaagaataccctcatcgcagaatcgatataagactgattccaaaagaccagtattactgtggagtcctatacttcacagggagcgacatcttcaacaagaacatgcgagcacatgcattagagaaagggtttaccatcaacgagtacactatccgtcctctgggcgtaaccgttctgcaagccactagggaggacttgatgcacaatatgctgcttggcccacagctgaaggctattaaggagctgcaggaaaacccctgtcagtggattgtgaagaaaacctcactgatcaccagcagcgggaacacgggtaatccaaggacaggcgctaatgaggcttgtattcttcctggaagacataaccccattggcgtgttaatctattttctcacatttgccatgtag

SEQ ID NO: 30217 - DNA, 843 bp, synthetic construct
  misc_feature 1..843: note = Description of Artificial Sequence: Synthetic coding sequence
  source 1..843: mol_type = other DNA
atgagcaagagaaaagctccgcaggagactttgaatggcggtatcacggacatgttaaccgagctggctaactttgagaaaaacgtttcacaggcaatccacaagtataacgcataccgaaaggctgccagtgtcattgctaaatacccacacaaaatcaaatctggagccgaagcaaagaaactgcccggtgtgggaaccaagatcgctgagaagattgacgagttcctcgcaacaggcaaacttcgaaagctcgagaagatacgacaggatgatactagtagctccatcaatttcctgaccagagtgtccggtattgggccatccgctgcaagaaaattcgttgacgaagggataaaaaccctggaaggcagccagctggactcatgtcccgtgaagggccatttaaacgggaccgaatcgcttttggacttgatctgggacgtaatgacaatcttgaagctgaaaaacgcagacctcaggaagaatgaagacaaattgaatcatcaccagagaattggactgaagtactttggtgacttcgagaaaagaattcccagggaagagatgctgcagatgcaagacattgtactcaacgaagtgaaaaaagtggactcagagtatattgccacggtgtgtggctcatttcgacgcggagcggagtcctctggcgacatggatgtgctcctgacccatcctagctttacgagcgagtccacaaagcagccaaagctactccatcaagtcgtcgaacagctgcaaaaggtacactttatcaccgacacactgtctaaaggcgaaactaaatttatgggcgtgtgccagcttccatcaaaaaactag

SEQ ID NO: 30218 - DNA, 714 bp, synthetic construct
  misc_feature 1..714: note = Description of Artificial Sequence: Synthetic coding sequence
  source 1..714: mol_type = other DNA
tgagaaaagatcgatgaatttctggcaactggtaaattgcgcaaactagagaaaatccggcaggatgatacatcctcttctattaattttttaacgagagtatccggtattggaccaagcgcagccagaaagtttgtggatgaggggatcaagaccttagaagatcttcgcaagaacgaggacaagctcaatcaccaccagcgaatcggcctgaagtacttcggcgattttgagaaaagaatcccaagagaggaaatgctacaaatgcaggatatagttctaaatgaggtgaaaaaagtggactccgagtacatcgctactgtctgcggttcctttagacgcggagccgagtcatccggagacatggacgtgcttcttacccatccatcttttaccagtgaaagtacaaagcagggggtgtgtcagctgccctcaaagaatgacgagaaagagtaccctcacagacgaatcgatatccgcctgatccctaaggatcagtattattgcggggtcctctacttcacaggaagcgacatctttaataaaaacatgagagctcacgccctggagaagggcttcaccataaatgaatatactattagacctttaggggtaacaggcgtggccggagaaccgctgcccgtggacagtgaaaaggacatcttcgattacatccagtggaagtatcgggagcccaaagacagaagcgaatag

SEQ ID NO: 30219 - DNA, 546 bp, synthetic construct
  misc_feature 1..546: note = Description of Artificial Sequence: Synthetic coding sequence
  source 1..546: mol_type = other DNA
atgctccagatgcaagatatcgtgctgaacgaggtgaaaaaggtggactcagagtacatagctacggtatgcggcagcttcaggagaggcgctgagtcaagcggcgatatggatgttctactcacacacccctcattcacctccgagtctaccaaacagcctaagctcttacatcaagtggtcgaacagctgcagaaagtccactttattaccgataccctgagcaaaggagaaaccaagtttatgggtgtgtgccagcttccaagtaagaatgacgaaaaggagtatccgcacaggaggattgacatccgtctgatcccgaaagatcagtattactgcggcgtcctctacttcactggttctgatatctttaacaaaaacatgcgggcacacgctttggaaaaagggttcactatcaacgagtatacaatcaggccactcggtgtgaccggggtcgcgggagagcccctgccggtggactccgagaaagacatattcgattacatccagtggaagtatcgggagcccaaagaccgaagcgaatag

SEQ ID NO: 30220 - DNA, 1728 bp, synthetic construct
  misc_feature 1..1728: note = Description of Artificial Sequence: Synthetic coding sequence
  source 1..1728: mol_type = other DNA
atggacccacgaggcatcctaaaagcctttcctaagcgacagaaaattcacgcggatgcatcctctaaagtgcttgccaagattcctagacgggaagaaggcgaggaagccgaggagtggttgagttctctgcgcgctcacgtcgtcagaaccggtattgggagagcaagggcagagctgttcgaaaagcagatcgtccagcacgggggacagttatgccctgcccaaggacccggagtgactcacatcgttgtcgacgagggaatggattatgagcgcgcactacgcctgttgcgcctccctcaactcccccctggcgctcaattagtcaagtccgcctggctttcattgtgcctccaggaaagaaggttagttgatgtggctgggtttagcatctttatacccagtagatatctggaccatccgcagccttcaaaggccgaacaggacgcttctatcccaccagggacacacgaggccctgctgcagactgctctcagcccccctcccccacctaccaggcccgtgtcccctcctcagaaggccaaggaggctcctaacacacaggcccagccaatctctgacgatgaggccagtgacggagaagaaacacaggtcagtgccgctgacctcgaagcgctgatcagcggccactatcctaccagcctcgagggagactgtgagccttccccagcccctgccgtgctggacaaatgggtctgcgcccagccatcttctcagaaagcaaccaaccacaatctacacatcaccgagaaactcgaggtgctggctaaggcatacagcgtacagggcgacaagtggagagcactgggctacgccaaggctatcaacgcgctcaagtcttttcacaaacccgtgaccagctaccaggaagcctgtagtatccctggcataggtaagaggatggctgagaagataatcgagatactcgagtccggccatttgagaaaactcgaccatatttccgagtctgtgccagtgttggagctgttctccaacatctggggcgctggcacaaagaccgcccaaatgtggtaccaacagggcttccgaagcctggaagacatcagaagccaagcctccctcactacccagcaggcaatcgggctaaagcactattctgattttctcgaaagaatgcctcgcgaggaagccaccgagattgagcaaaccgtacagaaggccgctcaggcttttaattcggggctgctctgcgtggcctgcgggtcttaccgacgagggaaagctacttgcggagacgtcgacgtcctgatcacacatcctgacggcagatctcacagggggatcttttcccgactactggatagtctcaggcaggagggctttttgaccgatgatcttgtctcgcaggaggagaacggccaacagcagaagtatttgggagtttgccgcctgccaggtcccggaaggcgccatagaagattagacattatcgtcgtaccatactctgagttcgcctgcgcacttctttactttacaggaagcgcccactttaatcgtagtatgcgggctctggccaagaccaagggcatgtctctgagtgaacacgctctgtctaccgccgtcgtgcgaaacacacacggttgcaaggtaggcccagggagagttctgccgacccccacagagaaagatgtctttcgcctcctgggactaccttatcgagagcctgccgagcgcgattggtag

SEQ ID NO: 30221 - DNA, 897 bp, synthetic construct
  misc_feature 1..897: note = Description of Artificial Sequence: Synthetic coding sequence
  source 1..897: mol_type = other DNA
atgcaccaccagaagtatttgcaacggttcctcggtggcaagcgagagaaaaaacagaaggaggcttgtagtatcccgggtattggtaaaagaatggccgaaaaaattattgaaattctggaaagcgggcacctgcggaagctcgatcacatttccgagagtgtcccagtactggagttattcagcaatatatggggggctgggactaaaacggcacagatgtggtaccaacagggctttcgtagcctcgaggatattagatcacaagcatcattgactacacagcaggccatcggactgaagcactatagtgattttttagagaggatgccacgagaagaggctaccgaaatagagcaaactgtccaaaaggcagcccaagcttttaactcagggctcctttgtgttgcgtgcggatcctaccgccgtgggaaagcaacctgtggagacgttgatgtgctaatcacacacccggacggccgatcccaccggggtatcttctctcggttattagattcgctcagacaggaggggtttttaaccgacgatcttgtctcacaagaggagaacgggcagcagcaaaaatacctaggggtgtgtcgtctccctggccctggcagacggcatagacgattggatattatcgttgtgccatatagtgagttcgcctgtgcccttctctattttactggctccgcccacttcaatcgctccatgcgggcactggctaaaacgaaaggtatgagtctttcagaacacgctctgtctaccgccgtggtgcgtaatacccacggatgtaaggtggggcctggcagagttctgccgacccccaccgagaaggacgtcttcagactgttgggcctcccctacagggagccagccgaacgagattggtag

SEQ ID NO: 30222 - DNA, 1548 bp, synthetic construct
  misc_feature 1..1548: note = Description of Artificial Sequence: Synthetic coding sequence
  source 1..1548: mol_type = other DNA
atggatccccgaggcattctgaaggcttttcccaaacggcagaagattcacgccgatgccagctctaaagtcttagctaaaatacctaggagagaggagggtgaagaagcagaagagtggcttagctctctgcgcgcacacgtcgtgcgtacaggtataggcagggctcgcgcagagctgttcgaaaaacagattgtgcagcacgggggacaattgtgtcctgcccagggtcccggagtgacccatatcgtggtcgacgaaggcatggattacgagagagcactaaggcttctgaggttgccacagctccctccaggagcgcagttagtaaaaagtgcatggctgagtctgtgcctgcaggaacgtcgcctagtggacgtggctggattctccattttcattccttcaagatacttagaccatccacagccatcaaaggccgagcaggacgcaagcattccacccggtacacacgaggcgctgcttcaaacggccttaagccctcctccacctccaacacgccctgtctccccgccacagaaggccaaggaggccccaaatacccaggctcagccaataagcgacgacgaggcgtcagacggcgaagagacgcaggtgtctgccgcagacctggaggccttaataagcggacattatcctacatcactggaaggcgattgcgaaccgtctcctgcgcctgccgtgctggataaatgggtctgcgcacaacccagcagtcagaaggccaccaatcataatctacatattactgaaaagctcgaggttctggctaaggcctacagcgtgcagggggacaaatggcgcgcactgggatacgctaaggcgatcaacgctctgaagtcttttcacaaacccgttacaagctaccaggaagcctgctccatcccgggaattggcaagcgtatggccgagaaaatcatcgaaatcctcgaatccggacatctacggaaattagaccacatctcagagtccgttcctgttctggagctgttttccaatatctggggcgctgggacgaaaactgctcagatgtggtaccagcagggattccggagcttagaggacatccggtctcaggccagcctgaccacgcagcaggccattggtctaaaacactacagtgatttcctggaacggatgcctagggaagaagccaccgagatcgaacagaccgtgcagaaagccgcacaagcatttaattctggtctgctgtgtgtggcctgcgggtcctacagacggggaaaggctacgtgtggtgacgtcgacgtgcttatcacacatcccgatggtaggagccataggggtattttctccagactgctggactccttgcgtcaggagggcttcctgactgacgatttggtgagccaggaggagaacggccagcaacaaaagtacttgggagtgtgccgtctgccagggcctgggcgtagacaccgtcggttagacatcattgtggttccctacagtgagttcgcctgtgcgctccaggggggagcttggccatccgcagcccatagccactag

SEQ ID NO: 30223 - DNA, 903 bp, synthetic construct
  misc_feature 1..903: note = Description of Artificial Sequence: Synthetic coding sequence
  source 1..903: mol_type = other DNA
atgcttatgcaccaccaaaaatacttacagcggttcctgggaggcaagcgagagaaaaagcagaaagaagcatgctcaatacctgggattggcaaacggatggcggaaaaaattattgaaatcttggaatcggggcatcttcgtaagttggaccatatcagcgagtccgtaccggtactagagctattttcgaatatttggggggctgggactaagactgctcagatgtggtaccagcagggattccggagcctagaggatattcggagtcaggcttcactgactacgcagcaggcaatagggctgaaacactacagcgatttcctggaaaggatgcctagggaagaggcgacagagatcgagcagaccgtgcagaaagcagctcaggccttcaactccgggttgctatgtgtcgcctgcggcagctacagacgcggaaaagcaacgtgtggagatgtggacgttctgatcacacatccagatggacgctcacatcgcggaatcttctctagactcctggattccctgcggcaggaaggattcttgacggacgacctcgtgtctcaggaagagaacgggcagcagcagaagtacctgggagtgtgtagactcccaggccctggccgtaggcacagacgcctggacattatagtggtgccctactctgaattcgcttgcgcattgttgtattttacgggaagcgcgcacttcaataggtccatgcgagccctcgcaaagacaaaaggtatgtctctgtctgaacatgcattgtccaccgctgtggtgagaaatacccacggatgtaaggtggggccaggaagagtgctgccaacgccaacagaaaaggatgtttttaggctgctggggctaccctatagagaacctgctgagcgggactggtag

SEQ ID NO: 30224 - DNA, 1728 bp, synthetic construct
  misc_feature 1..1728: note = Description of Artificial Sequence: Synthetic coding sequence
  source 1..1728: mol_type = other DNA
atggacccaagaggtatactgaaagctttccctaaaaggcagaagatccacgcggacgcttcatccaaagtgctggctaaaatccctcgaagggaggagggcgaggaggcggaagagtggctgagcagcctgagggctcatgtggtccgtactggaatcggcagagccagagctgaactctttgagaaacagatcgtacagcacggaggccagctgtgtccagcccagggacctggggtgactcatatagtcgtcgacgagggtatggattatgagagagcactcaggctcctgagactgccgcaactgccacccggagcacaacttgtcaaatccgcttggctctctctgtgtctccaggagcggagactggtggacgtggctggcttctccatctttattccttctagatatttagatcatccccagccctccaaagcagaacaggacgcttccataccgccaggaactcatgaagcgctcctccagactgccctctcaccaccgcctccgcctaccagaccagtgagccctccacagaaagctaaggaggcaccaaacacccaggctcagcccatcagcgatgatgaagcaagcgacggcgaagagactcaggtttcagccgctgacttagaggcccttatttcgggacactatcccacctcacttgagggggactgcgagcccagtcctgcgcctgccgtcttggataaatgggtgtgtgctcagccctcaagtcagaaagcgacgaaccacaacctacacattaccgagaaactggaagtactggccaaagcctactccgtgcagggggataagtggagggccctgggttatgccaaggccataaacgctttgaagtctttccacaagccagttacctcataccaagaggcttgttctatcccaggcattgggaaacgtatggcagagaaaattatagaaatcctggagtctggccacctcagaaagcttgatcatatatctgaaagtgtccctgtcctcgagttattctccaatatttggggcgcaggtaccaaaaccgcccagatgtggtatcagcagggtttcagaagtctggaggacatcagatctcaagcctcattgacaacacagcaggcaatcggactcaaacactatagtgatttcctggaacggatgcctagggaggaggctaccgagatcgagcaaacggtccagaaagcagcccaggcattcaattcaggcctgctatgcgtagcttgcggatcctatcgccgagggaaagctacctgtggcgacgttgatgtcctgatcacccacccagatgggaggtcccatagagggatcttctccaggcttctggatagtctgaggcaggaaggctttctaacagatgacctcgtgtcccaggaggaaaacgggcagcagcagaaatacttgggcgtgtgtcgcctgcctggaccgggtcgccgacataggagacttgacattattgtagtgccctactccgagtttgcctgtgcgttgctctacttcactggctccgcacatttcaacagatctatgcgggcactagctaagaccaagggcatgtccctgtcagagcacgccctgagcaccgcagttgttcgcaatactcacggatgtaaagtgggcccaggtcgtgtgctgcctaccccaaccgagaaagacgtgtttcgcctgctggggctcccctacagagagcctgccgagcgcgattggtag

SEQ ID NO: 30225 - DNA, 516 bp, synthetic construct
  misc_feature 1..516: note = Description of Artificial Sequence: Synthetic coding sequence
  source 1..516: mol_type = other DNA
atggattacgagcgcgctctccggctgctgcgcctaccacagctcccccctggcgctcaattggtgaaaagtgcctggttgagcctgtgtctccaggagcgaaggctcgtggatgtcgccggtttctcaattttcatcccatcaagcccttcccttatgatgaaacccgtcatgggcaaaaaacccagattagttcagctgatctggaaaccttcgagcgtcgctaccacccccccaccactcagagagatcgtctccctcgcccaaccactcctaagctggattagcgggtcagtccatagcccacaggctagacgccgacctatcacaacgtccattagtcagcggtcatggaagttttggccgaaaccaacagtattccgggaaacaagcggcggaccatgggcgatgcctcgcccaagtatgccaagccgcgcttctatcagcctcagtccaaggacacgcagacctgctgtgagtttgggcctgggatctgggtggctcagaaaatcttag

SEQ ID NO: 30226 - DNA, 747 bp, synthetic construct
  misc_feature 1..747: note = Description of Artificial Sequence: Synthetic coding sequence
  source 1..747: mol_type = other DNA
atggaggctttgtgtgtgtgctctctgatgcccctccactggtcttggatactgaccgccagccacctggctgcgttctttcaaggcttccgatccctggaagatatccgatcacaagcctctctgaccactcagcaagctattgggctcaagcactactctgactttctggaaagaatgcccagggaagaggcaactgagattgaacagactgtgcagaaggccgctcaggctttcaattcggggctgctgtgcgtcgcttgtggaagctaccggcgaggtaaagcgacctgtggcgacgtcgacgtgcttataacacaccctgatggccgttcacaccggggaattttcagccgactcctggactccctccgccaggaggggtttttgacggacgatctcgtttcccaggaggaaaacggacagcagcaaaagtatctgggagtatgccgtctgcctggacccggtcgcagacacaggcggctggatatcatagtagtgccatattctgaatttgcctgtgctctgctttattttacaggtagcgcccactttaaccgaagcatgcgggcattggctaaaactaaaggtatgtccctttcagaacatgcgctcagcacagccgtcgtgagaaatacgcatggatgtaaggtgggccctggcagagtcttgcccacacctaccgagaaggatgtttttcgcctcctcggcctgccatatcgtgaaccagctgaacgcgactggtag

SEQ ID NO: 30227 - DNA, 1728 bp, synthetic construct
  misc_feature 1..1728: note = Description of Artificial Sequence: Synthetic coding sequence
  source 1..1728: mol_type = other DNA
atggatcccagagggattctgaaggccttcccaaagcgacagaaaatccacgccgatgcatcctcaaaagtgcttgccaagatccctagaagagaagagggtgaagaggctgaggaatggctcagtagcttaagggcacacgtggttaggacaggaatcggcagagcaagggcagagttgtttgagaaacaaatcgtgcaacacgggggacagctctgcccggctcagggccctggtgtgacgcacatcgtggttgacgagggaatggattatgagcgcgctttgagactgctgcgccttccccagttacccccaggagctcagttagtgaagtctgcatggctgagtttatgccttcaggagcgtcgcttagtggatgtggcgggattttcaatatttattcccagcagatacctggatcacccacaaccctctaaggccgagcaagatgcctccatcccacccggaacccatgaggctcttctgcagaccgccctgtcccctcctccccctcccacgaggcctgtgagcccaccacagaaagccaaagaagcacccaacacccaggctcagcctatttctgatgacgaagccagcgatggggaggagacacaggtcagcgccgcagatctggaagcactgatatctggtcactatcccacctccctggagggggattgcgaacctagtccagcccctgccgtgctggataaatgggtgtgcgctcaacccagcagccagaaggccaccaatcacaacctgcacatcaccgagaagttagaggtgctcgctaaggcatactccgtccagggcgacaagtggcgcgctctgggatacgccaaagcaataaacgcgttgaagagtttccacaaacctgttaccagttatcaggaggcttgcagcatacctggcataggcaaaagaatggctgagaagatcatcgagattctggagagcgggcaccttaggaagctcgaccacattagcgaaagtgtgccagtactagagctgttcagcaatatctggggagccggaacaaaaacagcccaaatgtggtatcaacagggcttcagatccctcgaggacatccgcagccaggctagcctgacaactcagcaggcgattgggctgaagcactacagcgacttcctggagaggatgccgagagaggaggcgacagaaattgaacagacggtccaaaaggcggctcaggcctttaattcgggactgctctgtgtcgcctgtggcagttacaggcgagggaaagccacttgcggggatgtagatgtgctgatcacccacccagacggccgatcacatagaggtattttttcgagattgctggactctctgcggcaggaaggtttcttgacagacgatttggtcagccaggaagagaacgggcagcagcagaaatatcttggcgtgtgccgcttgcctggcccaggtcggcgtcaccgcagattggatatcatcgttgtcccgtattctgagtttgcctgcgccctgctgtacttcaccggcagcgcgcatttcaacaggagcatgagggcgctcgctaagacaaagggtatgtctctgtcagagcacgccctgagcacggccgttgttcgcaacacgcacgggtgtaaggtgggcccaggacgggtactgcctacaccaaccgagaaagatgtattcagactccttggcctgccctatcgagagccagcagaacgcgactggtag

SEQ ID NO: 30228 - DNA, 1464 bp, synthetic construct
  misc_feature 1..1464: note = Description of Artificial Sequence: Synthetic coding sequence
  source 1..1464: mol_type = other DNA
atggactacgaaagagcactgcggctcctgaggctacctcagctgcctcctggcgcacagctggtgaaaagtgcttggctctctctgtgtctccaagagcggaggctcgtcgatgtggccggtttttccattttcataccctctcggtatctggaccatcctcagccaagcaaagctgagcaagacgcatcaattccacccggaacccacgaagctctcttgcagacagctcttagtcctcccccaccccctactagacccgtctctccaccacagaaagccaaggaagctcctaatacccaggcgcagcctattagcgacgatgaggcctccgatggcgaggaaactcaggtgtcagctgcagatctcgaagctcttattagcgggcattaccctacttccctggagggggactgcgagccctctcccgctcccgcagtgctggacaaatgggtctgcgcgcagccttcatctcagaaggctacgaatcacaacctccacattacggagaaacttgaggtcctggcaaaagcatactctgtgcagggcgacaaatggagggctttgggttatgcaaaagccatcaatgccctgaaatcatttcacaagcccgtgaccagttaccaggaagcctgctccattcctggcatcggaaaacgcatggctgaaaagataatcgagatcctggaatctgggcacctgcgtaaactcgatcacatcagtgagtccgtacccgtgctcgagctcttttctaatatctggggagccggaaccaagactgctcagatgtggtaccagcagggattcagatctctggaagatatccgctcacaggcttctctgactacccagcaagcaatcggcctaaaacattattcagacttcttggagcgcatgcctcgggaagaggcaaccgaaattgagcagaccgtacagaaggccgctcaggcattcaattcaggccttctctgtgtagcctgcggctcttatcgacgaggcaaagccacttgtggagacgtcgacgtgctgataacacaccctgatgggaggtctcacagaggcatcttctcacggctcctcgactccctccgccaggagggattcttaacagacgacttggtgtcccaggaagagaacgggcagcaacaaaagtaccttggtgtgtgcagactgccagggccagggaggcgtcatcgcaggctggacatcattgtcgtgccttactctgaattcgcttgtgccctgttatacttcacgggctcagcccattttaaccgttctatgcgggctctcgcgaagactaaaggaatgtctctgtcagagcatgctttatctacggctgttgtccgaaatacgcatggctgcaaggtcggtcctggccgagtcctgccaactccaaccgaaaaagacgttttccggctgttagggctgccttaccgagagcccgcagagagagattggtag

SEQ ID NO: 30229 - DNA, 1548 bp, synthetic construct
  misc_feature 1..1548: note = Description of Artificial Sequence: Synthetic coding sequence
  source 1..1548: mol_type = other DNA
atggaccccagagggatcctgaaagccttccccaaacgacagaagattcatgcagatgcatcctcaaaggtgctcgctaaaatcccccgacgggaagaaggtgaagaagccgaggaatggctgtcttccctccgcgctcatgtggtccgaaccggcatcgggagagccagagcagaactatttgagaaacagatcgtgcaacacggcggacagctgtgccccgctcagggtcccggtgtgactcacatcgtcgtcgatgagggtatggactacgaaagggctttgagactgctgagactgccacagctgccgcctggcgcacagctcgtgaagtccgcctggcttagcctgtgcctgcaggagcgcaggctcgttgacgtagccggattcagtattttcattccgtccaggtacctggatcatccacagccatccaaggccgaacaagacgcatctatcccacccggtactcacgaggctctactgcagactgctctgagccctccccctcccccaacccgacctgtcagtccaccgcagaaagctaaagaggcacccaacacgcaggctcagccgatttcagatgacgaggcctccgatggggaagagacccaagtctctgccgcagatctggaggctctgattagtggacactaccccacgtcactggaaggggactgtgaaccctctcccgcacccgcagtgttggacaagtgggtgtgtgctcaaccgtcctcccagaaggccacaaatcacaatctgcacataactgagaagctcgaggtccttgcaaaggcttattctgtgcaaggggacaagtggcgcgctctggggtatgctaaggctatcaatgcgctgaaatcatttcacaaacctgtgacttcataccaggaagcctgcagcatccctggaattggcaagcgcatggcagagaagattatagaaattctcgaatccgggcacctgaggaaattagaccatatctcagaatcagtccccgtcttagagttattctcgaatatttggggggctgggaccaaaaccgcccagatgtggtaccagcaggggtttaggagcttggaggacatccgatcccaggcctccctaaccacacagcaggcaattggcctcaaacactattccgacttccttgaaagaatgccccgtgaagaagcgaccgagattgagcagacggtccagaaggcggcacaggcctttaactcagggctgctctgtgtggcgtgtgggtcttacagacggggaaaagcaacttgtggggacgttgatgtcctgatcacgcacccggatgggaggagtcatcgcggaattttttctaggttactggacagtctccggcaggagggcttcttaactgacgatctggtgagtcaagaggagaacgggcagcaacagaagtatctgggggtctgccgactcccgggtcctggtcgtaggcaccgccgattagacatcattgtagtaccttacagtgagttcgcttgtgcgttgcagggaggagcttggcccagtgcggcacattcccactag

SEQ ID NO: 30230 - DNA, 810 bp, synthetic construct
  misc_feature 1..810: note = Description of Artificial Sequence: Synthetic coding sequence
  source 1..810: mol_type = other DNA
atggacccccgagggatcttgaaagctttcccgaagcggcagaaaatccatgccgacgcgagtagtaaagtgctggccaaaattcctcgcagggaagagggggaagaggcggaggaatggctcagctcgctcagagcacacgttgtgcgcacaggaataggcagagccagagctgagctgtttgaaaagcagatcgtccaacatgggggtcaactgtgcccagcgcagggcccaggagtgactcatatcgtcgtggacgagggcatggactacgaaagggccttacggctgctgagattgccgcagctccctccaggcgcacaactcgtaaagagcgcgtggctgtcactgtgcttgcaggaacgacggcttgtcgacgtggcgggtttctctatctttatcccctcaaggtacctcgatcatccacagcctagcaaagcagagcaggatgcttctatccccccagggacgcacgaggccctgctccagactgcactatcccctcccccaccgccaacgagaccagtgtccccaccacaaaaagcaaaagaggccccaaatacacaagcccagcccatctcagatgacgaagccagcgatggcgaggagacacaggtatccgcagctgacttggaggccctgatcagcgggcactatcctactagccttgagggcgattgcgaaccctcccccgcacctgcggtccttgacaagtgggtgtgcgcccagccctcaagtcagaaggctaccaaccataatctgcatataacggaaaaattggaagttctagcaaaggcttatagtgtctag

SEQ ID NO: 30231 - DNA, 1413 bp, synthetic construct
  misc_feature 1..1413: note = Description of Artificial Sequence: Synthetic coding sequence
  source 1..1413: mol_type = other DNA
atggatcccaggggcatattgaaagcctttcctaaaagacaaaagatccatgctgacgcatcaagtaaggtgctggctaagataccaaggcgggaagaaggggaagaggccgaggagtggctgagctctctcagagcgcacgtggtgagaaccggtatcggccgagctagggcagagctctttgagaagcaaatcgtccagcacggcggacagctctgccccgcacaaggccctggcgtgacccacatagtggtagacgaagggatggactacgagcgcgctttgcggctcctccgtctgcctcaattgccaccaggcgcacaactggtcaaaagcgcttggttgtcgttgtgcctccaggagcggaggctggtagacgtggctggctttagcattttcatccctagccgctatctggaccatcctcagccatccaaggctgagcaggatgcctccatccctccgggtactcatgaggcactattgcagaccgccctgtctcctccccctcctcctacccgaccagtctccccaccgcagaaagctaaggaagccccaaatacccaggcccagccgatctctgatgacgaggccagcgacggagaggaaacccaagaggcctgtagcattcctggcatcggaaagcggatggctgagaaaattatagaaattctagaatcgggtcatttacgcaagctggatcacatctcagagtcagtgcctgtgttagaactgttcagcaatatatggggggcagggactaagacggcccaaatgtggtatcagcaggggttccgcagcctggaagacataagatctcaagccagcctcaccacccagcaggctattggcctgaagcattattctgatttcctggaacggatgccacgcgaagaagcaacagaaattgaacagacagtccaaaaggctgcacaggcatttaattctggcctgctgtgcgtggcttgcggttcatacaggagaggcaaggccacatgcggtgacgttgacgtcctgatcacgcatccggatggacgtagtcatcgtggaattttctcacgattactagacagcctgcggcaggaagcagttccgtcggtgggccctgggttccttacagacgacctggtgtctcaggaggagaatggacaacaacagaaatacctcggcgtctgccgccttcccggaccgggacgtcgacatcgtagattggacattatcgtagtgccctattcagagtttgcttgcgcccttctgtattttactggtagcgcgcacttcaaccgtagtatgagggcacttgctaagactaagggaatgtcgctgagtgagcacgctctctccaccgccgtcgtgagaaatacccacgggtgcaaggttggcccaggcagggttttacctaccccgacctag

SEQ ID NO: 30232 - DNA, 1005 bp, synthetic construct
  misc_feature 1..1005: note = Description of Artificial Sequence: Synthetic coding sequence
  source 1..1005: mol_type = other DNA
atggatcctcggggaattcttaaagccttccctaaacggcagaaaatccacgccgatgcgagttccaagccctcctgcgcttcagctcttcggtgcctctgccctgaaagcgatattggggcagacagcgcgtgccccggaccggctgagtggctctcctccctgcgcgcacatgtggtccgcactggcattgggagggcacgggctgagctgttcgaaaagcagatcgtgcaacacggagggcagctctgtccggctcagggcccaggagtcacacacatcgtcgtggacgagggcatggactacgagcgcgctctgcggctcctgagacttccccaactccctcccggagctcagctggtgaagagtgcatggctcagcctttgcctccaggagagaaggttagttgatgtggctggatttagcatttttatcccttcacgttacctcgatcatccccaaccatccaaagcagagcaggacgcctccatcccccctggcacccacgaggcccttctccagacagcgctgagtccaccacccccaccaacacggcctgtctccccccctcagaaggctaaggaagctcctaacactcaggcacaacccatcagtgacgatgaggcttctgatggtgaggaaacgcaggtgtctgccgctgatctggaagcactcattagcggacactaccccacctcattggaaggagattgcgaacctagccccgctcccgctgtccttgataagtgggtctgcgcccagccaagcagccaaaaggcaacgaaccacaacctgcatattaccgagaagttggaggtgctggcgaaggcatatagcgttcagggcgacaagtggcgggctctgggatacgccaaagccatcaatgctctgaaatcttttcataaacccgtgacatcataccaggaggcatgttccattccaggtatcggaaaaagaatggctgaaaaaatcattgaaattctcgaatcaggccacctcaggtag

SEQ ID NO: 30233 - DNA, 657 bp, synthetic construct
  misc_feature 1..657: note = Description of Artificial Sequence: Synthetic coding sequence
  source 1..657: mol_type = other DNA
atgcaccaccagaaatacctgcaaaggtttttggggggaaaaagagagaagaagcagaaagaggcttgtagtattcctggtattggcaaacgtatggctgaaaagatcattgagatacttgaaagcggccacctccgcaagctggatcacatttctgagtcagtgcccgtgctagagctgtttagcaatatctggggagccggaactaaaaccgctcagatgtggtatcagcagggcttccgctctcttgaggacatcagaagccaggcctctctcacaactcaacaggcaattggcttgaagcattatagcgactttcttgaacgaatgccaagagaggaagcaacagagattgaacagacggtgcaaaaagctgcccaagcattcaactcgggtctgctgtgtgtggcctgcggatcctacaggcgaggtaaggcgacttgtggcgatgtcgacgtgctcataacccatcccgatggacgcagtcatcgcggtattttctctagactgctcgactctttgaggcaggaggggtttctcacagatgacctggtgagtcaagaggagaatggacagcaacagaaatacctcggagtgtgtcgactacccggaccaggacgccgtcataggcgtctggacatcatcgttgtgccctag

SEQ ID NO: 30234 - DNA, 567 bp, synthetic construct
  misc_feature 1..567: note = Description of Artificial Sequence: Synthetic coding sequence
  source 1..567: mol_type = other DNA
atggatccaagaggtatacttaaagcatttccaaagcgacagaagatccacgccgatgcttcttccaaggtactcgcaaagatccccagacgtgaggagggcgaagaggccgaggagtggctgtcctcactacgtgcccatgtcgtgcgcactggaattggcagggcacgagctgagcttttcgagaaacaaattgtacagcacgggggacagctctgcccagcccagggtcccggagtgacacacattgttgtagatgagggtatggattacgagcgcgctcttagactgctcaggcttccacaactgcctccgggagcacagctggtcaaaagtgcgtggctgtcactgtgtctgcaagaaagacgcctggtggacgtggcaggcttctccatttttattcccagtaggtatctcgatcaccctcagccgtcaaaagccgaacaggacgcaagtataccgccaggcacacacgaagccctattacagaccgcgctgagtcctccacctccgcctacacggccagtttcacccccacagaaggccaaggaagctcctaacacgtag

SEQ ID NO: 30235 - DNA, 516 bp, synthetic construct
  misc_feature 1..516: note = Description of Artificial Sequence: Synthetic coding sequence
  source 1..516: mol_type = other DNA
atggattatgagcgcgcactgcggctccttcgcctgcctcagctgccacctggcgctcaactcgtcaaatccgcatggctgagtctgtgtctgcaggaaagaagactggtggatgtcgcaggcttttcaattttcattccttcctccccaagcttaatgatgaagcctgtaatgggtaagaaaccccgtctggttcagcttatatggaaaccgagctccgtggcaaccactcctcccccactaagagaaattgttagccttgcccagccattgctctcttggatcagtggcagcgtccacagtcctcaggcccgaaggcgacccatcactacctccattagtcaaagatcttggaaattctggcctaagcctacggtatttcgcgagacgagcggtggaccctgggctatgcccaggcctagtatgcctagccgggcttcaatatcattgagcccgaggacccggaggccagcagttagtcttgggttagggtctggctggctgcgtaagagctag

SEQ ID NO: 30236 - DNA, 459 bp, synthetic construct
  misc_feature 1..459: note = Description of Artificial Sequence: Synthetic coding sequence
  source 1..459: mol_type = other DNA
atggactacgagcgcgctttgcgtttgcttagattacctcagctcccacctggtgctcagttggtgaaatctgcctggttatctctgtgtctgcaggaacgccgtctggtggatgtggccggattcagcattttcatcccatcctcccctagcttaatgatgaaacctgtcatgggcaagaagccaaggctcgtgcagctgatctggaagccttctagcgtggcgaccactccaccccctctgcgcgaaatagtgagtctggcccagcccctgctctcgtggatcagtggctcggtccattctccccaggccagaagacgccctatcacaacctccatttcccaaaggtcctggaagttctggcctaaaccgaccgtattccgggaaacctccggcggtccttgggccatgccccgaccgtctatgcccagcagagcgtcaataagtctgtccccctag

SEQ ID NO: 30237 - DNA, 939 bp, synthetic construct
  misc_feature 1..939: note = Description of Artificial Sequence: Synthetic coding sequence
  source 1..939: mol_type = other DNA
atgcatcatcagaagtaccttcagcgtttcctaggcggaaaaagggaaaagaaacaaaagccgatcagcgacgacgaggccagcgatggagaggagacccaggaagcctgcagcattcctggtatcggcaagcgcatggctgagaagattatcgaaatattggagtcagggcacttgagaaagctagatcatatcagcgaatcagtgcccgtgctcgaattgttcagtaacatatggggcgctggcaccaaaactgctcaaatgtggtatcagcagggtttcaggtctctcgaggatatccggtcgcaggctagcctgacaactcagcaggccattggcttgaagcattacagtgatttcctggaaagaatgcccagagaggaagccaccgagattgagcaaacagttcagaaggcagcgcaggctttcaattctggcctgctgtgcgtggcctgcggatcttaccgtcgtgggaaagctacctgtggtgatgtggatgttctgatcactcatcccgatgggaggtcacaccgcggaattttttcgaggttactggatagcctaagacaggaggggttcctgaccgatgacctggtcagccaggaggagaacgggcagcaacagaaatacctcggagtctgcagactccctggcccaggacgacggcatcgtcgactggatataattgtggtcccatattcagagttcgcttgtgctctgctctacttcacaggtagtgctcacttcaacaggagcatgcgggctctggccaagacaaaggggatgtccctgagcgaacatgctctgagtacggccgtggtgagaaacacacacggctgtaaagtcgggccaggtcgcgtcctccccacacccaccgaaaaagatgtctttcgcctgctaggcctcccctaccgtgagcccgcagagagagactggtag

SEQ ID NO: 30238 - DNA, 1401 bp, synthetic construct
  misc_feature 1..1401: note = Description of Artificial Sequence: Synthetic coding sequence
  source 1..1401: mol_type = other DNA
atggccgaccagctgtacctcgaaaacatcgatgagttcgtgacagatcaaaacaaaattgtgacctacaaatggttaagttacaccctgggagtccatgtcaaccaggcaaagcagatgctttacgactacgtagaaagaaagagaaaagaaaactccggggctcagctacacgtaacatatctcgtgtccggctcgctgatacagaatggtcatagctgccataaggtggcagttgttagggaggataaactggaagcggttaaatccaagctggcagtgactgccagcatccatgtgtattctatccagaaggcaatgttgaaggatagcggccctctgtttaataccgactacgatattcttaagtctaacctacaaaattgctccaagttcagcgccatccaatgcgcagccgcagtgccgagagccccagcggagtcaagctccagcagcaagaagtttgagcagtcccatctgcatatgagttcagagacgcaagcaaacaacgagctgaccaccaacgggcatggaccacctgcctccaaacaggtgtctcagcaaccaaaaggcattatgggaatgtttgcctccaaggccgcagcaaaaactcaagaaaccaataaggaaactaagaccgaagcgaaagaggtgacaaacgcctcagccgctggcaataaagctcccggaaaaggcaacatgatgtccaatttctttgggaaggccgcaatgaataaatttaaggtcaacctcgattctgagcaggcagtcaaagaggagaaaatagtagaacagccaacggtgtccgttacagagcctaaactggctaccccagctgggttaaagaaaagtagtaaaaaggctgagcccgtcaaggttctgcagaaagagaaaaagcgtgggaagagagtcgcgttgtctgatgatgaaaccaaggagaccgagaatatgcgcaaaaaacgcaggaggatcaaactccccgagagtgacagctctgaagacgaggtgtttccagattcaccaggtgcgtacgaagccgaatctccatcaccccctcctccgccatcacccccacttgagccagtgcccaagacggaacccgagcctccatctgtgaagagctcttccggggagaataaaagaaagcggaaaagagtgttgaagagcaaaacatatctggacggcgagggttgcattgtcaccgaaaaagtatacgagtcagagtcatgtacagactcagaggaggagctgaatatgaaaacatcctccgtccacaggccccctgcaatgactgtgaaaaaggaacctcgcgaagaacgaaaggggcctaagaagggcaccgccgctctgggcaaggccaatcgtcaggtgtcgataacaggatttttccaaaggaagtag

SEQ ID NO: 30239 - DNA, 1284 bp, synthetic construct
  misc_feature 1..1284: note = Description of Artificial Sequence: Synthetic coding sequence
  source 1..1284: mol_type = other DNA
atgctctatgactatgtggagagaaagaggaaagagaacagcggtgcacagctccacgtgacatacctcgtcagtggatccctaattcaaaacgggcattcatgtcacaaggtggccgtagtacgggaagacaaattagaagccgtgaagtcaaagttagcggtgaccgcgtctattcatgtctatagcatccagaaggctatgctgaaggatagcggtccgctgttcaatactgattatgacattctgaaatccaatctccagaattgctcaaagttcagcgccatccagtgcgcggcagcagtcccaagggcacccgctgagtcttcgtcttccagcaagaaatttgagcagagtcacctacatatgtcatccgagacacaggccaacaatgagctgacaacgaacgggcacggcccacctgctagcaagcaagtctcccagcagcccaaagggattatggggatgttcgctagtaaagccgcagctaagactcaagagactaataaggagaccaagaccgaagccaaagaagtaaccaatgcgagtgcagccggaaacaaagccccagggaaaggcaatatgatgtcgaatttcttcggcaaagcagccatgaacaagttcaaagtgaatctggacagtgagcaggctgttaaagaagaaaaaatcgtggagcagccaactgtcagcgtgactgaaccaaaacttgcaaccccggctgggcttaagaagtccagcaaaaaggccgagccagtgaaggtccttcaaaaggagaagaaacggggaaagagagtcgccttatccgacgacgagaccaaggaaacggagaatatgaggaagaagaggaggcggatcaagctgccagagtccgactcttccgaggacgaagttttccccgacagtcctggcgcatacgaggcagagtctccaagcccgcctcccccaccatcaccaccgctagagcccgtccctaaaacggagccggagcctcctagcgtcaagagttcttcaggcgaaaataaaagaaagcggaaacgagtgctgaaaagtaaaacgtatttggacggggagggttgtattgtcaccgagaaggtttacgagtccgagtcgtgtacagacagcgaggaggaactgaatatgaaaacgtcatccgtgcatcgcccacccgcaatgaccgtgaagaaggagccacgagaggagagaaaaggacccaagaagggcaccgctgctttgggcaaggctaacaggcaggtatccattaccggtttttttcagagaaaatag

SEQ ID NO: 30240 - DNA, 1083 bp, synthetic construct
  misc_feature 1..1083: note = Description of Artificial Sequence: Synthetic coding sequence
  source 1..1083: mol_type = other DNA
atgctgaaagatagtggaccacttttcaatactgactatgacattctcaagagtaacctccagaattgcagcaaattttctgcaattcagtgtgccgctgcagtgcccagagcacccgctgaatccagtagctcctcaaagaaattcgagcaaagccatctgcatatgagctccgagacccaggcgaataatgagctgaccaccaatgggcacggcccaccagctagtaaacaggtgagtcaacaaccaaagggtatcatgggaatgttcgccagcaaggctgcggctaaaacacaagagacaaacaaggagaccaagaccgaagctaaagaggtcactaacgcctctgccgcaggaaacaaggcacctggaaaaggaaatatgatgtccaactttttcggtaaggccgcaatgaacaaattcaaagttaacctggactccgaacaggctgttaaggaggaaaagatcgtggagcaacccactgtgagcgttaccgagcctaagctggcaactccagcagggctgaaaaaatcctctaagaaggccgaacccgtgaaggtactgcaaaaggagaagaagaggggcaagagagtagccctctctgatgatgagacgaaagaaaccgagaatatgagaaaaaaacgccgaaggatcaagctgcccgagagcgattccagtgaggatgaagtgttccccgatagtcctggagcctatgaagccgagtccccctcgcctccgccacccccttcaccaccactcgagcccgtccctaaaaccgaaccagaaccaccgagtgtaaagtcttcctccggtgagaataagcgtaagcgaaagagagtcctcaagtcaaaaacctacctcgatggagaaggctgcattgtaacagaaaaggtctatgagtccgagagctgtactgattcagaagaggagctgaatatgaagacgtcgtccgttcacagaccacccgctatgaccgtcaagaaggaaccacgggaagaaagaaagggtcccaaaaagggcactgcagcccttggaaaggctaacaggcaagtcagcattacaggattctttcaaagaaagtag

SEQ ID NO: 30241 - DNA, 804 bp, synthetic construct
  misc_feature 1..804: note = Description of Artificial Sequence: Synthetic coding sequence
  source 1..804: mol_type = other DNA
atggcggatcagctctacctagagaatattgacgaattcgtgaccgatcagaacaagatcgttacatacaagtggctatcgtataccctcggagtgcatgtcaaccaagcgaaacagatgctatacgactatgtcgaaaggaagagaaaggaaaactctggcgcacagctgcatgttacctatttggttagtggttctctcatccagaatgggcattcctgtcataaggtggccgtggtgcgggaggataagctcgaggctgtgaagagcaaactggccgtgaccgcgtcaatccacgtctacagtatccagaaagcaatgctgaaggactcagggcctctcttcaacacagactatgacattctcaaatctaatctgcagaattgttcgaagttttctgcgattcagtgcgcagctgctgtccccagagcaccggctgaaagctcttcatctagcaaaaaatttgaacagtcacacctgcatatgtcatctgaaacacaagccaataatgagctcacgacaaatgggcacggccctcccgcatcgaagcaggtttcacaacagccgaagggaattatgggcatgttcgcttccaaagctgctgcaaagacccaagagaccaacaaggagacaaagactgaggctaaggaggtaacgaacgcctcagccgctggcaataaagctcctggcaagggtaacatgatgtctaacttttttggtaaagcagcaatgaataaatttaaagtcaacctggactctgagcaggcagttaaagaagagaagatcaaagagaagaaacggtag

SEQ ID NO: 30242 - DNA, 1566 bp, synthetic construct
  misc_feature 1..1566: note = Description of Artificial Sequence: Synthetic coding sequence
  source 1..1566: mol_type = other DNA
atgggggaagtggaggcgcctgggagactgtggttggaaagtccgccaggcggagcccctcctatctttcttccttccgatggacaggctctggtgcttggcaggggtcctctcacacaagtcacagaccggaagtgttcgcgcactcaggtggagctcgtagccgatcctgagacccgaactgtggccgttaaacagctcggggtgaatccatctacaactggcacacaggagctgaaacccggtctcgaagggtccctgggggtcggtgacactctgtacttggtgaatgggctgcacccgcttactctcagatgggaagagacacgaacacctgagtctcaaccggatacccccccagggacacctcttgtgtcacaggatgaaaagagagatgcagaactccctaagaagagaatgcgaaagtccaatcccggttgggaaaaccttgaaaagctactcgttttcacagccgctggggtcaaacctcagggcaaagtcgctggattcgacttggacggcaccttgattacaaccaggagcgggaaggtgtttcccaccgggccaagcgattggagaatactttacccagagatcccaaggaagctcagggaactggaggcggagggttataaacttgtcatcttcactaatcaaatgtccattggcagaggcaagcttcctgccgaggagttcaaggccaaggtcgaggcagtggttgaaaagctgggggttcctttccaggtccttgtcgccactcatgctggtttataccggaagcccgtgaccggcatgtgggaccacctgcaggaacaagccaacgacgggactcctattagcattggagactctatctttgtaggagatgcagccggtcggccagccaattgggcccctggaaggaagaaaaaggatttcagctgtgccgatcggttgtttgcactcaatctcggactccctttcgctacccccgaagaattctttctcaaatggcccgcagccggattcgagctaccggcattcgatccacgaacagtgtcccggtccggcccactctgtctcccagaatcccgtgccctgttgagcgcttcacccgaagtcgtggtggcagtcggctttcctggtgccggaaagtcgacatttctaaagaagcacctggtctcggccggatatgtgcacgttaatagggacacactcggttcctggcaacgctgcgtgacaacctgcgaaaccgccctaaagcaggggaagagggtcgccatcgacaataccaaccctgatgccgcttctcgtgctcgctatgtgcagtgcgccagagctgctggagtgccatgtcggtgcttcctctttacagccaccctcgagcaggcgcgacacaataataggttcagagaaatgactgactctagccacattccagtctcggatatggtgatgtacgggtaccgcaaacagtttgaggctccaacactggccgagggcttctctgcgattctggagatcccgttccggctgtgggtggaacccaggcttggtaggttgtactgccagttctcagagggttag

SEQ ID NO: 30243 - DNA, 699 bp, synthetic construct
  misc_feature 1..699: note = Description of Artificial Sequence: Synthetic coding sequence
  source 1..699: mol_type = other DNA
atgttgggtgcaatgttccgggctggcactcccatgccaccaaacctaaattcccaagggggagggcattattttatcgacagggatggaaaggcctttcgtcacatcctcaacttcctgagactcggccgactagatcttcctcgtggatatggagagaccgccctccttagagctgaagcagacttttaccagatcagacccctgctcgacgctctgcgggaactggaggcttcccagggcacacctgcacctaccgccgcattgttacacgcagatgtggacgtgagccctcgcttggtgcactttagcgcccgacggggacctcaccattacgaactttccagcgtgcaggtggacacttttagggctaatcttttttgtaccgattccgaatgtctgggggctcttagggcgaggtttggtgttgcctccggggatagggctgagggttcaccgcattttcacctcgagtgggccccaaggccggtggaacttcccgaagtggaatacggacggctagggttacagcctctgtggaccggcggaccaggcgagagacgggaagtggttgggacccccagtttccttgaggaggttctgagggttgctttagagcacgggtttcgcctggattctgtctttcccgaccccgaggacctgctaaattcgaggtccctcaggtttgtcagacattag

SEQ ID NO: 30244 - DNA, 5157 bp, synthetic construct
  misc_feature 1..5157: note = Description of Artificial Sequence: Synthetic coding sequence
  source 1..5157: mol_type = other DNA
atgaaccaaaatacaaccgaaccggtggccgctacagaaaccctagctgaggtgccagagcatgtgctgaggggcttgcccgaggaggtgcgactgtttccaagtgctgttgataaaacaagaatcggtgtctgggccaccaagcccatcctaaaagggaagaaatttggacctttcgtgggcgataagaagaagcgctcacaagtcaagaacaacgtgtacatgtgggaggtgtattatcccaatctcgggtggatgtgcatcgatgcaacagatcctgagaaggggaactggctccgatacgttaattgggcgtgctccggtgaggaacagaatctgttcccgctggaaataaatagagccatctattataagacactgaagcccattgcgccaggggaggagctgcttgtgtggtataatggcgaggataatccggaaatcgccgctgccattgaagaagagagagcctcagcgaggtctaaaaggtcttcgccaaagagccgcaaggggaagaagaagtctcaggagaacaagaataagggcaacaagatccaggacatacagctcaaaacctcggagccagattttacctcggccaacatgcgtgactccgccgagggcccaaaggaggacgaggaaaaaccttccgcaagcgcactcgaacagcctgctaccctgcaagaggtcgcaagccaagaagttcctccagagttagccactcccgctccagcttgggagcctcagccagagcctgatgagcgcctagaagccgcagcttgtgaggtgaacgacttgggtgaagaggaagaggaggaagaggaggaagacgaggaggaggaagaagatgatgacgatgacgaactggaggatgagggcgaggaggaagcctccatgccaaatgagaattccgtgaaagagccagagattcgctgcgatgaaaaaccagaggacttactggaagaaccaaagaccacgtcagaagagacactcgaggattgttccgaggtgacccctgccatgcagatacctagaaccaaggaagaggctaatggcgatgtgtttgagactttcatgttcccctgccaacactgtgaacggaaatttaccaccaagcagggtctggagaggcatatgcatatacacatctccacagttaatcatgcgttcaagtgtaagtactgcggcaaagcattcggcacgcagattaaccggagacgccacgagaggagacatgaggccggactcaaaagaaaaccatcccagacactacagcctagtgaggatttggccgacggaaaggctagtggggagaatgtggcctcaaaagacgactcatctcccccttcactgggcccagactgtctcatcatgaattccgagaaggccagccaggataccatcaattccagcgttgtagaagagaatggagaagttaaagagctgcatccttgcaagtactgcaagaaggtgttcggaacacacaccaacatgaggcgacaccagagacgcgtccacgagcggcaccttatacctaagggagtcagacgaaaaggcggactggaagagccacagccgccagcggagcaggcacaggctacccagaatgtgtacgtaccttcgaccgagcctgaggaggagggggaagcagatgacgtgtacatcatggacatctcctcaaatatctctgagaacctcaactactacattgatggaaagatccaaacaaataacaacacctctaattgcgatgttatcgagatggagagcgcatcagcagacttgtatgggataaactgccttcttacaccagtcactgtcgaaataacccagaatattaagactactcaggtccctgtcacagaagaccttcctaaagagccacttggctccactaattccgaggcgaagaagcgcaggacagctagtcctcccgcactccccaaaatcaaagctgaaacggactccgatccaatggttcctagctgttctctctccctgcctctatccatatccactaccgaagcagtcagcttccacaaagagaagagcgtctatctgtccagcaagctgaagcaactccttcaaacgcaggataagctcacaccagccggaatttccgcaacagaaattgctaaactaggacctgtatgcgtaagcgcgcctgctagtatgctgcccgtgacatctagtcggtttaaacgcaggacttcctcacctcctagcagtcctcagcactcacccgcacttagggacttcgggaaaccctccgatggtaaggcggcatggaccgacgcaggactgactagcaaaaaaagcaagcttgaaagtcatagcgacagcccagcctggtcgctgagcgggagagacgagagagaaaccgtcagtccaccatgctttgatgagtacaaaatgagcaaggagtggaccgcttcctccgccttcagctctgtgtgcaatcagcagccactggatctgtcaagtggagtgaaacagaaggcagaaggcaccggtaaaactcctgttcaatgggaaagtgtcctcgatcttagtgttcacaagaaacactgttcagatagcgagggaaaagagttcaaggagtcacactccgtgcagcctacctgcagcgccgtcaaaaaaagaaaaccaactacatgtatgttgcagaaagtcctgttgaacgaatacaacggcatcgatttgcccgtcgagaaccccgctgatggcaccaggtccccctctccttgtaaatcactagaggcccaaccagatcccgatctggggccaggctctggcttcccggcacctaccgtagaatcaaccccagatgtctgtccctcaagtccagccctgcagactccttcactgagcagtggccagctcccccctctgctgatccccactgacccgagttcgccacccccttgtccaccagtcctcaccgtggctacgccaccacctccgttgttacctaccgttccgttaccagctccgtctagtagcgccagtccccacccttgcccctccccactaagtaacgccaccgctcaaagcccactccctatcttgagtcctaccgtgtctcccagccccagccccatccctccagtggaaccgctcatgagcgccgcttcacccggaccccctacgctatccagctcctccagctccagtagcagcagctcctcattctctagcagctcttcatcctcctctccctcccctcccccactgtcagccatctcttcggttgttagctctggcgacaatctagaggccagtcttccaatgatatcatttaaacaggaagagctagagaatgagggattgaaaccgagagaggaaccgcaatcagccgcagagcaagacgtggtcgtccaggagacatttaacaaaaacttcgtctgcaatgtgtgtgagtctccctttctaagtatcaaggatctgaccaaacatctcagcattcacgcggaagagtggccctttaagtgtgagttctgtgtgcagctgttcaaagacaagacagatctgtctgaacatcggttcttattgcacggcgttgggaatatattcgtgtgcagcgtgtgtaagaaggaattcgcatttttgtgcaacctccagcaacaccagagagacctgcaccctgataaggtctgcacccatcacgaattcgagtctgggacccttagaccccagaattttacagacccatctaaagcacacgtggagcacatgcagtctttacctgaagaccctttggagactagcaaggaggaggaagagttgaatgatagttcagaagagctctataccacaattaagatcatggctagtggtataaagaccaaggatcccgatgtgcgcctggggctcaaccaacactacccctcgttcaaacccccaccttttcagtaccatcaccggaaccccatgggtatcggggttaccgccacgaacttcaccacgcacaacatcccccagaccttcaccacggccatccgctgcactaagtgcggaaaaggggtggataatatgcctgaactgcataaacatatcctggcatgcgcctccgcatccgataaaaaaaggtacacccccaagaagaatccagtgcccctcaaacagacggtacagccaaaaaatggcgtggtggtgcttgataattccgggaagaatgcgttccggagaatgggccagccaaaacgcctcaatttcagcgtagagctgtccaaaatgtcaagcaacaaactcaagctcaacgcattgaaaaagaaaaatcagctggtgcaaaaggcaattctccaaaagaacaagagcgcaaaacaaaaggctgacctgaagaatgcctgtgagagttcctctcacatttgcccatactgcaatagagaatttacatatattgggtccctcaataagcacgccgcattctcttgtcccaaaaagcccctgagcccacccaaaaaaaaagtctcccattccagtaagaaaggcggtcacagttcaccagccagctctgacaagaattcgaattcaaatcacaggaggaggacggccgatgccgaaatcaaaatgcagtccatgcaaacccctctgggtaagacaagagcacggagttctggccctactcaagtacccctgccctcctcctcgtttcggtcaaaacagaacgtcaaatttgccgcatccgtgaaaagcaagaagccgtcttcaagtagcctgagaaattctagtccaattcgaatggctaagattacccatgtggagggtaaaaaaccaaaggcggtggcaaagaatcattctgcccaattatcaagcaagacgtccaggtcactgcatgtccgggtgcagaaaagcaaagccgtcctgcaatccaagtctactttggcgtccaagaagagaactgatagattcaatatcaagagccgcgagcgcagtggaggaccagtgacccggtctctgcaacttgcggcagctgccgacttgagcgaaaacaaaagagaggatggcagtgccaaacaagaactcaaggacttcagctactccttaaggctggcctcccggtgttcaccccctgccgcaccgtatataacccgacaatatcgcaaggtgaaggcaccagctgctgcccagttccagggccctttcttcaaagaatag

SEQ ID NO: 30245 - DNA, 5049 bp, synthetic construct
  misc_feature 1..5049: note = Description of Artificial Sequence: Synthetic coding sequence
  source 1..5049: mol_type = other DNA
atgaatcagaacaccaccgaacccgttgcagccaccgagacactcgctgaagtgcccgagcatgttcttaggggcttacccgaagaggtgagactgtttccttcagccgtagacaagaccaggatcggggtatgggcgacgaagcctatcctgaaaggcaagaaattcggacctttcgttggtgacaaaaagaagagatctcaggtcaaaaacaatgtgtacatgtgggaagtctattatcccaatctgggttggatgtgtatcgacgctactgaccctgaaaagggcaactggctacggtacgtgaactgggcttgctcaggcgaggagcagaacttgtttcccctggagatcaacagagccatctactataagacacttaagcctatcgctccgggtgaggagttgctggtgtggtacaacggggaagataaccccgagatagctgcagcgatcgaggaagagagggcctcagccagaagcaaaaggagctcccctaaatctcgtaaaggcaaaaagaaatctcaggagaacaaaaataaaggaaacaagatccaggacattcaactgaagacatccgaacccgacttcacatctgcgaatatgcgcgattccgccgaagggcctaaagaagacgaggagaagcccagcgccagcgcccttgagcaacctgcgacgctgcaggaggtggcctctcaggaggtgcccccagagctggcgacacccgctccagcatgggaaccgcagcccgagccagatgaacgtcttgaagccgcagcttgcgaagttaacgatttgggagaagaggaagaagaggaggaggaggaggatgaagaagaagaagaagacgatgacgatgatgagttggaggatgagggcgaagaggaagcctctatgcccaatgagaacagcgtgaaagagcccgaaatacggtgcgatgaaaagcccgaagatctgctcgaagaacccaaaactacgtcagaagagacattagaggactgttcagaggtcaccccagctatgcagatcccaaggaccaaagaagaagcaaatggtgacgttttcgaaaccttcatgtttccatgccaacattgcgagaggaagtttaccacaaagcagggactagagaggcacatgcacatccatatcagcactgtcaaccatgctttcaagtgtaagtattgtggaaaggccttcggaactcaaatcaacaggcggagacacgagcgtcggcatgaagccggtctgaagcgaaagccctctcaaactctgcagccgagcgaggacctcgctgacgggaaggcttccggcgagaatgtcgccagcaaggacgacagttcccccccatccttgggacctgactgtttaataatgaattcggagaaggcgtctcaggacaccataaattcatctgtggtcgaagagaacggagaggttaaggagctgcacccatgcaaatattgcaagaaggttttcggcacacacacaaacatgagaaggcatcagagaagggtgcatgagcgccatctcattccaaagggcgttcggaggaagggtggcctcgaagaacctcagcccccagcggaacaggcacaggcgacacagaacgtgtacgtgcctagcaccgaacccgaggaggagggagaggcagatgatgtctatatcatggatatttcaagtaacattagcgagaaccttaattattacattgacggcaagatccaaacaaataataacacaagcaactgtgacgtcatcgaaatggaatccgccagcgccgacctatatgggattaattgtcttttgacaccggtgaccgtcgagatcactcagaacatcaagaccacccaggtgccagtcacggaggatttacctaaggaacccctgggcagcacaaatagtgaagcaaaaaaaagaaggaccgcttcccccccagccctgcctaagatcaaggcggagactgattccgacccgatggtacccagctgctctctatctttgccactatcaatttctaccaccgaagccgtgagctttcataaggaaaagtccgtctatctttcttcaaagctgaagcagctgctccagacacaggataagttgaccccagcaggaatctccgctactgaaattgccaagctcggcccagtttgtgtttccgcccctgcatccatgttgcccgtgaccagctccaggttcaaaagacgcaccagctcccccccatcctccccacaacattcgcccgcattaagggactttggcaagccctccgacggaaaggcagcctggaccgatgccggactcaccagcaagaaatctaagctcgagagccatagcgatagccccgcttggtccctgtcagggcgtgacgagcgagagacagtttctcctccctgcttcgatgagtataagatgagcaaagagtggacggcttcttcggcattctccagcgtatgcaaccaacagcccctggacttgagttccggcgtgaagcagaaggctgaaggaactggtaaaacaccagtgcaatgggaatcagtgctggacctctccgtgcataagaagcactgtagtgacagcgaaggtaaggagttcaaggagtctcactcagtccaacctacctgctcagccgtcaagaagagaaagcccacaacgtgtatgctccagaaagtgctgcttaatgagtacaacggcatcgatcttccggttgagaatcccgctgacgggactaggagccctagtccctgcaaatcgctggaagctcagccagatcccgacttgggtcctgggagcggctttcccgctcccacagtcgagtccactccagacgtgtgtccttcttcaccagccctgcagacaccctccctatcgagtgggcagcttccacccctattaattccgactgacccatcttcccctcctccttgtcctccagtgctcacagtggcaacaccccctccacccctgctcccaaccgtcccgttacctgccccttcaagctccgcttctcctcacccctgcccttcacctctatctaatgccacggcccagtcccctctccctatcctgtccccaacagtttccccatcccccagtcctattcctccagttgagccactgatgagcgccgctagcccgggaccaccgaccctgtcatcttcctcatcttcaagtagttctagctctagttttagcagctcatcatcgagcagctcccccagtccgcctccactgagtgctatatcatctgtggtctcatccggagacaacctcgaggcaagtctcccaatgatttccttcaagcaagaggagctcgaaaatgagggactaaagcccagggaggagccgcagagcgctgctgagcaagatgtggttgttcaagagaccttcaataagaatttcgtttgtaatgtgtgcgagtctccatttttgagtatcaaagacctgaccaaacacctgagtattcacgcggaggaatggccattcaaatgtgaattctgcgtgcaattgtttaaggataagaccgacctctcagaacatcgcttcctgctgcacggggtgggcaatatctttgtgtgcagcgtctgcaagaaggaattcgcattcctgtgtaacctacaacagcaccagagggacctgcatcctgacaaggtctgcactcatcatgagttcgaatcagggactctaagaccgcagaatttcaccgacccatcaaaagcacatgtggagcatatgcagtcactcccagaggatcccctggaaacgagtaaggaggaggaggagcttaacgactcctccgaagagttgtacaccacaatcaagatcatggcaagcggaatcaaaacaaaggatccagacgtacggcttggcctgaatcagcactacccaagctttaaaccgccaccatttcagtaccatcacagaaacccaatgggaatcggtgtgacggccaccaatttcactacccacaacatccctcagaccttcaccaccgccataaggtgtactaagtgtggtaagggcgtcgacaatatgccagagctccacaagcacatcctggcttgtgcatcagcttccgataagaaaaggtacacccccaagaagaatccggtgcctctgaagcaaactgtgcagcccaagaatggtgtggtcgtgctggataacagcggaaagaacgcctttcgcaggatggggcaacccaagcgcttgaattttagcgtggagttgtccaagatgtcatctaacaagttgaagttgaatgctttaaaaaaaaagaaccagttggtacagaaagcaattctacagaaaaacaaaagcgctaaacaaaaggccgacttgaaaaatgcctgtgagagttcctcccatatctgtccatattgcaatagggaatttacctacatcgggagcttgaacaaacacgcagcattcagctgccccaagaaacctctgtcgcctccaaaaaagaaggtatcccattcctccaagaaggggggtcatagtagtccagcctcaagcgataaaaactccaactccaaccatcgccgaagaacagccgatgccgaaattaaaatgcaatctatgcagacacctctcggtaagacaagggcccgatcgtctggtcccacgcaggtgccgctgccaagctcaagtttcagatcaaagcagaatgtcaagttcgctgctagcgtcaaatcgaagaaaccatcttccagcagtttgcgcaacagcagcccgattaggatggcgaaaatcacccatgtggagggcaaaaagcccaaggccgtggccaaaaatcacagtgcccagctgtccagtaagacatcgaggtctttgcatgtccgtgtgcagaagtccaaggccgtgctccagtcgaaatctaccttggcctctaagaagcgcactgatcgcttcaatataaagtcccgcgaacgctcagggggacccgtgacaaggtccctgcagctcgctgctgccgcagacctctccgaaaacaagagagaagacggctccgctaaacaggaactgaaagacttccgaaattttctctag

SEQ ID NO: 30246 - DNA, 4446 bp, synthetic construct
  misc_feature 1..4446: note = Description of Artificial Sequence: Synthetic coding sequence
  source 1..4446: mol_type = other DNA
atgcgcgacagcgctgaaggacccaaagaggacgaagagaaaccaagcgccagcgccctggagcagcccgcaactctccaggaggtagcatcacaagaagtgcccccagaattggcgactccagccccagcgtgggagccacaaccggaacctgatgagaggctggaggcagccgcatgcgaagtaaacgacctgggtgaggaggaggaggaggaagaagaagaggatgaagaagaagaggaggacgatgacgatgatgagctcgaggacgaaggggaagaggaggcttctatgcctaatgagaactctgtcaaagaaccagaaattcgatgtgacgaaaaacctgaggacctgttagaggaaccgaaaacaacttcggaagaaacgttagaggactgtagtgaggtgaccccagcaatgcaaatcccaagaacaaaggaagaggcaaacggcgacgtttttgagacctttatgttcccatgccagcattgcgaacgtaaatttactaccaaacagggtctcgagcgacacatgcacatacacatcagtacggtaaatcatgcattcaaatgtaagtattgtggcaaagctttcggaacccagattaacagaaggcgacatgagcggagacatgaggcaggactgaagagaaagcccagccagaccctacaaccctccgaggacctggccgatggcaaggcatccggcgaaaatgtggccagcaaggacgacagctcgccaccctcacttggccctgactgcctgattatgaatagcgagaaagcctcccaggacacaattaattcttcagtggtagaagaaaacggcgaggtcaaggaacttcacccctgtaagtactgtaaaaaagtttttggcacacatactaacatgcggagacatcagcgcagggtccacgagcggcacctaatccctaagggcgtgaggagaaagggcggtcttgaagaacctcagcccccagcggagcaggcccaggcaacacagaatgtctatgtccctagcacagaaccagaggaggagggtgaagctgatgatgtatacattatggacataagcagtaacatttccgagaatctaaattattacattgatgggaaaatccagacaaataacaacacgagcaactgtgacgtgattgaaatggagtccgctagtgccgatctgtacggaatcaattgtcttttgactcccgtgaccgtggaaataactcaaaacatcaagacaacacaagtgcccgttactgaagacttgcccaaggagccattaggatccacaaactccgaggccaaaaaaaggcggaccgcgagtcctcccgctctgcctaaaattaaagccgagactgattccgatcccatggtccccagctgctcattgagcctgccgctttccatttcaaccaccgaggcagtgagtttccataaagaaaaatctgtgtatcttagcagcaaattgaagcagcttctgcagacacaggataagctgacacctgccggtataagcgctaccgaaattgctaaactcggcccagtttgcgtgtctgccccagcttctatgctaccagtgaccagttcacgcttcaagaggagaaccagtagccccccatcttcaccccaacacagtccagctctgagagacttcggaaaaccttcagatggcaaggctgcatggacagatgccggtctcacctctaaaaagtctaagctcgagagtcactccgactcacccgcttggtcactgagtggcagagatgagcgggagaccgtttcacctccctgtttcgatgaatataagatgtcaaaggagtggactgcttcatcagctttttcctccgtatgcaaccagcaaccattggatttgtcatccggcgtgaagcagaaggcagaaggaacgggcaagaccccggttcaatgggagtccgtacttgatctttccgtgcacaaaaaacactgttctgatagcgagggtaaagagtttaaagaatcccacagcgtacaaccgacctgctccgctgttaaaaagcgcaaaccaaccacctgcatgctccagaaagtcttgctgaacgagtataatggtattgatctgccggtggaaaatccagccgatggcacccgttctccctcaccttgtaagtcactggaagctcagccagaccccgacctgggaccaggttctggatttcccgcacccacagtcgagagcacaccggatgtgtgtccgtccagtccagccctccaaactcccagcttgtcttcaggtcagctgccgcctctgctgataccaactgatccatcttcaccgccaccctgcccccctgtgctgacagtggctactccccctccaccattactcccaactgttcctcttcccgctccgagcagcagcgcatctccacacccatgccccagccccctgagcaacgccacggctcaatctcccttgccaattttgtctcccaccgtaagtcctagtccctcgccgatccctccggttgaacctcttatgagtgccgcttccccagggccaccaacactgagttcatcctcttcgtcatcttcatcctcttcatccttttcttcttcctcctccagtagctccccatctcccccacctctctccgcaatctcgtcagtggtcagtagtggggacaacctggaagcaagtctccccatgatatcttttaaacaggaagagctagaaaacgagggtctcaagccccgagaggaaccacagtccgcagctgaacaggacgttgtggtgcaggagacattcaataagaatttcgtgtgtaacgtctgtgagagcccctttctttccataaaggaccttacaaaacatctgtctatccatgctgaggagtggcccttcaagtgtgaattttgcgtgcagctatttaaagataaaaccgacttgagtgaacaccgattcttgttgcacggggtggggaacatttttgtgtgcagcgtttgcaaaaaagagtttgcatttctgtgtaacctgcaacagcaccagcgggatctgcatccagacaaagtgtgcacccaccatgaatttgagtccggaaccttacgaccacagaatttcacagacccttctaaggctcatgtggagcatatgcagagccttcctgaagacccccttgagacatccaaagaggaagaagaactgaacgactcttccgaggaactgtatacaaccattaagataatggcatcgggcattaagaccaaagaccctgatgtgcgtttggggctcaaccagcattatcctagtttcaagccaccaccgtttcagtaccaccatcgcaacccaatgggaattggggttactgccaccaatttcaccacacataacatccctcagaccttcacaacagccatccgctgtacaaagtgtggcaagggggtcgacaacatgcccgagcttcataaacacatcttagcttgcgcttctgcctccgataagaaacggtacactccaaaaaagaaccctgtcccactgaaacagacggtacaacctaagaatggagtggttgtcctcgataactccgggaaaaacgcattccgccgaatgggccagcctaaacgtctgaacttcagcgtggagttgagtaagatgagttcaaacaagctgaaattaaacgcactgaagaagaagaatcagctggtccaaaaagccatcctgcagaagaacaaatcagcaaaacagaaagccgatctcaagaatgcttgtgaatcaagcagccacatttgtccgtattgtaaccgcgaattcacctacattgggagtttaaataaacacgccgctttcagctgccctaagaaaccgttgtcaccgcctaagaagaaggtttcccacagctcaaagaaaggaggccacagttcacctgctagcagtgacaagaattctaacagcaatcacagaaggcgaacagccgatgctgaaataaaaatgcaatctatgcagacccccctgggaaagactcgagcccgaagctcgggcccaacgcaagtccccctcccaagctcctcttttcgttccaagcagaacgtgaagttcgccgcatcggtaaaaagcaagaagcctagcagctcttcgctcaggaactcatcccctataagaatggcaaagataactcacgtggaaggtaaaaagccgaaggcagtggctaagaatcattccgcgcagctatccagcaagactagtcgctctctgcatgtcagggtgcagaaatcaaaagccgtgctgcagagcaagtccaccctggcctccaagaagcgcacagatcggtttaatattaagtcacgcgaacgctccggtgggcctgtgacccggtcactgcagctcgccgctgcggcagacctctccgaaaacaagagagaggacggatcggctaagcaggaactgaaggatttcagaaactttctatag

SEQ ID NO: 30247 - DNA, 681 bp, synthetic construct
  misc_feature 1..681: note = Description of Artificial Sequence: Synthetic coding sequence
  source 1..681: mol_type = other DNA
atgaatcagaacacaaccgagccagttgcagccacagaaaccctcgcggaggtcccggagcatgtgctgaggggcctgcccgaggaagtgcgactttttccttccgctgtggataagacacggataggagtgtgggctactaagcctatcctcaaaggcaagaaattcgggccatttgttggagataagaaaaaaagaagtcaggtgaaaaataatgtctacatgtgggaggtgtattacccaaatttaggctggatgtgtatcgatgccactgaccccgaaaaaggcaactggctgcggtacgttaactgggcttgctctggggaggagcagaatctttttcctctagaaataaaccgcgctatctactacaagacattgaaacccatagcccctggggaagaactgctcgtttggtataacggcgaggacaacccagaaatcgcagccgctattgaagaggagagggccagcgccaggtctaagcgatccagcccaaagtcccggaaagcaactgctagcgcctggagacctgacgcccttcaccagcgacctaggacaagcccgggttcaattggacgatctaaactgcaattgcagcctagtagccgtgatcactccagtaagagcaggcattccggatgctccttgacggcccctgaggttacgtggaatcagtag

SEQ ID NO: 30248 - DNA, 5048 bp, synthetic construct
  misc_feature 1..5048: note = Description of Artificial Sequence: Synthetic coding sequence
  source 1..5048: mol_type = other DNA
atgaatcagaacacaactgagccggtggctgccactgagacattagctgaggtccctgagcacgtcttgagggggcttcccgaagaagtccggctgtttccctctgccgtggataaaaccagaataggcgtatgggcgacgaaacccatcctgaagggtaagaaattcggaccattcgtaggagacaagaagaagaggagccaggtcaaaaacaatgtctacatgtgggaggtgtattatccaaacttagggtggatgtgtatagatgccactgaccccgaaaagggtaactggctccgctatgtgaattgggcatgtagtggagaggagcaaaacttgtttccactcgagatcaatcgggcaatatactataaaaccctcaaacccatcgcacctggcgaggagttgctcgtctggtacaatggagaagacaatcctgagatcgccgctgccattgaggaggaaagggcttcagcacgttccaagagaagttcacccaaatcccgaaagggcaagaaaaaatcccaagagaataaaaacaagggcaataagattcaggacatccagctgaagacttccgagccagattttacatctgccaacatgcgggatagtgctgagggcccaaaagaggatgaggaaaagccatcagcttctgcgctcgagcaaccagcaacactgcaggaggtggcctcccaggaggtcccccctgagctcgcaaccccagctcctgcatgggagccccagcctgagcccgacgagaggcttgaggccgctgcgtgcgaagtgaatgacctgggcgaagaagaggaggaggaggaggaagaggatgaagaggaagaggaagacgacgacgacgacgagctagaggacgaaggggaggaagaagcctcaatgcccaatgagaactccgtaaaagagcccgagatccggtgtgatgagaaacccgaagatctccttgaagagcccaagactacatccgaggaaacgttggaggactgtagcgaggtaactccagccatgcagattccacgcactaaggaggaggcaaatggggacgtctttgaaacgttcatgttcccttgccagcactgcgagagaaagttcaccacgaagcagggcctggagaggcatatgcacatacacatctcaaccgtgaaccacgccttcaagtgtaaatactgcgggaaggcatttggaacacagattaataggcgcagacatgagcgacgccacgaggccggattgaaacgcaagccgtctcagacactccagccttccgaggacctggctgacggaaaggccagcggtgagaacgttgcttccaaagacgattcctccccacctagcttgggacccgattgccttatcatgaattcagagaaagcgagccaagacacgatcaactccagcgtcgtggaagagaatggcgaggtgaaggagttgcatccctgtaagtactgtaaaaaagtgttcgggacacatacaaacatgcgaagacaccaacgacgggtgcatgagaggcatctgattcccaagggggttaggcgcaagggcggactggaggagccacagcctcccgctgagcaggcacaagcgacacaaaatgtgtatgtacccagtactgagccagaggaggagggcgaagctgacgacgtgtacattatggatatcagcagcaacatcagcgagaatttgaattattacattgacggcaaaattcaaaccaataacaatacctctaattgcgacgtcatagagatggaaagcgccagcgcagatctttacggcatcaactgtctcctcaccccagtgacagtagaaattacccaaaatatcaagaccacacaggttcccgtgacggaggatctccctaaagagccactggggtccactaattctgaggccaagaaaaggaggactgcttctccacctgcattgccaaaaattaaggcggaaacagactccgatcccatggtacccagctgcagtctgagcctcccactcagcatctccacgacagaggccgtatctttccacaaagaaaaatcggtgtacctgtctagcaagttgaaacagttgctgcagacacaggacaaacttacccctgcaggaataagtgcgaccgagatcgcaaagctaggtcctgtgtgcgtctcagcgccagcttctatgctccctgtcacaagttccagatttaaaagacgaacctcctctccaccaagctcgcctcaacatagtccagccctgagggactttggaaaaccttctgacggtaaggccgcttggacggatgccggtctgacaagcaagaagtccaagctggagagccactctgattctcctgcctggtccttgtctggaagagatgaacgagaaactgtctctcctccctgtttcgatgagtacaagatgtccaaggagtggacggcctcatccgcattttcctctgtctgcaaccagcagcccctggatctgtcgagcggggttaagcagaaagctgaaggcacgggcaaaacccccgtgcagtgggaatctgtgctggacctgtctgtgcacaaaaagcactgcagtgactctgaaggaaaagagttcaaggagtcccatagcgtgcaacctacgtgctctgccgtaaagaagcggaagcctactacatgcatgctccagaaggtccttctgaacgaatacaacggcatagacctgcctgtggaaaaccctgccgatgggacccgaagccccagcccatgcaagtccttggaagcccagcctgaccctgatctcggaccgggatccggctttcctgcgcctaccgtcgagtcaactccggacgtgtgcccgagttctccagccctacagacgccaagcctgtcttcaggtcagttacctcccctccttattcctactgaccctagcagcccacccccttgcccacccgtgcttacggttgccaccccaccacctcccctattaccaacagttcccctgcctgcacccagctcctccgcttccccacatccatgccccagtcccctgtcaaacgctactgcgcaatcaccactcccgattctctcccctaccgtgtcaccatccccgagccctatcccaccagtcgagcctcttatgtcagcggcaagtcccggacctccaaccttgtcaagcagctccagctcttctagctcgtcctctagcttcagcagctcttcatcaagcagctccccctccccacctcccctcagcgctatttccagtgtcgtgtctagtggcgataacctggaggcatctctgcccatgataagctttaagcaggaagagctggagaatgagggcctgaagccgagagaagagcctcaatcggccgctgagcaggatgtggtggtgcaggagaccttcaataagaacttcgtgtgcaatgtgtgcgagtctcccttcctctccattaaagatttgactaaacacctttccattcacgcggaagaatggccgtttaagtgcgagttctgtgtacaactcttcaaggataagacagacctgtcagaacaccgttttcttctgcatggcgtcggaaatatcttcgtgtgcagtgtctgcaagaaggagttcgcctttctgtgcaatctccaacagcaccaacgagacctgcatccggataaagtttgcactcatcacgagtttgagtctggaacattgcggcctcagaactttaccgacccctcaaaggcccacgtcgagcacatgcagagcctccctgaagaccccctagagacgagcaaggaggaagaagagctaaacgattcttcagaagaactgtatactacgatcaagattatggcttccggaataaagacgaaagaccctgacgttcgactggggcttaaccagcactacccaagcttcaaacccccacccttccagtatcatcatagaaaccccatggggatcggggttaccgctaccaatttcacaacgcacaatattcctcagaccttcaccacagccatcagatgcacgaaatgcggcaaaggtgtggacaacatgccagaactccacaagcatattcttgcctgtgctagcgcgtccgataagaagcggtacaccccaaagaagaaccctgttccccttaaacagaccgtgcagcccaaaaatggagtcgtcgtccttgataactctggcaagaacgcctttagacggatggggcagcccaaacgtctcaacttctctgtagagctgagtaagatgagctcaaataagctgaaactgaatgccctgaaaaagaaaaatcaactggtgcagaaagcaatcttgcaaaaaaacaaatctgccaagcaaaaagcagatttaaaaaacgcgtgtgaaagttcaagtcacatttgcccgtattgtaatcgtgagttcacgtacattgggagcctcaacaaacacgcagctttttcatgtcccaaaaagcctctctcccctccgaaaaagaaagtgagccactccagtaaaaaaggtggacacagttctcctgcctcatcagacaaaaactccaactctaaccaccgacgtaggaccgcggacgcggagatcaagatgcaatctatgcagactcctctggggaaaactcgagctcgtagctcaggacccacacaagtccctctcccctcatcttcatttcgatccaagcagaatgtgaagttcgcggcatctgtcaaatcaaaaaagcccagttccagtagtctaaggaattccagcccaattcgcatggccaagataacccatgtcgaagggaaaaaacccaaagcggttgccaagaaccatagtgcccagctgtcttctaagacaagtaggtctctacacgttcgcgttcagaagtcaaaggcagttcttcagagcaaatccactctggctagtaaaaaaagaacggataggttcaacattaagtccagggagcggtcggggggacctgtgacccgctcccttcagctcgccgctgcggcagatctctcagaaaataagcgtgaggatggctcagccaagcaggaactcaaggacttcagatgcttcctgta

SEQ ID NO: 30249 - DNA, 237 bp, synthetic construct
  misc_feature 1..237: note = Description of Artificial Sequence: Synthetic coding sequence
  source 1..237: mol_type = other DNA
atgcgcgattcagccgagggccctaaggaggatgaggaaaaacctagcgcaagcgctctggaacaacccgcaaccctgcaggaagtggcatcacaggaagtgccaccagaacttgccactcctgcccctgcttgggagcctcaacctgagcctgatgagagactggaggctgccgcttgcgaagttaacgatttaggagaagaagaggaggaggaggaggaggaagacgaggagtag

SEQ ID NO: 30250 - DNA, 4446 bp, synthetic construct
  misc_feature 1..4446: note = Description of Artificial Sequence: Synthetic coding sequence
  source 1..4446: mol_type = other DNA
atgagggactccgcagagggacctaaagaggacgaggaaaagccgtctgcttcggctttggagcagcctgcgaccctccaggaggttgcctcccaagaagtgcccccagagcttgccactccggctccagcctgggagccacagcccgagcctgatgagcggctcgaagctgcggcatgcgaagtaaatgatctgggcgaagaagaggaagaggaggaggaggaggatgaggaggaagaggaggatgacgacgacgacgaattggaggacgaaggggaagaggaggccagcatgccaaacgagaatagcgttaaggaacccgaaatccggtgtgatgagaaaccagaggacctgctggaggaacccaagactactagcgaggagaccctggaagactgcagcgaggttacaccagccatgcagatccctagaactaaggaggaagccaatggagacgtcttcgaaacgtttatgttcccctgccagcactgtgagagaaagtttacaacaaagcagggcctagagcgacatatgcacatacatatatccacagtgaaccacgcctttaagtgtaaatactgcgggaaggctttcggaacccagataaaccgtcgcaggcatgaaagacgacacgaggccggactgaagcggaagccatcacagacactgcagcctagtgaggaccttgcagacgggaaagcctcgggtgagaatgtggccagcaaagacgactcctcacctccaagcctgggcccagattgtcttataatgaactccgagaaagcatcccaggacacgattaatagtagtgttgtggaggagaatggggaggttaaagagctccatccctgcaaatactgtaaaaaggtctttggtacacatactaacatgagaagacatcagcgtagggtgcacgaacggcatcttataccaaaaggcgtgaggcgcaaaggaggtctggaggagccccaacctcctgccgagcaggcccaggctactcagaatgtctacgtgccgagcaccgagcctgaagaggagggcgaggccgacgatgtgtatatcatggacatatcttccaatatctcagaaaatctgaactactatattgacgggaagatccagaccaacaacaacacgtctaattgtgacgtgatagagatggagtcagctagcgctgacctgtacggcatcaattgtctcctgacaccggtgacagtagagatcactcagaacatcaagacaactcaggtacctgtgacggaagacctcccaaaagagccactagggagtaccaacagcgaagccaagaagcgaaggactgcttccccgccagctctgccaaaaatcaaggctgagaccgacagcgatcccatggtgccatcctgctccttgagccttcctttgagtatctccacaaccgaggcggtgagttttcacaaagagaaaagcgtgtatttgagtagcaagctgaagcagctactacagacgcaggacaaattgacgcccgcaggcatctctgccacagagatcgctaagctaggacctgtgtgcgtgtcagcccctgcctccatgcttcccgtcacatcctcaaggtttaaaagacgtacaagcagcccaccttccagcccccagcattcacctgcccttcgggattttggaaagcccagcgatggcaaagcagcgtggactgacgccggactgacttccaagaaatcaaaactcgagtcccactctgacagtcccgcttggagcctatcagggagagacgagagggaaaccgtaagcccaccttgcttcgacgaatataagatgtctaaagaatggacagccagttctgccttctcatcagtttgtaatcagcagccccttgatctatcctcaggcgtgaagcagaaggccgagggaacaggtaaaactcctgttcagtgggaatccgtgctggaccttagcgtccacaaaaagcactgctcggactcagaaggaaaagagtttaaggagtcgcactccgtccaacccacttgcagtgccgttaagaagaggaagcctacaacttgcatgttacaaaaggtcctgcttaatgaatacaacggcatagatcttcctgtagagaaccccgcagacggcacacgctctccaagtccctgtaaatctctggaggctcagcctgacccagacctcggccctgggtcggggtttcctgcccctaccgtggaatcaacacccgatgtgtgtccctcaagccccgcactgcagacgccttctttgtctagtggccagctgcccccactgctcatccccacggatccgtcttccccacccccttgtccgcctgttttgacagtagccaccccaccaccacctctgcttccaaccgtgcccttgcccgctccctcttcttccgcaagcccacacccttgtccttctccactgtctaatgccaccgcccaatccccgttgcctatcctctcaccgactgtgtcacccagtccttcccccatacctccagtggaacccctgatgtccgctgcatctcccggtcctccaactctttcgagttcaagcagttcatcttcatccagctccagtttctcatcatccagctcatcgtcatctccatcgcccccacccctgtctgcaatcagctccgtagtctcatctggggataacctcgaagcatccctaccgatgatctcattcaagcaggaggaattagagaacgagggcttgaaaccacgcgaggagccacaaagtgcggcagaacaagacgtcgtggttcaggaaacatttaacaaaaactttgtgtgcaacgtgtgcgagagtcctttcctgtcgatcaaagacctcacgaagcacctgagtatccatgcagaggagtggcctttcaaatgtgaattttgtgtccagctcttcaaggataaaacagacctttcagagcacaggttcctcctgcatggagtgggaaatatattcgtgtgcagtgtgtgcaagaaggaattcgccttcctttgcaatttgcagcagcaccagcgggacctgcacccagataaagtttgcacacaccatgaatttgaaagcgggactctacgcccacaaaatttcaccgacccttctaaggcccatgtagagcacatgcaaagccttcccgaagatcccctggagacttctaaagaggaggaggagctcaatgattcctctgaggagctgtacaccaccatcaaaattatggcatcgggcattaagactaaagatcctgacgtgaggcttgggcttaatcagcactatccgtctttcaagccgcctccctttcagtaccaccatcgaaacccgatgggtataggtgtgaccgctaccaactttactacccacaacataccccagacctttaccacagccatacgctgcacaaagtgtggtaaaggggtcgacaatatgccagagctccataaacatattctcgcgtgtgccagtgcctcggacaagaagaggtatactccaaaaaaaaacccagtcccactcaagcagactgtgcaacctaaaaatggggtggtggtcctcgataatagcgggaaaaatgcatttcgcaggatgggacagccaaaaaggctgaacttctctgtggagctaagcaaaatgagctccaataagctcaaactaaatgccctgaagaagaagaaccaattagtgcagaaggccatactgcagaagaacaagtctgcaaagcagaaggccgacctgaaaaacgcttgcgagtccagctcacatatctgtccctactgcaacagggagttcacctatatcggcagcttgaataaacacgccgcttttagctgccccaagaaaccactgtctccgccaaagaagaaggtctcccacagctcaaaaaagggtggacacagctcaccggcttcaagcgataagaacagcaactcaaaccatcggagaaggactgctgacgctgagattaaaatgcagagtatgcagaccccactaggcaaaacccgcgcacggagcagcgggccaacgcaggtcccattgccaagcagcagcttccgtagcaagcagaacgtaaaatttgcagccagcgttaagtcgaaaaaaccctccagttcttccctcagaaacagcagccctattagaatggcaaaaatcacacacgtcgagggaaaaaagcctaaggctgtggctaaaaatcactctgcccaactttcctctaaaacatcccgatctttgcacgtccgtgttcagaaaagcaaagcagtcctccaaagtaagagcactttagccagtaagaagagaactgaccgctttaacataaagtctagagagaggagtggaggtcctgtaacaagatcccttcagctcgccgcagcggctgatctgtccgagaacaagcgcgaggacggctcagccaagcaggagttgaaggactttcgaaattttctgtag

SEQ ID NO: 30251 - DNA, 675 bp, synthetic construct
  misc_feature 1..675: note = Description of Artificial Sequence: Synthetic coding sequence
  source 1..675: mol_type = other DNA
atgagctcatatttcgtcaattccacttttcccgttacattggcctccgggcaggagtcttttctgggccagttgccactgtactcctctggttacgctgatccgctgcgccactatcccgctccatacggtcccggtcccggacaagacaaaggattcgccacttcaagttactatcctcccgctgggggagggtacgggagagctgctccttgcgattatggccctgcccctgcattctaccgcgaaaaagaatctgcttgcgcactgagcggtgccgacgagcagcctcctttccacccagagccaaggaaatctgactgcgcgcaggacaagagcgtttttggagagactgaggaacagaagtgttcgacacccgtgtacccttggatgcagaggatgaactcctgtaatagcagcagctttggtccctcaggcaggaggggtcggcagacctatacccgctaccagactctggaattagagaaagagtttcactacaatcgctacctgactaggcgcaggcggatcgagattgctcatgccctgtgcctaactgagcgtcagataaagatatggtttcagaataggcgaatgaaatggaagaaagagagcaaattactgtctgcttctcaactgtcggcagaagaagaggaagagaagcaagctgagtag

SEQ ID NO: 30252 - DNA, 2496 bp, synthetic construct
  misc_feature 1..2496: note = Description of Artificial Sequence: Synthetic coding sequence
  source 1..2496: mol_type = other DNA
atgaccgaattgaaagccaaggggcctagagccccacatgtggctggtgggcctccctctccggaggtgggctctcccttgctgtgcaggcccgcagccggacccttccccggaagtcagacttctgacactctgccagaggtgtcagcaatccccatcagtctagatggacttctgtttccacgtccatgccagggtcaggacccgagcgacgagaagacccaagaccagcagtctctgtcagacgtggaaggagcctactcccgcgctgaagccacacgcggtgcaggcggaagttcttcttccccacctgaaaaggactccggactgctggattcggtgctagatactctgctcgctccatctgggcctggtcagtcccagcccagcccaccggcatgtgaggttacatcgtcctggtgcctcttcggaccagaactcccagaggatccccctgccgctcctgccacccagagagtcctgagtccactcatgtccaggtcagggtgcaaggtgggcgacagttctggtactgctgctgctcataaagtgttgccaagaggtctatcccccgctaggcagctccttctccctgctagcgaatccccccactggtccggcgctcccgtgaaaccttcccctcaagcagcagcggtggaggttgaggaggaggatggaagcgagtcagaggagtcagctggccctcttctcaaaggtaagcctcgcgctttgggaggagcggctgcaggtggcggtgcagccgctgtgccaccgggagccgcagccggtggagtggcactggtgcctaaggaagactcaagatttagcgcaccaagagttgctctcgtcgagcaggacgcgcctatggcaccaggcaggagtcccctggccaccaccgttatggactttatccacgtgcccattctccctcttaaccacgcactgctagctgctaggacgcgccaactcctagaagatgagagctatgatggcggtgccggtgcagcctctgcatttgcccctccccgatctagcccctgtgcaagctcgacccctgtcgctgtgggcgactttccggactgtgcctatccaccagacgccgagcctaaggacgatgcgtatccgttatacagcgattttcagccaccagccctcaagatcaaggaagaggaagagggagctgaggctagcgcccgaagtcctcgcagctatctggtcgccggagctaaccccgctgcttttccagactttccactaggaccccctccccctctgccaccccgagctactccatctagaccaggcgaagccgcagttacagctgcgccagcaagcgcatccgtatccagtgcgtctagttcaggcagtacacttgagtgtatcctatacaaagctgagggggctcccccacagcagggccctttcgccccacccccttgcaaagctcctggagcttccggctgcctgctgcctcgcgacggccttccaagcacctccgcctccgccgctgcggctggggctgcaccagcactctatcccgcactggggctgaatgggcttcctcagcttggataccaagctgctgtgctgaaggaggggttgcctcaggtatatcccccatacctgaactacctgcgcccagattccgaggcctcccaatctcctcagtactctttcgagtcgctgcctcaaaaaatttgcctcatctgtggcgatgaggccagcggctgtcactatggtgtgcttacatgtggcagctgcaaagtgttcttcaaaagagcaatggaggggcagcacaactatctatgtgctgggcgtaacgattgtatcgttgacaaaatcaggagaaagaactgccccgcttgccggctaaggaagtgctgtcaggcaggaatggtcttggggggtttccggaacttacacatcgatgaccagataacactgatccaatattcctggatgagtctgatggtgtttgggctgggatggcgctcctacaagcacgtttccggccagatgctttactttgctcccgatctcatcctcaatgagcagaggatgaaggaatcgagtttctactcgctgtgtctgacgatgtggcagattccacaggagttcgtgaagttgcaggtgtcgcaagaagagtttctatgtatgaaggttctcctgctcctgaataccattcctctggaggggttgaggagccagacacagttcgaagagatgagatcttcgtacatcagagaactcattaaggccatcggcctcagacagaagggagtggttagctcctcacaacgcttctatcagctgaccaagctgctggacaacctgcatgatctggtgaaacagcttcacctttactgtctcaatacttttattcagtctcgtgcccttagtgtcgaatttcccgagatgatgtctgaggtcattgcagcgcagctccccaagatcctagctggcatggtcaagccattactttttcataaaaagtag

SEQ ID NO: 30253 - DNA, 2802 bp, synthetic construct
  misc_feature 1..2802: note = Description of Artificial Sequence: Synthetic coding sequence
  source 1..2802: mol_type = other DNA
atgaccgagctcaaggctaaaggaccgcgagccccacacgtcgcgggaggccctccctctccagaggtcggatccccactgttatgcaggcctgccgctgggcctttcccgggaagtcaaacgagcgacacattgccggaggtgtcagccattccaatcagtctagatgggcttctattcccacgaccgtgccagggccaggacccaagcgacgagaagacccaggaccagcaatcactctctgatgtggagggcgcttattcccgcgcagaggccactagaggtgccggaggtagtagctccagtccgccagagaaagatagcggactgcttgacagcgttctggacacactactcgccccaagtggacccggtcagagtcagccctcgcccccagcctgtgaggtcacgagttcttggtgcctgttcggaccagaactgcctgaggaccccccagccgcacccgctacgcagcgggtcctctcccccttaatgagcagatcggggtgcaaagttggtgattcctccggcactgctgccgcacacaaggtcctcccacgtgggctctcgccagccaggcagctgcttctgccggcttctgagagcccccattggtctggtgctccggtgaaaccatcaccccaggcagcagcagtggaagtggaagaggaagacgggagtgagagtgaggagtccgcgggtcccctgctcaaaggaaagcccagagcactgggcggagctgccgctgggggaggggctgccgcagtgccgcctggcgcagcagctggtggggtggctctagtcccaaaagaagacagtagattcagcgctcctagagttgctctggtggagcaggacgcccctatggccccaggtcgatcaccactagcgaccacagtgatggactttatacacgtacccatcctgcctctcaatcacgccctgctcgcagctcgcactcgccagttgttggaagatgagtcctacgatgggggagcaggtgctgcatccgctttcgccccacccagatcctcgccctgcgcctcttctacaccagtcgcagttggggattttcctgattgcgcctatccccctgacgccgagccaaaggacgatgcttaccccctgtatagtgatttccagcccccagcccttaaaatcaaggaagaagaagagggggcagaagcctctgctaggtcccccagaagctatctggtagcaggcgcaaatccagccgcattccccgacttccctctaggacctcccccacctcttcccccaagggccacgccgagtcgccctggggaggctgcggtcacagcggctccagcctcagcctctgtgagcagtgccagcagtagtgggagcacactcgagtgtatactctacaaagccgaaggagctccgcctcagcaggggccattcgccccacctccatgcaaagcgcctggcgcttcaggctgtctgttgcctcgggatggactgcctagcaccagtgcgagtgctgctgccgcaggcgctgcccctgcactgtacccagccctaggactgaatggcttacctcaactgggctatcaagccgctgttcttaaggaaggcctgccccaggtgtatcccccttatctgaattacctgaggccagatagcgaagcatctcagtccccccagtactcattcgaaagtttgcctcagaaaatttgtttgatttgcggagacgaggcatccggatgccactacggggtgctgacttgcggcagctgcaaggtattttttaagcgcgcaatggagggacaacacaattacctctgcgctggaagaaacgactgcattgtcgataaaattcggagaaagaactgtcctgcctgtaggctcaggaagtgctgccaggcaggcatggtccttggcggacggaaatttaagaagttcaataaagtcagagtggtcagggccctggacgctgtggccttaccccagcctgtcggtgtcccaaatgagtcccaagcactctcccagaggtttactttctctcccggacaggacatccagctaatccccccactgattaacttgttgatgtctatcgagcctgacgtgatttacgccggtcacgacaatactaagcccgatacaagcagctctcttctgacttccctgaatcagttaggggagcgccagctgctatccgtagttaagtggagcaagagccttccgggattccgaaatttgcatatcgacgaccagataaccctaattcaatacagttggatgagcctgatggtgtttggactcggatggaggagctataagcacgtgtctgggcaaatgctgtacttcgcaccggatctcattcttaacgagcagcgaatgaaggagagttctttttattccttgtgtctgacaatgtggcaaatccctcaagaattcgtgaaattacaggtgtctcaggaggagttcctgtgcatgaaggtactcctgctcctgaacaccattccacttgaaggattgcggagccagacccagttcgaggagatgagatcatcctacataagggagttaatcaaagccataggactgcggcagaagggagtcgtttccagcagtcagcggttttaccagctcactaaactccttgacaatctccatgatcttgtcaagcagctgcacctctattgtctgaataccttcatacagtctcgggctctgagcgtggagtttccggaaatgatgtcagaggttattgccgctcagctacctaagatacttgcgggtatggtgaagcctctcctgttccacaagaagtag

SEQ ID NO: 30254 - DNA, 2088 bp, synthetic construct
  misc_feature 1..2088: note = Description of Artificial Sequence: Synthetic coding sequence
  source 1..2088: mol_type = other DNA
atgactgaactgaaggcaaagggacctcgagctccgcacgttgctggaggacccccttctcctgaagtgggcagtccattactttgtcggccagcggcagggccattccccggaagccagaccagcgatacactgcctgaggtcagcgccatacccatttcccttgatggactgctgttcccacggccatgccaggggcaggaccccagcgacgagaaaacccaggatcagcagagtctttccgatgttgagggcgcatattcaagggcagaggccacaaggggcgctggaggtagctccagcagccccccagagaaagactctggactcctggactcagtgctcgataccctgctcgcaccctcaggacccggacagagtcagccgagccctcctgcttgcgaggttacgtcttcttggtgcctctttgggcctgagctacccgaagatccaccagctgcccctgcaacacagagggtgctcagtcccttgatgagtagatccggatgtaaagtgggagactctagtggcacagccgctgctcataaagttttgcctagaggactgtccccggcacggcagttgctgctgcctgccagcgagtcaccgcactggtctggcgctcccgtgaaacccagccctcaagctgcagccgtcgaagttgaggaggaggacggatctgagagcgaggaaagcgctggccctctgctgaagggtaagcctagggcccttggaggtgccgctgctgggggaggggctgccgcagttcctccaggggctgcagctggcggtgtggccctggtgccaaaggaagattcgagatttagcgcccctcgtgttgctttggtagaacaggacgcccctatggcaccaggccgaagcccgttggccactactgtgatggacttcatccacgtgccgattcttcctctaaatcatgcactcctcgcagctagaactaggcaactgcttgaagatgagagttatgatggaggcgcaggggctgccagcgccttcgctccccctagatcttctccttgtgcgagttcaacccccgtggctgtgggcgacttccccgactgtgcctatcctccggacgcggagcccaaggatgatgcctacccgttatacagcgatttccagccaccagccttgaagatcaaggaggaagaggagggggctgaagcctcagctagatctcctcgatcttatctcgtcgccggagctaaccccgctgcttttccagactttccgctgggccctccacctcccctgccacccagagcaactcccagccggcctggggaagcagccgtgactgccgcacctgctagcgcctctgtgagctcggcctctagcagcgggagcactctggagtgtattctgtataaggcagagggggctcccccacagcagggtccatttgcccctcccccttgcaaggctcctggagctagcggatgccttttgccgcgtgacggtttaccttctacttccgcttccgcagctgctgccggagcagcaccagctctgtaccccgctctcggcctcaacggtctgcctcaactcgggtatcaggcagccgtgttgaaagagggtcttcctcaggtttatcctccctacctaaattacttaaggcctgactcagaggcatctcagagtccgcagtactcatttgaatctcttccacagaagatttgtttgatttgcggggacgaggccagcggctgtcattatggggtgctcacttgcggctcttgcaaggtgttctttaagagagcaatggaaggccagcacaattatctgtgtgcgggtaggaacgactgcatcgtggacaagatacgcagaaagaactgtcccgcatgcagactcagaaagtgttgccaggccggtatggtcctagggggatttcgaaacctgcacatcgatgaccagataaccctgattcaatattcctggatgagcctgatggtgttcggacttgggtggcggtcgtacaagcacgtgagtgggcaaatgctttacttcgccccagatcttatcctcaatgattctttcggcagggctactaagtcgaatccagtgtag

SEQ ID NO: 30255 - DNA, 2295 bp, synthetic construct
  misc_feature 1..2295: note = Description of Artificial Sequence: Synthetic coding sequence
  source 1..2295: mol_type = other DNA
atgacagaacttaaagcaaagggaccacgagcgcctcacgtggctggcggaccaccatctccagaggtcgggtctccgctgctgtgtcgacctgccgctggcccattccctggtagccagacatctgacactctgcctgaggtttctgcaatcccaatttccctcgatggcctgctgtttcctagaccatgtcaaggacaggacccttccgatgaaaaaacccaagatcagcagtcattatcagatgtggagggggcttactcacgagccgaagctactaggggagcgggaggctcctccagcagcccgccagaaaaggattccggactgctcgactccgttcttgatactctgctggcccctagtgggcctggacagtcccagcccagcccaccagcttgcgaagtcacttcctcatggtgcctgttcggacccgaattgccggaagatccgccagctgcccctgcaacacagagggtgctctcaccactgatgtctcgctccggttgcaaggtgggtgacagtagtgggactgccgctgcacacaaggtgctccccagaggactctcccccgcaaggcagctcttgctgcccgcttccgaaagccctcattggtctggtgcccctgtcaagccttcaccccaggcagcagccgtcgaagtggaagaagaggacgggtccgaaagcgaggagtccgctgggccattactgaaagggaaacccagggctctcggcggagctgccgctggcggaggcgctgcagctgtgcctcccggtgcagcggctgggggtgtagccctagtccccaaagaggattccaggttcagcgctcctagggtggcactggttgagcaggatgcacccatggcccctggcaggtcacctctggcaacaacagtgatggactttattcacgttccgatcctaccgctgaaccacgctttgctggcagcccgtacccgccagctcttggaggacgaatcatatgatggtggggctggcgctgcctcagcgttcgctccaccaagaagtagtccatgcgcctcaagcactcccgtcgcggtaggcgattttccagattgcgcttatccacccgatgcggagccaaaggacgacgcataccccctttactctgacttccaacctcccgcattgaagataaaggaggaggaggaaggcgctgaggcctccgccagatcccctagatcgtatcttgtggctggagctaaccctgccgcattccccgatttccctctgggtcctccaccacccctaccaccacgcgcaacaccatccagacctggtgaagctgccgtgacagcagcacccgcaagtgccagtgtttctagcgcatccagctcgggcagcacactggaatgtattctgtacaaggccgaaggtgcacccccacaacagggacctttcgccccaccaccttgtaaagcccctggtgcaagcggctgccttctccccagagatggactcccctcaacaagcgcatctgctgccgctgcaggggctgcccctgctttgtatcccgcactcggtctcaatgggctgccacaattaggctatcaggctgctgttttgaaggagggactcccacaagtctatcccccatacctcaactacctgcgtcccgattccgaggccagccagagccctcagtactcttttgagtccctcccccaaaaaatttgtctcatctgtggggatgaggcttctgggtgtcactacggggtgttgacgtgcggcagctgtaaggtattcttcaagcgagccatggaggggagaaaattcaagaagttcaacaaggtgcgcgtcgtgagggccctagatgccgtcgccctgccacagcctgtgggcgtcccaaacgagagccaggccttgtcccaacgcttcacattcagcccaggacaggacatccagcttatccccccacttattaatttgctgatgagcatcgaacctgacgttatttatgctgggcacgataataccaaacccgacacttccagcagtctgctcacctcactgaaccagcttggagagaggcagctgctctccgtggttaagtggtctaagagtctgcctgggttcagaaacctacacattgacgaccagatcaccttgattcagtatagctggatgtccctgatggtcttcggattgggctggcgctcatataagcacgtatccggacaaatgctttacttcgcccctgatctgattcttaatgagtcgcaccgctctcttagtagtttcaagctggcgaaaaaatcatcttcagtttag

SEQ ID NO: 30256 - DNA, 1020 bp, synthetic construct
  misc_feature 1..1020: note = Description of Artificial Sequence: Synthetic coding sequence
  source 1..1020: mol_type = other DNA
atggagggccagcacaactatctgtgtgccggacgtaacgattgcatagttgataaaattcgcaggaagaattgtcctgcttgtaggttgcgcaagtgttgccaggctggaatggttctcggcggaagaaaatttaagaagtttaataaggtgagggtggtaagggcactggatgctgtggccctgccccagcctgtgggagtgcctaatgagtcccaagctctgtcacagagatttactttttccccagggcaggacatacagctgatacctccattaataaatctccttatgagcatcgaacccgatgtcatttatgcaggtcatgacaacaccaagccagatactagttctagtctattgacttccttgaaccaactgggagaaagacaactgctctccgtggtaaaatggtctaaaagcttgcctgggtttcgcaacctacatatcgatgatcagataacccttatccagtacagctggatgagcctcatggtgttcggactgggctggcgcagctacaaacacgtctctggccagatgctctatttcgctccggatctgatcttgaacgagcagagaatgaaggaaagtagcttctatagcctatgcctaactatgtggcaaatccctcaagagttcgtgaagctgcaggtctctcaggaggagtttctatgtatgaaagtcctccttctgctcaatactattcctcttgaaggcctaaggagtcaaacgcaatttgaagagatgagaagtagttacattagggagcttatcaaggctattggacttcgacagaaaggtgtggttagctccagccagcggttttaccagctcacaaaattgctcgacaatttacatgacctggtgaagcagttgcacctgtactgcctgaataccttcatacaatctagggcattatccgtggagttccccgagatgatgtccgaagtgatcgcagcccagttgcccaagatccttgcaggcatggtaaagcccctcctctttcataaaaagtag

SEQ ID NO: 30257 - DNA, 2412 bp, synthetic construct
  misc_feature 1..2412: note = Description of Artificial Sequence: Synthetic coding sequence
  source 1..2412: mol_type = other DNA
atgaccgagttgaaggctaaaggacccagggcacctcatgtggcagggggacctccctcaccagaagttggctccccgctgttgtgtagacccgcagcagggccatttccagggtcccagacttccgacactctccccgaggtgtctgcaatacctattagcctcgatggtcttctgtttccccgtccatgtcagggccaggacccaagtgatgagaaaactcaggatcagcagtcactctctgacgtcgaaggtgcatatagtagggctgaagccacgcgaggggctggaggtagctcatcatccccccctgaaaaagatagtgggctgctggatagcgtgctggacaccttattggcccctagcggcccaggacagagtcagcccagccctcccgcatgcgaggtgacttcctcttggtgtctttttggtccagagctgccagaggatccaccagctgcccctgcaacccagagagtattatccccattgatgagtcgcagcggttgcaaggtaggcgatagtagtggcactgcggcagcacacaaggttctgcctaggggcttatctcctgctcgccaacttctactgcctgccagtgagagtccgcattggtcaggagccccagtgaaaccgagcccccaggccgctgccgtagaggttgaggaagaggatggctccgagtcagaagaatcagccggaccactgttgaaaggtaaacctcgagcccttggaggagcagcggcagggggtggtgccgctgctgtgcctccaggcgctgctgctggcggtgttgcattagtaccaaaggaggactcccgtttctcagcccctagagtggccttagtggagcaagacgcgcctatggcccctgggcgaagcccactggccaccacggtaatggattttattcatgtgccaattctccccctcaatcacgcccttttggccgcaaggacacggcaactgcttgaggatgaatcatacgacggaggcgcaggagctgcatctgcattcgcccctcccagatcttccccttgcgcctcctctacgcctgttgccgtgggtgattttccggactgtgcctatcctcccgacgcggagccgaaggatgacgcctaccccctgtattccgatttccaaccccctgcccttaagatcaaggaagaggaagagggcgcagaggccagtgcacgctccccgcgatcttatctcgtcgccggagccaatcccgcagctttccccgactttcccctcggcccacccccaccccttccgcctagggccaccccatcgaggccgggtgaagccgctgtgactgcggctcccgcttccgcctccgtctcatccgcctctagctcgggaagtaccttggaatgtatattgtataaggcagagggggctccccctcagcaggggccttttgcccctcccccatgtaaagccccaggtgcttccggatgtttgctgccaagagacggtcttcccagcacttccgccagcgccgctgctgcgggtgccgctcctgccctctaccctgcgctgggattaaacgggttgcctcagttagggtaccaagccgcagtgctaaaggagggcctccctcaggtttaccccccttacctaaactatctgcggcctgattctgaggcctcacagtccccacagtattcttttgagtcattaccacagaagatttgtctgatttgtggagatgaggcttccggttgtcactacggtgtgcttacttgtggtagttgcaaggtgttttttaaacgcgctatggaggggcagcacaactacctctgtgctggcaggaacgactgcattgttgacaagattagacggaaaaattgccctgcatgcaggctccgcaagtgctgtcaggccggtatggtcctgggaggccgtaagttcaaaaaatttaacaaggtgagggtggtccgtgcacttgacgcagtagcattgcctcaacctgttggcgtgccgaatgagtcgcaagcactgtcccagcggttcactttttcccctgggcaggacattcagctgatcccacccctgatcaacttattaatgagcatagagcctgatgtgatctatgcgggacacgataacactaagcccgatacgagctccagtttactaaccagcctgaatcagctgggggaacgccaactgctcagtgttgttaagtggagtaaatcactgcccggattccgcaacttgcatattgatgatcaaatcacattgatacagtactcatggatgtctctcatggtcttcgggctggggtggagatcttacaagcatgttagcggccagatgctttactttgcacctgacctcatcctgaatgaaagccaccgctcccttagctccttcaagctcgccaagaagtctagttcagtttag

SEQ ID NO: 30258 - DNA, 2073 bp, synthetic construct
  misc_feature 1..2073: note = Description of Artificial Sequence: Synthetic coding sequence
  source 1..2073: mol_type = other DNA
atgacggaactgaaggctaaagggccaagagctccccacgtggctggcggacccccatctcccgaagttggatccccactgctttgtagaccagctgccggacccttccccggatcacagacttctgacaccctgcctgaagtttccgcaattccaatatcacttgacggcctgctgttccccaggccatgccaagggcaggacccatccgatgaaaagacccaggaccaacaaagcctttctgatgtcgaaggcgcttattcacgagccgaggcaacacggggagcaggtggttcatcgtcctcaccacctgaaaaagacagcggcttgctcgactcagtgctggacactctgctggcgccttcgggcccagggcagtcccagcccagtccccctgcctgcgaggtcacctcaagttggtgcctctttggcccagagctgcctgaagatccccctgccgctcccgcaacacaacgtgtgttatcccccctcatgtcacgcagcggctgcaaggttggggattctagcgggacggccgctgcccacaaggtcttacccagaggactgtctcctgcacgacaattgctgctccctgcctctgaatcacctcattggagtggcgcaccagtcaagccttcacctcaggctgcagcagttgaagtggaagaagaagacggatctgaaagcgaggagtcggctggccctcttctgaaaggaaagccgcgagcccttggaggggctgcagcgggaggtggcgctgcagcagtgccacctggggcagctgctgggggtgtcgcattggttcccaaggaggattcccggttttccgcaccaagggtagcccttgtagagcaagacgcgccaatggcccctggaagatctccactcgccacgaccgttatggactttattcacgtcccaatcttgcccctcaaccacgcactcctggctgcaagaactcgccagttactggaagacgaatcctacgacggaggagcaggtgccgcatcagccttcgccccacccaggtcctccccttgtgcaagtagcacaccggtcgccgtcggagactttcccgattgcgcataccctccggatgccgaacctaaggacgatgcgtacccgttatacagtgacttccaaccgccagccctaaaaatcaaggaggaagaagaaggggctgaagcctcagctagatccccacgcagctacctcgttgcaggggctaatcccgctgcctttcccgattttcctctaggtccacctccccctctaccacctcgggcaactccgtctcggcctggggaggccgcagtgactgcagccccagcctctgcctctgtatcctctgcctcttcatccggcagcacacttgaatgcatcctgtacaaagcagaaggggcaccaccacagcaggggccatttgctccccctccctgcaaagccccaggcgcaagcgggtgcctgcttccacgggacggccttcccagtacctcagcttcagcagcagcggcaggtgcagctcctgctctttaccccgctcttggacttaacggcttgcctcagcttggttaccaggcggctgtgctcaaggaagggcttccccaagtgtacccaccttatcttaactatctccggcctgatagcgaggccagtcaatcaccacagtacagcttcgagtctctcccacagaagatttgcctgatctgtggggatgaggcttccggatgccattacggggtgctcacttgcggctcttgcaaagtattttttaaacgggctatggaaggccaacacaattacctgtgcgctggaagaaatgattgtatagtggataaaatccgcagaaaaaattgccctgcctgtaggctcagaaaatgttgtcaggctggcatggtcttaggaggctttcggaatttgcacatcgacgatcagatcaccctgattcaatattcctggatgagccttatggtcttcgggctgggttggcggagctacaaacacgtctccggacaaatgctgtacttcgcacctgacctcattctcaacgaggagtcaatagtgacaagttag

SEQ ID NO: 30259 - DNA, 1410 bp, synthetic construct
  misc_feature 1..1410: note = Description of Artificial Sequence: Synthetic coding sequence
  source 1..1410: mol_type = other DNA
atggacgtggagaacgagcagatcttaaacgtgaaccccgctgaccccgataatttaagcgatagtctgttttcaggcgatgaggagaacgccggaactgaggagatcaagaacgagatcaatgggaattggatctctgctagctccattaatgaggcccgtatcaatgctaaagccaaaagaaggctcagaaaaaacagctctcgagactcagggcgaggggatagcgtgtccgatagtggcagcgatgcccttcgctcagggctgacggtccctacctccccgaagggccgattgctggacaggcggtcacggtctggaaaagggcgaggactaccaaagaaaggaggtgctggtggcaagggcgtgtggggcactcctggacaggtttatgacgtggaagaggtcgacgtgaaagaccctaactacgatgacgaccaggaaaactgtgtctatgaaacggtggtgctcccactcgatgagcgggcttttgaaaagactcttacacctatcatccaagaatattttgaacacggcgatacaaacgaagtggccgagatgttgagagatctgaatttgggcgaaatgaaaagtggcgtaccagtcctagcagtgtccctggcattggagggcaaagcctctcacagggagatgacgagcaagttgctaagcgatctctgcggaacagtcatgagcacaactgacgtggaaaagtcctttgataagctgctgaaggatctgccagaactggccttagacacccctcgggctcctcagctcgtcgggcagtttattgccagagctgtgggggacggcattctgtgtaatacatacattgacagttacaaaggcacggtggattgtgtgcaggccagagcagcccttgacaaggctactgtgcttttgtctatgagtaagggcggaaaaagaaaggatagtgtttggggctccggcggaggccagcagtcagtgaaccacttagtgaaggagatcgatatgttattgaaggagtatttactttctggcgacatctctgaggctgagcattgcttgaaggagttggaggtccctcattttcatcatgagctcgtgtacgaggctattattatggtgctcgagtcaacgggggagagtacttttaagatgatcctagatttactgaagtcactgtggaagtctagtaccataaccgtggatcagatgaagcggggttatgagcgcatctacaatgagattcccgacattaatcttgatgtgccccattcctactctgtgctggagcgctttgtggaggagtgcttccaggctggaataatcagtaaacagctgcgagatctgtgcccaagccggggacgtaaaagatttgtgagcgagggggacggaggtcgcctgaaacctgagtcctattag

SEQ ID NO: 30260 - DNA, 1377 bp, synthetic construct
  misc_feature 1..1377: note = Description of Artificial Sequence: Synthetic coding sequence
  source 1..1377: mol_type = other DNA
atgactaaatatccggataacctctctgattccctgttcagcggcgatgaggaaaatgctggcacagaagagatcaagaacgagatcaacggtaattggatcagcgcctcttccataaatgaggctcggattaacgcaaaggcgaaacgtcgtttacgaaaaaattcaagtcgagatagtggccgtggcgactccgtgtccgactcaggtagcgacgccctgcgttctggccttacagtccccacttcacctaaggggaggctgctggaccggaggtcaaggtcagggaaaggcagaggcctgccaaaaaagggcggagctggcggaaaaggggtgtgggggacgcccggacaggtgtacgacgtagaggaggttgacgttaaggacccaaactatgatgatgaccaagaaaattgtgtgtacgaaacggttgtcttaccactcgacgagagggccttcgagaaaacattgacaccgatcattcaagaatacttcgagcatggagacaccaacgaggttgctgagatgctcagagatctcaatttaggcgaaatgaaatccggcgtgcctgtcttggctgtctccctggcgctggagggcaaagcttcccatagagaaatgactagcaagttacttagtgatttgtgcggtactgtgatgtccacgaccgacgtcgaaaaaagttttgacaagctcctgaaagaccttccagagctcgctctcgatacacctcgcgcacctcagctggtcgggcagttcatcgctcgggcagttggcgatggcatactttgcaatacttatatcgactcatacaagggaaccgtagattgcgtgcaggccagggccgctttagataaagctactgttctcctgtctatgtcaaagggaggaaagagaaaagactcagtgtgggggtcgggtgggggtcagcaaagcgtcaaccaccttgtaaaagagattgacatgctactaaaggagtatcttttatctggagatatctctgaagcggaacattgtctcaaagagctagaggttcctcacttccaccacgagcttgtgtacgaagcgattattatggtgctggaatccacgggtgaatcaacctttaagatgatactcgatctgctgaaatccttatggaaatctagtaccatcacagtcgaccaaatgaaacgagggtatgaaaggatttataatgagatcccagacattaacctggacgtgccccactcttatagcgtgttggagcgtttcgtcgaagagtgttttcaggctggcattattagtaagcaactgcgggatctctgccccagccggggaaggaaaagattcgtgtccgagggtgacggcggaagactgaaacctgagagctactag

SEQ ID NO: 30261 - DNA, 696 bp, synthetic construct
  misc_feature 1..696: note = Description of Artificial Sequence: Synthetic coding sequence
  source 1..696: mol_type = other DNA
atggacgtcgaaaacgaacaaatattaaacgttaaccccgcagagaatgcaggcacggaggaaataaagaatgagatcaacggcaactggattagcgccagctccataaacgaggcacgcattaatgccaaggccaaacggagattacgtaagaattcctctcgagactctggcagaggcgattccgtgagcgactccgggtcagatgccctacgttcagggcttacagtgccaacgtcccccaagggtcggctgctcgatagaagatctcgtagcggcaagggcagaggtttacccaaaaaaggcggagcaggcggtaagggcgtatggggcacccccggtcaggtgtatgacgtagaggaggttgacgttaaggaccccaactatgacgacgaccaggagaactgtgtgtatgagactgtggtacttccgcttgatgagcgcgcatttgaaaaaactctgactccaattattcaagagtattttgagcatggggatacgaacgaggtggcagagatgctgagagatttgaatctgggagagatgaaatccggtgtcccggtcctggctgtcagtctggctctagaggggaaggcatcccaccgggagatgacttcgaagctgctatcggatctgtgcggcactgttatgtcaacaacggatgtcgagaaatcatttgacaagctactgaagtag

SEQ ID NO: 30262 - DNA, 786 bp, synthetic construct
  misc_feature 1..786: note = Description of Artificial Sequence: Synthetic coding sequence
  source 1..786: mol_type = other DNA
atgtttgaggccaggctggtgcaaggcagtattttgaagaaggtgctggaagctctcaaggatctgatcaatgaggcgtgctgggacattagctcttctggcgtgaaccttcagagcatggactcctctcatgttagcctcgttcagctaactttacggtccgagggatttgatacttaccgatgtgataggaacctggccatgggcgtaaatttgacctcaatgtcaaagatactaaagtgtgcagggaatgaagacatcatcactcttcgggctgaagataatgctgacacacttgccctggttttcgaggcacccaaccaggagaaggtcagtgactatgagatgaagttgatggatctggacgtggagcagctgggtatcccagagcaggaatatagttgtgtcgtgaaaatgcctagtggagagttcgccagaatctgcagggacctctcccacatcggggacgctgtggtaatttcatgtgcaaaggatggggtgaagttctcagcttctggcgaactagggaacggaaatattaagctttctcagactagtaacgttgataaggaggaagaggccgtcaccatcgaaatgaacgagccagttcagctgacatttgcactgcgctacctgaactttttcactaaggccacccctctctctagtaccgtcacactctctatgtctgctgacgtgcccctcgtggtggagtacaaaattgcagatatgggtcacctgaaatactatcttgcccctaagatagaggatgaagagggttcatag

SEQ ID NO: 30263 - DNA, 786 bp, synthetic construct
  misc_feature 1..786: note = Description of Artificial Sequence: Synthetic coding sequence
  source 1..786: mol_type = other DNA
atgtttgaggcaagattggtccagggaagtatcctaaagaaagtgttagaagccctgaaggatcttattaacgaggcatgttgggacatttctagctctggtgttaatctgcaaagcatggattcaagccacgtttcccttgtccagctgactctgagatctgaagggtttgatacctaccgttgcgatcgcaacctggccatgggggtcaacctgacctccatgagtaaaatcctcaagtgtgcaggaaacgaagacatcatcacccttagggctgaggataacgccgacacactcgctctcgtgtttgaagcccctaaccaggaaaaagtttctgactacgagatgaaactgatggatctggacgttgagcagcttggtattccagaacaggagtattcttgcgtggtgaagatgcccagtggggagttcgcaagaatttgccgagacctgagccacattggcgatgccgtggtgataagctgtgcgaaagatggcgtgaagttcagcgcaagtggcgagctggggaacggcaacattaaactgagccagacctccaacgttgataaagaggaagaggccgtgaccatcgaaatgaacgagcccgtccagctgacattcgctctgcggtacctgaacttttttaccaaggcgacccccctgtcaagtaccgtaacactatctatgagtgctgatgtccctttggtcgttgaatataaaattgccgatatggggcacctgaaatattacctggctccaaagattgaggacgaggagggttcctag

SEQ ID NO: 30264 - DNA, 1140 bp, synthetic construct
  misc_feature 1..1140: note = Description of Artificial Sequence: Synthetic coding sequence
  source 1..1140: mol_type = other DNA
atgtcttcgccctctctttcggatttgggcaaaagggagccagctgcggctgctgacgagagaggaacacagcagcgacgtgcttgtgctaatgccacttggaattctatccacaacggcgtgattgccgtgttccagagaaaaggactcccagaccaggagctgttttctctgaacgagggcgtgcggcagctgctcaagacagaactgggatcgttcttcactgagtacctgcagaatcagcttctgacaaaaggtatggtgattctgcgcgataaaatccgcttctacgaggggcagaaactgcttgactcgttggccgagacatgggatttctttttctctgacgtactgccaatgttgcaggcaattttttacccagtacagggaaaggaaccgagtgtgcggcagctggccctgttacacttccggaacgcgattacactgtctgtaaagttggaagacgcgctcgctagggcccatgcaagagtgcctccagcgattgtacaaatgcttcttgttctgcaaggggttcacgagagtaggggcgtgactgaagactatctgcgtctagagacactcgtgcaaaaggtggttagcccatatctgggcacatatgggctccacagcagcgagggcccattcacccattcttgcatcctggagaaaagactgttaaggagaagtagatcgggggacgtcctagctaagaacccagttgtgagaagtaagagctataacaccccgctgctcaatcccgtacaggaacacgaggctgaaggcgctgctgcaggcggaaccagcattaggaggcactcagtttccgagatgacctcatgtccagagccccagggcttctctgacccacctgggcagggtcctacaggcacctttcgctcatcacctgcgccacacagcggaccttgtcctagtcggttatatccaacaactcagccacccgaacagggtctggatcccacacggtcttccctaccgaggtcctctccagagaatctagtggatcagatacttgaatccgttgactccgattctgagggaatcttcatcgactttggtagaggcagaggctccggtatgagcgatctggaaggctctggaggcagacagtccgtggtgtag

SEQ ID NO: 30265 - DNA, 1167 bp, synthetic construct
  misc_feature 1..1167: note = Description of Artificial Sequence: Synthetic coding sequence
  source 1..1167: mol_type = other DNA
atgagaactctcagacgcctgaaattcatgagtagcccttccctgtcggatttgggtaagcgtgagcctgctgcggcagcagacgagcggggtacgcagcagcggagggcttgtgcaaatgcaacctggaattctattcacaatggggtcattgcagtgtttcaaagaaaaggattgcctgatcaagagcttttttcgctcaacgagggagttcgtcaactgttaaaaactgagcttgggtccttttttactgaatatctgcagaaccagctgctgacaaaaggcatggtcatcctgagggataaaattcgtttttacgaggggcaaaaactgctggactcactggcggagacatgggatttcttcttcagtgacgtcctgcccatgttgcaggccatcttctaccccgtgcagggcaaggaacctagtgtacgccaactggcccttcttcatttcagaaatgcgataacactgagtgtgaaactggaagatgctctggcacgcgctcacgcacgagtgccaccggcaatcgtccagatgctgttggtgctccagggagttcacgaatcacgcggagttacggaagattacctcaggctggagactctggtgcagaaagtggtgtccccctatctgggcacctacggattacattcatctgaggggccttttacccactcttgtatcctcgagaaacgtctcctgagaaggtcccgatccggagacgtgttagctaagaacccagttgtgcggagtaaatcttacaatactcccctgctcaatccagtgcaagaacatgaagctgaaggtgcagctgctggtggcacttccatccggagacattctgtaagtgagatgacatcctgccccgaacctcaaggtttttcggacccacctggccaaggcccaacgggcactttccgctcgtccccggctccacacagcggaccttgcccgtcaaggctctaccctactacccagccccctgagcaagggctggaccctactcgcagtagcttgcccagatcttctccggagaatctcgtggatcagatcctggaatctgtagactctgattctgagggcattttcatcgactttggcaggggcaggggtagtggcatgtccgatctggagggctccggcggtagacagtcagtcgtgtag

SEQ ID NO: 30266 - DNA, 804 bp, synthetic construct
  misc_feature 1..804: note = Description of Artificial Sequence: Synthetic coding sequence
  source 1..804: mol_type = other DNA
atgtccagcccatccctctccgatttgggcaaacgcgagccagcagccgctgctgacgaacgcggtacccagcagagacgggcatgcgcaaacgcaacatggaacagcatccataacggtgttatcgcggtgtttcagcgaaaaggcctgcctgatcaggaactttttagccttaacgagggtgtgcgccagctcctcaaaacagaactcggttccttctttacagaataccttcaaaatcagctgctaactaagggtatggtaatactgagggacaagataaggttctacgagggacagaagctactcgactctctcgccgaaacttgggactttttttttagcgacgtcctgcctatgttgcaggctatcttttatcctgtgcagggcaaggaaccttctgttaggcagctagccctgcttcactttcgaaatgccatcacactgagcgtgaaactggaggacgccctggcaagagcccatgctagggtgcctcctgctatcgtgcagatgctcctggtactccagggcgtgcatgaatctagaggtgtgacggaagactacctcagactggagaccctggtgcagaaggtggtgtctccatacctcggcacatacggactccattcttcggaggggccattcacccattcttgcatccttgaaaaacggctgctcaggagatctcgtagtggggatgtactggctaagaatcccgtcgtcaggtcgaagtcgtacaacactcccttgctgaaccccgtccaagagcacgaagcggagggagcggctgcgggaggaacctag

SEQ ID NO: 30267 - DNA, 681 bp, synthetic construct
  misc_feature 1..681: note = Description of Artificial Sequence: Synthetic coding sequence
  source 1..681: mol_type = other DNA
atgtcctcccccagtctctcggaccttgggaagagggaacccgcagccgcagccgacgaacgaggcacccaacagcggcgtgcctgcgctaacgcaacatggaatagcatccataacggagtgattgccgtgtttcagcgcaaaggcttgccggatcaggagcttttctcactgaatgagggagtgcggcagctgctcaagactgaactgggctcgttcttcacggaatacctgcagaaccaactcctcacgaagggtatggttattctccgcgataaaattcgattttatgaggggcaaaaattgctcgactctctggccgagacgtgggatttctttttttctgatgtgctgcccatgctgcaggccatattctaccccgtccaggggaaggagcccagcgtccgtcagctagctctgctgcatttcagaaacgcaattacacttagtgtgaaactcgaggacgccctcgcccgagctcatgccagagtcccgcctgctatagtgcaaatgcttctcgtgctgcaaggtgtgcacgagtctcggggtgtcacagaagattatctgcgcctcgagactttggtgcagaaagtagtgagtccctacttggggacttacggacttcatagttccgaaggcccatttactcatagctgcattctcgaaaagagattactgtag

SEQ ID NO: 30268 - DNA, 1236 bp, synthetic construct
  misc_feature 1..1236: note = Description of Artificial Sequence: Synthetic coding sequence
  source 1..1236: mol_type = other DNA
atggtttgcctggaactgtcccagcgcgaggcatgggggtcaggctcccccgaaaaaatgccagctcagcctgaggggctctaccgcctgaagttcatgagcagcccttcccttagcgacttgggaaaaagggaaccagcagctgcagccgatgagagagggactcagcagaggagggcctgtgcaaatgcaacctggaattcaatccacaatggggtgatagccgtattccagagaaaaggtctgcccgaccaggagctgtttagcctgaacgagggcgtcagacagctcctgaagactgaactaggcagctttttcacagaataccttcaaaaccagttgctgacaaagggcatggtcattcttagggacaagattagattttacgaggggcaaaagctactggactctctggcagagacttgggacttttttttcagcgacgtactgcctatgctccaggctatcttctaccctgttcagggaaaggagccatctgtgcggcagctcgccctcctgcacttccggaacgcaattactctgagtgtcaaacttgaggacgccctggcacgagctcacgcacgggttccgccagccattgtgcagatgctcctggttcttcagggcgtgcacgaatctcgcggagtgactgaagattatctccgtctagaaacccttgtgcagaaagtggtgagtccctatctgggcacctacggtctacatagcagtgaaggaccattcacacattcctgtatcctggaaaagcgactcctccgacggagtaggtcaggagacgtcctggccaagaatccagtagttaggtccaagagttataatacgcctttactcaatcccgtgcaggagcacgaagcagagggtgctgccgctgggggtaccagcatcaggaggcacagcgtgagcgaaatgactagctgtccagagccccaaggattcagcgaccctccaggccagggaccgacgggtaccttccggtcaagcccagcaccccattcagggccatgtcccagcaggctatatcctactacacaacctccagaacaaggactggatcccacacgaagttcccttccgcgatcaagtccagagaatcttgtggatcaaatcctcgagagcgtggactccgactctgaagggatctttatcgatttcggtcgcggacgcggttcagggatgagcgacttggagggaagtgggggaaggcaatcagttgtctag

SEQ ID NO: 30269 - DNA, 2649 bp, synthetic construct
  misc_feature 1..2649: note = Description of Artificial Sequence: Synthetic coding sequence
  source 1..2649: mol_type = other DNA
atggagcccgcaccggcaagatcacctaggccccagcaggacccagctcgacctcaagagccaacaatgcctccgcctgaaactccctccgagggcagacagcctagtccatctccatcacctacagagagggcacccgcatcagaagaagagttccagttcctgcggtgccaacaatgccaggcagaggcgaaatgccctaagctgctgccctgcctccacaccctgtgctctgggtgcctcgaagcgtcgggcatgcaatgccccatatgccaggctccttggcctctaggggcagacactccggcactcgataacgtatttttcgagtccctgcaacgcagactaagcgtttaccggcagattgtagacgcacaggcggtctgtactcgttgtaaggagagtgccgatttctggtgctttgagtgtgaacaactgctctgcgcgaagtgctttgaggcacatcagtggttcttgaaacacgaagctcgccctctggctgagcttcgaaaccaatccgtccgggaattcctcgacggtacaaggaaaacgaacaatattttttgctcaaatccaaatcataggacaccaacacttacttctatttattgcaggggttgctccaagccactgtgttgtagttgcgcattactggacagctctcactccgagttgaaatgtgatataagtgctgaaatacagcaaagacaggaagagttggatgccatgactcaggctttgcaggagcaagacagtgcgttcggggcagttcacgcgcagatgcacgccgcagttggacaactgggacgagctcgtgccgaaacagaggagctgattcgggagcgggttcgtcaggttgttgcccacgttcgcgcacaggaaagagagctgttagaggctgtggacgcgcgttatcagcgggactacgaagaaatggccagtagactaggaagactggacgcagttctgcaacgaatacgaactggtagcgcactggttcagaggatgaaatgctacgctagcgaccaagaagtcctagatatgcacgggttcttaaggcaggccctctgtaggctcagacaggaggagccccaaagcctgcaggctgccgtgcggactgatggcttcgatgagtttaaggtgcgcctacaggatctgtcttcctgtatcacacagggaaaggacgctgccgtctccaagaaagccagcccagaggctgcttccacgcccagagacccaatcgacgtggatctgccggaagaagcagagcgcgtgaaagcacaggtccaagccctcggtctggcggaggcacagcctatggccgtagtgcagtcggtacccggtgcccaccctgtccccgtctacgcattctctatcaaaggaccttcatacggcgaagatgtgtcaaataccactactgcccagaaacgcaaatgcagtcaaacacagtgccctaggaaggtgatcaagatggagtctgaggaggggaaggaggccagactggcccgatctagccccgagcagcccagaccatctacaagtaaagccgtgagtccccctcaccttgatggcccaccgagtcctcggagtcccgtaatcggaagcgaggtattcttgccaaattcaaaccatgtggccagtggcgcaggcgaggcggaggaacgagtagtggtaattagcagtagtgaagattcagatgcggaaaattcttcaagcagggagctcgatgactcttcaagcgagagcagtgacctgcagctggagggaccatccactctcagggttttagatgagaacctcgcagatccacaagctgaggacaggcccctggtctttttcgatttgaaaatcgataatgaaacgcaaaaaattagccagttggcagccgtgaatcgagaatccaaattcagagtagttatacagcccgaggccttctttagcatatatagcaaggcagtatcccttgaggtcgggttgcaacactttttgtcttttctaagctctatgagacgtccaatcctggcatgctacaagctgtgggggccaggtctgccgaactttttccgtgccctcgaggatataaaccgcctttgggaattccaggaggcaatctctggctttctcgctgccttgccactaattcgcgagcgagtgccaggggcaagttcctttaagctgaagaacctcgcccaaacatatttagccagaaacatgtctgaaagaagcgcaatggctgcagtgctggccatgcgggatctctgtcgcctgctggaggtgtcacctggccctcagctcgcacaacacgtctaccctttcagtagtctccagtgctttgctagtctgcagcctttggtgcaggcagcggtcctgcccagggccgaggccaggcttttagccctacataacgtgtccttcatggagcttcttagcgcccatagacgagatcgacaggggggactaaagaaatatagtcggtatctgagcctgcaaacaacaacgctccccccagcacagcctgccttcaatctccaggcgctgggaacttattttgagggactgctggaaggacccgctttggcacgagccgagggcgtcagcacgcctttagccggtaggggtctcgctgaaagggcgtcccagcagtcctag

SEQ ID NO: 30270 - DNA, 2490 bp, synthetic construct
  misc_feature 1..2490: note = Description of Artificial Sequence: Synthetic coding sequence
  source 1..2490: mol_type = other DNA
atggagccagcccctgctagatcgcccaggccccagcaggaccccgctcggcctcaggagcctaccatgccccctcctgagacaccatctgagggcagacaacctagccccagtccctcgcctaccgaacgtgcgccagcatcagaagaagagtttcaatttctgaggtgtcaacagtgccaagcggaggctaaatgccccaagttgctgccatgtctgcacaccctatgtagcggctgtctcgaggcttccgggatgcaatgtcctatctgccaggccccatggccactgggggctgacacccctgcattagataacgtcttctttgaatcattgcagcggagactctcagtgtaccgtcagatcgtggatgctcaggccgtctgcacccgctgcaaggagagcgcggacttttggtgctttgagtgtgagcagctactgtgcgcaaaatgctttgaagctcaccaatggttcttaaaacacgaggcacggccactggccgagctcaggaatcagagcgtgagggagtttctggacggcactcgcaaaacaaacaacattttctgtagcaatccaaaccacagaacccccacactgactagcatttactgtagagggtgctcgaaacccctgtgttgctcctgtgcgctgttagattcttctcactccgagctaaagtgtgatatatccgccgagatccaacaacgtcaggaagaattggatgccatgactcaggccctgcaggagcaggacagcgccttcggagcagtgcatgctcagatgcacgctgctgtgggccagctggggcgagccagagccgaaacagaggaactaatccgcgagcgggtgcggcaggtggtagcccacgtcagggcacaggagcgggagttgttggaggctgttgacgctcggtatcagagggattacgaggaaatggcatcacgactcggcaggttggatgctgtcttacaacgcatcagaaccggctccgccctggtgcaacggatgaaatgttatgcatcggatcaggaggtgctcgacatgcacggatttcttaggcaggcattatgtcggttacgacaagaggagccacagagtctgcaggcggctgtgaggaccgacggcttcgacgaatttaaagtgcgcctgcaggaccttagcagctgtattacacaaggtaaggacgctgcagtgagtaaaaaggcgagtccggaagcagcttcgactcctagagaccctattgatgttgacttgccagaggaagctgagagggttaaagcccaggtgcaggcactgggcctggcagaagcgcaacctatggccgtggtgcagagtgttcctggggctcaccctgttcctgtttatgccttttccatcaaagggccatcctacggagaggatgtatctaataccactaccgctcaaaaaaggaaatgtagccagacccagtgtccgcgtaaggtgatcaagatggaatccgaggagggaaaggaggctcgattggccagatccagtcctgaacaacccaggccatccacctcgaaagccgtgtcccctccacacctggatgggccaccttcgccccgtagtccagtcatcggatctgaagtgtttctacctaatagtaaccatgtggcgtccggcgctggcgaggccgaggaacgggttgtggtcatttcctcatctgaggatagcgatgcggagaacagttgtatggagcctatggaaactgccgaaccacagtcttcccccgctcattcctccccagcccactcctctcccgctcactcttctccagtgcagtctctcctgagagcgcaaggggcaagctccttgccttgcggaacctatcaccctccagcatggccccctcaccaaccagcagaacaagcagcaacccctgacgcagagcctcacagtgaacctcctgaccaccaggagagaccagcggtacatagaggtattcggtacctgttgtaccgcgcacaaagagctataaggttgaggcatgcccttcgtctacatccccagcttcaccgtgccccaattagaacctggtcaccccacgtggtgcaagctagcaccccagcgataacagggcctctgaaccaccccgctaacgcacaagagcatccagctcagttacaacgcggaatctctccaccacacagaattcggggagctgttcgcagccggagccggtcccttcggggtagcagccatttaagtcagtggcttaataatttcttcgccctacccttttccagtatggcgtcccaattagacatgagtagtgtggtgggagctggggagtcacgcgcacaaactttgggcgcaggcgtccctcccggtgattccgtacggggatccatggaggcttcccaggtacaggtgccgttagaagcaagcccaattacttttcctcctccatgcgcaccagagagaccccctatctctcccgtgccaggcgctagacaggccggactctag

SEQ ID NO: 30271 - DNA, 2346 bp, synthetic construct
  misc_feature 1..2346: note = Description of Artificial Sequence: Synthetic coding sequence
  source 1..2346: mol_type = other DNA
atggagcctgctcccgctcggagcccacggcctcagcaggacccggctaggcctcaagaacctaccatgccaccacccgaaaccccgagtgaaggcaggcagccatctccctcgcccagtccaactgagcgagctccagcttccgaggaggagtttcagttcttacggtgccagcagtgtcaagccgaagccaaatgcccaaagctgctgccctgcctgcacactctgtgcagcggatgtctcgaagctagcggcatgcagtgccctatttgtcaggccccttggcccctgggtgcggatacgcccgctctggacaacgtgttttttgagagcctgcaacggagactaagcgtctatagacaaatcgtggatgcccaggctgtctgcacccgctgtaaggaaagtgcagacttctggtgttttgagtgtgagcaacttctctgcgcaaagtgcttcgaagcacaccagtggtttttaaagcatgaagctcggcctttggccgagctacgcaatcaatcagtgcgcgagtttctggacggcacaagaaagactaataacattttttgctcaaatcctaatcacaggacacctacattgaccagcatctactgccggggttgctccaaacccctgtgctgctcctgtgcccttttagactcaagccattctgagctcaagtgcgacattagcgccgagatccagcagaggcaggaagagttagatgcaatgacccaggcgctgcaagagcaagattccgcttttggagctgtgcacgcccagatgcacgccgcagtgggccaactgggtagagctcgggctgagaccgaagaactaattcgcgaaagggtgcgccaggtagtagctcacgtgcgcgcacaggagagggagctactggaagctgtggatgcaaggtaccagagagattatgaggagatggcttcccggcttggaagactggacgcggtcctccaacgcattaggactggaagcgccctggtacagcgaatgaaatgctatgcttctgatcaggaagtgctagatatgcacgggtttctcaggcaggctctatgtaggttaagacaggaggagccgcaatctctccaagctgctgttaggaccgacggcttcgacgagttcaaggttaggctgcaggacctctcctcttgcattacacagggcaaggacgccgctgtttctaaaaaggcttctcccgaggctgcaagcacccctagggatccaattgatgttgacctcgatgtatccaataccacgaccgctcaaaagagaaagtgctcgcagacccaatgtcccagaaaagtcattaaaatggaatctgaggagggtaaggaagctcgtcttgccagatcctccccagagcaacctcgaccctcaacctccaaagctgtcagcccaccacacctcgatggaccaccctcaccgaggtcacccgtgatcggctctgaggtcttcctccctaatagcaaccacgtggcctctggagccggagaagccgaagagagggtggtggtgatctcctcttccgaagattccgatgctgagaactcgtgcatggagccaatggagactgcggagcctcaatcgtcccccgctcactcctcacccgctcacagcagcccggcacatagttctcctgtacagagtcttctgcgggctcaaggggcttcctcgcttccctgcggtacttaccacccgcctgcctggccccctcatcagccagccgaacaggctgcaaccccggacgcggagccccatagcgaaccccctgatcatcaggaacggcctgctgtacaccggggtatcagatacctgctctaccgggcacaaagagccattagactgcggcacgcattgaggctgcacccccagctccacagggctccaattcggacttggagcccccatgtcgtgcaggcaagcactccggcaatcacaggcccacttaatcaccccgcaaacgcccaggagcaccccgctcagctccagcggggtatttctcctccgcatcgaatcagaggcgcagtgagatctcgtagcaggtctctccgcggatcaagtcacctcagccagtggctgaacaattttttcgctctgcctttcagctcaatggccagccagttggacatgtcatctgtggtaggggctggggagagcagagcccagactctgggtgctggcgtgcctcctggagattccgtgcgtggttctatggaggcctcacaggtgcaagtgccactggaggcttcacctattacctttcccccaccatgcgctcccgagcgcccacccatttcaccggttcccggagccagacaggctggactctag

SEQ ID NO: 30272 - DNA, 1272 bp, synthetic construct
  misc_feature 1..1272: note = Description of Artificial Sequence: Synthetic coding sequence
  source 1..1272: mol_type = other DNA
atggaacctgcccctgcaaggagccctaggccccaacaggatccagcccgaccccaggagcccactatgcccccacccgaaacaccctcagaagggaggcaaccctctccgagcccgagtccaacagaaagggcacccgcttcagaggaggagtttcagttcttgcggtgtcaacagtgccaggctgaagctaagtgcccaaaattgctgccgtgtctgcataccttgtgttccggctgcctggaagcctccggcatgcaatgtcctatatgtcaggccccttggcccttgggcgcagatacacctgctctggataatgtcttttttgaaagcctgcagagacgtctaagtgtatacagacagatcgtagatgcccaggctgtctgtacccgatgtaaagagagcgcggacttctggtgttttgagtgcgaacagctgctatgtgcgaaatgttttgaagcacaccagtggtttctcaagcacgaggcacgccctttggcggagctccggaaccagtccgttagagagttcctggacgggactcggaaaaccaacaacattttttgctccaatccaaatcacaggacaccaactttaacctccatctattgtcgcggttgctcgaagccactctgttgcagttgcgccctgcttgacagtagccattccgagctgaagtgcgacatatctgctgagatccagcaacgccaggaggaactggatgctatgacccaggccttacaggaacaggatagtgcattcggggcagttcacgcacagatgcatgcagccgttggccagctgggaagagctagagctgagacagaagagctcatacgtgaaagggtacgccaggtggttgcacatgttcgtgctcaggaaagggagctgctggaggccgtggacgcacgttaccagagagattacgaggagatggcttcacgattgggaagactggatgcagtgttacaaagaatccgcaccggctcagccctggttcaaaggatgaagtgctatgcatcggatcaggaggtgctggatatgcatggatttctccgtcaggcactgtgtaggcttcgccaggaagagccccagtctcttcaggccgctgtaagaacagacggttttgatgagtttaaggtgcggttgcaggatctttcatcctgtattacacaggggaaggacgcagctgtttcgaaaaaagcctctccagaagctgcctctacacccagggaccccattgacgtagatctgcgaaacgccctgtggtag

SEQ ID NO: 30273 - DNA, 1308 bp, synthetic construct
  misc_feature 1..1308: note = Description of Artificial Sequence: Synthetic coding sequence
  source 1..1308: mol_type = other DNA
atggagcctgcccctgctcgctccccaagaccacagcaagaccctgcacgaccacaggagcctaccatgccaccccctgagacaccatccgagggcaggcagcccagtccctctccatctcccaccgaacgggctccagctagcgaggaagaattccaattcttaagatgtcagcaatgtcaggcagaggccaagtgcccgaaattgctcccctgtctgcataccctgtgctcaggttgtctggaggccagcggaatgcaatgccctatctgtcaagccccttggccgctcggggcagataccccagctctggacaatgtgtttttcgagagcctgcaacgcaggttatccgtttaccggcagatcgtggatgcccaggctgtttgtacaaggtgtaaggagtctgctgatttctggtgcttcgagtgtgaacagcttctctgcgcaaagtgcttcgaggcacaccagtggttccttaaacatgaagcgaggccactcgctgagctccgtaatcagagcgtgcgggaatttctggacggaactagaaagactaacaacatattttgctcgaaccctaatcatcggacgccaacactgacatccatatactgcagggggtgttctaagccactgtgttgcagctgcgcattgctggactccagccattccgagctgaagtgtgacatctctgccgagatccaacagcgccaggaagaattggacgccatgacacaagcgttacaggagcaggatagcgcatttggtgctgtccacgcccagatgcatgctgccgtcgggcagctgggcagagcgagggccgagaccgaagaactcatccgggaacgcgtgaggcaggtggtcgcccacgttagagcacaagaacgtgagctgctcgaggccgtggatgcaagataccaaagggactatgaggagatggccagtcgactcggcagattggatgcagtattgcagcgcatcagaacaggttctgcccttgtgcaacgcatgaaatgttacgcctcagaccaggaagtcttagatatgcacggctttctgcgacaagccctgtgtagattgcgtcaggaggagccccaaagtttgcaggccgctgttcgtacagatggattcgacgagttcaaagtaaggttgcaagatctgtcttcctgcattacccaaggcaaggatgctgcggtgtccaaaaaagcgtcacccgaggctgcctctacacctcgagacccaatcgatgtagacctgctaccgcctcccgcacatgccctaactggcccagctcaatcgtcaacacattag

SEQ ID NO: 30274 - DNA, 1902 bp, synthetic construct
  misc_feature 1..1902: note = Description of Artificial Sequence: Synthetic coding sequence
  source 1..1902: mol_type = other DNA
atggaacccgctcctgctaggtctcctaggcctcagcaggacccggcaagacctcaagaacccacgatgccacctcctgagaccccgagcgaaggaagacaaccctcacccagcccctcccctaccgaaagagcgccagcctctgaggaagagttccagttccttcggtgccaacagtgtcaggctgaagccaaatgcccaaagctgcttccttgcctccacactctatgttccgggtgtcttgaggccagcgggatgcagtgccctatttgtcaggccccatggccattgggcgctgacacgcctgccctggacaatgtctttttcgaatctctgcaacggaggctctcggtttacagacagatagtcgacgcgcaggccgtgtgcaccaggtgtaaggaatcggcggacttctggtgctttgagtgcgagcagctcctctgtgctaaatgttttgaggcccaccagtggttcttaaaacacgaggctagacccttggcggaactgaggaaccagagcgtgcgcgagttcctggacggcaccagaaaaacaaataatatattttgttcaaacccgaaccacaggacgcctaccctcacttccatctactgcaggggatgttctaaaccactgtgttgctcatgcgccctgttagatagctcacacagcgagctgaaatgcgacatatccgcagaaatccagcaacgtcaggaagagctggatgccatgacccaggccctacaggaacaggactctgcatttggggctgtacatgcgcaaatgcacgcagccgtgggccagcttgggagagctcgcgctgaaactgaagagctgattagggaacgggtcagacaggtggttgcccacgtacgggcacaagaacgggaactgctggaggctgttgacgctcgctaccagagagattatgaggaaatggcgagtagacttgggcgtctggacgcagttttacagagaatccgcactggcagtgcgctggtgcagcggatgaagtgctacgcatcagaccaagaggtgctcgacatgcacggcttccttagacaggccctttgccgattgcggcaggaggagccccaaagtctccaagctgctgtgcgtacagatggctttgacgagttcaaggtcagacttcaagatctcagctcctgcatcacacaggggaaggatgctgcagtatccaagaaagctagcccagaagccgctagtacgccccgagacccaattgatgtcgacttgccagaggaggcggagagagtcaaggcccaggtacaagcactgggactggctgaagcccagcctatggctgttgttcaatccgtacctggagcccatccagtgcctgtctacgccttctctatcaagggtcctagctacggtgaggacgtctcaaacactacaacagcacagaaaaggaaatgttctcagacccagtgcccccgtaaagtcatcaagatggagtccgaggaggggaaggaggctcgcttggcacggtcatctccggagcagcccagaccttctaccagtaaagccgtatcccctccacacttggatgggcctcccagcccacggagtcctgtgatcgggtctgaagtcttcctgcccaactcaaatcatgtggcatctggcgcaggggaagccgaagagcgggtggtagttatttcgagttcagaagactcggacgctgagaactcgtcaagcagggagctcgacgactctagctccgaatcatctgacttgcagctggagggaccctccacccttcgcgtgctggacgagaaccttgccgacccacaggctgaagatagaccactcgtctttttcgacctcaagattgacaatgagtccgggttttcttggggatatcctcacccattcctgatttag

SEQ ID NO: 30275 - DNA, 1332 bp, synthetic construct
  misc_feature 1..1332: note = Description of Artificial Sequence: Synthetic coding sequence
  source 1..1332: mol_type = other DNA
atggccgtagtgcagtcagttccaggcgctcaccccgtgccggtttatgctttcagtatcaagggcccttcctacggggaggacgtgtccaataccaccacagcccagaaacggaagtgttctcagacacagtgtccgagaaaagtgattaagatggagagcgaagaaggcaaagaagctcgcctcgcccgtagctcgcccgaacagcctagaccttccacctcaaaagccgtgtcacctccacacctggatggccctcccagcccaagaagccctgtcattggtagtgaagtgttcttacccaattcaaaccacgtagcctcgggagcgggagaggcggaggagcgggtcgtcgtgatttcaagtagcgaagactcagacgctgagaatagtagttcacgggagctcgatgactcatcgagcgaaagcagtgatctgcagctggaggggccatccaccctcagggttcttgacgagaatctagctgacccacaggcggaggaccggcctttggttttttttgatctgaagattgacaatgaaactcagaaaatctctcaattggcagctgtgaaccgcgagtccaagttccgcgtcgttatccagccagaggcctttttttccatctatagcaaggccgtcagcctggaggtgggactgcaacatttcctatctttcctgagcagcatgagaagacccatcctggcctgctacaaattgtggggccctggtctgcccaatttcttccgtgccctcgaggacataaatcggctgtgggagttccaggaggccattagtggattcctcgcagccctgccactgatccgtgaaagggtgcccggtgcctcatccttcaagttgaaaaatctagctcagacttatctggctaggaatatgagcgagcgaagcgccatggccgcagtgttagccatgcgggatctgtgtcggcttttggaggtgtcccctggccctcagctggcacagcatgtgtaccccttttccagcctgcaatgtttcgcatcactccaacctttagtgcaggctgccgtgcttccgcgagctgaggcccgacttcttgctctccacaatgtttcgtttatggagcttctgtccgcccatcgacgagatagacaaggaggattgaaaaagtacagcagatatttatccctccagactacgaccttgccgcctgctcagcccgcttttaacctccaggctttaggcacctacttcgagggactactcgagggcccagccttagccagggctgaaggggtgtctacccctcttgccggacgcggattggccgagcgcgctagccagcagagctag

SEQ ID NO: 30276 - DNA, 2598 bp, synthetic construct
  misc_feature 1..2598: note = Description of Artificial Sequence: Synthetic coding sequence
  source 1..2598: mol_type = other DNA
atggagcccgcacctgctaggtcacccagaccgcaacaggaccccgcaaggcctcaagaacccaccatgcctccaccggagaccccaagtgagggtcgccaaccaagcccttcccctagtcccacggaacgggctccagcgtctgaggaagagtttcagtttctcagatgccaacagtgtcaggcggaagccaagtgtccgaaactgctcccatgtctgcacaccctgtgcagtggatgcctggaggccagcggcatgcagtgtccaatctgccaggctccttggcccctcggggctgatacccccgctctggataatgtgttcttcgagtcactgcagcgacgcctcagcgtgtatagacagattgtggatgctcaagccgtttgcactcgatgtaaggagagcgctgatttttggtgcttcgagtgtgagcaattgttgtgcgcaaaatgttttgaggcgcatcagtggtttctcaaacatgaggccaggcccttggcagagttgcggaaccagtctgttcgggaattcctcgacgggactcgtaagaccaacaatatcttctgctctaatccaaatcaccgtacacctacacttacctcgatctattgcagagggtgctcaaagcccctgtgttgctcgtgcgccttattggattcatcccactctgagttgaagtgcgatatatcagccgagatccagcaacgacaggaagagctggacgctatgactcaggccctgcaggagcaggatagtgcttttggcgcagtacatgctcaaatgcacgcagccgtgggccagctggggcgagctcgtgcagaaacagaggaactcattagggagcgggtgcgacaggtagttgcgcacgttagggcgcaggaacgtgagctgctcgaggctgtggacgccaggtatcagcgcgattacgaagaaatggcctcacgcctggggaggttggatgccgtcctccaaaggattcgcaccggatctgcattggtgcagcggatgaagtgttacgcttctgaccaggaggtactggacatgcacggcttcctgagacaggccttgtgtagacttcgtcaggaggagcctcagtctctccaggccgcagtccggacagatggattcgatgaattcaaagttagactccaggacctgtcctcctgtattactcagggcaaggatgcagctgtgtccaagaaggcttcacctgaggctgctagcactccaagagacccgattgacgtggacttacctgaagaagctgaaagagtcaaggcacaagtgcaagccctggggctggcggaggcacagcccatggctgtagtgcaatcagttcctggcgcacacccggttcccgtgtatgctttctctatcaaaggccctagttacggagaagacgttagcaacaccacgaccgctcagaagaggaaatgttcccagacccagtgtccacggaaggtcatcaagatggaatcggaggaaggtaaggaggcaagactcgccaggtcttcccccgaacagcctcggccaagtactagcaaggctgtgtccccaccacacctcgatggacccccttcacccagatctccagtgataggttcggaagtgttccttccaaattccaatcatgtggcttccggagcaggtgaggccgaagagagggtggtggtgatcagctctagcgaggacagtgatgctgagaactcgagctcacgcgaactggatgatagcagctccgagtcctcggatctacaactggaaggcccatctacacttagggtattagatgagaacctcgctgacccccaggccgaagatcgtcccctggtcttcttcgatctgaagatcgacaacgagactcagaagataagtcaactggccgcagtaaacagggagtctaagttcagggtggtcatccaacccgaagcgtttttttcttttctgagctctatgagacgacctattctcgcttgctataaactgtggggtcccggacttccaaattttttcagggccctggaggacattaatcgactttgggagtttcaggaggctatctccgggttcctcgctgccctgccactcatccgtgaaagggtgcctggcgcttcaagttttaagctgaagaatctggcgcagacttatttggctcggaacatgagcgaacggtcggctatggccgcagtccttgcgatgcgggacctttgccggctgctagaggttagtccgggaccacagttggcacagcacgtatatccattttccagtctgcaatgctttgctagtctgcagccactggttcaagccgctgtcctgccccgtgccgaggcaaggttgttagcgctgcacaacgtgagctttatggagttgcttagtgctcatcggagagaccgccaaggtggtctgaagaagtactctcgctatcttagcctacagaccaccacactgccgccagcacagcccgcatttaatctgcaggctctcgggacgtacttcgagggcctgctggaggggcctgctctagctcgcgctgagggggtctccactccccttgcaggacgcggactcgcagagcgggcttctcagcagtcttag

SEQ ID NO: 30277 - DNA, 1836 bp, synthetic construct
  misc_feature 1..1836: note = Description of Artificial Sequence: Synthetic coding sequence
  source 1..1836: mol_type = other DNA
atggagccagccccagcgagaagccctagaccacaacaggaccctgcaaggcctcaggagcctactatgcctccaccggagaccccctcagagggtagacagccatcccctagtccaagcccaaccgaacgggctcctgcgtccgaggaagaattccagttcctgaggtgccagcaatgccaggcggaggcaaagtgtcctaagctgctcccgtgccttcacactctgtgctcaggctgcttagaagcgtccggtatgcagtgccccatttgccaggctccctggccgttaggagctgatacacccgctctggacaacgtattctttgagtccctccaacggcgactctccgtctacagacagatagtcgatgcacaggctgtctgcacccggtgtaaagagagtgccgatttctggtgcttcgagtgtgagcagctcttgtgtgctaagtgtttcgaggcacatcaatggtttctcaaacatgaggcgcgtcccctggctgagctgcgcaaccagagcgtcagagaattcctggacggcaccaggaagacgaacaacattttttgctcgaatcctaaccatcgcactccaacgttgacgtctatttattgtcggggatgcagtaaacctctctgctgttcatgtgcattgttggactcttctcactctgagttgaagtgcgacatttcggcagaaattcagcagaggcaggaggaattggacgccatgacgcaagcgctccaggagcaggactccgcattcggtgctgtacacgctcaaatgcacgcggctgtagggcagctgggcagggcaagagccgaaacggaggaactgattagagaaagagtccgacaggtggtcgctcacgtccgcgcacaggagagagaattactagaggctgtggacgcacggtaccagagggactacgaagaaatggcctcacggctaggcaggctagatgcggtcctgcagcgcattcggactggatcggccttggtccagagaatgaagtgctacgcctctgatcaggaggttttggacatgcacgggtttttgcgccaggccctgtgtaggctgaggcaggaagagcctcagtcactgcaggctgccgtgcgcacagacggattcgatgaattcaaagtgagattgcaggacctgtcctcatgcataactcagggcaaagacgccgcagtctccaagaaggcttctcccgaagccgcatctacaccaagagacccaatagatgtggatctgccagaagaagccgagcgggtgaaagcacaagtgcaggcactgggcctggcagaagcccagccgatggctgtagtccagtctgtaccaggggctcaccccgtgccagtgtatgcgttctccatcaaggggccatcgtacggcgaagacgtgtccaacacaactacagcacagaagcggaaatgttctcagacgcagtgccctcggaaggttattaagatggaatcagaagagggaaaggaggcccgactggctcggtcatctccggagcagcctaggccatctacctctaaggctgtatctccacctcatcttgatgggccaccttcacctaggtcgcccgtgatcggctctgaagtgttcctcccaaactccaatcacgtggcaagcggggcaggagaggccgaggagcgcgtggttgtgatctctagcagtgaggacagtgacgcagaaaactcagtgtccggcccagaggtgcaaccccgaacccctgcaagccctcactttcgttctcagggcgcacagccacagcaggtgaccctgcgtttagccctgaggctgggtaatttccccgtgcgtcactag

SEQ ID NO: 30278 - DNA, 1683 bp, synthetic construct
  misc_feature 1..1683: note = Description of Artificial Sequence: Synthetic coding sequence
  source 1..1683: mol_type = other DNA
atggagcccgctcccgctaggagtccacgtccccagcaggaccccgctcggcctcaggagccaaccatgccccctccagagacccctagcgagggcaggcagccgtcgcccagtccttctcccactgagagggcccctgcctctgaagaggagttccaatttttgcgctgccagcagtgccaggctgaagctaagtgccctaagctgctcccctgtctacatacactgtgtagtggttgcctggaagcaagcggcatgcagtgccccatttgtcaggctccgtggcccctgggagccgacacacccgcactggacaacgtattctttgagtcactccagcggaggctttccgtgtataggcagattgtcgatgcgcaggccgtgtgcacccgatgtaaagagagcgccgacttttggtgtttcgaatgcgagcagttgctgtgcgccaagtgctttgaggcgcatcagtggtttctgaagcacgaagctcgccctttggcagagctgaggaaccagagcgttcgggagttcctagatggtacacgtaagacaaataacatcttctgttcaaatccgaaccaccggacacccaccctcacctccatttactgtaggggatgcagtaaacctctttgctgttcttgcgccctgcttgattcttcgcactccgaattaaaatgcgacatctctgccgagatccagcagcggcaggaagagctggacgctatgacacaggcccttcaggagcaggacagtgcatttggagccgtacatgcccagatgcacgctgctgtggggcaactcggccgtgctagggcagaaaccgaggaactcatccgcgagagagtgaggcaagtggtagctcacgtgcgagcccaagaaagagaactccttgaggccgtggatgctcggtatcagcgcgattatgaggagatggcatcacggctgggacgcctggacgccgtgctgcaacggatcagaaccggtagcgcgttagtccaaagaatgaaatgctatgcttcagaccaggaggtcctggatatgcacggcttcctgcggcaggccctgtgccgcttgcgtcaggaggagccgcaatcactacaggctgcagtgcgaactgatggattcgacgagttcaaggtcagacttcaggatcttagttcttgtatcacccagggtaaggatgccgctgtgagtaagaaggcctcccccgaagcagcaagtacaccccgagacccaattgacgtggacctacctgaagaagcagaaagagtgaaagctcaagtgcaggcattggggcttgcagaagcccagcccatggccgtggtgcagagcgtccccggtgcccaccctgtcccagtttacgccttctccattaaaggcccaagttacggtgaagacgtgagcaatacaactacagcccagaaacgaaaatgctctcagacccagtgcccacgcaaggtgattaaaatggagagcgaggaaggcaaagaggcgaggttggcacggtcttcccccgagcagcccagaccctcaacatcaaaggccgtgagtccaccacatctcgacggcccaccatctcctcgtagccctgtaattggtagcgaggtgttcctgcctaactccaaccacgtggccagcggcgcaggcgaagcaggcagggagaggaacgcactttggtag

SEQ ID NO: 30279 - DNA, 1758 bp, synthetic construct
  misc_feature 1..1758: note = Description of Artificial Sequence: Synthetic coding sequence
  source 1..1758: mol_type = other DNA
atggagccagcgccagcccgtagtccaagaccccagcaggacccggctaggccccaggagcctacgatgccaccccctgaaacccccagcgaggggaggcagccaagcccaagtcctagccccacagaacgagctccggcatccgaggaagaattccagtttttgcgctgtcagcagtgccaggcagaagccaaatgcccaaagctcctgccgtgtttacacactttgtgttccggttgtctggaggcctcaggtatgcaatgcccaatttgccaggctccctggccgctcggggcagacactcctgccctggataacgtattcttcgagtcgctgcagaggcgtttgtccgtatacaggcaaatcgtagatgctcaggcagtgtgtacgcgatgtaaggaatccgccgatttttggtgctttgagtgtgaacagctcctatgcgccaaatgttttgaggcccatcagtggttcctcaaacacgaggccagacctcttgccgagttaaggaatcagtcggtccgagaatttctggacggtacacggaaaaccaacaacatattttgctccaaccccaatcataggactccaacccttacttctatctattgtcggggatgcagcaagcctctttgctgtagctgtgcccttctggactcttcgcactctgaactgaaatgtgatatttctgcggaaattcagcagaggcaggaagagctggacgccatgacacaagcgcttcaagagcaggattcagcatttggcgctgtgcacgcacagatgcacgccgctgttggccagttagggagggccagagcagagaccgaagaactaatcagagagagagtccggcaggtcgtagcacatgtgcgagcacaagaaagagaacttctagaggccgttgacgcacggtaccagagggactacgaggagatggcaagccgattaggcagactcgatgccgtgctgcagagaattagaacaggttctgccctcgtccagaggatgaaatgttacgcttcggaccaggaggtactggatatgcacggattcctcagacaggctctctgccgccttagacaagaagaaccccaaagcctccaggcagccgtgagaactgacggtttcgatgaatttaaggtgaggttgcaagacctgtcttcgtgcattacccaggggaaggatgccgctgtcagcaagaaagcatccccagaagcagcatcgactccgagggaccctattgacgttgatctggacgtctccaataccaccaccgcccagaaaaggaagtgctcccagacccagtgccccagaaaagttatcaagatggaatcagaggaggggaaagaagccaggcttgctcggtcgtctccagaacagcctagaccatctacttccaaagcggtctcaccccctcacctggatggcccacccagccctaggtcaccagtcatcgggagcgaggtctttttgccaaattctaaccatgtggcttcaggcgctggggaggccgaagagcgggtggtggttatatcaagcagtgaagattctgacgccgagaattcctccagccgagaattggatgactcttcttccgaatcaagtgatctgcagctggaaggaccatctacgctgcgggtgctggacgagaatctggccgatccccaggccgaggaccgccctttagtgttctttgatctaaagatcgacaacgagtccgggttttcatgggggtacccccatccttttttgatttag

SEQ ID NO: 30280 - DNA, 483 bp, synthetic construct
  misc_feature 1..483: note = Description of Artificial Sequence: Synthetic coding sequence
  source 1..483: mol_type = other DNA
atgcagcccgcttcagccaagtggtatgatcgcagggattacgtcttcatagagttctgcgtggaggacagcaaggacgtcaatgttaatttcgaaaaaagcaaactgacttttagttgcttgggaggcagcgacaactttaagcacctgaacgagatcgatttgttccactgcattgatcctaacgactccaaacacaagcgcactgacaggtcaatcctgtgttgccttaggaaaggggaatctgggcagtcttggcccaggcttacaaaggaaagagccaaactgaattggcttagtgtggattttaataattggaaggattgggaggatgacagcgatgaggatatgagtaactttgatcgtttctctgagatgatgaataacatggggggagacgaggacgtcgatttacctgaagttgatggagcagacgatgactctcaggactctgatgacgagaagatgcccgacctggaatag

SEQ ID NO: 30281 - DNA, 3141 bp, synthetic construct
  misc_feature 1..3141: note = Description of Artificial Sequence: Synthetic coding sequence
  source 1..3141: mol_type = other DNA
atgcagaagccaagtggtctgaaaccccctggtaggggcggtaagcactcatcaccaatgggtaggacctcaaccggttctgcttctagcagtgccgctgtagccgcttctagtaaggaaggcagtcctctccacaagcagtcctcaggtccaagcagtagccccgctgcagccgcagctcccgagaagcctgggcctaaagccgctgaagtgggagacgactttctgggcgattttgtagtgggagaacgagtgtgggtgaacggcgtgaagcccggagtagtccagtatctgggggagactcagtttgccccaggtcagtgggcaggtgtcgtgttggatgacccggtgggcaagaacgatggtgccgtcggcggagtgagatacttcgagtgtccggctcttcaggggattttcaccaggcctagtaagctgacaaggcagccaacagctgaaggatcagggtcagatgcccattctgtggagtctcttaccgcacaaaatctatcactgcatagcgggacagcaacgccaccactcacctcgagggtgattcccctgcgggagtcagtcttaaactcttccgtgaagaccggaaacgagagtggcagcaatctcagtgacagtggaagcgtaaagagaggcgagaaggatctgcgcctaggcgatcgcgttctggtggggggtactaagactggtgttgtgaggtacgtcggagagaccgatttcgccaagggcgaatggtgtggggttgagcttgacgaaccactgggtaagaatgacggagctgtcgctgggacaagatacttccagtgtcccccaaaatttggccttttcgcccctatccacaaggttattagaattggcttcccgtctacaagccccgctaaagccaagaagaccaaacggatggccatgggcgtgtcagctctgacccactcaccatcctcctcatcaatcagttctgtgtccagcgtggccagtagcgtggggggacggccttctcgaagtggcctgctgacagagacctcaagtcggtatgcaagaaaaatttcgggaactacagctctgcaagaagcgttgaaagagaaacaacagcatatcgagcagctcctggcagagcgggacctcgaaagggcggaggtagccaaagcaacctcgcacatctgcgaggtcgaaaaagaaatcgctctcctgaaagcccagcacgagcaatacgtcgctgaagccgaggagaaacttcagcgggcacgactgcttgtcgaaagcgtgcggaaagagaaagtggatctgtcaaaccagctcgaagaggaaagaaggaaggtggaagacctgcagtttcgcgtggaggaagagtcaattacgaaaggggatctcgaaacacagacccagctcgaacacgctcggattggagagctggaacaaagccttctgcttgaaaaggctcaggctgagaggctgctgcgggaactggctgataaccgccttacaaccgtcgctgagaaatctcgcgtcctccagctggaagaggaacttaccctgcgacggggtgaaatcgaagaactgcaacagtgccttctgcactctgggccacccccacctgaccaccccgatgccgctgagatcctcagactccgggaaagactcttatccgccagcaaggaacatcagcgggaatctggagtcttgagagacaaatacgagaaggccctgaaagcttaccaggcagaagtggataagctccgggcagctaatgagaaatatgcccaggaggtggctggtttaaaagacaaggtacagcaggccacctccgagaacatggggttgatggataattggaagagtaagctggactcactggccagcgatcaccagaagagcttggaggacctgaaagctacattgaattccggacctggcgctcagcagaaagagatcggagaactgaaagccgttatggaggggatcaaaatggaacaccaacttgagctggggaatctgcaggcaaaacacgatctcgaaacggcaatgcacgtcaaggagaaggaagccctacgggagaagctgcaggaggctcaagaagaactggctgggcttcagcgccactggagggctcagctcgaagtgcaggcatctcagcatcggttagaactgcaggaagcccaggatcagaggcgcgacgctgagcttagagtccacgagcttgagaaactcgatgtcgaatatagggggcaggcccaggccatcgaatttcttaaagaacagattagcctggcagaaaagaaaatgctggactacgagaggttgcagcgggctgaagcgcagggcaaacaagaggtggaaagtctccgggagaagctccttgtggccgagaaccgcctgcaggcggtggaggcgctgtgttcaagtcaacatacgcacatgatcgaatccaatgatatcagtgaagaaaccattcgaactaaggagaccgtggagggactgcaggataagcttaacaaacgggataaagaagtgacagcccttacctcacaaaccgagatgcttagggctcaggtctcagcactagagtcaaagtgtaaatctggtgagaagaaagtagatgcccttctgaaagagaagagacgactcgaagctgagctggaaactgtcagcagaaaaacacacgacgcaagcggacagctggtcctcatctcccaggagctgcttcggaaggaaagatccctgaacgaactcagggtactgcttcttgaagccaatcgccacagtcctggccctgaaagggacctgagcagggaggtccataaggccgaatggcgtattaaggagcagaagttgaaagacgacatccgagggctgcgcgagaagttaaccggactcgacaaggaaaagtccctgtctgatcagagaagatacagtctgatagaccgaagcagcgcgcctgagttgctccggttacagcatcagctgatgtccactgaagatgccctccgggacgctctcgaccaggctcagcaggttgaaaagttaatggaggccatgcgctcctgcccagacaaagcacagaccatcggaaactcaggaagcgctaacggcatccaccagcaggacaaagcacaaaagcaggaggataagcactag

SEQ ID NO: 30282 - DNA, 1800 bp, synthetic construct
  misc_feature 1..1800: note = Description of Artificial Sequence: Synthetic coding sequence
  source 1..1800: mol_type = other DNA
atgtctcggtctctattactgtggtttctcttatttctgctgctgttacccccattacccgttctgttagccgatccgggagccccaactccagtcaatccctgctgttactacccttgccagcaccaaggaatttgtgttaggttcggacttgatagataccaatgcgactgtactcgcacaggctattcggggcctaattgtacaatcccgggactgtggacctggctcagaaactcactgcggccttccccatcttttacacactttctgttgacacacggtaggtggttctgggaattcgtgaatgcaacatttatccgggagatgctaatgcgcctcgtcctcacggtccggagtaacctaatcccaagtccaccaacttacaatagtgcgcatgactacatctcctgggaatcattctccaatgtgtcttattacaccaggatactcccttctgttcccaaagactgtcctaccccaatggggactaaggggaaaaagcagttgccagacgcccaactcctagctcgtagattcttactcagacgtaagtttattcctgatccccaaggaactaatttgatgttcgccttcttcgcgcagcactttacccaccagttcttcaagacttctggaaagatgggtcccggatttaccaaggcactcgggcacggtgtggacctgggacacatttatggagataacctcgaacggcagtatcagcttaggctctttaaagacggcaaattaaaataccaagtcctggatggagagatgtatcccccttcggtcgaggaggcacccgtattgatgcactatcccagaggtattccaccccagtctcaaatggctgtcggccaggaggtattcggtctcctaccaggcctgatgttatatgccacactctggctgcgcgaacacaatcgcgtctgcgacctcctcaaagccgagcacccaacatggggcgacgagcagttgtttcagacaactcgccttatactgatcggggaaaccataaagatcgtgatagaggaatacgtacagcagctgtctggctatttccttcagctgaagtttgacccagagctcctgttcggcgtgcagtttcagtatagaaacagaatcgctatggagttcaatcatctgtaccattggcatcccctcatgccggactcattcaaagtcggcagccaggaatactcttatgagcagtttctgtttaacacatccatgctagtcgattacggtgtcgaggctctggtagatgccttttcacgccagattgccggtaggattggcggaggcaggaatatggatcatcatatccttcacgtcgctgtggatgtgatcagagagagcagagagatgaggctacagccctttaacgagtacaggaaaagattcgggatgaaaccttatacctcgtttcaggagctggtgggggaaaaggagatggctgccgaactggaagaactgtacggtgacatcgacgccctcgagttctatcccggattgctgttggagaagtgccacccaaactccatattcggcgaatctatgatcgagatcggagcaccattttccctcaaaggactcctgggaaaccctatttgctcccctgaatactggaagcctagtacatttggaggcgaggtgggatttaacatcgtgaagaccgctacactgaaaaagctggtctgtctcaatactaagacatgtccatacgtgtcttttagagttcccgatgcatctcaggacgatggacccgctgtggagcggcctagcacggaactttag

SEQ ID NO: 30283 - DNA, 1473 bp, synthetic construct
  misc_feature 1..1473: note = Description of Artificial Sequence: Synthetic coding sequence
  source 1..1473: mol_type = other DNA
atgctaatgcgccttgtcctaacggtaagaagtaatttgataccttcccctcctacttataacagcgcccatgattacatttcatgggaatccttttccaacgttagctactatactaggatcttaccttccgtacccaaagattgcccaacacctatgggtaccaagggtaaaaagcagctgcctgatgctcagctcttggccaggagattcctccttcgaagaaaattcataccagatccccaggggaccaatcttatgtttgccttcttcgcccagcactttacgcaccaattttttaagacctccggtaaaatgggtccaggctttactaaggccctgggccacggagtggacttgggccacatttacggagacaatctggaaagacaatatcagctgagactgtttaaagacggaaaattaaaataccaggtcctggatggcgagatgtacccacctagtgttgaggaggctccagtgctcatgcattacccacggggaatccctccgcaaagccagatggcggtgggccaggaggtattcggtctcctgccagggctgatgctttacgctacactctggctgcgggagcacaacagggtctgtgacctgctgaaagctgaacacccaacctggggcgatgaacagttattccaaactacgaggcttattctgataggcgagacgataaaaatagtcattgaggagtacgtacagcaactgtccggttactttcttcagcttaaatttgatccagaactgctgtttggcgtgcagtttcaatacagaaaccggatagcaatggagttcaaccatttatatcactggcatccactcatgccggacagctttaaggttggttcacaggagtactcctatgaacagttcctgttcaatacttctatgctggtcgactatggcgtcgaagcgctggtagatgcgttctctcgtcaaatcgccggacgaatagggggagggagaaacatggatcatcacattcttcacgtagccgtcgacgtgataagagagtcccgggagatgcgcctgcagccttttaatgagtaccgaaaaagattcggcatgaagccctacacctccttccaagagctggtcggcgagaaagaaatggcggcagagctggaggagttgtacggggatattgacgccttagagttctatcccggacttctgctcgagaagtgtcacccaaatagcatttttggtgagagtatgatcgaaattggcgctcctttttccttgaaggggctgctcgggaatccaatttgctcgcccgaatactggaaaccctccacctttggcggtgaggtcggatttaacatcgtcaaaactgccacactcaagaagctggtgtgcctgaacaccaagacctgtccatatgtgtccttcagagtgcccgatgcttctcaggacgacggtccagcagtggagaggccctctacggaactatag

SEQ ID NO: 30284 - DNA, 471 bp, synthetic construct
  misc_feature 1..471: note = Description of Artificial Sequence: Synthetic coding sequence
  source 1..471: mol_type = other DNA
agcctattgctttggtttttgttgtttctgctgctcctacctccactgcccgtgttgttagcagacccgggagctccgacaccggctggtctgtggacctggctccgcaactcactgaggccgtccccctcattcacccacttcctgctcacccatgggagatggttctgggagttcgtaaatgcaacgtttattagagaaatgctgatgcgtctggttcttaccgttagatctaatctgatcccaagcccccctacgtacaactccgcccacgattatatttcttgggaaagctttagcaatttctttaagaccagtgggaagatgggccctgggttcacgaaggccctgggccacggcgtggatttgggccatatttatggagataatctggagagacagtatcagctcagactttttaaagatggcaagctgaagtaccaggtgttagacggagagatgtatccatag

SEQ ID NO: 30285 - DNA, 1614 bp, synthetic construct
  misc_feature 1..1614: note = Description of Artificial Sequence: Synthetic coding sequence
  source 1..1614: mol_type = other DNA
atgaggaagccccgtctgatgaatccctgttgctactatccatgtcagcaccagggcatatgtgtcagattcgggctggaccggtaccagtgcgattgcactaggactggttactctggcccaaactgtacaatacctggcctatggacctggttaaggaacagcctgagaccttctccaagtttcacacacttcctcttgacccacgggcgatggttctgggaatttgtcaacgccacctttatcagggagatgctgatgcgcctggtcctgacggttcgctctaatttgatacctagtccccctacctataatagtgcccacgactacatatcctgggagtctttcagtaatgtcagttactatacacgtatactgccatctgtgccaaaagactgtccgacgcccatgggcaccaaaggaaagaaacagctgcccgatgcccagctgttggcccgaaggtttctcctgaggagaaaatttattccagatccccagggaaccaatctgatgtttgccttttttgcccaacatttcactcaccagttttttaaaacatcaggcaagatggggcctggattcacgaaggccctcgggcacggggtagacctggggcatatctatggagataacctcgagaggcaatatcagctgcgtctattcaaggatggtaaactgaaatatcaggtgctggatggcgagatgtatcccccttcagtggaggaggccccagttctgatgcactacccgagagggatcccccctcagtcacagatggccgtcgggcaagaggtgtttggactcttgcccggactgatgctgtatgccaccctctggttacgcgaacacaacagagtgtgtgatttattaaaggcggagcaccctacctggggggacgaacagttgtttcagaccaccagacttattctgatcggggagactattaaaattgttattgaggaatacgtccagcaactgagcggatatttcctgcagctgaagtttgaccccgagctcctgttcggcgtccaattccagtacaggaaccgaatcgcaatggaatttaatcatctgtatcattggcatccgctgatgcccgattctttcaagatcggtggaggcaggaatatggatcatcatatcctacacgtcgcggttgacgttatacgggagtcgcgtgaaatgagactgcagccattcaatgagtaccggaagcgatttgggatgaagccatacacaagttttcaggaacttgtaggggagaaggaaatggccgcagaactggaagagctctatggggacatcgacgcactcgagttctaccctggcctattactggagaagtgtcaccccaactcgatcttcggcgaaagcatgatagagataggcgcacccttctctcttaagggccttttagggaatccaatctgctcccctgaatattggaaaccctccacctttggcggtgaagttggcttcaacatagtgaagacggctactctcaaaaaactggtctgtctcaacacaaagacatgtccatacgtgtcattccgggtcccggatgcttctcaggacgacggccctgcagtggagagaccctccacagaactttag

SEQ ID NO: 30286 - DNA, 1815 bp, synthetic construct
  misc_feature 1..1815: note = Description of Artificial Sequence: Synthetic coding sequence
  source 1..1815: mol_type = other DNA
atgttagcaagggcgttattgctctgcgctgttctagcgctgtcacatacagcgaacccatgctgcagtcatccctgtcaaaaccggggagtctgcatgagtgtggggtttgaccaatacaagtgcgactgtacacgcactggtttttatggggagaactgctccacgccagagtttctgactcggatcaaactgttcctgaagccaacccccaataccgtccattatattctcactcactttaaggggttctggaatgtcgtcaataacatcccatttcttcggaacgcaattatgtcttatgtgcttacatctagatcgcacctgatcgactccccgccaacatataatgcagactatgggtacaagtcctgggaagcattctctaacctgtcttattacactagggcattgcctccagtacccgacgattgccccactccactgggggtgaagggcaaaaaacagctgccagactctaacgagattgtggaaaagctactgctccgtcgaaaatttatccccgacccacaaggtagcaacatgatgttcgctttcttcgcacagcacttcacccaccaattcttcaagaccgatcacaagcggggacctgcgttcaccaatggcttgggccacggcgtggacctgaatcacatttatggcgaaactctcgcccgacagcgtaaattgagactctttaaagacggtaaaatgaagtaccagattatagacggtgagatgtaccccccaaccgtgaaagatactcaggccgaaatgatctatccccctcaagtacctgaacacttgcggttcgccgttggccaggaagtgtttggtttagtgcctgggctcatgatgtatgcaacaatttggcttcgagagcacaacagagtgtgtgatgtgctcaagcaagaacatcccgagtggggtgacgagcagctgttccagacatctcgacttatcttgatcggggagacaattaaaatcgttatcgaggactacgtacaacacctctctggataccatttcaaacttaagtttgacccggaactccttttcaataaacagtttcagtaccagaataggatcgcagccgaattcaatactctctaccattggcaccctttactccctgatacatttcagattcacgatcagaagtacaactaccagcagttcatctacaacaactccattttgctggagcacggtatcacacaatttgttgagagcttcactcgtcagatagccggacgagtcgccggtgggaggaatgttcccccagccgtgcagaaggttagtcaagcctctatagaccagtcccgacagatgaagtatcagagtttcaacgagtatcgtaagaggtttatgttaaagccttatgaaagctttgaagaactgacaggtgagaaggagatgtctgcggagctggaggccctttatggagatatcgatgccgttgaactatatcccgctctcttggtggagaaacctcgccctgatgcaatttttggagagacgatggtggaagttggagccccattcagtctgaagggactgatgggcaacgtcatctgtagccccgcttactggaaaccctccaccttcggtggcgaggtcggtttccagatcataaacaccgcaagcatccaatccctgatctgtaacaacgtgaaaggatgcccctttacatcgttttcagtgccggaccctgagctgatcaaaactgttacaatcaatgcaagctcttcccgttcaggtctggacgatattaaccctacagtactacttaaggagaggtccactgagctgtag

SEQ ID NO: 30287 - DNA, 1614 bp, synthetic construct
  misc_feature 1..1614: note = Description of Artificial Sequence: Synthetic coding sequence
  source 1..1614: mol_type = other DNA
agtttagtccctgctaccaactacatctataccccactgaaccagctgaaagggggaacaattgtcaacgtgtatggcgtggtgaagtttttcaagcccccttatttgtcgaagggcacagactactgtagcgttgtcactatcgttgatcaaactaacgtcaagcttacctgtctgttgtttagcggaaattacgaggcactgcccataatttataagaatggcgatatagtgcgttttcaccggttgaagatccaggtctacaagaaggaaacccagggaattacgagctctggctttgcttcactgaccttcgagggaaccctcggggctcccattatccctcgaacgtcctctaaatacttcaacttcactaccgaggaccacaaaatggtggaggctcttcgggtgtgggcctccacccacatgagcccatcgtggacactcctgaagctttgtgacgtccagcctatgcagtatttcgaccttacttgtcagctgcttggaaaggcagaggttgacggcgcttcctttttgctcaaggtatgggacggaaccagaacacctttccctagttggagagttctgatacaggatctagtccttgagggagacctgtcccacattcaccggctacagaaccttactattgatatcttggtttatgacaaccatgtgcacgtggcccgatctttaaaggtcggatcttttctccgcatctactctcttcacacaaaattgcagtcgatgaactccgagaaccagaccatgctgagtcttgaatttcatctacacggcggaacaagctatggacgtggcattagagtgctcccagagagcaactctgatgtggatcagttaaagaaagatctcgagtccgccaatcttaccgccaaccagcattccgacgtgatttgtcagtcggaacctgacgactcatttcccagttccggcagtgtctccctatatgaagtcgagcgctgtcagcaattgtcggccactatcttgaccgaccaccaatacctcgaaagaacacccttatgcgctattctgaagcagaaggctcctcagcagtacaggatccgcgcaaagttgcggagttataagcctaggagactgtttcagagcgtgaagttgcattgtccgaagtgtcatctgttgcaggaagtgcctcatgagggcgacctggacataatttttcaggacggcgctacaaagacaccggatgtcaagctgcagaatacatccctgtacgactcaaaaatttggaccacaaagaatcaaaaaggccgtaaagtggctgtgcatttcgttaaaaataatggaatactacccctgtccaacgagtgtttgctgcttatcgaaggaggtactttgagcgaaatctgtaaactatccaacaagttcaattcggtcatccctgtgaggagcggtcacgaggacctcgagcttctggatctgagtgcaccttttctcatccagggtaccatacaccactatggctgcaagcaatgttcaagtctgcgatcaatacagaatcttaatagcttggttgacaaaacatcctggattccctctagcgtggccgaggaactggatatcgtgctccagtag

SEQ ID NO: 30288 - DNA, 1905 bp, synthetic construct
  misc_feature 1..1905: note = Description of Artificial Sequence: Synthetic coding sequence
  source 1..1905: mol_type = other DNA
atgtcactggttcctgctacaaactacatctacactcctctgaaccagctcaagggcggtacaatcgtgaacgtctatggggttgtaaaattcttcaaacccccatacttgagcaaaggcaccgattactgttctgtcgtgaccatagtcgatcaaaccaatgtgaaacttacatgcctcctgttctccggaaattacgaagcattgcctatcatatataagaacggggatatcgtgcgtttccacaggctgaagattcaagtttacaagaaagagactcaaggtatcacgagcagtgggttcgcatctttaacttttgagggcacactgggggctcctatcatcccccgtacctctagcaagtacttcaactttaccaccgaggaccacaagatggttgaagcccttagggtctgggcctccacccatatgtccccttcctggacactcctaaagctttgtgatgtgcaacctatgcagtattttgacctcacctgccaactgctcggcaaggcagaggtagatggcgcaagcttcctgctcaaggtgtgggatgggacccggactcctttcccttcatggcgcgtgctcatccaagacttggtcctagagggcgacctgtctcacatacaccgactacaaaacctgacaatagatattctcgtgtacgataatcatgtgcacgttgcgaggtcgctgaaagtcggctcattcttacgtatatatagccttcacaccaagctgcagagtatgaattccgagaaccagaccatgttgtcactggagttccacctgcatggcggtacgagctacggcagaggcattcgcgtgttgcccgagtcaaattctgatgtggatcagctgaagaaagacctggagtcggcaaatctcacagctaatcagcattctgatgtcatatgccagagcgagcccgacgactcatttcctagctctggttccgtttccttatatgaggtcgagcggtgtcagcagctttccgctaccatcttgactgaccatcagtatctggaaaggactcctctgtgcgctatcctaaagcagaaggccccacagcagtaccggatcagagcgaaactgcgttcttacaaaccaaggaggctgtttcagtccgtgaaactacactgtccgaaatgtcatttgctgcaggaggtcccccacgagggagatctcgatattatcttccaagatggggcaaccaagacaccagatgtcaaactgcagaatacgtcgctgtacgactccaaaatatggactaccaaaaatcagaaaggcaggaaggtagctgtccacttcgttaagaataacgggattcttcctctgtctaacgagtgtctcttactcatagagggcggtactttgagtgagatttgcaaactgtcgaataaatttaatagcgtcatacccgtccggtcggggcatgaggacctggaattgctggatctatctgccccatttctcattcaggggactatccaccactacggttgtaagcagtgttcatctctcagaagcattcagaacctgaacagtcttgtggataagacatcctggattccctccagcgttgccgaagctctgggtatagttcccctccagtacgtattcgtaatgacctttactctggacgatggcacaggcgtgcttgaagcctacctgatggatagcgacaaattcttccagatccccgcatcggaagtccttatggatgacgacctgcagaagtcagtggatatgatcatggacatgttttgcccccctggcatcaagatcgacgcctacccatggctggaatgcttcatcaaaagttacaacgtgaccaacgggacagacaaccagatttgttatcagatcttcgatacaacagtggccgaggacgtgatctag

SEQ ID NO: 30289 - DNA, 1023 bp, synthetic construct
  misc_feature 1..1023: note = Description of Artificial Sequence: Synthetic coding sequence
  source 1..1023: mol_type = other DNA
ctgagtctcgtccctgccacaaactacatttacaccccattaaatcagctgaaaggtggaaccatagttaacgtgtacggggtggttaaattcttcaaaccgccatatctatccaaaggtacagactattgtagtgtcgtgacaatcgtagaccagacaaacgtcaaattgacttgtttactattttccggcaactatgaggcactaccaattatttacaagaacggagatatcgttcgtttccacagactgaagattcaggtatataagaaggagactcaaggcatcacgtctagtggcttcgccagcctgaccttcgaagggacacttggcgctccaattattccaaggaccagctctaaatattttaatttcactacagaggatcacaaaatggtagaagcactcagagtatgggcttcgacgcatatgtctccatcctggacactcttgaaactatgtgatgtccagccgatgcagtacttcgaccttacatgtcagctactgggcaaagctgaagtggacggagcctccttcctcttgaaagtctgggacgggacccgtacccccttccctagctggcgcgtcctgatacaggacctggttctggaaggcgacctgtctcacattcaccgcctacagaatctgaccatcgatatcctggtttatgacaatcatgttcacgtggcacggagcttgaaggtcggttctttccttcgtatctacagcttgcatactaaacttcaaagtatgaactccgaaaatcagactatgctgtcacttgagttccacctgcacgggggaacctcttatggaagaggcattcgtgtcctgccagagagtaatagcgacgttgatcagctaaagaaggacctagaatcagctaaccttacagccaatcaacattcggacgtcatctgccaaagcgagccagacgattcattccccaatggcgtttcgctgaggcccccaggttggtccagcgtcgccaggagccggctgattgctgcatctacttcttag

SEQ ID NO: 30290 - DNA, 1512 bp, synthetic construct
  misc_feature 1..1512: note = Description of Artificial Sequence: Synthetic coding sequence
  source 1..1512: mol_type = other DNA
atggtcgaagcgctccgggtctgggccagtacccacatgagcccttcatggaccctgttgaagctctgcgacgtccagcctatgcagtactttgacctgacttgtcagctcctgggcaaagcagaggtcgatggtgcaagcttcctgttaaaggtctgggatggaaccagaaccccttttcctagctggagagttttgatccaggatcttgttttggagggcgatctgtcccatatccatcggctccagaatctcaccatagacatcctagtgtacgacaaccatgttcatgtggccaggtctctcaaagtgggatcctttttgagaatatatagtctgcacacgaagcttcagagcatgaatagtgagaatcagacaatgcttagcctggagttccacctgcacggcggtactagttacggaagagggatcagggtgctgccggaatccaactccgatgttgatcagctgaaaaaagacctggaatcggcaaaccttacagccaaccagcacagtgatgtgatctgccagtcagaacccgacgattccttcccttctagcggaagcgtgagcttgtacgaggtcgagcggtgccagcagctgtcagcaacgatcctaactgaccatcagtatctggagaggacccctctgtgtgccatcctcaaacaaaaggcacctcaacaataccgaatccgggcaaaactgaggagctataaacccaggcgcctatttcagtccgtaaagcttcactgcccaaagtgtcaccttttgcaggaggtcccccatgaaggggatcttgatattatttttcaggacggcgcaacaaaaacgcccgatgtcaaactgcagaatacttcgctgtacgattctaaaatttggacaaccaaaaatcaaaaggggagaaaagtcgctgtgcattttgtgaagaacaatggcatcttgcctctgtccaatgagtgcctgctcttgatagagggcggtacattgtcagagatttgtaagcttagtaacaagttcaatagtgtcattcccgtgcggagcgggcacgaggacttggagctcctcgacctctccgcccctttcctgatccagggtacgattcaccactacggttgcaaacagtgttcaagtttgaggtctatacagaacttgaattccctggtggacaagacaagctggattccaagcagcgtcgctgaagctctgggaattgtacctctccagtatgtttttgtcatgaccttcacgcttgacgacggaacaggagtgctagaagcatacctgatggatagcgataaattcttccaaattccagcttccgaagttctgatggacgacgatcttcagaaatctgtggacatgattatggatatgttctgccctcctggaattaaaatcgacgcctatccttggcttgaatgttttatcaaatcctacaacgttacgaatggaactgataaccagatctgctaccagatctttgataccactgtcgctgaggacgtgatctag

SEQ ID NO: 30291 - DNA, 1380 bp, synthetic construct
  misc_feature 1..1380: note = Description of Artificial Sequence: Synthetic coding sequence
  source 1..1380: mol_type = other DNA
ctgtccctggtgccggctacgaactacatatatacccctctgaatcagctcaaaggcggaaccattgtgaatgtttatggagtggttaaatttttcaagccaccatacctctctaaaggaaccgactattgtagcgtcgtgactatagttgatcaaaccaatgtgaagcttacttgtctgctctttagcggcaactatgaggcacttccaattatttacaaaaatggggatatcgttcgcttccacaggctcaagattcaggtatacaagaaagagactcagggaataaccagctccggcttcgcaagcctgacttttgagggcaccttaggtgcacctatcataccgagaactagctctaaatattttaacttcactacagaggatcataaaatggtggaggccttgcgcgtgtgggcatccacccacatgagcccttcttggaccttgctgaaattatgcgacgtgcagcctatgcaatatttcgacttaacctgccagctgctgggaaaggccgaagttgatggcgctagctttctcctcaaggtttgggatggaaccagaactccctttccttcatggagagtgctgattcaagacttggtgctggagggtgacctgtctcacattcatcggttgcaaaatttaactatcgacattttggtgtatgataaccacgttcatgttgccagatcgttaaaagtggggagttttctcaggatatattcactgcacacgaagttgcagagcatgaattccgaaaaccagaccatgctgtctctagaattccacctgcacggcggtactagctatgggagaggaattcgagtactccctgaaagtaattcagacgtggaccagttaaagaaggatctggaaagcgccaatttgaccgccaaccaacattccgatgtcatctgccagtccgagccagatgactccttcccgagctccggtagtgtgagcctgtacgaggtagagcgctgccagcaactgtccgctaccatcttgaccgatcaccaatatctggagagaacaccattatgtgctatacttaaacagaaggctccccagcagtacagaattcgggcaaagctgcggagctacaagccgcgacggctgtttcagtctgtaaaattgcactgccctaagtgtcacctgctgcaggaggtgccacacgaaggcgacctcgatatcattttccaggatggcgcaactaagactcctgatgtaaagctgcagaacacgtctctgtacgactccaaaatctggaccacaaaaaatcagaaaggacgcaaggtggccgttcattttgttaaaaacaatggcattctacccctgtccaacgaatgcttactgcttatcgaagtgttactttag

SEQ ID NO: 30292 - DNA, 249 bp, synthetic construct
  misc_feature 1..249: note = Description of Artificial Sequence: Synthetic coding sequence
  source 1..249: mol_type = other DNA
atgtcactcgtgcccgctacgaattacatctatactcccctcaatcaactgaagggcggtacgatcgttaatgtgtacggagtcgtaaaattcttcaaacccccttatctgtccaaggggacagactactgttccgttgtgacaatagtggatcagaccaatgtgaaactgacatgccttttgttttctggaaactatgaagcactcccgattatatataagaacggcgacatcgtccgcttccattag

SEQ ID NO: 30293 - DNA, 1557 bp, synthetic construct
  misc_feature 1..1557: note = Description of Artificial Sequence: Synthetic coding sequence
  source 1..1557: mol_type = other DNA
ctctccttggttccagcaactaactacatatacacacccctgaaccagttgaagggcggaactatcgtgaacgtgtacggcgttgttaagttcttcaaacctccttatcttagcaaggggacagattattgcagcgttgttactatagtggatcagactaatgtgaagctgacgtgcttactatttagcggtaattacgaggcactgcctattatttacaaaaacggcgacatagtgcgttttcaccgtctgaaaatacaggtgtataagaaggagacacaaggcattacaagtagcggcttcgcctccctgacatttgagggcactctgggtgcgcctatcatccctcgtacttctagcaagtacttcaacttcactacagaggatcacaaaatggtagaagccctccgtgtgtgggcctcaacgcatatgagcccatcgtggacactattgaaactgtgtgacgtacaaccgatgcagtattttgacttgacatgtcagctgctgggtaaagcggaggtggacggggcaagtttcctcttgaaggtgtgggacgggacccggaccccatttccctcatggagggtgctgatccaggatctggtgctcgaaggcgatttgtcgcacattcataggttacaaaacctgacgatagacatcctggtatatgataaccacgtgcatgtggcaaggtctttgaaagtgggctccttccttagaatatatagcctgcacactaagctacagtcgatgaactctgagaaccagacaatgctctctctggaatttcatttgcacggtggaacaagctacgggagaggcatcagggtccttcctgagtcgaacagcgacgtggatcagctgaagaaggatctggagtcagccaacctgaccgccaatcagcatagtgacgtcatttgtcagagcgagcctgacgactcattcccctcgtcagggtccgtatccctgtatgaagtggaacggtgccagcagctgagtgccaccattcttacagatcatcagtatctggagcgcacccctttgtgcgccatattgaaacaaaaagccccacagcagtaccggatcagggctaagctcaggtcctacaaaccccgacgcctgtttcaatctgtcaagctacactgtcccaagtgccacctcctgcaggaagtgcctcacgaaggcgatctagacattatttttcaagacggggctacgaaaactccagacgtgaagctccagaatacctctctgtatgattctaaaatttggaccaccaaaaatcaaaagggtcgaaaagtcgctgtacacttcgtgaaaaataacggcattttgccactgtctaatgagtgtctgctgctgatagaaggtggcacattaagcgagatctgcaagctatcaaataagtttaactcagtgataccagtgaggagtggccatgaggacctggaactcctggacctcagtgctccctttctgatccagggaactatccaccactacggcactggatactgtaccccaccaatctgcgtttgctacgatctctacacctag

SEQ ID NO: 30294 - DNA, 1374 bp, synthetic construct
  misc_feature 1..1374: note = Description of Artificial Sequence: Synthetic coding sequence
  source 1..1374: mol_type = other DNA
agcccggaagacccgagatccaagcacaaatttaaaatccatacctatggcagtccaacattctgcgatcactgtggctccctgctctacggattgatccaccagggtatgaagtgtgatacctgtgacatgaacgttcataagcaatgcgtaatcaacgtgccaagtctgtgtggaatggaccacactgagaaacgaggcaggatctacctcaaagctgaggtagcggacgagaagctgcatgttacagtaagggatgcgaagaatctcatacctatggacccaaacgggctttctgacccctacgttaaactcaagctgatacccgatcccaagaacgagtccaaacagaagactaagaccattaggtcaacactcaatccacaatggaacgagagcttcacttttaaattgaagcccagcgacaaagaccgccgactgagtgttgagatttgggattgggaccgaacaaccaggaacgacttcatgggttcactgagcttcggggtgtccgagctgatgaagatgccagcatctggctggtacaaactgttaaaccaagaggagggcgaatattataacgtccctatccccgagggcgacgaagaaggcaatatggagcttcgtcagaagtttgagaaagcgaaactgggccctgccggtaataaggtcatttctccttcagaagatcgcaagcagcccagtaataacctagatagagttaaactgaccgatttcaattttcttatggtcttaggtaaaggatctttcgggaaagtgatgttggcggataggaaaggcaccgaagaactgtatgccattaagatattaaagaaggacgtcgtcattcaggatgatgacgtggaatgcacgatggtagagaaacgcgttcttgctctgcttgacaagcccccatttctcacacagctccatagctgtttccagacagtggacaggttatactttgtgatggaatacgtaaacggaggcgacctcatgtatcacattcagcaggttggcaagttcaaggagcctcaagctgtgttctatgcagcggaaatctcaatcggactattcttcctgcacaaacgcggaatcatctacagggacctgaaattggataacgtcatgttggactctgagggacatattaaaattgccgatttcggcatgtgcaaggagcacatgatggatggggttaccaccagaaccttctgtggcactcctgactatatcgcacctgagattatcgcctaccagccttatggcaaaagtgttgactggtgggcttatggcgtgctcctctatgagatgctcgcgggtcaggtgatgttctgttatatattcatgttcgtgtattgttgcgtcatgtag

SEQ ID NO: 30295 - DNA, 2019 bp, synthetic construct
  misc_feature 1..2019: note = Description of Artificial Sequence: Synthetic coding sequence
  source 1..2019: mol_type = other DNA
atggccgatgtttttcccggaaatgatagcacggcctcacaagatgtggctaaccggttcgcgaggaagggagccctgagacagaagaacgtacatgaggtgaaggatcacaagtttatcgcgagattctttaagcaacccacattttgttcacactgcacagacttcatctgggggtttggtaagcaagggttccagtgccaggtatgctgtttcgttgtgcacaagaggtgtcatgaattcgtgacttttagctgtcccggagcagacaagggacctgacacagatgatccaagatcaaagcataaatttaaaatccatacgtatggctcaccgactttttgcgaccactgtgggtcgcttctgtacggcctgattcatcaagggatgaaatgcgacacatgcgacatgaacgtgcataagcaatgcgtgataaatgtgccttcgctgtgtggtatggatcatacagagaagcgcggacgaatctaccttaaggccgaggtggctgatgagaaactgcacgtgacagtgcgcgacgctaaaaacctcattccgatggatccaaacggacttagcgatccgtacgtgaagctgaagctgattcctgatccaaagaatgagtctaaacaaaaaaccaagacaattcggagtaccctgaatccccagtggaatgagtcttttacctttaaattgaaaccttccgacaaagatcggaggctttctgtggagatctgggactgggataggacgacacggaatgactttatggggtctctatcgtttggcgtatcggagctgatgaaaatgcctgcaagcgggtggtataagctcttaaaccaggaggagggagagtattataacgtgcctattcctgaaggggatgaggaggggaatatggaactgcgacagaagttcgaaaaagccaaacttgggccagctgggaataaggtgatcagcccctccgaagaccgaaaacaacccagcaataatctcgatagggtcaaactgacagatttcaatttccttatggttctcggcaaaggctccttcggaaaagtgatgctggctgacaggaaaggcaccgaggaactctacgccatcaaaattttaaaaaaggatgtcgtgatccaagatgatgatgtagaatgcactatggtagaaaaacgggtcttggcccttcttgacaagccgcctttccttacccagctgcacagctgcttccagaccgtggaccgcctttactttgtaatggaatacgttaacggaggggatctgatgtaccacattcagcaggtggggaaattcaaggagccacaggcagtgttttatgctgctgagatttcaataggattattctttttacacaagcgcggaattatttatcgagaccttaagctcgataacgtcatgctcgacagtgaaggtcacattaagattgccgacttcgggatgtgcaaggaacatatgatggacggtgtgaccacccggacattttgtggaacaccggattacatcgctccagaaataatcgcttatcaaccatacggaaagtcagtggattggtgggcttacggcgttctgctatatgagatgctggcaggccagcctcccttcgatggcgaagatgaggatgaacttttccaatctataatggagcataacgtgagttatcctaaatccctgagcaaagaggcagtatccgtctgcaagggattgatgaccaaacatccagctaaacgccttggatgtggtccggagggcgagcgtgatgtcagggagcatgcgttttttagacgtatcgattgggaaaaacttgagaaccgagaaattcagcccccattcaagcccaaggtctgcggaaagggggctgagaattttgataagttttttactcggggacagccagtgctcactccacccgaccagctcgtgatagcaaacatcgatcagagcgacttcgagggcttttcgtatgttaacccccagttcgtgcatcccattctgcagtcagcagtttag

SEQ ID NO: 30296 - DNA, 2022 bp, synthetic construct
  misc_feature 1..2022: note = Description of Artificial Sequence: Synthetic coding sequence
  source 1..2022: mol_type = other DNA
atggccgaccctgccgcaggccctccaccgtctgagggagaggagtctacggtcaggtttgccagaaagggagccctccgtcagaaaaatgtccatgaggtgaaaaatcataagttcacagctaggttttttaagcagcctacattctgcagccattgcacggattttatctggggtttcggcaaacaggggtttcagtgtcaggtttgctgcttcgtggtgcacaagagatgccatgaattcgttacattcagctgcccgggtgccgacaagggccctgcctcggacgaccccagatcaaagcataagttcaaaattcacacgtatagtagcccaaccttttgcgaccactgtggatcactgttatacggcctcatacaccagggaatgaagtgcgacacttgtatgatgaatgtacataaacggtgtgtgatgaatgtgccaagtctgtgtggtaccgatcacacagagagaagaggcaggatatatatccaggctcatatcgatagggacgttttgatcgtgctggtgagggatgccaaaaacctggtccccatggacccaaatgggctgtctgacccctatgtgaaacttaaattaattcctgatccgaaatccgagtctaagcagaaaacaaagacaatcaaatgctctctgaacccagagtggaacgagacattccgttttcagcttaaagaatccgataaggatcggagattgtctgtggagatctgggactgggatcttacgtctaggaacgacttcatgggaagcttgtcttttggaatctctgagctccaaaaggcctccgttgatggatggttcaagctgctgagccaagaggaaggagaatattttaatgtgcctgtccccccagaggggagtgaggctaatgaagaactgagacaaaaattcgagcgcgctaagataagtcaaggcaccaaagttcccgaagaaaaaacaactaacaccgtgagtaaattcgataataacgggaatagggatcggatgaagctgacagactttaattttctcatggttcttggaaaaggatccttcggaaaagtgatgcttagtgaaagaaaagggacagacgagctgtatgccgtgaagatattgaaaaaggacgtcgttatccaggatgacgacgtggagtgtaccatggtggagaaaagggtcctggccctccccggaaaacctccatttttgacacagctgcactcttgctttcagacaatggatcgtttatacttcgtaatggaatacgttaacggaggggacctgatgtaccatatacaacaagtgggtcgattcaaggaaccccacgctgtattctatgcggctgaaattgcaattggcttgttttttttacaatcaaaagggatcatctatagagatcttaagttggacaatgtaatgctagattcagaggggcacataaagatagcagactttggaatgtgcaaagagaatatctgggacggcgtgacaaccaagaccttttgtggcacgccagattacattgctcctgaaatcatcgcataccagccctacgggaaatccgtggactggtgggcctttggagtgctactttatgaaatgcttgcaggacaagccccatttgagggtgaggacgaagatgaactttttcaatccatcatggaacataatgtggcataccccaaaagtatgtctaaggaggctgtcgctatttgtaaaggattgatgactaaacaccccggaaagagattgggatgtgggccagagggagagagggatatcaaggagcacgctttttttcggtacattgactgggaaaaacttgagagaaaggagatacaaccaccttacaagcctaaggcctgtggacgaaatgccgagaatttcgaccggttcttcactcgccacccccctgttctgacacctcccgaccaagaggtgatacggaacattgaccaaagcgaatttgagggctttagctttgttaactccgaatttttgaaacccgaggtcaagagttag

SEQ ID NO: 30297 - DNA, 2016 bp, synthetic construct
  misc_feature 1..2016: note = Description of Artificial Sequence: Synthetic coding sequence
  source 1..2016: mol_type = other DNA
atggccgaccccgctgccggacctccaccttctgaaggggaagaatccaccgttcggttcgcccgaaagggtgccctccgccaaaaaaatgtgcacgaggtgaaaaatcataagtttactgccaggttctttaagcagcccacattctgttcccactgtacggacttcatttggggcttcgggaagcaggggtttcagtgtcaagtgtgttgctttgtcgttcacaagcgatgtcacgagtttgtgacgttttcgtgtcctggggctgataagggaccggcttctgacgaccccagatctaaacataagtttaagatacacacgtacagctcccccacattttgcgaccactgtgggagcctgctgtacgggctcattcaccagggtatgaagtgtgatacctgtatgatgaacgttcacaagcgctgcgtgatgaatgttccgagtctctgtggaactgatcacaccgagcggagagggaggatttacatccaggcccacatcgacagagacgttctgatcgttctagtaagggacgctaaaaacttagtgcctatggatccaaatggtcttagtgacccctacgtgaagctcaagctgattcccgaccctaaatctgagagcaagcagaagaccaaaacgatcaaatgcagtctcaacccggagtggaatgaaactttcagatttcagctcaaggaaagtgacaaggataggcggctttctgtggaaatatgggactgggatctgactagccggaatgacttcatggggagcctatcatttggaatatctgagctgcagaaggcatccgtggatggatggttcaaacttctgtcacaggaagaaggcgagtacttcaacgtgcccgtgcctccagaaggatctgaagctaatgaggagctgcggcagaagttcgagcgcgctaagatctctcagggtacaaaggttcccgaggagaagaccaccaacacggtatctaagtttgataacaatggcaacagagatagaatgaaattgacagacttcaactttctaatggtcctaggcaaggggagctttgggaaggttatgctttctgagcgaaagggcactgacgagctgtacgctgtgaagatcctgaaaaaagatgtcgtcattcaggatgacgacgtcgagtgcacgatggtggaaaagagagtgcttgcattgcccggaaagcctccattcctgacacagctccatagttgtttccagacaatggaccggttatattttgtgatggagtacgtgaacggtggagacctgatgtatcacatccagcaagtgggacgattcaaggaacctcatgctgtgttttatgccgctgaaattgcgatcggactcttctttctgcagagcaaaggaatcatctatcgggatctgaaattggataacgtaatgctggattccgaaggtcatattaagatcgcagatttcggcatgtgcaaggagaacatctgggacggcgtgactacaaagactttttgcggcactccagattatatcgcacctgagatcatagcctaccagccctacggtaaatcagtggactggtgggcatttggagtactgctgtacgagatgttagctggccaggccccatttgagggggaggatgaggacgagcttttccagagtattatggagcataacgtggcttacccgaaaagtatgagtaaggaggctgtcgcgatctgtaaagggttgatgacaaagcatcctggcaagcggctcggctgtggcccagagggtgagcgggatattaaagagcacgcatttttccggtatattgactgggaaaaattagaaagaaaggaaatacagccaccctacaagccaaaagctcgtgacaaaagggatacaagtaatttcgacaaagaattcacccgccagccggtggagctcacacccacggataagctttttattatgaacctagaccagaacgaattcgcaggatttagttataccaaccccgagttcgtgatcaacgtgtag

SEQ ID NO: 30298 - DNA, 786 bp, synthetic construct
  misc_feature 1..786: note = Description of Artificial Sequence: Synthetic coding sequence
  source 1..786: mol_type = other DNA
atgcgtgagtctgccctggaacggggacccgtcccagaggccccagcaggaggaccagtacacgccgtaactgttgttacactcctcgaaaaactcgcttccatgctggagacactccgagaaaggcaggggggacttgcccgtcgacaggggggtctcgccggtagtgtgcggaggattcagtcaggcctgggcgcactctccagatctcacgacacaacctcaaatacgctggcacagttgctcgccaaagcagagagggtctcatcacacgccaacgccgcacaggagagagcagtcagacgtgccgctcaagtccaaagactcgaagcaaaccatggactgttagtggctcggggaaaacttcatgtgttgctgttcaaagaggagggggaggtgcctgcctctgcttttcagaaggccccagagcctctaggtccggcagatcagagcgaactcggccctgaacagcttgaagcggaggttggcgaaagctccgacgaggagcctgtagagtcccgagcccagcggctgaggcgcaccggactgcagaaagtgcagagtctgcgaagagcgctctctgggagaaaaggaccagcagcgccaccccctactcccgttaaaccacctcggctcggccctggcaggagtgcagaggcacagcccgaggctcaaccagcattagagccgactctggagcccgaaccacctcaggacacagaggaggatcctggaaggcctggcgcagctgaggaggccctattgcaaatggagtcagtcgcctag

SEQ ID NO: 30299 - DNA, 2214 bp, synthetic construct
  misc_feature 1..2214: note = Description of Artificial Sequence: Synthetic coding sequence
  source 1..2214: mol_type = other DNA
atggttgtgttcaatgggttattgaaaattaagatttgtgaggctgtctcccttaaacccaccgcgtggtctctgcgacacgccgtgggccctcgtccccagacctttttactagatccatacatagctctgaacgtggacgactcacgcatcggacagaccgcgaccaagcaaaagacgaattctcccgcatggcacgacgaattcgtaaccgacgtgtgcaatggcaggaagatcgagttggctgtattccacgacgccccaatcggctatgacgatttcgtggcaaactgtacaattcagtttgaggagctgttacagaacggatccaggcactttgaagattggattgatttagaacctgaggggagggtttatgtgattatcgacctcagcggctcaagtggtgaggccccaaaagacaacgaagagagggtcttcagggagaggatgcgaccacgtaagcgccagggtgcagttcgacgcagagttcaccaggtgaacggacataaatttatggctacctacctccgccaacccacttactgctctcactgccgcgacttcatatggggtgtaattggtaagcaaggctaccagtgtcaggtgtgtacttgtgttgtgcacaagcggtgccatgagcttatcattacaaaatgcgcagggctaaaaaaacaggagacccccgaccaggttggaagccaacggttcagcgtgaatatgccccacaagttcggcatccacaattataaggttccgacgttttgtgaccattgtggctcactcctgtgggggctgctccgtcagggactgcaatgtaaggtgtgtaaaatgaatgtccaccgacgttgtgaaaccaatgtggccccaaattgtggggtggacgctaggggcatagccaaggtccttgcagacttgggggtcacgcccgataaaattactaattcaggacagcgaaggaaaaagttgattgcaggggcagagtcaccccagcccgctagcgggtcaagcccatctgaggaagaccggagcaagtctgcacctacctctccttgcgaccaggagattaaagaactcgagaacaatatccgtaaagccctttcattcgataaccggggtgaggagcatagggccgctagttcaccagacggacagctgatgagccccggagaaaatggagaggtcagacagggtcaagccaagcgcctcggcctggacgagtttaacttcatcaaggttctgggtaagggttccttcggcaaggtgatgctcgctgaacttaagggaaaggatgaagtctacgccgtgaaagtcctgaaaaaggatgtgattttacaggatgacgacgttgattgtactatgacagaaaaacgcatcttagcgttagctaggaagcacccttatcttacgcaactatattgctgcttccagaccaaggatcggctgtttttcgttatggagtatgttaatggcggtgacttaatgtttcaaatacaaagatcccgaaagttcgacgagccacgctctcggttctatgccgctgaggtaacctcagctcttatgtttctgcaccagcacggggtgatctaccgagacctcaaactcgacaatatcctgctcgatgccgagggacattgtaagctggccgacttcggcatgtgtaaggaaggtatcctaaatggagtaaccacaaccactttctgcgggacacccgattatatagctcccgagatactgcaagagcttgagtatgggccaagcgtagactggtgggcactgggggtactgatgtacgagatgatggccggacagcctccgttcgaagcagacaatgaggacgacctgtttgagtccatcctacacgacgatgtgctgtatccggtttggctcagtaaggaagccgtcagcatcctcaaagcctttatgactaagaatccccataagcgtctgggctgcgtggccagtcagaacggagaagacgccatcaaacaacacccatttttcaaggagatcgactgggttctcctggagcaaaagaaaatcaagcccccattcaaaccccgtatcaaaaccaaaagggatgtgaacaattttgaccaggacttcacccgcgaagagccagtcttgactctggtcgatgaagctatagttaaacaaattaatcaggaagagttcaagggtttctcttatttcggtgaggatttgatgccttag

SEQ ID NO: 30300 - DNA, 384 bp, synthetic construct
  misc_feature 1..384: note = Description of Artificial Sequence: Synthetic coding sequence
  source 1..384: mol_type = other DNA
atggtcgttttcaatggtctgctgaaaattaagatatgcgaggccgtctccctaaagccaacagcctggagcctccgccacgccgtggggcctcggcctcagactttcttgctcgacccatacattgccctgaacgtggatgattcaagaattggacagaccgcgaccaaacagaagactaattcgccagcctggcacgacgaatttgtcaccgacgtttgcaacggccgtaagatcgagttggcagttttccacgacgctccaatcggctacgacgactttgtcgcaaactgcacaattcagtttgaagaactcctccagaatgggtctcgtcactttgaggattggatagatctggagcctgagggacgcgtgtacgtttag

SEQ ID NO: 30301 - DNA, 2094 bp, synthetic construct
  misc_feature 1..2094: note = Description of Artificial Sequence: Synthetic coding sequence
  source 1..2094: mol_type = other DNA
atggcaggcttgggacccggagtgggagacagcgaaggcggacctcggccattgttctgtcgcaaaggagccctacggcagaaggtggttcatgaggtgaagagtcacaagtttaccgctcgtttttttaagcagcccacattctgttcgcactgcactgacttcatttgggggatcggtaagcagggcctacaatgccaggtgtgctcatttgttgtccataggagatgccacgaatttgtcactttcgagtgccctggagctggcaagggaccacagacggacgacccaagaaataagcacaagttcaggctccactcatacagttccccaactttttgtgaccactgtgggagtctgctatacggtctagtacatcagggaatgaaatgttcatgctgcgaaatgaacgtgcacaggcgatgcgtgcgctctgtgcccagcctatgcggcgttgatcacacggagcgccgtggtcgactacagcttgagatccgcgctccgacagctgacgaaattcacgttactgtgggcgaagccaggaacctgatccctatggatccgaacggcttaagcgacccctacgtgaagctcaaacttattcccgaccctaggaacctgacgaagcaaaagaccagaaccgtaaaagctactcttaatcctgtgtggaacgaaacctttgtgttcaatctgaaacctggggatgtggagaggaggctctccgttgaagtgtgggactgggatagaacaagccgcaacgactttatgggggctatgtcctttggcgtctccgagcttctgaaggcacccgtcgacggctggtacaaacttctcaatcaggaggaaggcgagtactacaacgtgccggtggccgacgccgacaattgctccctcttgcaaaaatttgaggcttgtaattatcctctggagctctatgaacgggttaggatgggaccatcgtcaagccctattccatctccttctccatcccctactgatcctaagcgctgcttctttggggcaagtcccggtcgactgcatatttctgatttttccttcctcatggtgctgggaaaggggagctttggcaaggttatgcttgcagagcggcgaggtagtgatgagctgtacgctatcaagatcctgaagaaagacgtgatcgtccaagacgacgatgtcgattgcactctcgtggaaaaaagggtgctcgcactcggcggtcgtggcccaggaggcagacctcacttcctaacacagttacacagtaccttccaaacgcctgatcgcctctatttcgtcatggagtatgtgaccggcggagacttaatgtatcacattcagcagttggggaaatttaaggagccgcatgctgccttttacgccgcagaaatagccattgggctgttcttcctacacaaccaggggattatctaccgggacctgaagctggacaacgtgatgctcgacgcggaggggcacatcaagataaccgacttcggcatgtgtaaggaaaacgtgttccccggaaccaccacgcgtactttctgtggtacccccgattacatcgccccagaaatcatagcttatcaaccttatggaaagagcgtggactggtggagcttcggagtccttctctatgagatgctcgcagggcagcctcctttcgatggcgaggacgaggaggagctgttccaggcaataatggagcagaccgtcacttacccgaaaagcttaagtagggaggctgtagccatttgcaaaggctttctaactaaacaccctggtaagaggctcggatccggccctgacggtgagccgaccatcagggcccacggattttttaggtggatcgattgggaaagactagagcggttggaaatccccccacctttccgaccccgaccctgcggaagatccggagaaaactttgataagtttttcaccagggccgcacccgcattaacacctccggaccggctcgttctggcttctatagaccaggcagatttccaggggtttacttatgttaaccccgattttgtgcaccctgacgcacgatcgccaaccagccctgttccggtgcctgttatgtag

SEQ ID NO: 30302 - DNA, 984 bp, synthetic construct
  misc_feature 1..984: note = Description of Artificial Sequence: Synthetic coding sequence
  source 1..984: mol_type = other DNA
atggcgggtcttgggccaggtgtcggggactcggagggcggacccagaccactgttctgtcgcaaaggggcactgcgccaaaaggtagtgcacgaggtgaagagtcataaattcacagcgaggttttttaaacagcccactttctgctcccattgcacagatttcatctgggggatcgggaagcagggactgcagtgtcaggtctgctccttcgtggttcacagacgctgccatgagttcgtgacattcgagtgccctggagctgggaagggaccacagacagacgaccccaggaataaacataagttccgcttgcacagttacagctctcccactttctgtgatcactgtgggtccctcctctacggactggtgcaccagggtatgaaatgcagctgctgcgaaatgaatgtgcaccgccgatgcgttcggtccgtaccttcactatgcggagtggatcacactgaacgaaggggcagactgcagcttgaaattcgagctccaacagcagacgaaatccatgtgaccgtgggagaggcacgtaatctaatccctatggaccctaacgggctttcagatccctatgtgaaactcaagctaatcccagaccctcgtaatctgacaaaacagaaaaccaggactgtgaaagccacactcaaccctgtgtggaacgaaacctttgtcttcaatctgaagcctggcgacgtggagcgcaggctgtccgtcgaagtgtgggattgggaccgtacatctagaaacgattttatgggggctatgtcattcggcgtgagtgagttgcttaaagcccctgtcgacggctggttggtgacaaccccatggaactgcatgtcaggctgtgggtgggcacccctcccactgccaagtcctcccctgcccctggtccctcccacccctagcgcagcttcgtccgggagagtgcaggatgcctgtacaagcccaactagtgcgagtagttggttttag

SEQ ID NO: 30303 - DNA, 2133 bp, synthetic construct
  misc_feature 1..2133: note = Description of Artificial Sequence: Synthetic coding sequence
  source 1..2133: mol_type = other DNA
atggcaggactgggtcctggagttggtgattccgaaggcggacctagacccctgttctgccggaagggagccctgaggcagaaagtcgttcatgaggtgaagagtcataagtttacggccaggttctttaagcagcccacgttctgttcccactgtacagacttcatttgggggatcgggaaacagggccttcagtgtcaggtatgcagcttcgttgtccatagacgttgccacgagttcgtaacatttgagtgtcccggtgccggaaaggggcctcagaccgatgacccaaggaacaagcacaagtttaggctgcattcatacagctcccctactttctgtgatcactgcggctcactactgtacgggctggtgcaccagggcatgaaatgctcttgctgcgagatgaatgtccatcggaggtgtgttcgttctgtaccgtctctctgtggggtcgatcacacggaaaggagaggccgtctccagttggaaatcagggctccaactgccgacgagatccacgtgacagtaggcgaggctcggaaccttattccaatggacccgaatggcctcagcgatccatacgtgaaattaaaactcatccctgacccacggaatttaaccaaacaaaagaccaggacagtgaaggctaccttgaaccccgtttggaacgaaacattcgtgtttaacctcaagcccggtgacgtcgagaggagacttagtgtggaggtatgggattgggacagaaccagcaggaatgacttcatgggagcaatgagcttcggtgtgtccgaattactaaaggcgcctgttgacggttggtacaagctgctgaaccaggaagagggggaatattacaatgtcccggtggcagacgctgataattgctctctcctgcaaaaattcgaagcctgcaattatcctcttgaattgtatgagcgggttagaatgggtccctccagctcccctattccctcgccctctccatcgcctacggatcccaaacggtgttttttcggagcgagcccgggtcgactgcacatttctgatttctcctttctgatggtgctaggaaagggctctttcggcaaggtcatgctcgctgaaaggaggggctctgacgaactatatgctattaaaatcttgaagaaggacgtcattgtgcaagatgacgacgtcgactgcactctggtggaaaaacgtgttctggccctaggcggtagaggccctggaggcagacctcattttctcacgcaactgcactctacattccagactcccgatagactctactttgttatggaatacgtgacgggcggtgacctgatgtaccatattcagcagctgggcaagttcaaggaaccccacgcagctttctacgctgccgaaattgctatcggactgttcttcttacacaatcaggggataatctacagagacttgaaactggacaacgtgatgctggatgccgaaggacacatcaagatcacggatttcgggatgtgcaaggagaacgtattccctggaacaaccaccagaactttctgcgggacccctgattacatagctccggaaatcatcgcttaccaaccctacggcaagagcgtggattggtggtcatttggcgtactgctttacgagatgctggcagggcaacctcctttcgatggcgaggatgaagaagagctgtttcaagcaattatggagcagactgtcacctaccccaagtccctgtcacgggaagctgttgccatatgcaagggattcctaacaaaacaccccggtaaacgtctgggcagtggtcccgatggcgaacctacaatccgggctcatggttttttccgatggatcgattgggaacgactagagcgcctggaaattccccctccctttcggccaagaccttgcggacgtagcggagagaattttgacaagtttttcacccgtgcagccccagctctgacgcctcccgatcggcttgtcctcgcaagcatagaccaggccgacttccaaggcttcacttacgtcaatcccgattttgtgcacccagacgcgaggtctccaacatctccagtgccagtccctgttatctcttgtacgcctgccttccagttgtgtcccagaggattctag

SEQ ID NO: 30304 - DNA, 1647 bp, synthetic construct
  misc_feature 1..1647: note = Description of Artificial Sequence: Synthetic coding sequence
  source 1..1647: mol_type = other DNA
atgccccgaatatgtgacctcagggtcagtagacggtgggaaggtccgccagatggacggtgcgaaatgaatgttcaccgcagatgtgtgcgatccgtgcctagcctttgcggagtggatcacaccgagcgtaggggcaggctgcaactagagatccgcgctcccacggcggatgagatacatgtgaccgttggggaggcccgaaacctgattcctatggaccctaacggcttaagcgacccttatgtcaagctgaaattgattcccgacccccgaaatttgaccaagcagaaaactcgcaccgtgaaggcaaccctgaaccctgtgtggaatgagactttcgtgttcaatctcaaacccggagacgtggagaggcggctttcagtagaagtgtgggactgggaccggacaagcaggaatgacttcatgggggctatgagtttcggtgtctccgagctactaaaagcgccagtcgacgggtggtataaactccttaatcaggaagagggggagtattataacgtacctgtggccgatgcagacaattgcagtctgttgcaaaaatttgaagcttgtaactatcccctcgagctctatgaaagagtgcgaatgggcccatcttcctctccaatcccgagcccatccccctctcctacagatccaaaaagatgctttttcggggcttcacctggtaggctgcatatttccgacttcagcttcctgatggttctgggtaagggaagctttggaaaggttatgcttgccgaacgaagagggtccgacgaactgtacgcgatcaagatcctgaagaaggacgtgatcgtgcaagatgacgacgtggattgtacactggtggagaaaagagtacttgccctgggcggaaggggtcctggagggaggccccatttcctcactcagcttcactcgacctttcaaactcctgatcgactgtatttcgtgatggagtacgtcaccggaggcgacctgatgtatcacattcagcaactgggtaagttcaaggagcctcatgctgccttctacgcggctgagattgccattggcctgtttttcttacataatcagggcattatctaccgagacctgaaattggacaacgtgatgctcgacgcagaaggtcatataaagattaccgactttggaatgtgcaaggaaaacgtgtttccaggtacaacaacgcgaactttctgtgggactcccgactacatcgcgccagagatcatagcataccaaccctacggaaagtctgtggattggtggtcgtttggtgtgttgctctatgagatgctggccggacagtttcttacaaagcacccgggtaaacgcttaggcagtggcccagatggtgagcctactatccgggcacacgggtttttcagatggatcgattgggagcggctcgagcgattggagatccccccacctttccgcccaagaccgtgtgggcgtagcggggagaacttcgataagtttttcacacgcgcagcgcctgcattgacacctccagaccgcctcgtcttggcgtctatcgatcaggccgatttccagggcttcacatacgtgaatcctgatttcgtgcaccccgacgctcgcagtccgaccagtcctgtgcccgtgcctgtaatgtag

SEQ ID NO: 30305 - DNA, 1779 bp, synthetic construct
  misc_feature 1..1779: note = Description of Artificial Sequence: Synthetic coding sequence
  source 1..1779: mol_type = other DNA
atgccctcgaggacaggcccaaaaatggagggatctggcggtcgggtcagattgaaagcacattacggtggcgacattttcatcacatccgttgatgccgctaccacttttgaagagctgtgtgaagaggttcgagacatgtgtaggctgcaccagcagcacccattaactctgaagtgggtagactctgagggcgacccctgtacagtgagcagtcagatggagctggaggaagcctttagactcgcacgccagtgccgcgacgagggtctcatcattcacgtttttccaagtacccctgagcagcctggactgccttgccccggagaggacaaaagcatttaccgaaggggggctagaagatggcgaaaactttatcgtgccaacggccatctatttcaggcgaagcggtttaatagaagggcatactgcggccagtgtagtgaacggatctgggggctcgcccgtcagggctacagatgtatcaattgtaagcttttagttcataagcgttgccacggtctggtgccgctgacctgcagaaaacacatggattccgtgatgcccagccaggaaccccctgtggatgacaagaatgaggatgccgatttaccttctgaagaaaccgacggtatcgcctatatctcttcatctcgtaagcacgactccattaaggatgactctgaggaccttaaaccagtaattgacggcatggacgggattaaaatcagccagggactgggcctgcaggactttgacttgataagggtcattggacgcggatcgtatgctaaggttctgttggtcagactgaaaaagaatgaccaaatttatgccatgaaagtcgtgaagaaagaactggtgcacgacgatgaagatattgattgggtgcaaacggaaaaacatgtgtttgagcaagctagctccaatccctttctggtgggcctgcattcttgttttcagaccaccagtcggctgttcctcgttatagaatacgttaatggcggagatttgatgttccacatgcagcgacagaggaagctgcccgaggaacatgcacgattttatgccgctgagatttgcattgccctgaacttcttgcacgaacgcggaataatatacagagacctgaagttggataacgttttgctggacgccgatggtcacatcaaactaaccgattacgggatgtgtaaggaaggcctgggcccaggtgatacaacttcaaccttctgtggaacacccaattatatagctcccgagattctgaggggtgaggaatacggcttttccgtggactggtgggctttgggcgtcctgatgttcgagatgatggccggtcgatcccccttcgatattatcacagataatccagacatgaataccgaggactatcttttccaggtcattctagagaaaccgattcgcatccccaggttcctttcagtcaaggcctctcacgtcctgaagggtttcctgaacaaagaccccaaggagcgcctggggtgccgacctcagacaggcttctccgatattaagtcacatgcattttttcgatccatcgattgggatctgcttgaaaaaaaacaggcgctgccacctttccagcctcagattacagacgattacggacttgataactttgacacccaatttacatctgagcccgtccagttgacccccgacgatgaggatgctataaaacggatcgaccagtccgaattcgagggcttcgaatacattaatccgctgctgttgtccacagaagaatctgtctag

SEQ ID NO: 30306 - DNA, 1230 bp, synthetic construct
  misc_feature 1..1230: note = Description of Artificial Sequence: Synthetic coding sequence
  source 1..1230: mol_type = other DNA
atggattccgttatgccttctcaggaacctccagtggacgataaaaatgaggacgccgacttgccctccgaggagaccgatggtattgcctacattagctctagccgcaagcatgattccattaaggacgattccgaagatctgaaacctgtgattgacggtatggacggtattaagattagtcaaggcctgggactgcaggacttcgacctaatcagggtgatcggcagaggctcctacgctaaggtccttctcgtccggctgaagaagaacgaccaaatctacgctatgaaggtcgtcaagaaagagcttgtgcatgacgatgaggatatcgactgggtgcagacggaaaaacacgtctttgagcaggcatctagcaaccccttcctagttggcctgcattcttgctttcagacaacctcccggctgtttctggtgatcgagtacgtgaatggaggagacctgatgtttcacatgcaacgccaacgcaagctgccagaggagcacgccagattttacgccgcagaaatatgtatcgccctaaattttctgcatgaaaggggaataatctatagagaccttaagctagacaatgtacttcttgatgccgacgggcatataaagctgacagattacggcatgtgcaaagagggtctgggtcctggggatacaacatcgactttttgcggaactcccaattatatcgcccctgaaatattgcggggagaggagtacgggttcagtgtcgactggtgggcgctcggggttctgatgttcgaaatgatggcaggcaggtcacccttcgatatcatcacagataatcctgacatgaatactgaagattacctcttccaggtgatcctggagaagccgatccgaattccaagattcctttctgtaaaggctagccacgtgctgaagggattcttaaataaggatcctaaggagcgccttggttgtcggccacagacagggttttcggacattaagtctcatgcttttttccgaagtattgactgggacctgttagagaagaagcaggccctcccgccatttcagcctcagataacagacgactacgggctcgacaatttcgatacacagttcacatctgagcctgtgcaactcactcctgatgacgaagacgccattaaacgtatcgatcagtcagagtttgagggcttcgaatacattaaccccctgctgttgtctaccgaagagagcgtctag

SEQ ID NO: 30307 - DNA, 1230 bp, synthetic construct
  misc_feature 1..1230: note = Description of Artificial Sequence: Synthetic coding sequence
  source 1..1230: mol_type = other DNA
atggactctgttatgccgtcccaagagccccctgtggacgataaaaacgaagatgcggatcttcccagcgaggaaactgatgggattgcatatattagttctagcagaaaacatgatagtattaaggacgattccgaggatctgaaaccagtcatcgacgggatggatggtatcaaaattagtcagggcctgggcttacaggacttcgacctcatccgcgttatcgggaggggttcttatgccaaagtgctgctggtaaggctgaagaagaacgaccaaatttacgcaatgaaggttgttaagaaggaacttgtacacgatgacgaggatattgattgggttcagactgagaagcatgttttcgaacaggcgtcttccaaccccttcctggtgggacttcattcctgcttccaaaccacctccagactgtttctcgttatcgaatatgtgaatggaggagatctaatgtttcatatgcagagacaacgcaaacttccggaggagcatgccagattttatgctgcggaaatttgtattgctctgaacttcctacatgaacgtggtataatctacagggatttaaagctggataatgtcctgttagacgcagatggccatatcaaactgactgattatggaatgtgtaaggaagggctggggccaggggatactacttctaccttttgcggcacccctaactacatcgctcccgagatcttgcggggtgaagagtacggcttctcggtggattggtgggctcttggggttcttatgtttgagatgatggccggaaggagcccttttgatatcattacagataaccccgatatgaacaccgaagactacctgttccaggtgattctcgagaaacccattaggattcccagattcttgtccgtaaaagccagccacgtactgaagggattcctgaacaaagatcctaaagaaagactagggtgccgaccacagaccggtttcagcgacatcaaaagccacgccttcttcaggtccattgattgggacctgctcgagaaaaaacaggcattgcccccttttcagccccagatcaccgacgactacgggctcgacaactttgacactcagttcaccagcgagcccgttcagctgactcctgatgacgaggacgcaattaagcgcattgaccagtccgaattcgagggatttgagtatatcaatcctctgctcctaagcacagaagagtctgtgtag

SEQ ID NO: 30308 - DNA, 1467 bp, synthetic construct
  misc_feature 1..1467: note = Description of Artificial Sequence: Synthetic coding sequence
  source 1..1467: mol_type = other DNA
atgctgacccccagaactgatgaaagcatttatcgacgcggagcaagaaggtggaggaagctgtacagagcgaatggacatctgttccaggctaaaaggtttaataggagagcctactgtggacagtgttctgagcgcatttggggtctggctcgccagggttaccgctgcattaattgtaagcttctggtgcataaacggtgtcatggactggtgccgctcacctgccgaaagcacatggattcggtcatgcctagccaggagccccctgtggacgataaaaacgaagacgccgacttgccttccgaagaaaccgatggaatagcctatattagctcctctcgtaagcatgactctatcaaagacgactccgaggatctcaaaccggtgatagacggtatggatgggatcaagataagccagggattgggcttgcaggactttgatctcatccgcgtcatagggcgaggcagctacgcgaaagtactgctcgtacgccttaagaaaaacgaccagatatatgccatgaaagtcgtaaaaaaagaactggtacatgatgatgaggacattgattgggttcagacagagaaacatgtgtttgaacaagcttcaagtaaccccttcctcgtgggcctgcactcctgctttcagacaaccagcagactgttcctggtcatcgaatacgtcaacggcggtgatctgatgttccacatgcaaaggcagcggaaactccccgaagagcatgcacgattctatgccgctgagatttgcatcgcgctcaattttctgcatgagaggggcattatatatagagatcttaaactggataacgtcctgttggatgcagacggacatattaagctgactgactatggtatgtgtaaggaggggttgggcccaggggatactacaagtacattctgcggcacacctaactatattgcccctgagatcctgcgcggtgaggaatatggattttccgtagattggtgggcgttaggggtcctcatgtttgaaatgatggctggtagatctccgttcgacattattaccgacaatcccgatatgaataccgaggattacctgttccaggtgattttggagaaaccaatcaggatccccagattcttatccgtgaaggcatcacacgtgctcaaggggttcttgaacaaggaccccaaggagaggttggggtgccggcctcaaactggattttctgatatcaaatcacacgcatttttccgctcaatcgattgggaccttctggagaagaagcaggccttgcccccttttcagcctcagatcacagatgattacggactagacaactttgatactcaatttacgtctgagcctgtgcagttgacaccagacgacgaggatgctatcaaaagaatcgatcagtcagaatttgaagggttcgagtatatcaaccctctgctgctctctaccgaagagtccgtgtag

SEQ ID NO: 30309 - DNA, 78 bp, synthetic construct
  misc_feature 1..78: note = Description of Artificial Sequence: Synthetic coding sequence
  source 1..78: mol_type = other DNA
atggactctgtgatgccaagtcaagaaccacctgtggacgacaagaacgaggacgctgatctaccatcggaggagtag

SEQ ID NO: 30310 - DNA, 249 bp, synthetic construct
  misc_feature 1..249: note = Description of Artificial Sequence: Synthetic coding sequence
  source 1..249: mol_type = other DNA
atggatagcgtaatgccatctcaggagcccccagtggacgataagaacgaggatgccgatttaccaagtgaggaaacagatggaatcgcttatatcagcagttcccggaagcacgactcaatcaaagacgactcagaagatctaaagcctgtcatagatggcatggacggaatcaaaatttcccaaggactgggcctgcaggatttcgatctcatccgtgttatcgggaggggttcctacgccaagtag

SEQ ID NO: 30311 - DNA, 297 bp, synthetic construct
  misc_feature 1..297: note = Description of Artificial Sequence: Synthetic coding sequence
  source 1..297: mol_type = other DNA
atggatagcgtaatgccatctcaggaacctcctgtggacgacaaaaacgaggacgcggacctgccatctgaggagacagacggtattgcctatattagctcttctaggaagcacgactcgataaaggatgacagtgaagatctgaaacccgtgattgacggaatggacggaatcaagattagccagggcctgggtcttcaagacttcgatttgattcgtgtaatcggacgtggaagttatgccaaagtgctgttagtacgactgaaaaagaatgaccagatttatgcgatgaagtag

SEQ ID NO: 30312 - DNA, 330 bp, synthetic construct
  misc_feature 1..330: note = Description of Artificial Sequence: Synthetic coding sequence
  source 1..330: mol_type = other DNA
atggactccgtcatgcctagccaggaaccccctgtggatgacaagaatgaggatgccgacctgcccagcgaagaaacagatggaatcgcgtacattagctcttccagaaagcacgactcaattaaagatgattcagaagacctaaaaccggtgattgacggcatggatggaattaagatttctcagggactgggtttacaagactttgatctgatcagagtcatcggaaggggtagttacgcgaaggttttgctagtgaggttaaagaagaacgaccagatctatgctatgaaagttgtaaagaaagagctcgtgcacgacgacgagtag

SEQ ID NO: 30313 - DNA, 141 bp, synthetic construct
  misc_feature 1..141: note = Description of Artificial Sequence: Synthetic coding sequence
  source 1..141: mol_type = other DNA
atggattctgtgatgcctagtcaagagccacctgtggatgacaaaaacgaagacgctgatttacccagcgaagagactgatgggattgcctatatttctagcagccggaaacacgacagcattaaggacgacagcgagtag

SEQ ID NO: 30314 - DNA, 222 bp, synthetic construct
  misc_feature 1..222: note = Description of Artificial Sequence: Synthetic coding sequence
  source 1..222: mol_type = other DNA
atggactctgtgatgccaagccaggagccgcctgttgatgacaaaaacgaagacgctgatctcccctctgaggaaaccgacgggatagcctacattagttcaagccggaaacacgactcaatcaaggacgattctgaggatctgaagcctgtgatagatggaatggatggcatcaagatctctcaggggctagggttacaggacttcgatttgattaggtag

SEQ ID NO: 30315 - DNA, 66 bp, synthetic construct
  misc_feature 1..66: note = Description of Artificial Sequence: Synthetic coding sequence
  source 1..66: mol_type = other DNA
atggattccgtaatgccttcccaggagccccctgtggatgacaagaatgaggacgctgacctgtag

SEQ ID NO: 30316 - DNA, 216 bp, synthetic construct
  misc_feature 1..216: note = Description of Artificial Sequence: Synthetic coding sequence
  source 1..216: mol_type = other DNA
atggacagtgtgatgccaagccaggaaccccctgttgacgacaaaaacgaggacgcggatctaccttctgaggagactgatggtatcgcttacatctcaagtagcagaaagcatgacagcatcaaggatgattccgaagatctgaagcctgtcatagacggtatggacggaatcaagatttcgcaaggactgggccttcaggacttcgatctgtag

SEQ ID NO: 30317 - DNA, 417 bp, synthetic construct
  misc_feature 1..417: note = Description of Artificial Sequence: Synthetic coding sequence
  source 1..417: mol_type = other DNA
atgatctcactgaccgacacccaaaaaattggaatgggactgaccggctttggcgtgttcttcctatttttcggaatgatcctattttttgataaagccctactggctatagggaatgtgctcttcgtggctgggctggcgttcgttatcgggctagagcgtacttttaggtttttctttcagaaacataaaatgaaggccacaggattcttcctgggcggtgtgtttgtcgtgttgatcggctggccactaatcggtatgatcttcgaaatatacgggttcttcctcctcttcaggggcttttttccagtggtggtggggtttatccgccgagtccctgtattgggtagcctgctcaatttacccggaattagatcatttgtggataaagtgggggaatctaataatatggtttag

SEQ ID NO: 30318 - DNA, 702 bp, synthetic construct
  misc_feature 1..702: note = Description of Artificial Sequence: Synthetic coding sequence
  source 1..702: mol_type = other DNA
atggatagccctgaggatgccgatctgttccacagtgaggaaatcaaggctcccgagaaggaggagttcctggcttggcaacacgacctggaggttaacgataaagcccctgcacaggccagaccaaccgtatttaggtggacggggggaggcaaggaagtgtatttgagtggcagcttcaacaactggagcaagctgcccctgacaaggagtcataacaacttcgtagccattttggacctgcctgagggggagcatcagtacaagttctttgttgacggacagtggacccacgatccatccgagcccatagtgacaagccagcttgggactgttaacaacatcatccaagttaaaaagactgactttgaagtttttgacgctctcatggtggatagccagaagtgttcagacgtctcagagttgtcatcctcgccccctggcccttaccaccaggagccatatgtgtgcaaaccagaggaacgttttcgcgcacctcccatcctgccgcctcacctgctgcaggtaatcttgaacaaggatacaggcatctcatgtgacccagcattgctaccggagcccaaccatgttatgctcaaccacttatatgctctgagtataaaagacggagtcatggttttatccgccacacaccgctataagaaaaagtacgtcacaaccctgctttacaaaccaatctag

SEQ ID NO: 30319 - DNA, 813 bp, synthetic construct
  misc_feature 1..813: note = Description of Artificial Sequence: Synthetic coding sequence
  source 1..813: mol_type = other DNA
atgggaaatacctccagcgagcgcgctgcattagagcggcacggtgggcataaaacacctagacgggatagcagtggcggaaccaaggacggcgacaggcctaaaatcttaatggactctccagaggacgccgacctgttccatagcgaagagatcaaagcccctgaaaaagaggagttcctggcatggcaacatgatctggaagtgaatgataaagctccagcccaggcgaggcccaccgttttccggtggactggagggggtaaggaggtctacctaagcggctcgtttaacaattggtccaagttgccacttacacggtctcataacaattttgtggcaatcctggacctgcccgagggagagcaccagtacaaattcttcgtggacggacagtggacccatgacccgtctgaacctattgtgacttctcaactgggtaccgtgaataacatcatccaggttaagaaaactgattttgaggtcttcgacgccctcatggtagatagtcagaagtgttcagatgtgtcagaactgtccagttcccctcccggaccttatcatcaggaaccttacgtgtgtaaaccagaggaacggttccgtgcgccacctatcctccctcctcaccttcttcaggtgatattgaacaaggacaccggcatctcctgtgatccggcattgctgcctgagccaaaccatgtgatgctgaatcatctgtatgcccttagcatcaaggacggcgtgatggttttaagcgccacacacaggtataagaagaagtatgtcacaacactgttgtataagccaatctag

SEQ ID NO: 30320 - DNA, 12384 bp, synthetic construct
  misc_feature 1..12384: note = Description of Artificial Sequence: Synthetic coding sequence
  source 1..12384: mol_type = other DNA
atggctgggtccggagccggtgttcggtgttcccttctgcggctgcaggagacactgagcgccgctgaccgatgtggagccgctctcgccggacaccagctgatcaggggactggggcaagagtgtgtgttgtcgtcctctccagcagtcctggcactccagaccagcctcgttttctcaagggattttggtctgctggtgtttgtgaggaagagcctgaattcaatcgaattcagggagtgtcgagaagagattctaaagtttctgtgcatttttctggagaaaatgggccaaaaaatcgctccttactctgtggaaattaagaacacttgcacgagcgtgtacaccaaggatcgagcagcaaagtgtaaaatcccagctctggatctcctgattaaactgctacagacattcaggtctagccgcctgatggacgagttcaagattggcgagttattctccaaattttatggggagctggccttgaagaaaaaaattcctgacaccgtactggagaaagtgtacgagttgctcggcctattgggggaagtccacccctctgagatgattaacaacgctgaaaatttgttcagagcctttctgggggagcttaaaactcagatgactagtgccgtccgggaacccaagcttcccgtactggccggatgcctgaaagggctttcttctcttctctgtaattttactaaatctatggaagaggatccacagacctcacgggagattttcaattttgtgctgaaagcaatccgccctcagatagaccttaaaagatatgccgtgccaagcgcaggacttcgtctgtttgcactccacgcgagccagtttagtacatgcctgctcgataactacgtttctctatttgaagttcttctcaaatggtgcgcccatacgaatgttgaactgaaaaaggcagcactcagcgcccttgaatcattcctgaagcaggtgagcaacatggttgcgaagaatgccgaaatgcataaaaataagttgcagtattttatggagcaattttatggcattatcaggaacgtggacagtaataacaaggaacttagcatcgccattcgagggtacggattatttgcagggccttgtaaagtaattaatgctaaggacgttgactttatgtacgtagagttaattcagagatgtaagcagatgttcttgacccagacagatactggcgacgatcgcgtttaccagatgccttctttcttgcaaagcgtcgctagtgtgctgctgtaccttgatacggtccctgaggtttacactcccgttctggagcacctcgtggtgatgcagatcgattctttccctcagtactctcccaagatgcagctcgtttgttgtcgtgctatcgtaaaagtatttctggctctggcagccaagggtcccgtgcttcgcaattgcatctccaccgtggtccatcaggggttaatccgaatctgtagtaagccagtggtgctgccaaagggtcctgaatcagaatccgaggaccacagagccagcggagaagtgcgaacaggcaaatggaaggtccctacctacaaggactatgtcgatctatttcgtcacctactgagctctgatcagatgatggattctattttggcagacgaagcattcttttcagttaatagtagttcagaaagcctaaaccatctgttatatgatgaattcgtgaagagtgtgcttaagatcgtggaaaaactcgatctgacactggaaatccagacagtcggggagcaggaaaatggtgatgaggcccctggagtgtggatgataccgactagcgatccagctgccaaccttcatccggctaagccaaaagatttttcagcctttattaatctcgttgaattctgtcgcgagattctgcccgaaaagcaggcagaatttttcgagccatgggtgtactcttttagctacgagctcatcctccaatcaacccgtctcccgcttatctcggggttctataagctcctgtctataactgttcgaaacgccaaaaaaatcaaatattttgaaggcgtctcgccaaaatccctgaaacactcacccgaggatcctgagaagtattcatgcttcgcactgttcgtcaagtttggtaaggaggtggccgtaaaaatgaaacagtataaagacgaactcctcgcctcttgtctgacttttctgctgtccttgccacataatattattgagcttgatgtgcgtgcctacgtaccagcgctacagatggccttcaaactgggattaagctatactcctcttgccgaggttgggcttaacgccttggaagaatggagcatttatatcgataggcatgtgatgcagccatactacaaagacattctcccttgcctcgacgggtacctgaagacctctgccctttccgatgaaaccaaaaacaattgggaggtgtctgccctctctcgggctgctcagaaaggcttcaacaaagtggtcttgaagcacctcaagaagacaaaaaacctgtccagcaatgaagccatatcccttgaagaaatccgaattcgcgtggttcagatgttgggcagtctggggggacaaattaataagaacctgctgacagtcacctcatccgacgagatgatgaaatcctacgtggcctgggaccgggagaaaagactgtcgtttgctgtgccctttcgtgagatgaagcccgttatatttctagatgtgttcttacctcgggtgacagagctggccctcactgcctctgatcgtcagacaaaagtggctgcatgcgaactgctacattctatggtcatgttcatgctgggcaaggccacgcaaatgcccgagggcggacagggagcccctccaatgtaccagctgtacaagcgcaccttccctgtgctcttacgcctggcctgcgacgtggatcaggtaacaagacagctctacgagccactggtaatgcagctgatacactggtttacgaacaacaaaaagttcgagagccaggacaccgtcgctctgctcgaagccattctggatgggattgtagaccccgtcgactccactctccgtgatttttgtggcagatgtattcgggagtttttgaagtggtcaatcaagcagattacaccccagcaacaggaaaagtccccagttaatacaaagtccctcttcaaaaggctgtacagcctggctctgcacccaaatgccttcaagagactgggcgcaagccttgcatttaataatatatatagggagtttcgggaggaggagagtctggtggaacaattcgtgtttgaggctctggtaatatatatggagtcactcgcccttgcgcacgccgatgagaagagcctgggcacgatccagcagtgttgcgatgccatagaccatctgtgcaggattatagagaagaaacatgtttctttgaataaagccaaaaaaaggcgccttcctcgcggtttccctccctcggctagtttatgtctcctcgacctggtgaagtggttactcgctcactgtgggagaccccagactgaatgtaggcacaagagtattgagctgttttacaaattcgtacccctgttgccagggaaccggagcccaaatctatggctgaaagatgtgttgaaagaagagggtgtgtcgtttctcattaacacattcgagggagggggatgcggtcagccatccggaatccttgcccaacctaccctgctgtaccgtggccctttctcgctccaggcaactctatgctggctggacctactcctggctgcactagaatgctacaatacattcattggcgagagaaccgtgggagctctgcaagtgttgggaaccgaagcacaaagcagcctccttaaggctgtcgcattcttcctggagtctattgccatgcatgatatcatagccgctgagaaatgctttggaaccggagcagccggaaatagaacatcaccgcaggagggcgagagatacaactattcgaagtgcacagttgtggttagaataatggagttcaccactactctgctcaatacatctcctgaaggctggaaattactgaagaaggacctgtgtaacactcatttgatgagggtcctggtccagacactgtgcgagcccgctagtatcggatttaatatcggagacgtgcaggttatggcccatttgccagatgtctgcgtgaatctgatgaaagcactgaagatgagcccttataaggacattctggaaactcatttacgcgagaagatcacagcacagtccatcgaggaattatgcgccgtaaacctgtacggccctgacgctcaggtggaccgtagtcgactggcggcagttgttagcgcgtgtaagcaactccatagggccggtctcttgcacaatattctcccatctcagagcacagatctgcaccatagtgtagggacagagctgttaagcttggtgtataaagggatagcgccaggagatgaacgacagtgtctgccctcacttgatctctcatgcaagcaactggcaagtggtttgctggaactggcctttgcgttcggcggtctgtgcgaacggctggttagcctactactcaaccctgcggtgctctctaccgccagtctgggaagctcccaggggtcagtaatccacttctctcatggcgaatacttttactcactcttttccgagacgatcaatacagagctgctcaaaaaccttgacctggctgtgctcgagttgatgcaatcctcagtcgacaacacaaaaatggtgtccgccgtcctcaatggcatgctagaccagtcatttagggagagggcaaatcaaaaacaccaggggctgaaactggccaccacaatcctccaacactggaagaagtgcgactcctggtgggccaaggattcccctctggaaaccaagatggccgttcttgctcttttagccaagattctgcaaatcgactcttctgttagttttaatacctcacacgggagctttcctgaggtttttacaacgtacatcagcctgctggcagacaccaaattagaccttcatttgaaaggtcaggctgttactctgcttccatttttcaccagtttaactggcggaagtctagaggaactgagacgggtattggagcagcttatcgtagcccattttcccatgcagtctcgggagtttcctcctggaactcctagattcaataactatgtggattgtatgaagaagtttctcgacgccctagaactcagccagtcgcctatgctcctagaactgatgacggaggtgttgtgcagggaacagcaacatgtcatggaagagttattccagtccagcttccgaagaattgcgcgtaggggatcctgcgtaacccaggttggattgctagaatccgtctatgagatgttccgcaaagatgatccacggctctccttcacacggcagagcttcgtggatcgctctctgctcacattgttgtggcattgcagccttgacgctctgagggaatttttttccacaattgtggtcgatgctattgatgtgctgaaaagcaggttcactaagctgaacgaatcaacattcgacacacaaatcacaaaaaaaatgggatactacaaaattttggacgtcatgtactcaagactgccaaaggatgatgtacatgctaaagagtctaaaatcaaccaggtgttccacggatcgtgtattactgaagggaacgaactgacaaagactctcatcaagctatgctacgatgccttcacagaaaacatggccggagagaatcaactgttggaacggaggcgcctctatcattgcgcagcttacaactgtgctataagtgtgatctgttgcgtgttcaatgaacttaagttttaccagggcttcctgtttagtgagaaacctgagaaaaaccttctgatattcgagaacctaattgatctgaagaggcggtacaatttcccagtagaggtcgaagtgcctatggagcgaaagaaaaagtatatcgagataaggaaagaagcaagggaagctgctaatggagatagcgatggcccatcttatatgtctagcctttcctatttggcagacagtactcttagtgaggagatgagccagttcgacttctcgacaggcgtgcagtcctacagctacagctctcaagatccacgtccggctaccgggaggtttaggcgaagggagcagcgcgaccctaccgtgcatgatgatgtgctggaattggagatggacgaacttaacagacatgagtgcatggcccctcttacggcactggttaagcacatgcatcggtcactgggaccccctcaaggagaagaggatagcgttcctagagacctgccgtcttggatgaagttcctccacggtaaactgggcaatccaatcgtcccattaaacatcaggctctttctggctaagctcgtgattaacacggaagaggtgtttcggccttacgccaagcattggttatcacctcttctccagctggcagcatccgaaaacaatggtggcgaaggcatccactatatggtggtagagatcgtcgctacaattctttcatggaccgggctcgcaactccgactggagttccgaaagatgaagtgctggctaaccgacttctgaatttcttgatgaaacatgtgttccatcccaagagggctgttttccgtcacaacttggaaataattaagaccctggttgaatgttggaaagactgcctgtccattccataccgtctgatctttgaaaagttctccgggaaggatcctaactccaaggataattcagttggcattcaacttcttgggatcgttatggccaacgatctcccaccctacgacccccaatgcggaatccagtccagcgaatacttccaggccctggtgaacaacatgagcttcgtgcggtataaagaggtatatgccgctgccgcagaggtacttgggcttatattgagatacgttatggagcgtaaaaacattctggaagaatcattgtgcgaactagtggctaagcagctgaagcagcaccagaataccatggaagacaaattcatcgtgtgcttgaacaaagttaccaaatcatttcctcctctagccgataggtttatgaacgcggtcttttttttgctcccgaaattccatggagtcctgaagactctatgcctggaagtggttttgtgccgcgtggagggcatgaccgagctatactttcagctgaaatcaaaggactttgttcaggtgatgagacaccgggacgatgagcgacaaaaggtgtgtcttgacatcatttacaaaatgatgcccaaacttaaacccgtggaactaagagaattgctgaacccagtggtggaattcgtttcacatcctagcaccacctgcagggagcagatgtataacatactaatgtggattcacgataattaccgagaccccgagtcggaaacggataatgatagccaagaaatctttaagctagctaaagatgtgctgatccagggactaatcgatgagaaccccggattacagttaattatccgcaatttttggtcgcatgagaccaggttgccatcaaatacactggaccgcctcttggccttgaactcactgtactcacccaagatcgaggttcatttcctgagccttgctacgaactttctgctggagatgacctctatgagtccagattatcctaaccccatgttcgagcacccactcagcgagtgcgagttccaggagtacacaattgatagcgactggaggttcagatccacagtgctcacacccatgttcgtagagactcaggcttctcagggcacgctacagacaaggacacaagaagggagccttagcgcacgttggcccgtggctgggcagatccgtgccactcagcaacaacatgatttcacacttacacaaaccgctgatggaaggtctagcttcgattggctaacaggcagctctaccgatccacttgtcgatcatacgtctccctcaagcgactctctactgtttgctcacaagaggtcggagagactccaacgggctcctctgaaatcggtgggcccagattttggaaaaaagcggttgggactgcccggtgacgaagtggacaacaaagtaaagggagccgcagggcgtacagacctgcttagacttcgtagaaggttcatgcgagatcaggaaaaactctctctgatgtacgcgaggaagggtgtcgcagaacagaaacgcgaaaaggagatcaagagtgaactgaaaatgaaacaagacgcacaagtcgtgttataccggagctacaggcacggggacctgcctgacatccaaatcaagcactcgtcactaatcacacccttgcaggccgtggcccagagggatccaattatcgcgaagcagctgttctcctcattgtttagcgggattctgaaggaaatggataaatttaaaacattgagcgaaaagaacaatatcacccagaaactccttcaggactttaacagattcctgaatactacattctccttttttccccctttcgtcagctgtatacaggacatctcttgtcagcatgccgctctacttagtctggatccagccgctgtaagcgctggctgcctcgcgtcccttcagcagccagtgggaatccggctcctagaggaggcccttctccggttgttgccggctgagcttcccgcaaagagggtgcgaggtaaggcacggctacccccagatgtactgcggtgggtcgaattagccaagctctaccggagcattggcgagtatgatgtgctaagggggatctttactagtgagattgggaccaagcagatcactcagtcagcactgctcgctgaagccaggtccgactactctgaagctgccaaacaatatgatgaggcactcaacaaacaggattgggtggatggtgagcctacggaggcagagaaggacttctgggaactggcgtctttggattgctacaatcacttggcagagtggaagtcccttgagtattgcagcacagcatctatcgacagcgaaaatccacctgatcttaataaaatctggtctgaaccattttatcaggaaacatatctgccctatatgatcaggtccaagctgaaactcctgctgcaaggggaggcagaccagtctctgctaaccttcatagataaagccatgcatggggaactccaaaaggccattctggagttacactattctcaggaactgagtctattatacctgctgcaggatgatgttgacagggcgaagtattatatacagaacggaatacagagctttatgcaaaattacagcagtatcgatgtgctcctgcaccagtctcgcctcaccaagcttcagtccgtccaagcactgacagaaatccaggagtttatttcattcataagtaaacagggcaatctgagctcccaggtgccgctgaaacgcttactgaatacctggacgaacagatatcctgatgccaaaatggatccaatgaacatctgggacgacatcattaccaatagatgtttcttcttgtccaaaatagaagaaaagttaactcctctccccgaagacaatagcatgaacgtggaccaggacggggatcctagtgacaggatggaagtgcaggagcaggaggaggacatcagtagtctgattcggtcttgcaagttctccatgaagatgaaaatgatcgactccgcgagaaaacagaacaatttctcgctggccatgaagctcttgaaagagttgcacaaggaatcaaagactcgggatgattggctggtcagctgggtacagtcttactgtaggctgtcccactgcagaagccgcagccaggggtgcagcgagcaggttcttactgtgctgaagaccgtgtctctgcttgacgagaataacgtgtctagttacttgtcaaagaatatactggccttccgcgaccagaatatactgctcggcactacatatcggattatcgctaatgccctgagcagcgaacctgcttgcctagctgaaatcgaggaggataaagcacggagaatcctagagttgtccggcagttcttctgaggattcagaaaaggtgatagccggactctaccagcgcgcttttcagcacctctcagaagcggtacaggcggcagaggaagaggctcagcctccatcatggtcatgtgggcctgctgcaggcgtgattgatgcctatatgactcttgccgacttctgcgatcaacagctgcggaaggaggaggagaacgcttctgtgatagattccgccgagctgcaggcataccccgctctcgtggtggaaaaaatgcttaaagctctgaagctgaatagcaatgaagctaggctgaagttcccgcgattattacagatcattgagaggtatccggaagaaaccctatccttgatgactaaggaaatctcatctgtgccctgttggcagtttattagctggatcagtcacatggtcgctctgcttgataaggatcaggccgtagctgtgcagcattccgtggaagagatcactgataattacccacaggccattgtttacccttttatcatctcgagtgaatcttattcctttaaggacacttcaactggacacaagaacaaagagtttgtcgccagaattaagagtaaacttgaccaaggaggagtgatacaggacttcatcaacgctctggaccagttaagcaacccagagttgcttttcaaagattggagcaacgacgtgcgggctgagttagctaagacccccgttaataagaagaatattgagaagatgtatgaaagaatgtacgcagccctgggagaccccaaggcccctgggttgggggctttcaggaggaaattcattcaaaccttcggtaaggagtttgacaaacattttggcaagggcggatctaagctacttaggatgaagctgagcgatttcaacgatattacaaacatgctcttattaaagatgaataaggactccaagccacctggcaatctcaaggaatgttccccctggatgtcggactttaaggtggagtttctgcggaacgaactggaaatccccggtcagtacgacggaagaggtaaaccattaccagaatatcatgttcgtatcgccggattcgacgagagggtcacagtgatggcctcgctgaggagacccaagaggattattattcgtggacatgatgagagagagcaccccttcttggtcaaagggggtgaagacctccgccaggaccagcgggtggaacaactgttccaagtgatgaacggcatactggcccaggactccgcctgtagtcagcgagccctgcagctcagaacatacagtgtcgtgccgatgacaagtagactggggctgatcgagtggctcgaaaataccgtcactcttaaggacctgttgctgaatacgatgtctcaagaagaaaaggcagcttatctctcggaccccagggctccaccctgcgagtacaaggactggcttaccaaaatgagtggcaaacatgatgtcggtgcctatatgctgatgtacaagggagctaatcggacagaaactgtgacaagcttcagaaaacgcgagtcaaaggttccagccgatctgttgaagcgggcattcgtgcggatgagtacctcgccagaggcttttttagcactgcgcagtcactttgcgtcgtctcatgccctgatctgtattagtcactggatcctcggtattggcgatcgacacttgaacaactttatggtcgccatggaaacaggcggtgtgataggcattgactttggccatgcgttcggaagcgccacccagttcttgcctgtgccagaattgatgccctttcggctaactaggcaatttattaaccttatgcttccgatgaaagagaccggtttgatgtactccattatggtgcatgctctcagggcctttcggtctgacccaggactgttgaccaatacaatggatgtgttcgttaaggaaccctcatttgactggaagaacttcgagcaaaaaatgctgaaaaaaggcggttcatggatccaggaaataaatgtagctgagaagaattggtacccgagacagaagatatgctatgcaaagagaaagttggccggagctaaccctgctgtgattacctgcgatgagttgctcttaggccacgagaaggcgcctgcgtttagagactacgtggctgtggccagggggagcaaagaccacaacatccgcgctcaggagccggaaagcggactgtcagaagagacccaggtgaagtgtctgatggaccaggcaaccgatcccaacattctggggaggacctgggaggggtgggagccctggatgtac

SEQ ID NO: 30321 - DNA, 12291 bp, synthetic construct
  misc_feature 1..12291: note = Description of Artificial Sequence: Synthetic coding sequence
  source 1..12291: mol_type = other DNA
atggctgggagcggcgcaggcgttcggtgttcgcttcttcggctacaggagactttaagcgcagcagataggtgcggcgcagctttggctggccatcaactcattcggggactgggccaagaatgtgttctgtcttcttccccagcggtgctagccctgcagacatccctagtgttcagccgagactttggcctgcttgttttcgttaggaagtctctgaacagcatcgagttcagggagtgtcgagaagagatcctgaagtttctctgcatctttttggaaaaaatgggacagaagatcgcaccttattcggtagagatcaaaaacacctgcacctctgtgtataccaaggaccgtgcagccaagtgtaagatacccgctctggatctgctcatcaagcttctccagacatttagatcgtctcgacttatggacgagttcaaaattggcgagcttttcagtaaattctacggagagttggccttaaaaaaaaaaatccccgataccgtgctggaaaaggtgtatgagttgctgggattgctgggggaggtgcacccgagcgagatgataaacaatgccgaaaatctattcagagcgtttctgggagaactcaaaacacaaatgactagcgcagtgagggaaccgaagctgcctgtgctggcgggatgtctgaagggtctgtcctccttgctctgcaacttcacaaagtctatggaagaggatccacagacttcacgagagatcttcaacttcgttctgaaagctatccgaccgcaaatagatctgaaaagatacgcggtaccctccgctggactccgccttttcgcactccacgcttcacagttctccacatgtctgctggataattacgtgagtctttttgaggtgcttctcaaatggtgtgcccacacgaatgtggagctgaagaaagctgcgctctccgccttagaaagcttcctaaagcaagtgtccaatatggtagctaagaacgcggagatgcacaagaataagctgcagtattttatggagcagttctatgggataatccgtaatgtcgacagcaataacaaagaactctcaatagcgatccgcggatatggacttttcgcaggtccctgcaaggtcatcaatgccaaagatgtggacttcatgtacgtcgaactgattcagcgttgtaaacagatgtttctgacacagacagataccggcgatgacagagtgtaccaaatgccaagttttctgcagagcgtggcgtccgtgctcttatacctcgacacagtgccagaggtttatacccccgttctggaacacctggtggtgatgcagattgatagtttccctcagtactcgcctaaaatgcaactcgtctgctgtagagccattgtgaaggtgttcctggccctggccgctaaagggccagtgctgcggaattgcatttccactgtggtgcaccaaggcctgatccggatttgctctaagcccgtggtgctccctaaaggcccagaatccgaatcagaggaccaccgcgcatccggggaggtccgcacaggcaagtggaaggttccgacatacaaagactacgtggatttgttccgacatctcttaagctccgaccaaatgatggattctatcctggcggacgaggcttttttcagcgtaaacagctctagcgagagtctgaatcacttattgtacgatgagttcgtaaaaagcgtactgaaaattgtcgaaaagctggatctgacgcttgaaatccagaccgtcggcgagcaggagaatggcgacgaagcaccaggcgtttggatgattcccacatctgaccctgctgcaaatttgcacccggcaaagccaaaagacttttctgcctttataaacctcgtggagttctgtcgggagatcctccctgagaagcaagccgagttcttcgaaccgtgggtttactcatttagctacgagctcatcctccagtcaactcggctgccactgatctcagggttctataaacttctgtcaatcacggtgcgaaacgcaaagaaaataaaatacttcgagggagtaagtccgaaaagcttaaagcactctcctgaggaccctgaaaaatactcttgtttcgccctgtttgtgaagtttgggaaggaggtagctgtcaagatgaagcagtataaggacgagctcttggcgtcctgtttgacgttcctcctgtcactacctcacaacattatcgaacttgatgtgcgggcttatgtgccggcactgcaaatggcctttaagttggggctgagctacacacctcttgccgaggtcggtctcaacgccctggaagagtggtccatatacattgatcgccatgtcatgcaaccatattacaaagacatcctcccctgcctggacggttacttaaagacctctgcactcagtgacgaaactaaaaacaactgggaagtgagcgcactgtcgagagccgctcagaaaggattcaacaaggttgtgttgaaacatttgaaaaaaacaaagaatctgagcagtaatgaggctatttccctggaggagatacgaatcagggttgtccaaatgctcggttctctaggtggccagatcaataagaacctcctaacggtgaccagttcagatgaaatgatgaagagttacgtggcttgggacagagagaaaaggcttagctttgccgtgccgtttcgagagatgaagcccgttatcttcctcgacgtgttcctgccccgtgtcacagaactggccctgacagctagtgatcgccaaacaaaggtggcggcttgcgaacttctgcacagcatggtgatgttcatgctgggcaaagcaactcagatgcctgaggggggtcagggggctccccctatgtatcagctgtacaaacgtactttcccggtcctcctgaggctggcctgcgatgttgaccaggttactagacagctctacgaaccgttggtgatgcaactgattcattggtttactaacaataaaaaattcgagagccaggataccgtcgccttgcttgaggccatacttgacgggatcgtcgacccagttgatagcaccctgcgggacttctgtggcaggtgtattagagaatttctgaagtggagcattaaacagatcacaccacagcagcaagagaagagccctgtgaacacgaaatcactctttaaacggttatactccctggctttgcacccaaacgcctttaaacgcttgggcgcttctttggcattcaacaacatttatagagaattcagggaagaggagagtttagttgaacaattcgtattcgaagctctcgtcatatacatggagagcttagctctggcacatgccgatgagaagtctctgggaacaattcaacaatgttgtgacgctatagaccatctttgtaggattattgaaaaaaaacacgtgtctttgaataaggcaaagaaaagacggctgccaagaggctttccaccctcagcatctttgtgtctcctcgacctggtgaagtggcttctggcacactgtggacgtccacagactgagtgcaggcacaaaagtatagagctgttctataaatttgtccccctattacctgggaaccgcagccctaacctgtggctgaaggacgtcttaaaggaggaaggagtcagctttctgattaacacatttgaaggaggcggttgcggtcaaccatccggcatcctagcccagccaaccctgctgtatcggggacccttctccctgcaggccacgttgtgctggttggacctactgctggctgccctggaatgttacaatacattcattggggagcgaacggtgggcgctctccaggtgttgggcaccgaagcccagtcgtccttgctcaaggccgtggcttttttcttggaatccatcgctatgcatgacatcatcgctgccgagaaatgctttggcacgggcgcagctggcaaccgcaccagcccccaggagggagaacggtataactactcgaaatgcaccgtcgtcgtccgcatcatggaatttaccacaacacttctcaatactagcccggaggggtggaagttgctaaagaaggacctctgtaacacccaccttatgagagtgttggttcagactctgtgtgagcctgcttcaatcgggtttaacataggcgacgttcaagtcatggcccacttgccagacgtgtgtgtcaaccttatgaaagctctgaagatgagcccatacaaggatatcctggagacccacttgcgcgaaaaaattaccgcccagtctattgaggagctgtgcgccgttaatctctacggccctgacgcccaggtcgaccgcagtcgtttagccgctgtggtgtcagcttgcaagcagctgcaccgcgctggcttgctgcacaacatcctgccatcccaatccaccgatctccaccattccgttggtactgagctcctatccctggtgtacaaagggatagcgccaggagatgagcgccagtgcttgccctcgctagatctctcctgtaagcaactggcaagcggcctgttagagcttgcctttgcctttggcggtttatgcgagagactggtctccctcttacttaaccccgcagtcctgtccaccgcaagcctgggtagctcccagggttcagtgatccactttagccatggcgaatatttttactccctgtttagtgagaccattaacacggaactgcttaagaatctggatctggcggtgctagagctgatgcagagctcggttgacaatacaaaaatggtgtcagccgttctgaacggaatgctcgaccagagctttagggaacgcgcaaatcagaagcatcaaggcctgaaactcgccactacaatattgcaacactggaaaaaatgtgattcgtggtgggccaaagacagccctctggagactaagatggctgtcctggccctgctcgccaagattctgcagattgattccagtgtttcgttcaacacctctcacgggagctttcctgaagtgttcaccacttacatcagtctgcttgccgacaccaaactcgacctgcacctgaaaggtcaggcagtgaccctgcttccattcttcacatctctgaccggcggtagtttggaggaactaaggagagtgctggaacagctgattgtggcccactttcctatgcagtctagggagtttcctccaggcacccctaggtttaacaactacgtagattgtatgaagaagtttttagatgcactggaactcagtcagagtccaatgctgttggagctgatgacagaggtgctatgtcgggagcagcagcatgtcatggaggagctgtttcagagctcgtttcgaaggatcgcaaggagaggctcctgcgtgacccaggtgggtctcttggagagcgtgtacgagatgtttcgaaaagacgatcccagactgtcctttacccgacagtcattcgtagaccgctccctgctaacgcttttatggcattgtagcctggatgctttgcgcgagttcttttcaacaatagtggttgacgctatcgacgtcttgaagtctagattcacaaagttgaacgagtctacgttcgacacgcaaatcaccaagaagatggggtactataaaatacttgacgtcatgtactcgcgccttccaaaggacgatgtgcatgctaaggaatctaaaataaaccaggtgttccatgggtcttgcattacagagggaaatgaattgaccaagaccctaatcaaactgtgttacgatgcatttaccgaaaacatggctggggagaatcagctactggagcgccgacgcctataccactgtgctgcttacaactgcgccatttccgtgatttgttgcgtttttaacgagttgaaattctaccaagggtttctcttctcagaaaaacctgagaaaaatctgctgatatttgagaatctcatcgatttaaagcgtcgctataacttcccggtggaggtcgaggtgcccatggagcgcaaaaagaaatatatcgaaataaggaaggaagccagggaagccgctaacggggactcagacggtccaagttatatgagcagcctgtcttacctggcagacagcacactatctgaggaaatgtctcaattcgacttctctactggggtccagtcttattcatactctagccaggatcccaggccagccaccggaagattccgccgacgcgagcagcgggacccaacagtgcatgatgatgtgctcgaattggaaatggatgagctgaatcggcacgaatgtatggctcccctgacagcactggtaaaacatatgcacagaagcctgggcccaccacagggagaggaagactcggttcccagagacctaccttcatggatgaaatttctgcatggaaaactggggaaccccatcgttcccttgaatatcagactcttcctcgccaagctcgtcataaacacagaagaagttttccgcccttacgccaaacattggttgtcgccactcttacagctcgccgcatccgagaataacggcggtgagggaattcactatatggtagttgaaatagtggctactatcctcagctggacgggcttagccacacccacaggtgtccccaaggatgaagtgttggcgaatcgcctcctaaattttctgatgaagcatgtattccatcccaagagggccgtgtttcggcataacctcgaaatcatcaagaccctggtcgaatgctggaaggactgcctgagcataccttacagactgattttcgagaaatttagcggaaaggacccaaactccaaggataattccgtaggcatccagctcctaggcattgtaatggccaacgacctacccccatatgacccgcagtgtggtatccagtccagcgaatattttcaagcactagttaataatatgtcatttgttagatataaggaagtgtacgccgctgccgcagaggtgctaggccttatcctcaggtacgtgatggagcgcaaaaatattttagaggagagcctctgcgaacttgtggccaaacagttgaaacagcaccagaatacaatggaagataaattcattgtatgcctgaataaggtgacaaagtctttcccacccttggctgatcgatttatgaacgctgtgtttttcttgctgcccaagtttcacggcgtgctgaaaactctctgcttagaagtagtcctgtgccgtgtggagggaatgaccgagctctactttcaactgaaatccaaggacttcgtccaggtgatgaggcatagggatgatgaacggcagaaggtgtgtttagatatcatctataagatgatgcccaaacttaagcctgtcgagctgagagagctgctcaaccccgtcgtcgaattcgtcagccacccgagtacaacttgcagagagcagatgtacaatatcttgatgtggatccacgataattatagggatcctgagagtgaaacggacaatgactcccaggaaatatttaaactggcaaaggatgtacttattcagggcctgattgacgagaaccccggattgcagctcatcataaggaacttttggtcccatgagacgcgtctccctagcaacaccctggataggttacttgcactgaatagcctttacagcccaaaaatcgaggtgcactttttgtctctagccaccaacttcctgttagaaatgacctccatgtctccagattatcccaaccccatgttcgagcaccccctgtcagaatgtgagttccaggagtacactatcgatagcgattggcgattcaggtcgacagttctaacacctatgttcgtcgagacccaggcctcacagggaactctccaaaccaggacacaagaaggatccctgagtgctcggtggcccgtggccggtcagattcgggcaacacagcagcaacatgatttcacactaacacagacggccgatggcagatcttcctttgattggttaacggggtcatcgacggatcctctggtggaccacacgagcccaagttcggactcacttctgttcgctcacaagcgtagcgaaaggctgcagagagccccactgaaatccgtggggccagacttcggcaagaagagactgggtctgcccggtgatgaggtggataacaaagtgaagggagcagctgggagaactgacctgctgagacttcgtaggagatttatgcgcgatcaagagaaactatctcttatgtatgcccgtaaaggtgtggctgaacagaaacgggagaaggaaattaagtctgaattaaagatgaagcaagacgcccaggtggtactgtatagatcttatcgccacggtgacctccctgacatccaaataaaacattcttcccttattactccactgcaggccgtggcacagcgcgaccccattattgccaagcagttgttctcatctctcttttcaggaatcttgaaagagatggacaagtttaagacactgtcagagaagaataacattactcagaagttgctccaggatttcaatcgtttcctcaacaccaccttttccttcttccctccctttgtatcatgcatccaagacatctcttgtcaacatgctgccctccttagtctggaccccgcagcagtgagtgcaggatgcttagctagcctgcagcagcccgtcggaatacgcttgttggaggaggccctgctccggctcttgcccgctgagctaccagccaaaagagtgagaggcaaagctcgcctgcccccagatgtactgcgctgggtagaactcgccaaactgtacaggtctattggggaatacgatgtgctgagaggcatttttaccagcgaaattggcaccaagcagatcacccaaagcgctttgttggccgaggccagatctgattatagtgaggcagcaaaacaatacgacgaggctctgaacaagcaggattgggttgacggggaacccaccgaggccgagaaggacttctgggagctcgctagtttggactgctacaaccatttggcagaatggaagtccctcgagtattgcagcacggctagcatcgactctgagaaccccccagacctcaataaaatctggtccgagcctttctaccaggaaacttacctgccgtacatgatcaggagcaaactcaagctcttactccagggtgaagctgatcagtccctgctaaccttcattgacaaagcaatgcacggagagttacaaaaagctatcctggaactccactactctcaggaactcagcctgctctacctgttacaggatgacgttgatcgggcaaaatactacatccagaatggaatccagtcatttatgcagaactatagctctattgacgtgctgttgcatcagagtagactgaccaaactgcagtccgtgcaggcgctgacggagattcaggaattcatatcatttattagcaaacaggggaacctctctagtcaagtgccactcaaacgtttgctgaatacatggactaaccggtatcctgacgcaaagatggatccaatgaatatctgggacgacatcatcacgaatagatgtttcttcctctctaaaatagaggagaagctcacccctctcccagaggacaattcaatgaacgtggaccaagatggtgacccgtctgaccgcatggaagtgcaagaacaggaagaagatataagttctttaatccgcagttgcaaattttcaatgaaaatgaagatgatagactcggcgcgaaagcaaaataacttctctctggccatgaaattactcaaagaactgcacaaagagtcgaagacacgcgacgactggcttgtcagctgggtccagtcctactgccggctttcacactgtcgatcacgctcgcagggttgttctgaacaggtcctgaccgtgctaaaaactgtgagcttgctggacgagaacaacgtgtcttcctatctgtcaaagaacatattagcattccgcgatcaaaacatactgcttggtaccacataccggatcatcgcgaatgcattgtcaagcgaaccggcatgcctagccgaaatcgaggaggacaaagcgcgaagaatcttggagctctccgggtctagctccgaggactccgagaaagtgatagcagggctgtatcaacgggcatttcagcatctttcagaggcggtgcaagcagcggaggaggaggctcagcctccatcctggagctgcgggccagccgctggggtgattgatgcgtacatgacattagccgatttctgcgaccagcaactccgcaaggaagaggaaaacgcttcagtcattgattcagccgagctacaggcataccccgcactggttgtggagaaaatgctcaaagctctcaaactcaatagcaacgaggccaggctcaaattcccacggttactgcagatcattgaacggtaccccgaggagacactgtctctaatgacaaaggaaatctcaagcgttccctgctggcaattcatttcttggataagtcatatggtggccctactcgacaaggatcaggctgtagcagtgcagcattcagtggaagagatcactgacaactatccccaagctatagtgtacccctttattatatcttctgaatcttatagctttaaagacacaagcacagggcataagaacaaggaatttgtcgctcggattaagtctaagttggatcaggggggtgtgatacaggatttcatcaacgcccttgaccagcttagcaacccggaactgctcttcaaagactggagtaacgacgtgcgagccgagctagcgaagactcctgtcaataaaaaaaacattgagaaaatgtatgagcgcatgtacgccgctctgggcgaccccaaggcgccaggcctgggcgcattccgccgtaagtttatccaaacatttgggaaagagtttgacaagcacttcggaaaaggcggttccaagctactgcggatgaagttaagcgattttaacgatatcaccaacatgctgttgctcaaaatgaataaggacagtaagccaccgggaaatctgaaagaatgctctccatggatgtcagattttaaagttgagttcctgcggaatgaactggagatcccgggacagtacgatggtcggggaaaaccacttcctgagtaccatgttcgcattgccggattcgatgaaagggtgactgttatggcatctctgcggcgacccaaacgcattatcattcggggtcacgacgagagagaacaccccttcctggtgaaggggggagaggatctgaggcaagaccagcgggtggaacagctgttccaggtaatgaacggaatcctagcccaagacagtgcatgctctcaacgtgcactgcaactgaggacctacagcgttgttccaatgacaagcagcgatcccagagcgccaccatgcgagtacaaggattggctgaccaagatgtccggtaagcatgacgtgggagcctacatgctgatgtataagggggctaataggactgaaacggtgacatcattccggaagagagagagtaaggtaccagccgacttgcttaagagagccttcgttaggatgagcacatctcccgaggcattcttggccctgcgttcccactttgcaagctcccacgccttaatctgtatttctcattggattcttggcattggcgaccggcacctgaataattttatggtggctatggagactgggggtgtgatcggcatagactttggccacgccttcggcagcgcaacacagtttctgcccgtgcctgagctgatgccctttcgtttaaccagacagttcattaatctcatgttacctatgaaagaaaccgggttgatgtacagcattatggtacatgcactccgggcattccgatcagatccgggtctgttaacaaacactatggacgtgttcgtcaaagaaccctcttttgactggaagaattttgaacagaagatgctgaagaaggggggatcttggatccaagagattaatgtggccgaaaaaaattggtacccacgccagaagatttgctatgctaaaagaaagctggccggtgccaacccagccgtgatcacctgcgatgagttattgctcgggcacgaaaaggccccagcttttagagactacgtggccgtggccagggggtctaaagatcataacattagggcacaggagcccgagagcggcctgtccgaagaaacgcaggtcaagtgccttatggaccaggccactgaccccaatatactgggcagaacgtgggagggttgggaaccttggatgtac

SEQ ID NO: 30322 - DNA, 444 bp, synthetic construct
  misc_feature 1..444: note = Description of Artificial Sequence: Synthetic coding sequence
  source 1..444: mol_type = other DNA
atggcagcgcaaaggctgggaaagagagtcctgagtaaacttcagagcccctctcgggctcgcggtcctggtggatcaccaggtgggctccaaaagcgtcacgctagagtgaccgtgaagtacgatcgaagggagttacagcgcaggctggacgtcgagaaatggattgacggtagattagaggagctctaccggggaatggaggccgacatgcctgacgaaattaacatagatgagctgttggaacttgagtctgaggaggagcgctccaggaagatacagggactgttaaagagttgtggcaagcctgtcgaagactttatccaagaacttcttgccaagttgcagggcttacatcgccagcccggattacgccaaccatcccctagtcatgacggcagcctgtctcctctgcaagatagagccagaaccgcacatccctag

SEQ ID NO: 30323 - DNA, 363 bp, synthetic construct
  misc_feature 1..363: note = Description of Artificial Sequence: Synthetic coding sequence
  source 1..363: mol_type = other DNA
atggccgcacaacgactcggaaagagagttttgagcaaactgcagtctccttcccgcgcaaggggtccaggtggatcccccggaggcctgcagaagaggcatgctagagtaacagttaagtatgacaggcgtgaattacagcgaagactcgatgtggaaaagtggatcgatggcaggctggaggagctctatcggggtatgggcttactgaaatcttgcgggaagccagtcgaagatttcatccaggagttgttagcaaaactgcaggggcttcaccggcaaccaggcctccggcaaccttcgccatcccacgacggctccctgagtcccctccaggacagggctcgcacagcacatccctag

SEQ ID NO: 30324 - DNA, 2025 bp, synthetic construct
  misc_feature 1..2025: note = Description of Artificial Sequence: Synthetic coding sequence
  source 1..2025: mol_type = other DNA
atggccccaggacaggcgccacatcaagcgacgccttggcgggacgcccacccattcttcttgctgtcaccagtgatgggcctgctaagcagagcttggagccggcttcggggtctcggcccacttgagccttggctggtggaggccgtgaaaggtgccgctttggtggaagctgggctggaaggcgaagccaggaccccccttgccatcccccataccccctggggtcggaggccggaagaggaggcagaggattccggaggcccaggagaagaccgggagaccctcggcctcaagactagttcatccctgcctgaggcgtggggcctgttggatgacgacgacggaatgtacggggagagggaagccacttcagttcctagaggtcaggggtcccagttcgctgacggacagagagctccactttcgccgagtctccttatcagaaccctacagggcagcgacaaaaaccctggggaggagaaagctgaggaggaaggtgttgcagaagaggagggtgtaaataagttctcttaccctcccagccatcgcgagtgttgcccagccgtggaggaggaggatgatgaagaggctgtgaagaaggaggcccaccggacgtcaactagcgcactctctcctgggtctaagccatctacctgggtgtcttgcccgggagaggaggagaatcaagctaccgaggataaacgcaccgagcggagtaagggtgcacgcaaaacaagtgtttctccacgtagttcaggatccgatcccaggagttgggaataccggagtggagaagcaagtgaagaaaaggaggagaaggctcacaaggaaaccggtaagggggaggctgcccctggaccacagagttcggcaccagcgcagcggccacaactcaaatcttggtggtgccagccatctgatgaggaggagggggaagtgaaagcactaggcgctgccgagaaagatggagaggcagaatgtcccccatgcatccctcctccctctgcttttctgaaagcttgggtttactggcccggagaagacacagaggaggaagaggacgaggaagaggatgaggattcggattccgggtctgacgaagaggagggagaagctgaagcatcctcatccacgccagccaccggtgtttttttaaagtcttgggtgtatcagccaggagaggatacagaagaggaggaagacgaggactctgataccggtagcgcggaagatgaacgggaagccgagactagcgccagcacaccccctgcatcagcattcctgaaggcttgggtttataggcctggcgaagatacagaggaggaggaagatgaagatgtcgatagcgaagataaagaggacgacagtgaagcagctctcggcgaagcagaatccgacccccacccatcacatccagatcaaagggcccatttccgcggttggggatacaggccaggcaaagaaactgaagaggaagaagctgctgaggattggggagaagcagaaccctgcccattccgcgtggccatttatgtgcctggagaaaaaccccctccaccttgggcacccccaagattgccccttagactacaaagacgcctgaaacggccagaaactcccacgcatgaccccgatcctgagacccctttaaaagccagaaaagtgcgcttctcggaaaaggttacggtccactttctggcggtgtgggcaggtcctgcccaggctgctaggcaggggccttgggaacaactggcgagagatcgaagtagatttgcacgacgtatcactcaagctcaagaagagctgtctccttgtctgacgcctgcggctagggccagggcatgggcaagattgcggaatccccctctggcccctattcccgcactgacacagacgctgccttcgtcctcggtgccatctagtcccgtgcagactacccccctctctcaggccgtagccactccttccaggtcctcagccgcagctgccgctgctctagacttgagcggaaggaggggatag

SEQ ID NO: 30325 - DNA, 1545 bp, synthetic construct
  misc_feature 1..1545: note = Description of Artificial Sequence: Synthetic coding sequence
  source 1..1545: mol_type = other DNA
atgaaagccgaggaggaaggggtggcagaagaggaaggagttaataagttttcttaccctcccagccaccgtgagtgctgcccagcagtggaagaggaggatgacgaggaagcggttaaaaaggaagcgcacagaaccagtacatccgccctgagtcctggtagcaagccaagtacctgggtatcttgtccaggagaggaagaaaatcaggcaaccgaggacaaacggacagaaaggtcaaagggcgctaggaagactagtgtctccccaaggagttccggcagcgacccacgttcttgggaatatcgttcgggtgaagcttcagaggaaaaggaagagaaggcccataaggagaccggcaaaggcgaggcagccccaggaccgcagagttccgctcccgcacagcggcctcagctgaaaagctggtggtgccagccctcggacgaggaggaaggggaggtaaaagcccttggcgcagctgaaaaggatggggaggcagagtgtccaccttgcatccccccaccttcagcctttctaaaggcctgggtttattggcctggggaggataccgaggaagaagaagatgaggaagaggacgaagacagcgacagcggctccgacgaggaggagggcgaggcagaggcctcgtcaagcacacccgcaactggagtattcctgaagagttgggtatatcaacctggtgaggacaccgaagaggaggaagatgaagattcagacacaggttccgcagaagatgagagggaagccgaaacttcagcttccactcctccagcatctgcatttctgaaggcctgggtgtaccggcctggcgaggatacggaggaagaagaggacgaagatgtcgattccgaggacaaagaggacgattctgaagcggcactcggagaagccgagtctgacccccacccttcccatcctgatcagcgtgcgcacttcagagggtggggatataggcctggaaaggaaaccgaggaagaggaagctgccgaggactggggcgaggccgaaccctgtcctttccgggtggcaatctacgtgcctggggagaagcctcctcccccttgggcacccccaagactgcctctgaggttacaaaggcggctaaaaaggcccgaaactcctacgcacgaccctgatcccgaaactcctctcaaagccaggaaagtccgcttttctgaaaaagtgacagtgcactttctggcagtgtgggccggacccgcacaggcagcacgccagggtccctgggagcaactcgcacgggatcgcagccgcttcgctcggaggattacccaggcgcaggaagaacttagtccgtgcctgactccagccgctagggctcgggcttgggccaggcttagaaatcccccattggctcctatccctgctttaactcagacattgccttcaagcagcgtgccatcctcccctgtccagaccactccattgagccaggcagtggcaacaccctcgcgctcttcggccgctgctgctgccgctctcgacctctccgggagaaggggatag

SEQ ID NO: 30326 - DNA, 1899 bp, synthetic construct
  misc_feature 1..1899: note = Description of Artificial Sequence: Synthetic coding sequence
  source 1..1899: mol_type = other DNA
atgccatggctcgtagaggctgtaaagggcgctgctctggtggaagccggattggagggcgaagcacggacgcctctggccatcccacataccccgtggggacgacggccagaagaggaggcggaggattccggtggacctggggaagacagagaaaccctgggccttaagaccagctcctcattaccagaggcctggggcttactggatgatgacgacggcatgtatggcgagcgggaggcaacgtccgtgcccagaggacagggtagccagtttgctgacggacagagggcaccgctgtcgccttcactgcttattcgcactcttcagggctccgataagaaccctggagaagagaaagccgaagaagaaggagtggcggaagaagagggagtaaataagttctcataccccccaagccaccgggagtgctgccctgcagtggaggaagaagacgacgaggaggcagtcaagaaagaagctcaccggacctcgacaagtgctttgtcccctggatccaaacctagtacttgggtgagctgccccggagaggaagagaatcaggcaaccgaggacaagcgtacagagcgaagcaaaggcgcaaggaaaactagcgttagccctcggagtagtggaagcgaccccaggagctgggagtaccggtcgggggaagcatcagaggaaaaagaggaaaaggcacacaaggagacggggaaaggcgaggccgctccagggcctcagtctagcgcgccagcgcagcgcccacagctgaaaagctggtggtgccagccctcggatgaagaggaaggagaggtcaaggctctaggggctgccgagaaagacggtgaagctgagtgccccccatgcatcccgccaccctccgccttcctgaaggcatgggtgtattggcctggtgaggacacagaagaggaggaagacgaagaggaggatgaagatagcgatagcggttctgatgaggaagaaggcgaagctgaggcttccagctcgacccctgccaccggcgtctttttgaagtcgtgggtgtatcagcccggtgaggacacagaggaggaggaagacgaagactcagacactggtagcgccgaagacgagcgcgaggccgagacttcagccagcacgcctccggcaagcgcatttctcaaagcctgggtttacagacctggcgaggacacagaagaggaagaagacgaagacgtagactctgaggataaagaagatgactcggaggccgctctgggggaggcggagagcgacccccatccatcgcacccagaccagcgggcacatttcaggggttggggttaccgccctggtaaagaaaccgaggaagaggaagccgcagaggactggggcgaagcagaaccgtgtccatttagagttgcaatttatgtgccgggtgagaagccaccaccaccatgggctcctccaagactcccactccgcctccaacgacggctgaaaaggcccgagaccccaacgcatgacccagaccccgagacaccgctgaaagctaggaaagtgaggtttagcgaaaaggttacagtacacttcctggctgtgtgggcaggacccgcacaagcggctagacaggggccatgggagcagctggcccgagatcggtcgcggttcgccaggcggatcacacaggctcaggaggagctgtccccgtgcctcacaccggcagcccgtgctcgggcatgggccaggcttcgtaatcctcccctcgcccctattcccgcactaacacaaacgttgccttcttcttctgtccctagtagccctgtgcaaacgacacccttgtcccaggccgtggccacaccgagccggtcctctgccgctgccgcagccgctctcgatctttccggtcgcagaggctag

SEQ ID NO: 30327 - DNA, 1671 bp, synthetic construct
  misc_feature 1..1671: note = Description of Artificial Sequence: Synthetic coding sequence
  source 1..1671: mol_type = other DNA
atggcaggcgcttcagagcttgggaccggccctggcgctgcaggaggtgacggggacgacagcctttaccctattgcagtacttattgatgaactaaggaacgaagatgtgcagctccgacttaattcaatcaagaagctcagcacaatcgccctggccctgggagttgagagaacccggagtgagctcctgccatttctgactgacacaatctatgacgaagacgaagtgctcctggccttggccgagcagctcgggaacttcaccggcctcgttggtggtcctgacttcgcccactgtctgctaccccctctggagaacttagcgaccgtggaggaaaccgtcgtgcgggataaggccgtggagagccttagacagatttcacaggagcacactcccgtggctctggaggcatacttcgtgccactggtgaagaggctggcctcaggagactggtttacttcgagaacttcagcctgtgggctctttagtgtgtgttatcccagggcatctaatgcagtgaaagcggagataaggcagcagtttagaagtctgtgtagtgatgatactcctatggtacgtagagccgcagcctcaaagctcggcgagttcgccaaggtactggagctcgattctgtaaaatcagagatcgttccactatttacttctctagcctccgacgaacaagacagcgtgcgactactggctgttgaagcatgcgtatcaattgctcagctgctctcacaagatgatctcgagacactggtcatgcctactctgcgtcaagctgctgaagataaatcttggagagtcagatacatggttgctgatagattttccgagctgcagaaagcaatgggccctaaaatcaccctcaacgatctgatcccagcctttcagaatttgcttaaggattgtgaggccgaggtaagagcggctgctgcgcacaaggtgaaagagctgggagaaaatttgcccatcgaggatcgtgaaacaataatcatgaatcaaattctgccctacatcaagtgccccgatgtccgattgaatatcattagtaaccttgattgtgtaaatgaagtcatcggaatacgtcagctgtctcagtccttactcccagcaatcgtggaactcgccgaggatgccaagtggcgagttcgcctcgcgattatcgagtatatgccattgctggccggacagctgggggtcgaattctttgacgagaaactgaacagtctttgcatggcctggttggtggaccacgtgtacgctatccgggaagcagcgaccaataatctgatgaagctcgtccagaagttcggcaccgaatgggcccaaaacaccattgttcccaaggtcttagtcatggccaacgaccccaactacttgcaccggatgaccaccttgttttgtataaacgccctgagtgaagcctgcggtcaagagatcaccacgaaacagatgctgcccatcgtactgaagatggccggagaccaggtcgcgaacgttcgctttaatgtggctaagagtttgcagaagatcggacccatcttggataccaacgcattacagggcgaagtgaagccggtgctgcagaagcttggccaagacgaggacatggacgtgaagtacttcgcccaggaggccatctcagtgctagcactcgcgtag

SEQ ID NO: 30328 - DNA, 1770 bp, synthetic construct
  misc_feature 1..1770: note = Description of Artificial Sequence: Synthetic coding sequence
  source 1..1770: mol_type = other DNA
atggcagcggctgatggtgatgactccctttatcctatagctgtgctaattgacgaattacgcaacgaggacgtgcagcttcgactaaattcaatcaaaaaactctccacgatcgccctggctctgggggtggagagaactcgctccgaactgttgccttttcttacagataccatatatgatgaagatgaagtcttactggctcttgccgagcagttaggcactttcacgacccttgtgggaggcccagaatacgtgcactgcctgcttccacccctggaaagcctcgccaccgttgaagagactgtggtacgcgataaggctgtggagtctctgagggccatcagccatgagcactctccttctgatctggaggcccacttcgtcccactcgtgaagagactggccggtggggactggtttacatcccgcacaagcgcttgcggcctctttagcgtgtgctatccaagagtttcttcagctgtaaaagcagaacttcgacagtactttcgaaatctctgctccgatgacacacccatggtgcgcagggctgccgcttcaaagctgggcgagtttgcaaaagtactcgagctcgataatgtgaagtctgagatcattccgatgttctcaaacctcgcctccgacgaacaggattccgtcagactgctggccgtcgaggcttgtgttaatattgcccagctactcccccaagaagacctggaggctttagttatgccaactctgagacaggccgctgaagataaaagctggcgcgttcggtacatggttgctgataaattcacagaactgcaaaaagctgttggtccagaaatcactaagactgacctagtacccgctttccagaatctgatgaaagattgcgaggccgaggtgagggccgcagcttcccataaggtgaaggagttttgtgaaaatttgagcgcagactgtagagaaaatgtgataatgagccagattctgccctgtattaaggagctggtttcggacgcaaatcagcatgtcaaaagcgcactggcatcggttatcatgggactctcacccattctcggcaaggataatactatcgagcatttgctaccattattcttggcccagctcaaagatgagtgccctgaggttcgcctgaacatcatatccaatctcgattgcgtgaacgaagtcataggaatacgccagctttcgcagtctcttctaccagctatcgtggagcttgcggaggacgccaaatggcgagttagactagctatcattgaatacatgcctctgctggctggacagttaggggtggaatttttcgatgagaagctgaacagtctgtgtatggcatggctggtggaccacgtctatgccataagggaggccgctaccagcaatttgaagaaacttgtggagaaatttgggaaagaatgggcacacgcaaccattattccgaaggtgttggctatgagcggcgatcccaactacctacaccgaatgacaacactattctgtataaacgtgttgtccgaagtgtgtggccaagacattaccaccaagcatatgctgcccactgtgctgagaatggccggtgaccccgtggcaaacgtgaggtttaacgtcgcgaaatcactgcagaagatcggaccgatcctagataatagtaccctccaaagtgaagtgaagcccattctggagaagctcacacaagatcaggatgttgatgtcaaatacttcgcgcaagaggctcttaccgtgctgtcgctggcttag

SEQ ID NO: 30329 - DNA, 1740 bp, synthetic construct
  misc_feature 1..1740: note = Description of Artificial Sequence: Synthetic coding sequence
  source 1..1740: mol_type = other DNA
atggctgctgccgatggggacgactctctctacccgatcgcagtgctcattgacgagctgagaaatgaagatgtgcagctgagacttaattccatcaaaaaattgtccaccatagccctggctctgggtgtggagaggactagaagcgaactactgccctttctgactgacaccatctacgacgaggacgaagtcttactagctttggctgaacaattgggaacattcacaaccctggtggggggacccgagtatgtgcactgcctgcttccccctcttgaaagcctcgctaccgtggaaagcctgagagctatatcacacgaacacagcccttccgacttggaggcccactttgttccactcgtaaaacgccttgccggaggtgactggttcacctctagaacttctgcttgtggccttttttccgtgtgttacccacgggtgagttcggctgtgaaagccgagttgcgccagtacttccggaacctgtgcagcgacgacacccctatggtgcggagagccgctgcttcgaagctgggggaatttgcaaaagtacttgagctcgataatgtgaagagcgagataatccctatgttctcaaatctggcttccgacgagcaggattctgtccgcctgctcgcggtggaggcctgtgtgaatattgcccagctgctgccccaggaagacctggaagccctcgtgatgccgaccttgagacaggccgctgaagacaaatcttggcgagtgaggtacatggtagcggacaaattcacggaattacagaaagcagtaggcccagagataaccaaaacagatctcgtgccagcttttcaaaatctgatgaaagactgcgaggctgaagtgagggccgcagcaagccacaaggtgaaagagttttgcgagaacctgagcgcggactgtagagagaacgtgattatgtcccagatcttgccttgcatcaaagagctggtctccgacgcgaaccaacacgtgaaatccgccctcgcctctgtgattatggggctgagccctattcttggaaaagataacactatcgaacacctgcttcctctgtttttggcccagcttaaggatgaatgcccggaggtcaggcttaatatcattagtaatttggactgcgtgaacgaggtgatcgggatccgccagctgagccagtctttattacccgctatcgtagagttggctgaggatgctaaatggcgcgtacggctggccatcattgaatacatgccactcctcgcaggccagctgggagtggagttcttcgacgagaaactgaactccctctgcatggcctggcttgtcgaccacgtgtacgccattcgcgaggccgctactagtaatttgaagaaattagtggagaagttcggcaaggagtgggcccatgccactatcattccgaaagtcctggccatgagcggagatcctaactatttacacagaatgacgacgctcttttgtatcaacgtcctaagcgaggtgtgtggtcaagatatcaccactaagcatatgctgcctaccgttttaagaatggctggtgaccccgtcgccaatgtgagattcaacgtggcaaaaagcttgcagaaaatcggccctatcctggacaattccaccctgcaatccgaggttaagcctatactggagaaactcacgcaggaccaagacgtcgacgtaaagtatttcgcccaagaggccctgacagtgcttagtcttgcctag

SEQ ID NO: 30330 - DNA, 471 bp, synthetic construct
  misc_feature 1..471: note = Description of Artificial Sequence: Synthetic coding sequence
  source 1..471: mol_type = other DNA
atggcagccgcagacggggacgatagtttatacccaatagcggttcttattgatgaattacgcaatgaggatgttcagctccgcctaaactctaacctgaagaaattagtggagaagttcgggaaggaatgggcccatgctactatcattcccaaggtcctggcaatgagtggggatccaaattatcttcacagaatgaccaccctattttgcattaatgtcttaagcgaggtttgcggccaggacatcaccacaaagcacatgctgccaaccgtgctgcgaatggcaggagatcccgttgccaatgtgaggttcaatgttgcaaaatcgttgcagaaaatcggacctattcttgataatagtaccctgcaatccgaggtgaagcctatcctcgaaaaacttactcaggaccaggatgtggatgttaaatattttgcgcaagaagcattaacagtcctctccctggcctag

SEQ ID NO: 30331 - DNA, 1605 bp, synthetic construct
  misc_feature 1..1605: note = Description of Artificial Sequence: Synthetic coding sequence
  source 1..1605: mol_type = other DNA
atgcgaacgttctcatttgcaagtacagccagccgaagctgtccgccatctccttggcccttgggactgaagggccctgaagtctcgttctgtcttagccttcagccccctctggaaagtctggccacagttgaggaaaccgtggtgagagataaagccgttgagtctctgagagcaatatcacatgagcacagtccatctgatcttgaagctcatttcgtacccctcgttaagagactcgcgggaggagactggtttacctcacgtacgtcagcctgtgggctgttcagtgtttgttaccccagggtgagctctgccgtcaaggccgagctgcggcaatatttccgcaatctctgttcagatgacacacccatggtcaggagggccgctgcaagcaagctgggtgagttcgctaaagtgctcgaactggacaacgtgaaatctgaaattatcccaatgttcagtaacctggcaagcgatgaacaagactcagtgagactgcttgcggttgaggcctgtgttaatatcgcccagcttctgcctcaggaggatctggaggcattggtcatgcccactctgcgacaggcagcagaggataagagctggcgtgtgagatacatggtggcagacaagttcactgagttgcagaaggctgtgggccctgaaataactaaaactgatctggtccccgcttttcaaaacctcatgaaggattgcgaggcggaggtcagagcagctgcatcccacaaggtaaaagagttctgcgagaacttatctgcggattgtcgggaaaacgtcatcatgtcacagatcctcccttgcattaaagagctcgtgagtgatgcaaatcagcatgttaagtcagcactggcgtcagttattatggggctgtctcctatcctagggaaggacaacacaatcgaacatctgctgccattgtttcttgcccagcttaaagatgagtgcccagaagtgagactaaatatcatctcaaatttggactgtgtcaatgaggtgatcgggatccgacaactcagtcagtccctgctccccgctattgtggaactggcagaggatgccaaatggagggtgcgcctcgcgattattgagtacatgcccttgttagcaggtcaacttggggtcgaatttttcgacgagaaacttaattccctttgtatggcttggctggtggatcacgtttacgcaataagagaggccgcaacttccaacttgaaaaagctcgtagaaaaattcggaaaggagtgggcacacgctacaattattcccaaagtgctggccatgtcgggggacccaaattacctgcacaggatgactacgttattttgtataaatgtgcttagcgaagtatgcggtcaggacattacgaccaaacacatgctgccgacagttctgcgcatggcaggagaccctgttgctaatgtgcgcttcaacgtggctaaaagcttacagaaaattggaccaatcctggacaacagcaccctccagtctgaggtgaagcctatcctcgaaaagctcacacaggaccaggacgtggacgtgaagtacttcgcccaagaggccttgaccgtcctttccctcgcatag

SEQ ID NO: 30332 - DNA, 2004 bp, synthetic construct
  misc_feature 1..2004: note = Description of Artificial Sequence: Synthetic coding sequence
  source 1..2004: mol_type = other DNA
atggccggagcaagcgaactgggaaccggccctggtgccgctggcggtgatggagatgattctctgtatcccattgccgtcctgattgacgagctgcggaacgaagacgtacagttgagacttaacagcatcaagaaactgagcacaatcgccttggcgctgggggtggaaagaacgcgctctgaactgcttcccttccttaccgatacaatttacgacgaggatgaagtgctcctggcgctggccgagcagctgggtaacttcacgggtctggtgggaggacccgactttgctcattgtttgctacccccacttgagaacctggccaccgtggaagaaaccgtggtgcgggataaggccgtcgaatcgctcagacagattagtcaggaacatacgcccgtagccctggaagcatattttgtgcccctcgttaagcgcctagcaagcggcgattggttcacaagcaggacatctgcctgcggactgtttagtgtttgctacccgagagcaagcaatgccgtaaaagctgagattcggcaacaattccgctctctctgttcagacgatacacctatggtgaggcgagccgctgcttcaaagcttggcgaatttgcaaaagtgcttgaacttgactctgtcaaatctgagatcgtacccctttttacaagcttggccagcgatgagcaggacagcgtcagactgctcgctgtggaggcctgcgtgtccatcgcccaactgttgtcccaagacgatctagaaaccttggtcatgcccacccttcgacaggccgctgaggataagagctggagagtgcggtatatggtcgctgatagattcagcgagctccagaaggcaatgggccctaagattaccctgaacgatctgatcccagccttccaaaatttgctcaaagactgcgaggccgaagtgagggctgccgctgctcacaaagtgaaagaactgggggagaatctccctatagaggacagagagaccattattatgaatcagattttgccgtatattaaggagttagtctcagacacgaatcagcacgtcaaaagcgccctggcatccgtgatcatggggctgtccacaattctgggaaaagagaataccattgagcatttgctccccctgttcttggctcagcttaaggacgagtgtcccgacgtccgactaaatataatttctaacctagattgcgtgaacgaggtcatcggtatacgccagctatctcaatctttattgcctgcaatcgtcgaactcgctgaagatgccaaatggcgcgtacggctggcaattatcgagtatatgcctctcctcgcaggtcaactgggtgtggaatttttcgatgagaagctgaacagcctctgcatggcatggcttgttgatcatgtgtatgctattcgcgaagcagccaccaacaatttgatgaagcttgtccaaaaatttgggaccgagtgggcccaaaatacgattgtgccaaaggttttagtgatggctaatgaccctaattatttgcatcgtatgaccaccctcttttgcattaacgcactaagtgaggcatgcggccaggaaatcactactaagcagatgctgcctatcgttctaaaaatggccggagatcaggttgccaatgtcaggtttaacgtagccaagagtctgcagaaaatcggacctattctcgataccaatgcactgcagggcgaggtgaagcccgtgctccagaaactaggccaggacgaggacatggatgttaagtatttcgcccaagaggcaataagcgtggtagcccagcggcttcggaagctggagtttcctgtcaaagactccggcgagccaagtgtgccccgagccgataaaaaccactttcccagacccactgtccccggagaggatatgggaaaagggcctgtttaccagctgcggggtgacacccgagatacacttgcccagctcggcatcgccgagctggtgcactttagccagtcgaccgactag

SEQ ID NO: 30333 - DNA, 1425 bp, synthetic construct
  misc_feature 1..1425: note = Description of Artificial Sequence: Synthetic coding sequence
  source 1..1425: mol_type = other DNA
atggccggtgcctctgagctcgggaccggccctggagccgctggcggagatggtgatgactcactttaccccatagctgttctgatcgacgagctccggaacgaggacgtgcagttgagattaaacagtattaagaagctttccactatagcacttgcgctcggggttgaacgcaccagaagtgaattgctcccatttctcactgacacaatctatgatgaggacgaggtactcttagcgttagcagagcaactggggaacttcacagggctggtaggcggtccagacttcgcccactgccttttggactccgtacggctcctcgccgtggaggcctgcgtgagcatcgcacaattactgtcccaggacgacctggagaccctggtgatgcccacattacgccaagccgctgaagacaaatcatggcgggtgcggtacatggtcgccgatcggttttcagagctgcagaaggccatgggacccaagattacactcaatgacctcatccctgcgtttcaaaatctcttgaaagactgcgaggccgaggtacgggcagctgccgctcacaaagtgaaggaacttggcgagaatctcccaattgaggaccgggaaacaatcataatgaatcagattctcccctacatcaaggagctcgtgtctgatactaaccagcatgtaaaaagcgctctggccagtgtaatcatgggcctgtccacaatcctggggaaggaaaacaccatagagcatttgctgcccttgtttcttgcccagctgaaggatgagtgcccggatgtgcgcctgaacatcataagcaacctggattgtgtgaatgaggtgattggtatacggcaactttctcaatctctgcttccagccatcgtggagctggcagaggatgctaaatggcgtgtaagattggcaatcattgagtatatgcccttgttggcgggtcagttgggcgtggagttcttcgacgaaaaattaaactcactctgtatggcttggcttgtggaccatgtctatgccattcgagaagcagccaccaataatcttatgaaactagtacagaagttcggaactgagtgggcccagaatacaatcgtgcccaaggtattggtaatggcaaacgatcctaactatcttcatcggatgacaacgctcttctgtataaacgctttgagtgaggcgtgtgggcaggaaattaccactaagcagatgctgccaatagtgctcaagatggcaggcgaccaggtcgcgaatgtccgtttcaacgtggccaagtcactccaaaaaattggcccaatactcgacacaaatgccctgcaaggggaggttaaacccgttctgcagaagctgggacaggacgaagatatggatgtcaaatactttgcccaggaggctattagcgtgctggcgctggcttag

SEQ ID NO: 30334 - DNA, 1365 bp, synthetic construct
  misc_feature 1..1365: note = Description of Artificial Sequence: Synthetic coding sequence
  source 1..1365: mol_type = other DNA
atggcgggagcctccgagttaggcacggggccaggcgctgccggtggagatggagatgattctttatatcccatcgccgtgttaattgatgagctgcggaacgaggacgtccagcttcggctgaatagtatcaagaaactgtccaccatagcattggccttgggagtcgaaagaactagatcggaattgttaccctttctgactgataccatttatgatgaggacgaagtgctcttggctctcgccgagcagcttggcaatttcactgggctggtaggtgggcctgatttcgcgcactgtctactggactccgtacggctgcttgctgtggaggcctgcgtctcgatcgcccagctgctcagtcaggacgatctcgagaccctagtgatgcctaccttgcgtcaggccgcagaggacaaatcctggcgggtgaggtatatggtagccgaccgcttctctgaactccaaaaggctatggggccaaagattactttgaacgacctgatcccagcttttcaaaacctgcttaaggactgtgaggctgaggtgcgggctgccgcagcacataaagtcaaggaactcggcgagaatctcccaattgaggaccgcgaaaccataatcatgaatcagatcttaccctatatcaaggagcttgtgagcgacactaaccagcatgtcaaaagcgcactggccagtgttataatggggttgtccactatcctaggaaaagagaacaccatcgagcatctgctcccgctgtttctggcacagttgaaggatgagtgtcccgacgtcaggctgaacataatatctaacttggattgcgtgaatgaggtaatcggtattagacagctgtcccagtctctgcttcccgctattgtagaactcgctgaagacgcaaagtggagggtgagattggcaataatcgaatacatgcctttgctagcaggccagttgggggttgagttttttgacgaaaagttaaacagtctatgtatggcctggttggtggaccatgtgtatgccattagggaggccgcaaccaacaatctcatgaagctggtgcagaaattcggaactgaatgggcccagaatactattgtgcccaaagtactggttatggcgaacgatccaaactacctccatcggatgactacactcttttgcattaacgctctgagcgaggcctgcggccaggaaatcactacgaagcagatgcttcctattgtcaagaatggcagaaggcccagtagtaaatgctctctgcagtgcggacaaatttcgactaaggactggactaatagtcgataccaatgctttaccggccgatccgaggccagcaccaccgaagtgcgttcgcgttag

SEQ ID NO: 30335 - DNA, 1812 bp, synthetic construct
  misc_feature 1..1812: note = Description of Artificial Sequence: Synthetic coding sequence
  source 1..1812: mol_type = other DNA
atggcaggcgcttccgagctgggaaccggccctggtgccgctggcggtgatggggatgattctctttatcctatcgccgtgctaattgacgagctgcgcaacgaggatgtacagcccccactggaaaatcttgcaaccgtggaagagaccgttgtcagagataaggccgtggaatcgctgcgccagatctcacaggaacacacccccgttgcccttgaggcttacttcgtccctttggtgaagagactggcaagcggcgactggtttacatcacgtactagtgcatgcggcctgttctccgtgtgttacccccgtgcgagcaacgccgtaaaggccgagattcgccaacagtttcgctccttatgcagcgacgatacccctatggtgcggagagccgcagcttccaagctgggcgagttcgccaaggtactggaactggacagcgttaagtcggagattgtgcctcttttcacgagcctggcaagcgacgaacaggactcagtgagactgctagcggttgaagcttgtgtgagcattgcgcaactgctgtcccaagacgacctcgagaccctcgtgatgccaactctcaggcaggcagctgaagacaaatcctggcgagtgcgttacatggtggccgataggtttagcgagctccagaaggccatgggcccaaagatcacactcaacgatttgatcccagcattccagaacctgctgaaggactgcgaagccgaggtgcgcgcagccgctgcccataaggtcaaggaactcggggaaaatctgcctatcgaggacagggagacaataatcatgaaccagatcctgccttatataaaggagctcgtgagtgacacgaatcagcatgtgaagagcgccttggcaagtgtgattatgggcctctctacaattctaggaaaagagaacaccatcgagcacttactgcccttgttcctcgcccaattgaaggacgagtgccctgatgtgcgactgaacattatatccaatctcgattgcgtcaatgaagtgattggaatccgacagctgtcacagtccctactgccggcaatagtcgaactcgctgaggatgccaagtggagggtccggcttgcgatcatcgagtatatgcctctgctggcgggtcagctgggcgtcgaatttttcgacgagaaactaaattctttgtgtatggcctggttggtggatcacgtatatgccattagggaggctgcaactaacaaccttatgaagctggttcaaaaatttgggacggaatgggcccagaacactattgtgccaaaagtcttggtaatggccaatgaccccaactatctgcatagaatgaccacactgttctgtattaatgccttgtccgaagcttgtggtcaagagatcaccactaagcagatgttgcccatcgtgctgaaaatggcgggagatcaggtggcaaacgtccggtttaacgtggccaagtccctgcagaagattggacctatcttagatactaacgccctgcagggtgaagtgaaacctgtgctgcagaaactgggccaggacgaggatatggatgtgaagtacttcgcccaggaggccattagcgtggttgctcagaggctgcgaaagctcgaattccctgtaaaagactctggtgaaccctctgtcccaagggcggacaagaatcactttccacgcccaacagttccaggggaagatatggggaagggcccagtgtatcagctaaggggagacactagagatactctggcccagctcggcatcgctgagctcgtccatttttctcagagcaccgattag

SEQ ID NO: 30336 - DNA, 1323 bp, synthetic construct
  misc_feature 1..1323: note = Description of Artificial Sequence: Synthetic coding sequence
  source 1..1323: mol_type = other DNA
atgatgcagctcacattctggctgcgagtccctcccccatttagtcacttcaaacggcagtttagatccctatgttccgatgacaccccaatggtgcggagagccgcagccagcaagctgggggaatttgccaaagtcctcgaactcgattctgtcaaatcagaaattgttcccctgttcacgagtctggcctctgatgagcaggattcggtccggttgctggcagtggaggcctgtgtgagcatcgcacagctactgtctcaggacgatctggagactctggtgatgccaaccctgcggcaggcagctgaggacaagagctggcgggtaaggtatatggtagctgatcggtttagtgaactgcagaaagcgatgggcccaaagatcactttaaatgatctcatcccggcatttcaaaacctcctgaaagattgcgaggctgaggtgagagctgccgcagcccacaaggtcaaggagctgggagagaaccttccaattgaggacagggagactatcattatgaaccagattctgccctatatcaaagagctggtgtcggatactaatcaacacgttaagtcggctctggccagcgttattatgggactctcgacaattctagggaaggagaacaccatcgaacacctgttaccactcttcctcgctcaactcaaggatgagtgtcccgatgtccgcctgaatatcatttcaaatctcgattgcgtaaatgaagttatcggaatcaggcaactctcccagtcactgctcccagctatcgtagaattagcagaggatgctaaatggagggtccgcttggccataattgaatatatgcctctcttggccggtcaactgggtgtggaatttttcgacgagaagcttaattcgttgtgcatggcttggctggtggaccacgtatatgccatccgggaggccgcaaccaacaatctcatgaagcttgttcagaagttcgggacggaatgggcacagaacacaatcgtacctaaagtgctcgtgatggccaacgatccaaattacctgcacagaatgacaaccctgttctgtatcaatgcactgagcgaagcctgtggacaagagatcaccacaaaacagatgttacctatcgtgctgaagatggcaggagaccaagtcgctaatgtgaggttcaatgtggctaagagccttcagaagatagggcctatcctggatacaaacgccttacagggtgaggtcaaaccagtgctgcagaagctgggtcaggacgaagatatggacgtcaagtactttgcccaggaggccatcagtgtgttggccctggcctag

SEQ ID NO: 30337 - DNA, 1806 bp, synthetic construct
  misc_feature 1..1806: note = Description of Artificial Sequence: Synthetic coding sequence
  source 1..1806: mol_type = other DNA
atggcaggcgcttcagagctgggcacgggaccgggagctgcaggcggagacggtgacgattctctgtatcctattgcagtcctgatcgatgaattacggaacgaggacgtgcagctccgcctgaacagtatcaagaaactgtcaacgatcgcactcgcgttgggagtggagagaaccaggagcgagctgttgccgttcctgactgacactatctacgatgaggacgaagtcttgctcgccctcgcagagcagctagggaacttcactggtttggtgggcggaccagattttgcgcactgcctactccctcctctggagaacctcgccacggtggaggaaacagtcgtcagagataaagcagttgaatccctccgccaaatctcacaggagcacacacccgtggcgctggaggcgtactttgtcccactggtgaagcggttagcttctggagactggttcacaagcagaacctccgcctgtgggctgttcagtgtctgctatccaagagcctccaatgctgtgaaggccgaaattcggcagcaatttcgctctttatgttctgacgacacgcctatggtacggagggcagcagcatctaagctcggtgagttcgccaaggtactggaactagacagcgtcaagtccgagatcgtgccactgttcaccagtctggcatcagacgaacaggactctgtcagactcttggccgtggaggcttgtgtgagcattgctcagctgctatctcaggatgatcttgagaccctggtgatgccaacactcaggcaggccgctgaagataagagttggcgtgtccggtatatggtagcggatcggttcagcgagctacagaaggcaatgggacccaaaattacactaaatgatctaattcctgcctttcagaatctactgaaggattgcgaggctgaagttcgagccgctgctgcacataaagtgaaagagctgggagaaaatctgccaatcgaagatcgtgagacaataataatgaaccagattctgccttacatcaaggagctggtgagcgacactaatcagcacgtgaagagcgctcttgcttctgtcatcatggggctgtctaccattttggggaaagaaaataccatcgaacacctgctgcccctttttctcgcccagctgaaggatgagtgccccgacgtcaggctcaacatcataagtaatcttgactgcgtcaacgaagtaatcggcataaggcagttgtcccagtcactgctgccagcaattgtggaactcgcggaagatgccaagtggcgggtccggcttgcgattatcgagtacatgccgcttctcgctggtcagctcggcgtggagttttttgacgagaagctaaacagcttatgcatggcctggctagtggatcatgtgtacgccattagggaggctgccactaacaacctgatgaaactcgtacagaagtttgggacagaatgggcccaaaataccattgttccaaaggtgctcgtgatggccaacgatcccaattatctgcataggatgacaactctgttctgtattaacgctctatccgaagcctgtggtcaagagatcaccaccaaacagatgctcccgatcgtattaaaaatggccggagaccaggtagctaacgtgcgttttaacgtcgctaaaagcctccaaaaaattggacctatcttggacacaaatgctttgcagggcgaggtgaagcctgtccttcagaaactggggcaggatgaggatatggatgtgaagtactttgcccaggaggccatatctgtgttggcactggcctag

SEQ ID NO: 30338 - DNA, 1566 bp, synthetic construct
  misc_feature 1..1566: note = Description of Artificial Sequence: Synthetic coding sequence
  source 1..1566: mol_type = other DNA
atgagtgggagaagatttcatctgtcaactacagaccgggtgatcaaggctgtccccttcccccctacccaaaggttgactttcaaagaggtgtttgagaacggaaagcccaaagtcgatgtgctaaaaaatcacttggtcaaggaaggccgactggaggaagaagttgcgctaaaaatcattaacgatggtgccgcaatcctgcgacaagaaaagaccatgattgaagtcgatgccccaataaccgtttgtggagatattcacgggcagttctttgatctcatgaagcttttcgaagtaggaggatccccttctaacactagatacttatttctcggggattatgtagaccgtggttacttttcaatagaatgtgtgctctatctgtggagcctaaaaataaatcacccaaagaccctgtttctcctccggggaaatcacgaatgtcgccacctaactgactactttacgttcaaacaagagtgcaggattaagtattctgagcaggtgtatgacgcctgcatggaaaccttcgattgcctgccactggcagctctgttgaaccaacagtttttgtgcgtccacggaggtatgagccccgaaattacttccctggacgacattaggaaattggacaggttcacagaacctccagcatttgggcctgtctgtgacctcctgtggtctgatcccagcgaggactacgggaatgagaagactttagagcactacacccacaataccgtcagaggctgtagctacttttattcctaccctgcggtgtgtgaattcctgcagaataacaacctgttgtccattatcagggcacatgaggcgcaggatgccggataccgtatgtatcggaaatcccaagcaacgggattcccaagtctgattactatattttctgccccaaactacctagatgtatacaacaacaaggccgcagtgcttaaatacgaaaataacgttatgaatattaggcagtttaattgttcgccccacccgtactggttacccaacttcatggatgttttcacctggtccctgcctttcgtgggagagaaggttacagagatgcttgtgaatgtcctgaacatttgctcggacgacgaactgatctctgatgacgaagccgaggatcactatattcccagctaccaaaaaggcagcactacagtgaggaaggaaattatccggaataagataagggccattggaaaaatggcaagagtgtttagtattctacgccaggagtcagaaagtgtcttaactctcaagggacttacccctactggtactctgccgctaggagtgttatctggcggtaagcagaccattgagactgctacagtcgaagcagtggaggctagagaagccattcgtggtttttccctgcagcacaaaattaggagcttcgaggaagccagaggcctagatcggattaatgaaaggatgccccctcgtaaggatagcatccacgcagggggacctatgaaaagtgtcacaagtgcccatagtcatgccgctcatcgctcagaccagggtaagaaagcccattcatag

SEQ ID NO: 30339 - DNA, 1410 bp, synthetic construct
  misc_feature 1..1410: note = Description of Artificial Sequence: Synthetic coding sequence
  source 1..1410: mol_type = other DNA
atgtccgagcctaaagcaatcgacccgaagctaagcactaccgatcgagtggtgaaggcagttcctttccctcctagtcatcgactcacagctaaagaggtcttcgataacgatggtaagccccgagtggacatactgaaagctcatctcatgaaggaggggaggctggaggagtctgtggctttaagaatcatcaccgaaggcgcatcaatcctgcgccaggaaaagaatctgcttgacatcgacgcaccggtgacggtttgcggggatatacacgggcagttcttcgatctgatgaagctatttgaggtgggcggaagccctgccaacacaagatacttgttcctaggggactacgtggatcgcggatacttctcaattgagtgtgtcctgtacctgtgggcactcaaaatcctctacccaaaaaccctgttcctcctcagaggcaaccacgagtgccggcacctgactgagtacttcacgtttaaacaggagtgcaagatcaaatattcagagcgcgtatacgatgcctgcatggatgcctttgattgcttgccactcgcagccttgatgaatcagcagtttctctgtgttcatggcggtctatcccccgaaatcaacacactggatgatatccggaagttagaccggttcaaagagcctcctgcctatggaccaatgtgtgatatcttgtggagcgacccgttagaggatttcgggaacgagaaaacacaggaacactttactcacaatacagttcgcggatgtagctacttttattcataccctgccgtgtgcgagtttttgcagcataataatttattgtccattctccgtgcacacgaggcccaggacgctggataccggatgtataggaagagtcagacaaccggattccccagccttattacaatattcagcgccccaaactatctggatgtatacaataataaggtgactgaaatgctcgtgaatgtgttgaatatttgttcagatgacgaactgggatccgaagaagacggttttgatggcgctacagccgctgccagaaaggaggtgatacggaataagattagagctatcggtaaaatggcaagggtgttctcagtattacgcgaggaatcggaatctgtattgaccttgaagggtctgacccctaccggtatgctgccatccggagtcctgtctggcggaaagcaaactctgcagtctgcaatcaaaggattttcccctcagcataagataacttcattcgaggaagccaagggtctggatcggattaacgagcgaatgccccctcgcagggacgcaatgccttcagacgcgaacttaaattccataaataaagccttaacctctgagactaacggaacagattctaatggctctaattccagcaacattcagtag

SEQ ID NO: 30340 - DNA, 1536 bp, synthetic construct
  misc_feature 1..1536: note = Description of Artificial Sequence: Synthetic coding sequence
  source 1..1536: mol_type = other DNA
atgtccgaacccaaagccattgaccctaaactgagtacgactgatagggtcgtcaaggcggtgccctttcccccaagccaccgtcttacagcaaaagaggtgttcgacaatgatggaaagcctagagtcgatatcctaaaggctcacctcatgaaggagggcagactcgaggagtcggtagctctgagaattatcacagagggcgcatctatattacggcaagaaaaaaatctgctggatatcgatgccccagtaacggtctgcggcgacatacatggccagttcttcgatctgatgaagttgttcgaagtgggtggctcacccgctaacacgaggtacctcttcctcggtgactatgttgatagggggtacttctctatcgagtgtgtcctctacttgtgggctctgaagatcctctacccgaaaacactgtttttgctgaggggaaatcatgaatgccggcatttgaccgagtactttacattcaaacaggagtgcaagataaagtattccgaaagagtctacgacgcgtgcatggacgcttttgactgccttccacttgccgctcttatgaaccaacagtttctgtgtgtccatggagggctgagccccgaaatcaatactcttgacgatataaggaagctcgaccggtttaaagagcctcctgcctacggacccatgtgtgacatcttatggagcgaccccctcgaggactttggcaatgagaagacccaggaacactttacacataataccgtgcggggatgctcttatttctatagctacccagctgtgtgtgaattcctccagcataataatttgctatccatcctgcgcgcacatgaggcccaggacgcagggtatagaatgtatagaaaaagtcagactacaggttttccctcgctaatcaccatttttagcgcacccaactatttagatgtgtacaataacaaagctgccgtcctgaagtacgagaacaatgtgatgaacatcaggcagttcaattgttcgccacatccctattggctgccaaactttatggacgtgtttacttggtctctgccttttgtgggagagaaagttacagaaatgctggttaatgttctgaatatctgcagcgacgatgagcttggatcagaagaagatggcttcgatggagccactgcggcagccaggaaggaggtgattcgaaataagattagggccatcgggaagatggccagagtgttcagtgtgctgagagaagagtccgaatccgtgctcaccctgaagggactgacacccacagggatgttaccaagcggcgttctctctggcggaaagcagacactgcagagtgctattaagggattcagcccgcagcacaaaatcaccagctttgaggaagcaaagggattagaccgaattaatgagcgcatgcccccaagaagagatgccatgcctagtgacgcaaacctgaattccatcaataaagccctaacgagtgaaacaaacggcactgatagcaatggatccaattcttccaacattcagtag

SEQ ID NO: 30341 - DNA, 1566 bp, synthetic construct
  misc_feature 1..1566: note = Description of Artificial Sequence: Synthetic coding sequence
  source 1..1566: mol_type = other DNA
atgagtgagcctaaggctatcgaccccaagttatccacaactgatagagtggtcaaagcagtcccatttccgccttctcaccgcttgactgccaaagaggtcttcgacaacgatggaaagccaagggttgatattctgaaagcccatttgatgaaggagggccgtctggaagagtcagtcgccctgcgcattatcacggaaggggcttccattctgcggcaagagaaaaatctgcttgacattgacgcgccagtgaccgtgtgcggggacatacatggacagttctttgacctaatgaagttattcgaggtcggtggctcccccgcaaatacaagatatctgttcctcggtgattacgtggataggggttactttagcatcgagtgcgtgctgtatctttgggcgcttaaaattctttaccctaagaccttatttctgctgcgtggaaaccatgaatgtcgacacctgactgaatactttacgtttaagcaggaatgtaaaattaagtattctgagcgtgtgtacgatgcctgcatggacgcattcgactgtctacctctagccgctcttatgaatcaacagtttctgtgcgtacatggcggactgtctcctgaaatcaatacgctcgacgatattagaaaactggatagattcaaggagcctcctgcctacggacctatgtgcgatatactctggtctgacccgttagaagactttgggaacgagaagacacaagagcactttactcataacaccgtccggggatgttcctacttctattcctacccagcggtttgtgaattcttgcaacataataacctgctcagcatcctgagagctcacgaggcccaagatgccggatataggatgtacagaaaaagccaaaccacaggctttcccagtctcattaccattttctcagcgccaaattatctggatgtatataataataaggctgccgtgctcaagtatgagaacaacgtcatgaatataagacagtttaattgctccccccacccatactggctccctaattttatggacgtgtttacttggagcctcccttttgtgggcgagaaggtgacagagatgttagtgaacgttctgaacatatgtagtgatgacgaactgggctctgaggaggacggtttcgatggtgccaccgccgctgctagaaaagaagtgattcgcaacaaaattcgcgctatcggcaaaatggccagagtctttagcgtgctaagagaagagtctgagagtgtcctcaccctaaagggactcactcccacaggcatgctgccttctggggtcctcagtggaggtaagcagaccctacagtcagctaccgtggaggcaattgaagctgacgaggctattaaggggttctctccacagcacaagattacaagcttcgaggaggcgaagggcctggaccgcatcaacgagcgcatgccgccacgcagggacgctatgcctagcgacgccaaccttaactctattaacaaggccctcaccagcgaaactaatgggacagattccaacggatctaattcgtcaaacatacagtag

SEQ ID NO: 30342 - DNA, 1272 bp, synthetic construct
  misc_feature 1..1272: note = Description of Artificial Sequence: Synthetic coding sequence
  source 1..1272: mol_type = other DNA
atgaagctgttcgaggttgggggtagccctgctaatacaaggtacctgttcctcggggattatgtggacagaggctatttttccatcgagtgcgttttgtatttatgggccctaaagatcctctaccctaagaccctgtttctgttgagaggaaatcatgaatgccgtcatttaactgagtatttcactttcaaacaggagtgcaaaattaaatacagtgaacgggtgtacgacgcctgcatggacgcatttgattgcctgcccctggctgctctcatgaatcagcagttcctttgcgtgcatggcggattgagccccgagattaacacattagatgatatccgcaaactcgatcggtttaaagagccccctgcctatggacccatgtgcgatattctgtggtccgacccactcgaagacttcggcaacgagaaaacccaagaacactttacccacaacacagttcgtgggtgctcctacttctactcttaccccgcagtgtgcgaatttctccaacacaacaatttgttgtctatactgcgggcacacgaggcccaagacgccggttaccgaatgtataggaagagccagaccactggatttccctctctcataaccatcttcagcgctcctaactaccttgacgtgtacaacaacaaggcagctgtgctgaaatatgagaacaatgtcatgaatatacgtcagtttaactgcagtccccacccgtattggctgccgaactttatggatgtcttcacctggtctctccccttcgtgggcgagaaggtgacagagatgttagtaaatgtcctaaacatttgtagcgacgatgaactggggtccgaagaagatgggtttgatggggctacagctgccgcaagaaaagaagtgattcgcaacaaaattcgggcaattggcaagatggctcgcgtgttcagtgtgttgcgcgaagagtcggaatcggttctcacccttaaaggacttaccccgaccggaatgctacctagcggcgttctgtccgggggaaagcagactttgcagtcagccacagtggaggccattgaggcagatgaggccatcaagggattttcaccccagcataagattacctcgttcgaggaagcaaagggcctggacagaatcaacgagaggatgcccccacgtagagacgccatgccatccgatgctaatttgaattcaatcaacaaggccttgacatctgaaacgaacggtaccgactctaatggaagcaacagctccaacatccaatag

SEQ ID NO: 30343 - DNA, 870 bp, synthetic construct
  misc_feature 1..870: note = Description of Artificial Sequence: Synthetic coding sequence
  source 1..870: mol_type = other DNA
atgagcgagccaaaagcaatcgatccaaagctgtccaccaccgatagagtcgtcaaggctgtaccatttcctccatcacacaggctgacggcaaaggaggtgtttgacaacgatggtaagcccagggtggacatcctcaaggcccatctaatgaaagaaggaagattggaagagtccgttgcccttagaattattacagagggggcttcgatcttgagacaagagaagaacctgcttgatattgatgcaccagtcactgcggcagtgctgaaatacgagaacaatgtgatgaatattaggcaattcaactgctccccgcatccgtattggctgcccaacttcatggatgtcttcacctggagcctgcctttcgtaggcgagaaggttacagaaatgcttgtgaatgtgctgaatatctgtagcgatgatgagctggggtccgaggaagacgggtttgacggggcaactgctgcggctaggaaggaagtgataagaaataaaatccgcgctataggaaagatggcacgcgtattttcagtgctgcgcgaagaaagtgaatccgtgctgaccctgaaaggactcacgcccaccgggatgctgcccagcggagtgctgagtggaggtaaacaaacgctacagtccgctacagtggaagctatcgaggccgacgaagccattaagggattcagcccccagcacaaaatcactagcttcgaagaggccaagggcctagatcgcatcaacgagaggatgcccccaaggcgggatgccatgccttccgacgccaatctgaattcgattaacaaagccctgacctctgaaaccaacggtacagactcaaatgggtctaatagctccaatatacaatag

SEQ ID NO: 30344 - DNA, 1365 bp, synthetic construct
  misc_feature 1..1365: note = Description of Artificial Sequence: Synthetic coding sequence
  source 1..1365: mol_type = other DNA
atgtcggagccaaaagccattgatccaaagctttccacaaccgatagggtagtcaaggtatgtggagacattcatggtcagttctttgacctgatgaagctgttcgaggtgggcggttctcccgcaaacacacggtacctgtttttgggcgactacgtcgatcggggatattttagtatagaatgcgtcctctacctgtgggctttgaaaatcctctatcctaaaaccctcttcctgctacgcggaaaccatgagtgtcggcacctgacagaatacttcacgtttaaacaagaatgcaagatcaagtatagcgaacgggtgtacgatgcttgcatggacgcttttgactgtctgcccttggcggctctgatgaatcagcaattcctctgcgtgcatgggggtctttcaccagagataaacacattggatgatattcggaagctcgacagattcaaggagcctccagcctacggcccaatgtgcgatatcttatggtccgatcccctggaggattttggtaacgagaaaacacaggagcatttcactcacaacactgtacggggttgttcttacttctacagctacccggcagtctgtgagtttttacagcacaataacctgctcagcattttgagggcccatgaggcccaggacgcaggttatcggatgtacaggaaatcccagaccaccgggttcccttctctcattacgattttttctgctcctaattatttagacgtgtacaacaacaaagctgctgtgctcaagtacgagaataatgtgatgaacatcaggcagtttaattgtagcccccacccctattggttacccaatttcatggacgttttcacctggagcctcccttttgtgggagagaaggttacagaaatgctggtgaatgtcttaaatatctgcagtgatgatgagctgggttccgaggaggatggatttgacggtgccacagctgccgcacggaaagaggttattcgaaacaaaatacgggctattgggaaaatggcccgagtattcagcgtactccgtgaggaatctgaaagtgtattgacgctcaaaggcctgactcccaccggaatgttgcccagcggcgttctgagcggcggaaaacagacactgcagagcgccactgttgaggcaatcgaggctgatgaggcaattaagggtttttcaccgcaacataagatcacgagctttgaagaagccaagggccttgataggataaacgagaggatgccccctcgccgtgatgccatgccgtctgacgccaacttgaatagtattaataaggccctgaccagcgagacaaacggcaccgactcaaacgggtccaacagctccaatatccagtag

SEQ ID NO: 30345 - DNA, 399 bp, synthetic construct
  misc_feature 1..399: note = Description of Artificial Sequence: Synthetic coding sequence
  source 1..399: mol_type = other DNA
atgaaggagggacggctggaggaatctgtcgcattgagaattatcaccgaaggggcatcgattctcaggcaggaaaagaatctcttggacattgatgcacccgttaccgtctgcggcgacatccacggccagttcttcgatctcatgaagctgtttgaggtcggcggttcccccgcaaacacccgctatctgtttttaggagattatgtcgaccggggatattttagcattgaatgcgtgttgtacttgtgggccctgaagatactatacccaaagaccctgtttttgttgcggggaaatcacgaatgcagacacctaactgaatactttaccttcaaacaggagtgtaagataaaatactctgagcgggtgtatgatgcctgcatggacgccttctag

SEQ ID NO: 30346 - DNA, 444 bp, synthetic construct
  misc_feature 1..444: note = Description of Artificial Sequence: Synthetic coding sequence
  source 1..444: mol_type = other DNA
atgaaagaggggcgtctggaggagagcgtggccctgaggatcatcaccgagggggcttcaattcttagacaggagaagaatcttctggacattgacgctcctgtgaccgtgtgcggggatatccacggtcaattctttgatctaatgaagctctttgaagtggggggtagccccgcaaatacgagatacctgtttctcggggattatgtggacaggggctacttctcaattgagtgtgtgctatacctgtgggccctgaagatcctctatcctaaaacgttattcctcctccggggaaatcacgagtgccgtcatttaacagagtacttcacattcaagcaggagtgcaagattaagtattctgagagagtctatgacgcctgtatggatgctttcgactgcctgccactagccgcactgatgaatcagcaatttctgtgctag

SEQ ID NO: 30347 - DNA, 1491 bp, synthetic construct
  misc_feature 1..1491: note = Description of Artificial Sequence: Synthetic coding sequence
  source 1..1491: mol_type = other DNA
atggcagcacccgagcccgcaagggctgctccccctccccctcctccaccgcctccccctccaggagccgatagagtcgtgaaggccgtgccatttccccctacacacaggctaacatctgaggaggtgtttgacctagatgggatacccagggttgatgtcctcaaaaaccacctggtaaaagagggcagagttgatgaagagattgccctgcgaatcatcaatgagggggctgcaattctaaggagggagaaaacgatgattgaagttgaggccccaataaccgtctgcggtgatatccatggccagttcttcgacctaatgaagctcttcgaggtgggcggaagccctgccaatacgcgctacctctttcttggtgattatgttgacagaggctacttctcaattgagtgcgtcctttatttatgggtgctaaaaattctctatccctccacattgtttctgcttaggggcaatcacgagtgtcggcatctgacggaatacttcactttcaaacaggaatgtaaaatcaaatacagcgaacgagtctacgaggcctgcatggaggcttttgattccctccccctggctgctcttttaaaccaacagtttctctgcgtgcacggcggattgtcgcctgaaatccatactctcgatgatataaggcgtctcgacagattcaaagagcctccggctttcggacctatgtgtgatttgctgtggtctgacccaagtgaggacttcggtaacgagaagagccaggagcatttttctcacaatactgtcagggggtgttcctatttttataattatcccgcagtatgtgagttcctgcagaataacaacctgcttagcatcataagggcacacgaggctcaggacgcgggttaccgtatgtatcgtaaatcccagaccaccggctttcctagccttattactatattctcagcccctaattaccttgacgtttataataacaaggctgctgtgctgaaatacgaaaataacgttatgaatatccgacaatttaattgctccccccacccgtattggctcccgaactttatggacgtcttcacctggtctctgcccttcgttggggagaaagtgacagaaatgctggtgaacgtgcttagcatctgttctgacgatgagctaatgactgaaggagaggaccagtttgacggaagcgctgcagccaggaaggaaataatccggaataaaatccgagctattggaaagatggccagagttttttctgtgctgcgagaggagagcgagagcgtgctgacactgaaggggctcacacccacaggaatgcttcctagcggcgtgctcgccggtggccgacagaccctccagagcgggaatgatgtgatgcagctggcagttccgcagatggattggggtactccccattcctttgccaataattctcacaacgcttgcagagaattcctcctgtttttctcatcctgcttatcgtcatag

SEQ ID NO: 30348 - DNA, 1575 bp, synthetic construct
  misc_feature 1..1575: note = Description of Artificial Sequence: Synthetic coding sequence
  source 1..1575: mol_type = other DNA
atggctgctccagagccagcacgcgctgctccaccacccccaccgccaccgccaccccctcctggtgccgatcgcgtggtgaaagctgtgccttttcccccaactcatcggctaaccagcgaggaggtattcgacttggacggtatacccagggtagacgtactgaagaaccacctggttaaagagggcagagtggacgaagagatcgcactgagaattatcaatgaaggggctgcaattctacggagagaaaaaactatgatcgaggtggaggctcctatcaccgtatgtggtgacatccatggacagttcttcgacctgatgaaactgttcgaggtgggcggatctcccgctaatactagatacctgttcctgggggactacgtggatcgtggctattttagtatcgagtgtgtgctgtatctgtgggtgctgaaaatcctgtatccatcaacgttattcctcctccgcggtaatcacgagtgcagacacctgacggaatatttcacattcaaacaggagtgcaaaatcaagtattctgagagagtgtatgaggcctgcatggaggcattcgacagcctgcctctggctgctctgttaaatcaacagtttctatgtgtccacggcggactctctccggaaatccacaccctcgatgatatcaggcgactggatcgttttaaggagccgcctgccttcgggcctatgtgcgacttactctggtctgacccctcagaagatttcggtaatgagaaaagccaggaacatttttctcataacacagtgcggggatgctcttatttttataactatcccgcagtgtgcgagtttttgcaaaataacaatctcctgtccatcatccgcgctcacgaagctcaggatgccggttacagaatgtacagaaaaagccaaactaccggcttcccttccctgatcactatatttagtgcccctaattatcttgatgtgtacaacaacaaagctgccgtgcttaagtatgagaacaacgttatgaacataagacaatttaattgtagtccgcacccctactggctgcccaactttatggacgtgttcacttggtcactgcctttcgtaggtgagaaggtgactgagatgctcgttaacgttctgtccatttgctcagatgacgagcttatgactgagggcgaagaccagttcgacggttccgccgcagcgaggaaagagataattcggaacaagatccgagccatcggaaagatggcaagagtgttcagtgtgttgcgggaggagtccgagagcgtgctaacactcaagggactgaccccaacaggaatgttgccatccggggttttggcgggaggccgacagactttacagagcgcgacggtcgaggccatcgaggccgagaaagctatccggggtttttcgccgcctcaccgcatttgtagtttcgaggaagccaagggattagaccgtataaatgagcgaatgccccctaggaaggacgctgtgcaacaggacggatttaacagtctgaataccgctcacgccacagagaatcacggcacaggaaatcacaccgcccagtag

SEQ ID NO: 30349 - DNA, 1545 bp, synthetic construct
  misc_feature 1..1545: note = Description of Artificial Sequence: Synthetic coding sequence
  source 1..1545: mol_type = other DNA
atggccgcacccgagcctgcacgtgccgcaccacccccaccccctcctcctcctcctcccccaggggcagatagggtggtgaaggcggtacccttcccccctacccacagactcaccagcgaagaggtttttgatttagacggcatcccccgtgtcgacgtgctcaaaaaccacttagtaaaagaagggagagttgatgaagagattgccctgagaattattaatgagggggcagctatccttcgcagggaaaagactatgatcgaagtggaggcccctatcactgtatgtggggacatccatgggcaattcttcgatctcatgaaactgttcgaggtggggggatcaccggctaatacccgttacctttttttaggagactacgttgacagaggatacttttcaatcgagcatgtgttggggacagaagatatctctatcaacccacataataacatcaacgagtgtgtgctctacctctgggtgctgaaaatcctttatcccagcaccttgttcctcctgcggggaaaccacgagtgccgtcacctgacagaatattttacctttaagcaagagtgtaaaattaagtacagcgaacgcgtgtatgaagcatgcatggaagcattcgactcacttccgttggcggctctgctgaatcaacagtttctgtgcgtgcacgggggactgagccctgagatacacactcttgacgatattagacgactcgaccgcttcaaggagccacccgcattcggtccaatgtgcgatctgctgtggtctgacccatctgaggactttggaaacgaaaaatcccaagagcatttcagtcacaacactgtccggggatgcagttatttctacaattaccctgctgtgtgtgagtttttgcaaaataacaacctgctctctatcatccgggcacatgaggcacaggacgccggatacaggatgtatcgtaagtcacagaccaccggatttccttcactcatcaccattttcagcgcccctaactacctggatgtgtataacaacaaagcagctgtgcttaaatatgagaacaacgtgatgaacattagacaattcaactgttctccacacccctactggctgccaaacttcatggacgtgtttacttggagcctgccatttgtcggagaaaaggtcaccgaaatgcttgtgaatgtccttagtatctgttctgatgacgaattaatgacagaaggtgaagaccagtttgatgggtctgcagccgcacgaaaagagattatcaggaataagatccgagctatcggtaagatggccagagtcttctctgtgttaagagaagaatctgagtcagttctcacgttgaagggactgactccaacaggcatgctgccaagcggagtgctcgcgggagggagacagacacttcagagcggcaacgacgttatgcagctcgccgttccacagatggactgggggactccccacagctttgccaataacagtcataatgcctgtcgtgaatttttgctctttttctcgtcttgcctgagttcatag

SEQ ID NO: 30350 - DNA, 591 bp, synthetic construct
  misc_feature 1..591: note = Description of Artificial Sequence: Synthetic coding sequence
  source 1..591: mol_type = other DNA
atgaatatccgccaatttaattgtagcccacacccgtactggctccccaacttcatggacgtgttcacatggagccttccttttgttggcgagaaagtgaccgagatgctggtgaacgtgctgtccatttgtagcgatgacgagttgatgacggagggggaggaccagtttgatgagcgcctaatctacgggaacaaaaaaggctcagctgcagcccgaaaggagatcatacgcaacaaaattcgggctataggcaagatggctcgagttttctctgtgttgagagaagaaagcgagtccgtgttgactctcaaggggctcacccctacaggcatgctgcccagtggagtcttagctggcggacggcagacccttcagtctgccaccgtcgaggccattgaggctgagaaggcaatccggggattttcgccgcctcaccgaatttgctccttcgaggaggcaaaagggctcgatagaatcaatgagcgcatgcctcctagaaaagacgccgtccagcaggacggttttaattctttgaacacagcccatgctacagagaaccacggtaccggaaaccacaccgcccagtag

SEQ ID NO: 30351 - DNA, 1548 bp, synthetic construct
  misc_feature 1..1548: note = Description of Artificial Sequence: Synthetic coding sequence
  source 1..1548: mol_type = other DNA
atggccgcaccggaaccagctcgggctgctccccctccacctccacctcctcctccaccgcctggcgctgaccgcgtggttaaagcggtgcctttcccccctacacatcgcctgacctcagaggaggtgtttgacctggatggcattcccagggtcgatgttttaaagaaccacctggtaaaagaggggagagtagatgaggaaattgccttacgaattattaatgagggcgctgcaatacttcggagagagaagaccatgattgaggtggaagctcctattacggtgtgcggcgacattcacggacaatttttcgacctgatgaaattgttcgaggtgggcggaagtccggctaatacgcggtacctgttcctgggtgattatgtggacagagggtactttagcatagagtgcgtgctctatctgtgggttctcaagatcctatacccaagcacactgttcctcctgagaggcaatcacgagtgtcgacatttaactgaatattttaccttcaaacaggagtgtaaaattaaatacagtgagcgggtctacgaagcatgtatggaagccttcgatagcctgccactggctgcactgttaaaccagcaatttttgtgcgtgcacgggggactgagtccggagatccacactctggacgatattcgaagactggatcggttcaaggaaccgcctgcattcggcccaatgtgtgatttgctgtggagcgatcccagtgaagactttgggaacgaaaaaagccaggaacatttttctcataacacggtgcggggttgtagctatttctataattacccagcggtttgtgagttcctccaaaataataatctgttatccatcattcgagcacatgaggctcaggatgctggttatcggatgtacaggaaaagtcagaccacgggattccctagtctgatcaccatcttctcagctcccaactaccttgatgtgtataacaataaggctgcagtcctgaaatacgaaaacaatgtgatgaacatcaggcaatttaactgttcccctcatccttactggctgcctaatttcatggacgttttcacgtggtccttaccattcgtaggcgagaaagttaccgaaatgctcgtcaatgtattgtctatttgctccgatgatgaactcatgacagaaggagaagaccagtttgacgttggaagtgcagccgcaaggaaagagattattcgaaataaaatccgggcaatcggaaaaatggcccgagtcttcagtgtcctgcgcgaagagagtgaatcagttctgacacttaagggcttgactccaaccggaatgttgccctctggagttctcgctgggggaagacagaccctgcagtccgccatccgaggtttttcaccccctcaccgaatctgcagtttcgaggaggccaaaggcctggataggattaatgaaagaatgccaccaagaaaagacgcagtgcaacaagacggatttaactccctgaatactgcgcatgctacagagaaccacggcactggtaatcacactgcacagtag

SEQ ID NO: 30352 - DNA, 1578 bp, synthetic construct
  misc_feature 1..1578: note = Description of Artificial Sequence: Synthetic coding sequence
  source 1..1578: mol_type = other DNA
atggccgctcctgaaccagcgagagcagcacctccccctccgcctcctccgcctccaccacccggtgcagaccgtgtcgtgaaggctgttcctttccctcctacacaccgcctgacaagcgaagaggtgttcgatctcgacgggattccgagagtggatgtgctgaaaaatcatctggtcaaagagggaagagtcgacgaggagattgccttgaggataataaacgagggggctgccatcttgcgccgtgaaaagaccatgattgaagtcgaagcgcctatcacggtttgtggcgatattcacgggcagttcttcgatctcatgaagctctttgaggtcggcggatcccccgctaacacccgctatctgtttttaggggactacgtggatcggggttacttttccatcgagtgtgtgctctacctgtgggttctcaagatcctctaccccagtacgctattcctactgaggggaaatcacgagtgtaggcacttaactgaatatttcacattcaaacaggaatgtaaaataaagtatagcgagcgtgtctatgaagcctgcatggaggcctttgacagtctccctctggcagccctgcttaatcagcagtttctctgcgttcatggcggtctatcccccgagatacatactctcgacgatattcgcaggctcgacagattcaaggagccccctgctttcggacccatgtgtgacttgctgtggtccgacccaagcgaagattttggcaatgagaagtctcaggagcacttttcccacaatactgtgcggggttgtagctacttttacaattacccagccgtttgcgaattccttcagaacaacaatctcttgtccatcattagagcccacgaagctcaagatgctggatatagaatgtaccgcaagtcacagactacagggtttccctcacttattaccatcttcagtgcccctaattatttagacgtatataacaataaagctgctgtgctgaaatatgagaataacgtcatgaacatacgccagttcaactgctcgcctcacccctattggttgccaaattttatggacgtctttacctggtccctgcctttcgtcggggaaaaggtcacagagatgctggtgaatgtgcttagtatctgttctgacgacgaactgatgaccgagggagaggaccaatttgacgtgggatcagccgcagctcggaaagagattatcaggaataagattagagccatcggaaagatggcaagagtcttttcagttctcagagaggaaagcgagtccgttctgaccctgaagggacttaccccaacgggtatgctaccatctggtgtgttggctgggggaagacagaccctccagtctgctacggtggaggccatagaagctgagaaagccatacggggattctctccacctcacagaatctgttctttcgaggaggccaagggtctggatcgcattaacgagaggatgcctccgagaaaagacgctgtccagcaggatggttttaacagcctaaacaccgcacatgccacggagaatcatggcacagggaaccacacagctcagtag

SEQ ID NO: 30353 - DNA, 561 bp, synthetic construct
  misc_feature 1..561: note = Description of Artificial Sequence: Synthetic coding sequence
  source 1..561: mol_type = other DNA
catccttactggcttccaaattttatggatgtcttcacttggtctctcccttttgttggcgagaaagttactgagatgctagtcaacgtactctcgatttgttccgatgatgaactgatgaccgagggcgaagatcagttcgacgagcgcctgatctacgggaataaaaaggggagcgccgcagcgaggaaggaaatcataaggaataagatccgcgcaatcggtaaaatggctcgcgtgttctcagtcctgagggaggagtcagaatccgtgctcacgttgaaggggctgacaccaacaggcatgctcccgtcaggggtgctcgctggagggagacagaccctgcagtctgcaaccgtggaggccatagaagccgagaaggccatccggggattttccccccctcaccgcatatgttcctttgaagaggcgaaaggtttggatcgcattaacgagcgcatgcccccaaggaaagatgcagttcagcaggatggctttaactccttgaacactgcacacgccaccgaaaaccatggtactggtaatcatactgcccagtag

SEQ ID NO: 30354 - DNA, 459 bp, synthetic construct
  misc_feature 1..459: note = Description of Artificial Sequence: Synthetic coding sequence
  source 1..459: mol_type = other DNA
atgctagtgaacgttctcagcatctgcagtgacgacgagctgatgactgaaggcgaagatcagttcgacggaagcgctgccgcacggaaagaaattattcggaataagattcgagcaatcggcaagatggctagagtgttctctgtgctgagggaggaaagtgagagtgtgctcactctcaagggattgacaccgacagggatgttgccttcaggcgttctcgccggtgggcgacaaacgcttcagtctgccactgtagaggctatcgaagcagagaaggcaatcagggggtttagcccaccccaccgtatatgctctttcgaagaggcaaagggactggaccgcatcaacgaacgcatgccccctaggaaggacgctgtccagcaggacggctttaactcgctcaatactgcacatgccaccgaaaatcacggaacagggaaccacactgctcagtag

SEQ ID NO: 30355 - DNA, 1236 bp, synthetic construct
  misc_feature 1..1236: note = Description of Artificial Sequence: Synthetic coding sequence
  source 1..1236: mol_type = other DNA
atgatagaagtcgaagcgcctattacagtgtgtggtgacatacacggccagtttttcgacctgatgaagctgttcgaggtaggcggttcacccgctaataccaggtacttattcttgggggactacgtagaccggggatatttctccatcgagtgcgtgctctatctctgggtgctaaagattctctacccttccaccctgttcctgctccgtggaaaccatgagtgtcgccaccttacagagtatttcacttttaaacaagaatgcaaaattaaatatagcgaaagagtctacgaagcctgtatggaagcctttgacagtctccctctcgccgctctgctcaaccagcagtttttgtgcgtgcacggcggactcagtccagagattcatacattagatgacatccggaggctggatagatttaaagagcctcccgcattcggccctatgtgtgaccttctctggtcagaccccagtgaagattttggcaatgaaaaaagccaggagcatttttcccacaatacagtacgcggatgctcctatttttataattacccggctgtgtgtgagttcctccaaaacaataatttgctctcgattatccgggctcatgaggcccaggatgctggctaccggatgtaccggaagtcccaaaccacaggttttccaagcctgatcactatattttccgccccaaactatctggatgtctacaataataaggccgcagtgttaaagtatgaaaacaacgttatgaacattcgacagttcaactgctccccacatccctactggctgccaaatttcatggatgttttcacctggtctctgccctttgtcggggagaaagtgaccgaaatgctggtcaatgtgctttccatttgtagcgatgacgagctgatgacggagggtgaagaccagttcgatgttggctccgccgctgctagaaaggagatcatcaggaacaagattcgtgcaattggtaaaatggctagagtcttctccgtcctgcgggaggaaagcgagagcgttctcactctgaaaggtctcacacctaccgggatgctgcccagtggcgtgctcgccggaggacgccagaccctgcagtccgggaacgacgtgatgcagctggctgtcccccagatggattggggaacaccgcactcttttgcgaataattcccacaatgcttgccgagagttcttactttttttctcatcctgtctgagctcctag

SEQ ID NO: 30356 - DNA, 1539 bp, synthetic construct
  misc_feature 1..1539: note = Description of Artificial Sequence: Synthetic coding sequence
  source 1..1539: mol_type = other DNA
atgtccgggcgtcgtttccacctgagcaccactgaccgggtgattaaagcagtgccgtttcctccaacacagagactgaccttcaaagaggtcttcgagaatgggaagcccaaagtagatgtcctgaaaaaccatctcgttaaggagggcaggctcgaggaagaggtcgccctgaagattatcaatgatggagcagcaatactgcgccaagagaagacaatgatcgaagttgatgcccctattactgtctgtggagatattcatggacagttcttcgacctaatgaagctttttgaggtcggtggttcccccagcaatacccgctacttatttcttggcgattacgtggacaggggttatttctcaattgaatgtgtgctgtacttatggtctctgaaaattaatcacccaaaaaccctgttcctgcttcgagggaaccacgaatgccgccacttgaccgattacttcacctttaaacaggagtgccgcattaagtactcagagcaggtgtacgacgcatgcatggagaccttcgattgtctacccctcgctgcactgctcaaccagcaatttctgtgcgttcacggtggaatgagcccagaaatcacatccctggacgacatcagaaagctggatcggtttactgaaccaccagccttcggccctgtgtgtgacctactgtggtccgacccgtctgaggattacgggaatgagaagacattggagcactacacacacaacaccgtacgcggatgttcttatttctactcttatcctgcggtttgcgaatttctgcagaataataacttgctgagcatcattcgtgcccacgaggcacaggatgccggatataggatgtatagaaagtcacaggccaccgggttccctagcctaatcacaattttcagcgcacctaattatctggacgtgtataataataaagcagcagtactcaaatacgagaataacgtcatgaacatacgccagttcaactgcagccctcacccttactggttacccaatttcatggatgttttcacttggagtctgccattcgtgggtgagaaagtcacggagatgctcgtgaacgtcttgaacatatgttcggatgatgagctgataagtgacgacgaggcggaagggagcactaccgttcgaaaagaaattatccggaataagatccgcgcaattggtaagatggcacgcgtgttcagcatcttgcggcaggagagtgagtcggtgttaacactcaaaggactcacgcctactggaaccctgcccctgggcgtcctgtcaggtggaaagcagaccatcgaaactgctaccgttgaagccgtcgaggctagagaagctataaggggattctctttacagcataaaatcaggtccttcgaggaagcgaggggtcttgatagaattaacgaacggatgccgccacggaaagatagcatccatgccggaggacccatgaagagcgtgacaagcgcgcactcccacgctgcccaccgatccgatcaggggaagaaagctcatagttag

SEQ ID NO: 30357 - DNA, 1509 bp, synthetic construct
  misc_feature 1..1509: note = Description of Artificial Sequence: Synthetic coding sequence
  source 1..1509: mol_type = other DNA
atgagcgggagacgatttcatctgtccaccacagaccgggtgataaaagctgtgcctttccctcccacccagcggctaaccttcaaagaggtgtttgagaacgggaagcccaaggtcgatgtgttgaagaaccatctcgtaaaggagggtaggctcgaagaggaggtggccctgaagatcattaacgacggtgccgctattctgcgacaggaaaaaactatgattgaagtcgatgcccctattactgtatgcggtgacatccacggtcagttcttcgacttgatgaagctgtttgaggtcggaggatctccttctaacactcggtatctgttcttgggtgattatgttgatcgtggctactttagtattgagtgtgtcctatatctttggagtctcaagattaaccaccccaaaactctgttcttgttgcgcggtaaccacgagtgtcggcatcttacggactactttacttttaagcaggagtgcagaattaaatactccgagcaagtatatgatgcctgtatggagaccttcgactgtttgccactagccgcactactgaatcagcaattcctgtgtgtgcacggcggtatgtcccccgaaatcacttctctggatgacattaggaagctggataggtttaccgagccaccggctttcggccctgtgtgcgacttgttgtggtccgacccttccgaagattatggaaacgagaaaacgctggaacactacacgcacaatacagtgcgcggatgctcctacttttatagctaccccgctgtttgcgaattcctgcagaacaataacctgttgagtatcattcgcgctcatgaggcccaggacgctgggtaccggatgtatcgcaagagccaggcaacaggattccctagcttgatcacgatcttttcggctccaaattacctggatgtatataataataaggcagccgtccttaagtacgaaaataacgtgatgaacatccgtcagtttaattgcagcccacatccatactggctgcccaactttatggacgtgttcacttggagtcttccatttgtcggcgaaaaggtgactgaaatgttggtgaatgtcctgaatatctgttccgatgacgaattgatcagcgacgatgaggccgaggggtcaaccactgtgaggaaggagattatccggaataaaatccgtgctataggtaaaatggcacgcgttttctccatcctccgacaagagtccgagagtgtgctgaccttgaaaggcctaacccccaccggtaccctgccactaggagttctcagtggcggaaaacaaaccatcgaaacagccattcgcggtttcagcctgcagcataagatccgctcctttgaagaagcacgaggcctggatcggattaatgagcgaatgcctccgaggaaagacagcatccacgcaggcggacccatgaaaagcgtaaccagtgctcactcacacgctgcccaccgatctgatcagggaaagaaagcccatagctag

SEQ ID NO: 30358 - DNA, 345 bp, synthetic construct
  misc_feature 1..345: note = Description of Artificial Sequence: Synthetic coding sequence
  source 1..345: mol_type = other DNA
atgtactataagttttcaggtttcacccaaaaacttgcgggtgcctgggcgtcagaagcctactccccgcagggcctgaaacctgttgtgtctaccgaggctcccccaatcatattcgcaaccccaacgaaattaacgtccgatagtacagtgtatgattacgctggcaagaataaagttcccgagcttcagaaattctttcaaaaggcagacggcgtcccagtatatctgaagaggggtctgccggaccaaatgctgtaccgaaccactatggctctcactgtgggcggtaccatttattgccttattgccctgtacatggcatcccagcccaagaataaatag

SEQ ID NO: 30359 - DNA, 522 bp, synthetic construct
  misc_feature 1..522: note = Description of Artificial Sequence: Synthetic coding sequence
  source 1..522: mol_type = other DNA
atgtctacgatgggcaatgaggcttcttaccccgcagagatgtgctctcatttcgataatgatgagattaagcgattgggacggcgttttaaaaaacttgacctggacaagtccgggagcctctcggtggaggaatttatgtcgctaccagaactccggcacaatcctctagtgaggcgtgtcatcgacgtttttgacacggatggtgatggtgaagtggactttaaggaatttattctgggaactagccagttttctgtaaagggagatgaagagcagaaactgcgatttgctttttccatctatgacatggataaggacggttacataagtaacggcgagctctttcaggtgctgaagatgatggtcgggaacaacctaactgactggcagctgcagcagttggtagacaaaacgattataattctcgacaaagatggcgatggcaaaatctcctttgaggaatttagcgcggtggttcgcgacctggaaatccacaaaaaactggtcctgatcgtgtag

SEQ ID NO: 30360 - DNA, 420 bp, synthetic construct
  misc_feature 1..420: note = Description of Artificial Sequence: Synthetic coding sequence
  source 1..420: mol_type = other DNA
atgtcaaccatggggaacgaggccagctatcctgccgagatgtgcagccactttgataatgatgagatcaaacggttgggtaggcgcttcaagaaactggatctggataagagcggatctctgtcagtcgaagagttcatgtctcttcccgagctccgtcacaatcctctggtgaggcgtgtgatcgatgtcttcgatactgacggcgatggggaagtcgactttaaggaattcatccttgggacatctcaattcagcgtcaaaggtgacgaggagcagaagttaagatttgcgttttctatctacgacatggacaaagacggctatatatccaatggggagttgttccaagtcctgaagatgatggtgggaaataatctcaccgattggcagctgcaacagttggtgcttatagtgtag

SEQ ID NO: 30361 - DNA, 1818 bp, synthetic construct
  misc_feature 1..1818: note = Description of Artificial Sequence: Synthetic coding sequence
  source 1..1818: mol_type = other DNA
atggcgggactttactcactcggcgtcagtgtattttccgatcagggtggtagaaagtacatggaggatgttactcagattgttgtagaacctgaacccaccgctgaggaaaagcctagtccaaggagatcgctctctcagccccttccaccacggcctagtcccgcagccctcccgggtggggaggttagcggtaaagggccagcagtagccgcaagggaagcgagggaccccctgcccgacgccggagcatctcctgcccctagccgatgttgcaggaggagaagctcagtggcctttttcgctgtttgtgacggacacggcggacgagaggctgctcagtttgcgagggaacatttatggggctttatcaaaaagcagaagggcttcacgtcatccgagccagccaaggtttgcgccgcaatccgaaagggatttctggcctgccatcttgctatgtggaagaaactcgctgaatggccaaaaacaatgacgggcctacccagtaccagcgggacaaccgcctccgtcgtcattatccggggaatgaagatgtacgtcgcccacgtaggcgattcaggcgtggttttggggatccaggacgaccccaaggacgattttgtccgtgcagtggaggtgacacaagaccacaaacctgagctccccaaggagcgcgaaagaatagaaggactgggcggttcagtcatgaataagtcaggggtgaatcgcgtcgtttggaagagacctaggctgacacataacgggcctgtcagaaggtccactgtcattgatcagattcctttcctcgccgtcgcccgtgccctgggcgatttgtggagctacgactttttctctggcgagtttgttgtaagtcctgaacccgatacttctgtgcacacgctggacccccagaagcataagtatatcatactcggcagcgacggcctctggaatatgataccaccccaggatgccatttctatgtgccaggaccaggaggagaagaaatacttgatgggtgaacacgggcagtcctgcgctaagatgctagtcaatagggccctggggagatggcgacagcggatgcttcgcgcagacaacacaagcgcgattgtcatttgtatttccccagaggtggataaccagggcaacttcacaaatgaagacgagctgtatttgaacctgaccgattccccttcgtataatagccaggagacatgcgtaatgaccccatccccttgtagtactccaccagtgaagtctctagaggaggatccttggccaagggttaactccaaggaccatatccctgcattggtgaggtcaaatgcgttctctgagaacttcctcgaagttagtgctgagatagcaagagaaaacgtgcagggcgtagtcatcccttcaaaagaccctgagcccctagaggaaaactgtgccaaagctcttaccctgcgtatacacgatagcctaaacaatagcctgccaataggcctcgtgcccacgaatagcacaaatacagtgatggatcagaaaaacctgaaaatgtccacacctgggcagatgaaggcccaggaaatcgaacgtacacctcccaccaacttcaagaggacattggaggaatccaactctggacctctgatgaagaaacacagaagaaacggattaagtcgttctagcggagcacagcccgcaagcctcccaaccacctctcaacggaagaactccgtcaaactcacgatgcggagacgcttgaggggtcagaaaaaaatcggaaatcctttgctgcatcagcaccgcaaaaccgtgtgtgtgtgttag

SEQ ID NO: 30362 - DNA, 1293 bp, synthetic construct
  misc_feature 1..1293: note = Description of Artificial Sequence: Synthetic coding sequence
  source 1..1293: mol_type = other DNA
atggcaggtctttactcgctaggcgtgagtgtcttcagcgaccagggaggtaggaagtacatggaggatgtgacgcaaatcgtggtggagcccgagccaaccgctgaggaaaagcctagccccaggcgttcactttcccagccgctgccacctcgcccatctccggcagccctgcctggtggagaggtgtccggaaagggtcccgcagtcgccgctagggaggccagggatcccctgcctgacgccggtgcatcacccgctcctagtcgttgctgtcggaggaggagcagcgtagcttttttcgcagtgtgcgatgggcacgggggacgggaggccgcacagttcgcgcgagagcacctgtgggggtttattaagaagcagaagggctttactagttctgagccagccaaggtctgcgcggcaatccggaagggcttcttggcttgtcatctggctatgtggaaaaagcttgccgaatggcccaagactatgactggtttgcccagcacaagtgggaccaccgccagcgtggttattatcagaggcatgaagatgtatgtggctcatgttggagattccggcgtggtgcttgggattcaagacgaccctaaggatgacttcgtccgggcagttgaggttacacaagatcataagcccgagctaccgaaagagcgcgagaggatcgaagggctgggaggcagcgtgatgaataaatccggggttaaccgggtggtttggaaacgccctagactgacccataacgggcctgtccgtaggagcacagtgattgatcaaataccgtttctcgcagtcgctagagccttaggagacctctggtcttacgatttcttttccggggagtttgtggtctccccggagccagacacctcggtgcacacactcgatcctcagaagcacaagtacatcattctgggctctgacggcctctggaatatgataccgcctcaagacgctatatccatgtgtcaggaccaagaggagaaaaagtacctgatgggagagcatggacagtcgtgtgctaagatgttggtgaatagggccttgggcagatggcggcagagaatgttgagagcagataacacaagcgccatcgtgatctgtatttcgccagaggttgacaatcaggggaattttacgaacgaagatgaactatatttgaacctgacagatagcccgagctataacagtcaagagacctgcgtcatgacaccttccccatgttcgacaccccctgtgaaagactttggatttgagctggactctcgcaagtag

SEQ ID NO: 30363 - DNA, 837 bp, synthetic construct
  misc_feature 1..837: note = Description of Artificial Sequence: Synthetic coding sequence
  source 1..837: mol_type = other DNA
atgtggaagaaactggccgaatggccgaagacaatgacaggactgcctagcaccagtggcacgaccgctagtgtcgttattattaggggaatgaaaatgtacgtcgcccatgtcggcgatagcggagttgtgctgggcatccaggacgaccccaaggacgattttgtgagagcagtagaagtgactcaggaccacaagcccgagctgcccaaggaacgcgaaagaatcgaaggcttaggtggaagcgttatgaataagagtggggttaaccgcgtcgtgtggaaacgccctagattgactcacaacggacccgttcgccgatccaccgtgatcgatcaaataccatttctggccgtcgcaagagctttgggggatctctggtcgtatgatttcttttcgggagagttcgtcgtaagtcctgaacctgatactagcgtccatacactggatcctcagaagcacaagtacattatcttaggaagcgacggtctctggaatatgattccaccccaagacgctatttctatgtgccaggatcaagaggaaaagaaatacctcatgggggaacatggccagagctgtgccaagatgctggtgaacagagccctagggagatggcgtcagcgcatgctgcgggctgataatacctccgccatcgttatatgtatatcccccgaagtcgacaaccagggcaactttacaaatgaggacgagctatatctaaatctgacagactcgcccagctacaattcccaagaaacctgcgtcatgaccccatctccatgcagcactcccccagtgaaggacttcgggtttgagctggattctcgcaagtag

SEQ ID NO: 30364 - DNA, 3432 bp, synthetic construct
  misc_feature 1..3432: note = Description of Artificial Sequence: Synthetic coding sequence
  source 1..3432: mol_type = other DNA
atgtacctgtggctgaagcttctggcctttggcttcgctttcctggacacggaagtgtttgtaaccggacagagccctacacccagcccaactgacgcctatctcaacgccagcgaaaccacaacgctgtcgccatctgggtcggcggttatttccacaaccactattgctacaacaccctccaaacctacatgcgatgaaaaatacgcaaacattactgtggactacctgtacaacaaggagaccaagctctttacagcgaagttgaatgtcaacgagaacgtcgaatgcggcaataacacttgcaccaacaatgaggtccataacctgaccgaatgtaagaatgccagcgtgtccatttcccataatagctgcactgctcctgataaaaccttaattttggacgtgcctcccggagtagaaaagtttcaattgcatgattgcactcaagttgagaaagcggacaccactatatgtctgaaatggaagaacatcgagacttttacatgcgacacacagaacattacataccggttccagtgcggcaatatgatcttcgataataaggagatcaagctggaaaacctggagcccgagcatgagtataaatgtgacagcgaaatcctttacaacaatcataagttcactaatgctagtaaaataatcaaaaccgactttgggtcccctggggaaccccagatcatcttctgtaggtcagaagccgcacatcagggtgtcataacatggaatccccctcagcggtcatttcacaacttcaccttgtgttacatcaaggagactgaaaaggattgtctgaatttggataaaaatctgatcaaatacgacctgcagaatcttaagccctacaccaaatacgtgctgtctctgcatgcatatattattgctaaggtgcaacgaaatggctccgcagcaatgtgccacttcacaacgaagagtgccccacccagtcaggtgtggaacatgacagtgagtatgacaagtgataattccatgcacgtgaagtgtagaccccctagggaccgaaatggtcctcacgaacggtaccatcttgaggtggaggcgggtaatacactcgtgcggaatgagagtcataaaaactgtgacttcagggtcaaggacctacagtactcaactgattacacatttaaagcctatttccataacggagattaccccggtgagccattcatcctccaccacagcacctcatacaactccaaagccttgattgcctttctggcattcctgatcatcgtcacatccattgcactcctagtggttctgtacaaaatttacgacctgcataaaaagaggtcatgcaacctggacgagcaacaggagctggtggagcgtgatgacgagaagcagttgatgaatgtggagccaatccatgccgacatcttgcttgagacctataaacggaaaattgccgatgagggcaggcttttccttgccgagtttcagtcaatccccagagtcttcagcaagtttcccatcaaagaagcacgaaaacccttcaatcagaacaaaaacagatacgtggacatattgccctacgactataacagagtggaattgagtgagatcaacggggacgctgggtccaactacattaacgcctcatatatcgacgggttcaaggagccaaggaaatacatcgctgcccagggaccacgagacgagacagttgatgatttctggcggatgatctgggagcagaaagccactgtgatcgtgatggtgaccagatgtgaagagggtaatagaaataaatgcgctgagtattggccgtctatggaggagggtacaagagccttcggggatgtcgtagtgaaaatcaatcagcataagcggtgccctgactatatcatccagaagctaaacatagtgaacaagaaggaaaaagctactggcagggaggttactcacattcagttcacatcctggccagaccatggtgtgccagaggacccacaccttttgctgaaactgcggcgacgagtgaacgcattctccaattttttctcgggtccaatagttgtgcactgtagcgccggagtcggcaggacaggaacgtacatcggcatagatgcaatgttagagggtctggaagctgagaataaagtcgacgtatatggctatgtggttaagctgcgcagacagcgctgtttaatggtacaggtagaagcccagtatatccttattcaccaggccctcgtggagtataatcagtttggggagacagaggtgaacctctccgagctgcacccgtacctacacaacatgaaaaaacgagaccctccatcagagcccagcccactggaagccgaattccagaggcttccatcatatcgttcttggcggactcagcacatcggcaaccaggaggaaaacaaatccaaaaatcggaactcaaatgtcattccatatgactataaccgcgtccccttaaagcatgagctagaaatgtcgaaagagtccgagcatgatagcgatgagtctagtgacgatgatagcgatagcgaagaaccctccaagtacatcaatgcttccttcatcatgtcttactggaagccagaggtaatgatagcggctcaagggccactcaaggagaccatcggggacttttggcagatgatctttcagcgaaaagtgaaggtgatagttatgttgactgaactgaagcatggcgaccaggagatttgcgcccagtattggggcgaaggcaagcaaacttacggggatatcgaagtcgaccttaaggatacggacaaaagcagcacctataccctgcgcgttttcgagctgagacactctaagagaaaagactcccggacagtgtatcaatatcagtatacgaactggagcgtggaacaactgcctgcagagcctaaggagttaatttctatgatccaagtggtgaaacagaaactgcctcaaaaaaatagttcagaaggcaataaacatcataagtctactccactcttaattcattgcagggatgggtctcagcagactggtatcttctgcgccttgctgaatctgttggaatcagcagagaccgaagaagtggtggacatcttccaagtggtgaaagccctgagaaaggctcggcctggaatggtctccacatttgagcagtaccagttcctttatgatgtgatcgcaagcacctacccagcacagaacggtcaagtgaagaaaaataatcatcaggaggacaagattgaattcgacaatgaggttgataaagtgaagcaagacgcaaattgcgtgaatcctctaggcgctccagagaaactgccagaggccaaggaacaagcggaaggtagtgagcccacctctggtaccgaggggcctgaacatagcgtgaacggacccgcaagcccagccttgaatcagggtagctag

SEQ ID NO: 30365 - DNA, 105 bp, synthetic construct
  misc_feature 1..105: note = Description of Artificial Sequence: Synthetic coding sequence
  source 1..105: mol_type = other DNA
atgtacctttggctaaaactcctggcgttcggcttcgctttcttggatacagaagtattcgtaactgggcaaagcccaaccccgagtcctaccggcaagaactag

SEQ ID NO: 30366 - DNA, 447 bp, synthetic construct
  misc_feature 1..447: note = Description of Artificial Sequence: Synthetic coding sequence
  source 1..447: mol_type = other DNA
atggctaggatgaaccgccctgcccctgtggaggtaacgtataaaaacatgcggttcctgatcactcacaacccaaccaacgccacgctgaataaattcattgaggaacttaagaagtatggagtgactacaatcgttcgcgtttgcgaagcgacttacgacaccaccttggttgagaaggaaggcatacacgtgctcgactggcccttcgacgacggcgctcccccatctaaccagattgtcgatgattggttgagtctcgtgaagattaagtttcgggaagaacctgggtgttgcatcgccgttcattgtgttgctggacttggcaggaagcgcagaggcgcatttaacagcaaacagttgctctatcttgagaaatatcgcccaaagatgcgcctccgcttcaaggactccaacggtcaccgaaacaactgttgcatccagtag

SEQ ID NO: 30367 - DNA, 447 bp, synthetic construct
  misc_feature 1..447: note = Description of Artificial Sequence: Synthetic coding sequence
  source 1..447: mol_type = other DNA
atggctaggatgaacaggccagcgccagtcgaggtcacatataaaaacatgcgattcctgatcactcacaacccaactaacgccaccttgaacaaattcatagaagagttaaagaagtatggtgtcaccaccatagtacgcgtgtgtgaagccacctatgacacaaccctcgtcgagaaggaagggatccacgtcttggactggccctttgacgatggcgcaccgccatcaaaccaaattgtagatgactggctgtcactcgtgaagatcaagtttcgggaagagccaggctgttgcatagccgtacactgcgtggctggactgggcaggaaaaggagaggcgctttcaactcaaagcagcttctgtacctagagaagtataggccaaagatgcgactccgctttaaggactctaacggtcacagaaacaactgctgtattcaatag

SEQ ID NO: 30368 - DNA, 522 bp, synthetic construct
  misc_feature 1..522: note = Description of Artificial Sequence: Synthetic coding sequence
  source 1..522: mol_type = other DNA
atggctaggatgaaccgaccagccccagtggaggtaacctataagaacatgcgctttctgatcacccacaatcccacaaacgccactcttaacaagtttattgaagagttaaagaaatacggggtgaccacaatcgtgagggtgtgtgaggcaacctatgatactacactcgtggaaaaggagggcattcatgtcttggactggccgttcgatgatggcgctcctccatccaaccagatcgtggacgactggctatcactcgtgaaaatcaaatttcgcgaagagcctggatgttgcatagcggtacattgtgtggccggactggggagagcccctgtcctcgtcgcactggctttgattgagggagggatgaagtatgaagacgccgtgcagttcattcgccagaagcggcgaggcgcatttaactccaaacagttgttgtacctcgaaaagtacagacccaaaatgagactgcgatttaaggattctaacggccacaggaacaactgttgtatacagtag

SEQ ID NO: 30369 - DNA, 1308 bp, synthetic construct
  misc_feature 1..1308: note = Description of Artificial Sequence: Synthetic coding sequence
  source 1..1308: mol_type = other DNA
atggagatggagaaggagttcgagcaaattgataaatcaggctcttgggccgcaatataccaggatatcaggcatgaggcttccgatttcccatgtcgagtggccaaactacctaagaacaaaaacaggaatcggtaccgtgacgtgtcaccctttgatcactctcgaattaaactgcaccaggaagataatgactacatcaatgcatctctcattaagatggaagaggcccagaggtcatacatcctaacacaaggcccattgcctaatacatgcgggcatttttgggagatggtttgggaacagaaaagcagaggtgttgtcatgctgaatcgggtgatggaaaagggttcactcaagtgtgcccagtattggccccagaaagaggagaaagagatgatcttcgaggatacaaacctgaagctcactctaatctcagaggatatcaagagctactatacagtccgacagctggagctcgaaaatctgactacacaggaaacccgcgagatcctccacttccactatacaacgtggcccgatttcggcgtgcccgaatcacccgcatctttcctcaactttctgttcaaagtgcgagagtctggtagcctgagcccagagcatgggccagtggtggtccactgctcagccggtatcggacgttccggaaccttttgtttggcagatacttgtttgctgctcatggataaaagaaaagaccccagctctgtcgacattaagaaggtgctgttggaaatgcgcaagttccgaatggggttgattcagaccgcagaccagctacgcttttcctatctggcagttatcgaaggagcaaagtttatcatgggggacagcagtgtgcaggatcaatggaaagagctgagtcatgaggatctcgagcctccacccgagcacatcccgccacccccaagacctccaaagcggatcttggagccccataatggaaaatgtagggaattctttccgaaccaccaatgggtgaaggaagaaacacaagaagacaaggactgtccaattaaggaggaaaaagggtcaccactgaatgcagccccttatggaattgagtcgatgagtcaagatacagaggtgagatctcgagtggtaggcggttctttgaggggagctcaggcggcttcacccgctaagggagaaccttccctacctgaaaaagatgaagatcatgccctgtcttactggaagccattcctcgtaaacatgtgtgtggcaactgttctaactgcaggggcatacctgtgttatagatttcttttcaactctaacacctag

SEQ ID NO: 30370 - DNA, 1089 bp, synthetic construct
  misc_feature 1..1089: note = Description of Artificial Sequence: Synthetic coding sequence
  source 1..1089: mol_type = other DNA
atggaggaagctcaacgctcatacatcctaacccagggccctctgcctaatacctgcggacacttctgggaaatggtgtgggagcagaaatctcgaggggtcgtgatgctgaacagggttatggaaaagggcagtttgaaatgcgctcagtattggccccagaaagaggagaaggagatgatttttgaggacaccaatttgaaactcaccctcattagcgaagacatcaaaagctactatactgtccgtcagctagagcttgaaaatctcactactcaggaaactcgggagattttacatttccactacacgacttggccagatttcggtgtcccggaatcacctgcaagtttcttgaattttctctttaaggtaagagagtcaggatctctgtcccccgagcacgggccagtggtggttcactgttctgcaggcataggtagaagtggcacattttgcctcgctgatacgtgtcttctgcttatggacaaacgcaaggatccatcctccgtcgacatcaagaaggtcctgctagagatgaggaagttcaggatggggctgattcagacagccgaccaattaagattttcatatctggcagttatcgaaggcgctaaattcataatgggcgattctagcgtccaagaccagtggaaggagttatctcacgaggacctcgagcctcctcctgagcatataccgccacctccgagaccccctaaaagaatcctcgagccccacaatggcaaatgcagggagtttttccccaaccatcagtgggtcaaagaggaaacacaggaggataaggattgccctatcaaggaggagaaagggagccccctcaacgccgcaccctacgggatcgagtctatgtcccaggacacagaagtgcggagccgcgtggtgggcggaagccttagaggtgcccaggccgcatctccggctaaaggcgaaccaagcctgccagagaaagacgaagaccacgccctgagctattggaaaccgtttctggtgaacatgtgcgtcgccaccgttctgaccgccggagcttacttgtgctatagattcctatttaatagtaacacatag

SEQ ID NO: 30371 - DNA, 1782 bp, synthetic construct
  misc_feature 1..1782: note = Description of Artificial Sequence: Synthetic coding sequence
  source 1..1782: mol_type = other DNA
atgacaagccgacgttggtttcaccctaacattaccggagtagaagcagagaacctcctcctaactcggggagtggacggctctttcttagccaggccttccaagagcaaccccggtgacttcacactgtccgtgagaaggaatggagccgtcacacacattaagatccagaatacaggagattactacgacctttatggcggagaaaagttcgcaacacttgcagagctggtgcaatattatatggaacatcacggacaactgaaagagaagaacggtgacgtaatcgagttaaagtaccctctcaattgtgcagatcccacatcagaacgatggtttcatgggcatttaagcggaaaggaggcggaaaagctcctgacagaaaaaggaaaacacggaagtttccttgtgcgggagtcacagtctcatcccggagacttcgtgttgtcagtgcgtactggcgacgataaaggagaaagtaatgacggcaaatctaaagtgacccatgttatgattcgttgtcaggagctgaaatacgacgtgggcggtggtgagcgtttcgatagtttgacagatcttgttgaacactataaaaagaatccgatggtggaaacactcggcacagtgcttcagctaaagcagccactgaatactaccagaatcaatgccgctgaaatcgaatctcgagtccgggagctgtccaaactggccgagaccaccgacaaggtgaagcagggcttctgggaagagtttgaaaccctacagcagcaggagtgcaaacttctatattctcgcaaggagggccagcgccaggagaacaaaaataagaatcggtataaaaacatattaccgtttgaccacaccagagtagttctgcatgatggagaccccaatgaacctgtttctgattatatcaatgccaacatcattatgcctgagtttgagaccaagtgtaacaacagtaaacccaaaaagtcatacattgccacgcaaggctgtttacagaacaccgtcaatgatttctggaggatggtgttccaggagaactctcgtgtgattgtcatgactactaaagaggtggagcgcggtaaatctaagtgtgtgaaatactggccagacgaatatgcgctgaaagaatacggagtgatgcgggtcaggaacgtgaaggagtctgctgcacacgactatacgctccgggagctgaagctgagcaaagtgggccaggggaatacagaacgcaccgtgtggcagtatcacttccggacctggcccgatcatggtgtgccttcagatcccggaggagtactggacttcctcgaggaagtgcaccacaagcaagaatctatcatggacgcaggcccagtggttgtgcactgtagtgccggaattggacgtaccggtactttcatcgtgatcgacattcttatcgatatcatcagggaaaaaggtgtcgattgcgacattgacgttccaaaaacgattcagatggtgcgtagtcagagaagcgggatggttcagactgaagcacagtacaggtttatttacatggcagttcagcactacatcgagaccctacagcggcgaatagaagaagaacagaaatccaaaaggaaggggcacgaatacaccaacattaagtattccctcgccgaccaaacctccggagatcagtcacctcttccgccatgcacaccaacacctccgtgcgcggaaatgcgcgaagactctgccagagtttacgagaacgtcggcctcatgcagcaacagaagtcttttaggtag

SEQ ID NO: 30372 - DNA, 651 bp, synthetic construct
  misc_feature 1..651: note = Description of Artificial Sequence: Synthetic coding sequence
  source 1..651: mol_type = other DNA
atgacaagccggagatggtttcatcccaacattacaggagtggaagccgaaaacctgttgctgactcgcggagtcgatggttctttcctcgccaggccttcgaaaagtaatcctggcgattttacactctccgtgcgaagaaatggagctgtcacacacatcaaaattcaaaacactggagactactacgatctgtacgggggagagaagtttgccaccttggccgaactcgtgcaatattatatggaacaccatggccagctcaaagagaaaaacggagacgtgatcgaattaaaatacccactcaattgtgccgaccctacttctgagagatggttccacggccatcttagcgggaaagaggctgagaagctcttaacagagaaaggcaaacacgggtcattcttggtcagggagagtcaaagccatcccggtgatttcgtgctaagtgtgagaacaggagatgacaagggagagagtaacgacggaaaatcaaaggtgacccacgtgatgattaggtgccaggagctcaagtacgatgtcggaggtggggaacgctttgatagccttaccgacctcgttgagcactataaaaagaacccaatggtcgagaccctcggcacagtgttgcagctgaaacagcccctgtag

SEQ ID NO: 30373 - DNA, 1383 bp, synthetic construct
  misc_feature 1..1383: note = Description of Artificial Sequence: Synthetic coding sequence
  source 1..1383: mol_type = other DNA
atgaccagcaggcggtggtttcaccctaacatcacaggagtggaagctgagaacctgctcctgactcggggtgtggacggctctttcctggctcggccttctaagagcaacccaggagacttcaccctgagtgtccggagaaatggggctgttactcatatcaaaatccagaatacgggggattactacgacctctatggcggagaaaagttcgcaacactggctgaactggtgcagtactacatggaacatcacggccagctgaaagagaaaaacggtgacgtgatcgagctgaagtaccccctgaattgtgcggaccctactagtgagcgatggttccacggtcacctatcaggcaaagaggccgagaagctactaactgaaaagggtaaacacggttcatttcttgtcagggaatcacaatctcatcccggagactttgtgctgtcagttcgtaccggcgacgacaagggtgagagcaatgacgggaagtcgaaagtgacccacgtaatgataaggtgtcaggaactgaagtacgatgtcggaggcggagagaggtttgactctctgactgacctcgtggagcactataaaaaaaatcctatggttgaaaccctaggcaccgtcctccagctaaagcagcccctaaataccacccggataaacgcagctgagatagagagcagagtccgtgaattaagtaagttggccgagaccaccgataaggtgaagcagggcttctgggaggaatttgagaccctgcagcagcaagagtgtaaactgctgtactcccgcaaggaggggcagcggcaggagaacaagaataaaaatcggtataagaatattctcccttttgaccatacaagagtggttttgcacgatggggaccctaacgagccagtgagcgattacatcaacgcgaatatcatcatgcctgagtttgaaacaaaatgcaataactcaaaaccaaagaagtcatatatcgccactcaaggttgcctgcaaaacaccgtgaacgatttttggcgaatggtcttccaggagaatagccgggtaatcgtaatgaccaccaaagaagttgaaaggggcaagagtaaatgcgtgaagtactggccagacgagtacgccttgaaggagtacggcgtgatgcgcgttcgcaacgtgaaggaatctgcagcgcacgactatactctccgagagcttaagctgagcaaggtcggacagggtaacaccgaaagaaccgtctggcagtaccacttcaggacctggccagaccacggggtgccgtccgaccctggtggcgtcctggatttcctcgaggaggtccaccacaagcaagagtcaataatggatgctggcccagtggtcgtccactgccggtag

SEQ ID NO: 30374 - DNA, 723 bp, synthetic construct
  misc_feature 1..723: note = Description of Artificial Sequence: Synthetic coding sequence
  source 1..723: mol_type = other DNA
atgtatctttggctaaagctgctggctttcggctttgcatttctggacaccgaggttttcgtcaccggccaatcccccactccttcaccaaccggccatcttcaggctgaagagcagggcagccaatctaaatcccctaatctgaagagcagggaggctgattctagtgcttttagttggtggccaaaagccagagagcccctgacgaaccattggcgactgacaaccgccaagatgcctagcgtgccactgtcgtccgatcctcttcccacgcacactactgccttcagtccagcttctacatttgaacgtgagaatgacttcagcgagacgactacaagcctcagcccagacaatacttccacgcaagtgtccccagacagtctggacaatgcctctgcttttaatacaacaggggtgtcctccgtgcagacgccacacctcccaacccacgccgacagccagaccccctcagccggtacagacacgcagacatttagcggctccgcagctaacgccaaactgaatccaacacccggatctaatgccatctctgacgtgccgggagaacggagtacagcctcgactttccccaccgatccggtctccccactgaccacaaccctgtcactcgcccatcactctagcgcggctttgccggcacggacctccaataccaccatcacagcaaacacttctgacgcttatttgaatgcttcttag

SEQ ID NO: 30375 - DNA, 3432 bp, synthetic construct
  misc_feature 1..3432: note = Description of Artificial Sequence: Synthetic coding sequence
  source 1..3432: mol_type = other DNA
atgtacctgtggctaaagctgctggcttttggatttgcattcttggatacggaagtattcgtgacaggccagtctccaacgccatcacctaccgatgcgtacctcaacgcttcggaaactacaacactatcccccagtggttccgcggtcatctcaacaactactattgctacaacaccctcaaaacctacatgtgacgaaaaatatgctaacatcacagtggattatctctacaacaaggaaaccaagctgtttacggccaaactgaatgttaatgagaacgttgaatgtggtaataacacttgtaccaacaatgaggtgcacaatctgaccgaatgcaagaacgctagtgtgagcattagccacaactcatgcacagcaccagacaagactctgatcctagatgtacccccaggggtggagaagttccagctgcatgattgcacacaggtagagaaggcagacactaccatatgcctgaagtggaaaaatatagaaacattcacctgtgacactcagaacattacatataggtttcagtgtggtaatatgatttttgataataaagagattaagctggagaacctggaacctgagcacgagtacaaatgcgactccgaaatcttatataacaatcacaagttcaccaatgccagcaaaatcatcaaaacggactttggctctcccggagagccacaaataatcttctgtagaagtgaggccgcacaccaaggcgtcatcacgtggaatcctcctcagcgctcctttcacaactttacactgtgttacatcaaggagactgagaaagattgcctcaatttggataaaaacctcattaagtacgacctgcagaatctcaaaccttatacaaagtatgtgctgagtcttcatgcttacatcatagccaaggtccagagaaatggctccgcggctatgtgtcatttcacaacaaaatcagcaccgccaagccaggtttggaatatgacagtttctatgacttccgacaactctatgcacgtgaaatgtcgtccccctcgtgaccggaatgggcctcatgaacggtaccacctggaggttgaagctggcaataccctggtcagaaatgaatcacataaaaattgcgacttcagggtgaaggacttacagtactcaaccgattatacattcaaggcttattttcataatggcgattaccctggagaacctttcatcttgcaccatagcacctcatacaactcgaaagctttaatcgcttttctagcatttctgataatcgtgacttccattgctctgctggtcgtgctttacaaaatctatgacctgcataagaagcggtcttgtaaccttgacgaacagcaggagctggtggaaagagacgatgagaagcagctcatgaacgttgagcctatacacgccgatatcctcctcgaaacatacaaacggaagatcgctgatgaaggccgattattcctcgcggagttccaaagcatccctcgagtgtttagcaaattccctattaaggaagcgaggaaacccttcaaccagaacaaaaaccggtatgtggacatccttccctatgattataaccgcgtggagttaagtgagatcaatggcgacgctggcagcaactatatcaatgcctcatacatagacggttttaaggagccaaggaagtacattgccgctcaagggcctcgcgatgagacggtggatgatttttggagaatgatttgggaacagaaggctaccgtgattgtaatggtgacacgttgtgaggagggcaataggaataaatgcgccgagtactggccttctatggaggagggaacccgtgcattcggagacgtcgttgtgaagatcaatcaacacaaaaggtgccccgactacattatacagaagctgaatattgtcaataagaaggaaaaagctactggcagggaggtgacccacatccaatttacatcttggccagaccatggggtgcctgaagatcctcacctgctcctcaagctgcgacggcgtgtgaatgctttctccaactttttctccgggccaattgtagtgcattgtagtgctggcgtcggacggacaggtacctatattgggatcgacgcaatgctagaggggctagaggcagagaacaaggtggacgtgtacggatatgtggtgaagttacggcgtcagcgctgcttgatggttcaggtggaagcacagtatatcctgattcatcaggctctggttgaatataaccagttcggcgagaccgaagttaacctgtctgagttacatccttatttgcacaatatgaaaaagcgtgaccctccctcggagccatccccactggaggccgaatttcagcgacttcccagctacaggtcctggaggactcaacacattgggaaccaggaagagaacaaaagcaaaaacaggaactctaatgtgattccttatgactacaacagagtaccccttaagcatgaattggaaatgagcaaggaatcagaacatgacagtgacgagagttctgatgatgattctgactcagaggaaccctccaagtacataaacgcttcttttataatgagttattggaagccagaggtgatgatagctgctcagggcccactgaaggaaacaatcggggatttttggcaaatgatttttcagaggaaggttaaggtgatcgtgatgctcaccgaactgaaacacggagatcaagaaatttgtgcgcaatactggggggaaggaaagcagacctacggcgatattgaagtcgacctgaaggacacagacaaatcctctacatacacgctgcgggtttttgaactgagacacagcaagcgcaaggactctcgcaccgtgtaccagtaccagtacacaaattggagcgttgaacagcttcctgctgagcctaaggagctgatcagcatgattcaagttgttaaacagaagctgccgcaaaaaaattcctccgaaggcaataaacatcataagagcacacccctcctgatacattgtagagatggcagccagcagacaggtatattctgtgcactcctgaaccttctggaatctgccgaaacagaggaggtcgtggacatctttcaagttgttaaggccttgcggaaggcccgaccaggcatggtgagtacattcgagcagtatcagttcttgtatgacgtgatagcttcaacctatcccgcacagaacggccaggttaagaagaacaatcaccaggaagataagatcgagttcgacaatgaggtcgataaggtgaagcaggatgcgaattgcgtgaacccgctgggagcgcctgaaaaacttccagaagccaaggagcaggccgaggggtcagaaccgaccagcggcactgaaggaccagaacatagcgtgaatggccctgcttcccccgctctgaatcaggggtcttag

SEQ ID NO: 30376 - DNA, 3771 bp, synthetic construct
  misc_feature 1..3771: note = Description of Artificial Sequence: Synthetic coding sequence
  source 1..3771: mol_type = other DNA
atgtacctgtggctgaaattgttggcattcggctttgctttcctcgacacagaggtttttgtgactggacagtctcccacaccttcccccactggcctgacaaccgcgaaaatgccctccgttcctttgtctagcgatccactgcctacccacaccaccgctttctcacctgccagcacttttgaacgtgagaatgatttttccgaaacgactacatccctgtcacccgacaacacatccacacaggtatctccagactctcttgataacgcatccgcctttaatactaccggcgtctccagtgtgcagacccctcacctgccgacccatgcagactcccagaccccatccgctggaaccgacactcagacatttagtggttcagccgcaaacgctaaactgaaccctactcccggatcgaacgccataagcgatgcctacctgaacgctagtgaaacgactaccctgagtccaagcggctctgccgtcattagtaccactacaatagccacgactccatctaagcccacatgtgacgagaaatatgccaatattacggtggactatctgtacaacaaagagacgaaactgtttacggccaaactcaatgtgaatgaaaatgtggaatgtggtaacaacacctgtaccaacaatgaggttcacaatctgactgagtgtaagaacgcatcggtgagcatttcccacaatagctgcacagcacccgacaagactctcatattggatgtgcctcctggcgtagaaaagtttcagctgcatgactgtactcaggtcgaaaaggctgatacaactatttgcctgaagtggaagaacatcgagacgttcacttgtgacactcagaatatcacatatcggtttcagtgtggcaacatgatctttgataataaagaaatcaaactggagaacctagaaccagagcatgaatacaaatgtgacagtgagatcctatacaataatcacaaatttaccaatgcgtcaaagatcattaagacggacttcggaagccccggagagcctcaaattatattttgtagatctgaggccgctcaccagggggttattacctggaatccacctcagaggagttttcacaatttcaccctctgttatattaaggaaacagaaaaagactgtctcaacttggacaagaacttgatcaaatacgacctacagaacttaaaaccatatacaaagtatgtgctgagtctgcacgcttacattatcgccaaggttcagcgaaatggttccgccgctatgtgccactttactaccaaatccgctccgccttcacaggtgtggaacatgaccgtcagtatgacctcagacaactcaatgcacgtgaagtgccgcccaccacgcgaccgcaacggaccacatgaacgctatcacctagaggtggaggctggcaacacgctagtgagaaacgaatcccataagaattgcgatttccgtgttaaagaccttcagtatagcactgactacacatttaaggcatacttccataacggtgattaccccggagagcccttcatcctgcaccatagcacctcctataatagcaaagccttaatcgcttttctcgctttcttaattatcgtcaccagcatcgccttgttggtggtcttgtataaaatctacgatctccacaagaagcgtagctgcaacctggatgaacagcaggaacttgtggaacgcgacgatgagaaacagttaatgaacgtcgagcctattcatgcggacattctgctggaaacatataagcgaaaaattgcagacgaggggcgtctctttctggccgaattccagagcattcctagggtgttctctaagtttccaatcaaagaagcgaggaaaccgttcaatcagaataaaaacaggtatgtggatattttgccgtatgattacaaccgagtggagctctccgaaatcaatggagatgcaggcagcaactatattaacgcttcctacatcgacggctttaaagagccccgtaagtacatagctgcacaagggcctcgcgacgagaccgtggacgacttctggcgaatgatttgggaacagaaagcaacggtcattgtcatggtgactaggtgtgaagaagggaaccgaaacaaatgtgctgagtactggccctccatggaggagggcacccgggcattcggcgacgtggtcgtgaagatcaaccagcacaaacgctgtccagattacattatccagaaacttaacattgtcaataagaaggaaaaggctactggcagggaggtgacccacattcagttcacttcttggcctgatcacggcgtgcccgaggatccccacctacttctgaagctcagaagacgcgtgaatgccttcagtaacttctttagtggcccaatcgtggtccattgcagcgctggggtgggcagaacaggaacctatattggcatcgatgcgatgctcgagggactcgaagctgagaacaaagtagacgtgtatggctatgtagttaagctgaggcggcagcgttgtctgatggtgcaggtcgaagcccagtacatactaattcaccaggcactggtggaatataaccagttcggagaaacagaagtgaatctatccgaactgcacccttatctccacaatatgaaaaagcgggacccaccaagcgagccaagtcccttggaggccgagtttcaaagacttccttcataccgttcctggcgaacccagcacatcggtaaccaagaggaaaacaagtccaagaatcgtaatagcaacgtgatcccatacgattacaaccgcgtccccttgaagcatgagctagagatgtccaaagagtccgaacacgatagtgacgaaagctcagatgatgacagtgacagcgaggaaccatccaaatatattaatgcaagctttataatgtcctattggaagccagaagtgatgatagcagcccagggacccctgaaggagacgatcggcgatttttggcagatgatctttcaacgcaaggtcaaggtaatcgtcatgttgaccgagttgaagcatggcgatcaggagatttgtgcccaatactggggggagggtaagcagacctacggcgatattgaggtagacttgaaggatacagacaagtcctccacgtacacactcagagtgttcgagctacgccactccaagcggaaagactcccgcacagtgtatcaatatcaatacacgaactggagcgtcgaacaacttccggcagagcccaaggagctcatttccatgattcaggtggtgaagcaaaagcttccacagaaaaatagctcagaaggtaacaagcatcacaagagcacacccttactcattcattgtcgcgatggtagccaacagactggaattttctgtgctttgctaaatctactggagagcgccgaaactgaagaagtggtagatatttttcaggtcgttaaggctctgaggaaagccaggccaggaatggtctcaaccttcgaacagtatcagtttctgtatgatgttatcgcgtctacctacccagcccagaacggtcaagttaagaaaaataatcatcaggaagacaaaattgagtttgataatgaggttgacaaggtaaagcaagacgcaaactgcgtgaatcccctcggcgcaccggagaaattgccggaggcaaaggagcaggcagaaggtagcgagccgacatctgggaccgagggtcctgagcactctgtgaatggaccagctagccctgccttgaatcaaggcagttag

SEQ ID NO: 30377 - DNA, 2208 bp, synthetic construct
  misc_feature 1..2208: note = Description of Artificial Sequence: Synthetic coding sequence
  source 1..2208: mol_type = other DNA
atgaccatgtacctctggctcaaacttctggcattcggatttgcatttctggacaccgaagtttttgtgaccggacagtctccaacaccctcacccacaggcgtgtccagcgttcagacaccccacctcccaacacacgctgattcccaaaccccgagtgctgggacagatacacagacatttagtggctcagctgcaaacgctaagctcaaccccacccctgggagcaatgcaatctccgatgtgccaggagagagaagcacagcctcaacctttcccaccgatccagtgagccccctcactaccactctctctctcgctcaccattcttcagcggcattacccgctaggacgtctaataccaccattacggcaaacacttcggatgcctacctgaatgcttctgagacaaccactctctctccgagcgggtcagcagtcatctctaccaccactattgccactacaccttccaaaccgacctgcgacgagaaatatgccaacataacggttgactacctttacaacaaagagaccaagcttttcaccgcaaaactgaacgttaacgagaacgttgaatgcggcaacaacacctgtaccaacaacgaggtacacaatctgacagagtgtaagaacgcctctgtgtcaatcagtcacaatagttgtaccgctccggacaagaccctgatcctagatgtcccaccaggtgtggagaaattccagctgcacgactgcacacaggtggagaaggccgataccactatttgtctcaaatggaagaacatcgaaaccttcacctgtgacacccaaaatataacctataggtttcagtgcggtaatatgattttcgataacaaggaaattaagctggagaatctggaacccgaacatgaatacaagtgcgactcagaaatcctgtacaataatcacaaatttacgaacgcgtcgaaaatcatcaagaccgactttggcagccctggagaaccacaaattatcttttgccggtctgaggccgctcatcagggcgtgattacttggaatcccccacagcgaagctttcataacttcacgctttgttatatcaaagagaccgagaaggactgcctgaacctcgacaagaatttaattaagtacgatctgcaaaacctgaaaccctacaccaaatatgtcctgtctcttcatgcctatattatagccaaagttcagcgaaatgggagcgccgctatgtgccatttcacaactaagagtgcgccaccatcacaagtgtggaatatgactgtctcaatgaccagtgacaactccatgcacgtgaaatgtaggccaccaagagacagaaacgggcctcacgaacgctatcacttggaggtagaagccggaaacaccctcgtacgaaatgaatctcacaaaaattgtgactttagagtgaaagatctccagtacagcacggactacacatttaaggcctatttccacaatggcgattatcctggagaaccatttatcctccatcactccacttcttacaactccaaggccctgattgccttccttgccttcttgattattgtcaccagtatcgccctgctggtggtgctgtataagatttacgatctgcacaaaaaaaggagttgtaatttagacgagcagcaggaactggtagagagagacgatgagaagcagctgatgaacgtagaacccatccacgccgacattttgctggagacctacaagcgcaagatcgctgacgagggcaggctctttctcgcagaattccaatccattccgagggttttctctaaattccccatcaaagaggctaggaaaccattcaatcaaaataaaaaccgctatgtcgatatacttccttatgattacaatagggtcgaattatcggagatcaacggcgacgccggatcgaactatattaatgcgagctacatagacggctttaaggaacctcgaaaatacatcgccgctcaaggacctcgcgacgaaactgttgacgatttttggcgtatgatttgggagcagaaggcgacagtgatcgtgatggtgaccagatgcgaagagggaaaccggaataaatgtgcagaatattggccttctatggaagaaggaacaagagccttcggagacgttgtcgtgaagatcaaccagcacaagcgttgcccagactacattattcagaagcttaacatagtaaattag

SEQ ID NO: 30378 - DNA, 2202 bp, synthetic construct
  misc_feature 1..2202: note = Description of Artificial Sequence: Synthetic coding sequence
  source 1..2202: mol_type = other DNA
atgtatctgtggttgaagctgctggcatttggttttgctttcctcgatactgaagtgttcgtgactggccaatctcctaccccaagtcctacaggggtgtcttccgtgcagacgccacacttaccaacccatgcagacagccagacaccttctgccggaacagacactcaaaccttttctggcagtgctgccaatgccaaactaaacccgacccccggaagcaacgcgatctccgatgtgcctggggagagaagcactgcctctacattcccaaccgaccctgtctcccccctcactacgacgctaagcctggctcaccattcatcggccgctctgccagctagaaccagcaacaccaccatcaccgccaatacttccgatgcttacctgaatgcctctgagaccaccacattgtcaccctccggaagcgccgtgatttccacaaccaccatagccacgacgcccagcaagcccacttgtgacgagaagtatgctaacattacagtggactacctctataacaaagaaaccaagctctttacagctaagctaaacgtcaacgagaatgtagaatgtggcaataacacctgtacaaataatgaggttcataatcttaccgagtgcaaaaacgcttcagtgtctatctcccacaactcttgcaccgcccctgataagaccttaatactcgacgtcccccctggtgtagagaagttccagcttcacgactgcactcaggtggaaaaagccgacacaacaatttgtctgaaatggaagaatatcgaaactttcacatgcgacacccaaaatataacttatcgctttcaatgcgggaacatgatctttgataataaggagatcaagctggagaacctggaacctgaacatgagtacaagtgcgatagtgagatcctctacaacaatcacaagtttacgaatgcgtccaagattattaagactgacttcgggtctcccggagagcctcagatcatcttctgtcgctcggaggctgcgcatcaaggggtcattacctggaacccaccacaaagaagcttccataacttcactctgtgttatatcaaggagaccgagaaagactgcctcaatctggataagaatctgataaagtacgacttgcagaatctcaagccgtacacaaagtacgttttgtctcttcacgcctatattatagcgaaggtgcaacgcaatggcagcgccgctatgtgccactttaccacaaagagtgctcctccttcacaggtatggaatatgaccgtttccatgacgagcgacaactctatgcatgtcaaatgtagaccacccagggatagaaatggccctcacgagcgataccatctagaagttgaggccggaaataccctggttcgtaacgagagccataagaattgcgattttcgggtgaaggacctccagtattccaccgattatacatttaaggcctacttccataacggcgattaccctggcgagcctttcatactgcaccactcgacatcgtacaactctaaagccctgatagctttcctggccttcctcataattgtcacctcaattgcattactggtggtgctctacaaaatatatgatttgcataaaaaacggtcttgtaaccttgacgagcagcaagagctcgtcgaaagagacgatgagaagcagctcatgaacgtggaacctattcacgccgacattctgcttgagacctacaagagaaagattgccgacgagggcagactgttcctcgctgagttccagagtatcccaagagtctttagtaagttccctatcaaggaagctagaaagccatttaaccagaataaaaatcggtatgtggatatcctcccctatgattacaaccgagtggagctctctgaaatcaacggggatgcgggatctaactatataaatgcatcctatatcgacggattcaaggaaccacgcaagtatattgccgcacaggggccacgcgacgagaccgtagatgatttctggcgaatgatctgggaacagaaagcgacagtgattgtcatggtcacacgatgtgaggaggggaacaggaataagtgcgccgaatactggccaagcatggaggagggcacccgcgcttttggagacgtcgtggttaaaataaaccaacacaagagatgccctgactacattatccaaaagcttaatattgtaaactag

SEQ ID NO: 30379 - DNA, 3921 bp, synthetic construct
  misc_feature 1..3921: note = Description of Artificial Sequence: Synthetic coding sequence
  source 1..3921: mol_type = other DNA
atgacgatgtacctgtggttaaaactattagcattcggcttcgcatttcttgacactgaagtttttgtcacaggccagtctcccacaccaagtcctactggcctcacaaccgcgaaaatgccgagtgtgccactgagttctgatccacttcctacacacactactgccttctcacctgcctctacttttgaacgcgagaacgacttctccgaaacaacaacatccctaagtcctgataatacctctacacaggtttctccggatagtcttgacaacgcaagcgccttcaacactacaggggtgtccagcgtccagacccctcaccttccaacccatgccgacagtcagactcccagcgcagggacggacacccaaaccttttccggttctgctgctaacgcaaaactcaatccaactcccggtagtaacgctatttcagacgtacccggtgagagaagcaccgcttccaccttccctactgatccggttagtccccttactaccaccctaagccttgctcaccattcttctgctgccttacctgcacggacatccaacacgaccatcactgctaatacttccgatgcatatctcaatgccagtgagactaccacactaagccctagcggaagtgctgttatctctactacaaccatcgccaccacaccatcgaaaccgacatgcgatgaaaaatacgctaatataacagttgattacctgtataataaggaaaccaagctctttaccgctaagcttaacgtgaacgagaatgtggaatgcgggaacaatacatgtactaataacgaagttcacaacctcaccgagtgcaagaatgcaagtgtcagcatcagccacaacagttgcacagcccctgataaaacccttatactggatgtgccacctggggtggaaaagttccagctacacgactgtacccaggtggagaaagctgataccacaatctgtctcaaatggaaaaacatcgaaacatttacttgtgacacccagaatataacttatcgcttccagtgtgggaatatgattttcgataataaagagattaaattagaaaacctagagcccgagcacgagtacaaatgcgatagcgaaattctctataacaaccataaattcacaaacgcctctaaaatcattaagactgacttcgggtcccccggagaacctcagataattttctgtaggagcgaagctgcacaccagggagtgattacttggaaccccccacaacgatccttccacaatttcactttgtgttacataaaggagaccgaaaaggattgcctgaacctggacaaaaacctgatcaagtatgacctgcagaatcttaagccctatacaaagtatgttttgtcactccatgcttacataatcgctaaagtccaacgtaacggctctgccgctatgtgccatttcacaacgaagagcgctccgccttcacaggtgtggaatatgactgtgtccatgacttctgataatagcatgcacgtcaaatgcagaccacctagagatagaaacggcccacacgagaggtaccaccttgaggtcgaggccggaaataccctagttcgcaatgagagccacaaaaattgtgactttagggtcaaagacttgcaatactccactgactatacattcaaagcctatttccacaatggcgattatcccggagaaccttttatccttcaccacagtacatcctacaacagcaaagcccttattgcttttttggcattccttattattgtgacgtctatcgctctgctggtggtattgtataaaatctatgacctacataaaaagcggagctgtaacttggatgagcagcaggaactggtggaacgcgatgatgaaaagcagttgatgaatgtagagcccatacatgccgatatattgttggagacctacaagaggaagattgcagatgaggggagattgtttctagctgaattccaatctatccctagggtcttcagtaagttcccgattaaggaggcccgaaagccttttaatcaaaacaaaaatcgctacgtggacatccttccatatgattataatagagtggagctgtccgagattaatggcgatgccggtagcaactacatcaacgcaagttacatcgacgggttcaaggagccaagaaagtacatcgccgctcaaggccctagggacgagacagtcgacgatttctggcggatgatctgggagcaaaaagccaccgtgattgtgatggtgaccagatgcgaagaagggaatcggaacaaatgtgcagagtactggccttccatggaggaaggcaccagggcctttggcgatgttgttgttaagatcaatcaacacaagcgctgtcctgactacataatacagaaactcaacatagtaaacaaaaaggagaaggctaccgggagagaagtcactcatatccagtttacctcttggccagaccacggggtaccagaggatccacaccttttgctgaagttacgcaggagggtcaatgcattttccaactttttttccggccctattgtggtccactgctccgccggagtgggtaggacagggacctacatcgggattgacgctatgctggaggggctggaggcagagaataaagttgatgtgtatggctacgtggttaaattaaggcggcaaagatgtctcatggtccaggtagaagcgcagtatatcctcatccaccaggccctggttgaatacaatcagtttggcgagactgaggtgaatctgtctgagctgcatccctacctgcacaatatgaagaagcgagatccccctagcgaaccaagccccctggaagccgagttccagagactgccttcctataggtcctggcgcacacaacacatcggcaaccaggaagaaaataagagcaaaaacaggaattccaacgtgatcccatacgactataatcgagtcccactgaaacatgagcttgaaatgtcaaaggaatccgaacacgacagcgacgaatccagcgatgacgactcggactctgaagaaccctccaagtatataaacgcctccttcatcatgtcttattggaagcccgaagtcatgatcgccgcacagggcccattgaaagagactattggggatttttggcagatgatattccagagaaaagtgaaagtgatcgttatgttaaccgaactgaaacatggagatcaagagatctgcgctcaatattggggtgaaggcaagcagacatatggagatatcgaagtggatcttaaggatactgataagtcctccacctacacactccgcgtgtttgaactccggcacagcaagagaaaagatagccgaactgtgtaccagtaccaatacacgaactggtctgtggagcaacttcccgcagagcccaaagagctgatctctatgatccaggtggtaaagcagaagctacctcaaaaaaacagcagcgaaggcaataaacaccataaaagcacgcctttgctcatccattgtcgggacggctcccaacagaccggaattttttgcgccctcctgaacctcctcgaatcagctgagactgaggaggtggttgacatctttcaggtggtgaaggcactaagaaaggcaaggcctggtatggtgagtacctttgaacagtatcaatttctatacgatgtaatcgcatcgacatatcctgcccaaaacggccaagtgaaaaaaaataaccaccaagaggataagatcgaattcgataatgaggtggacaaggtcaaacaagacgcaaactgcgtcaaccccctgggcgctcccgagaaactcccggaggctaaagaacaagcagagggctctgaacctactagcgggactgaaggtcctgaacactccgtgaacggccctgcatcgcccgcattgaaccagggctcctag

SEQ ID NO: 30380 - DNA, 441 bp, synthetic construct
  misc_feature 1..441: note = Description of Artificial Sequence: Synthetic coding sequence
  source 1..441: mol_type = other DNA
atgtatctgtggttgaagctgctggcattcggatttgccttcctggataccgaggttttcgttaccgggcagagccccactccttctcccactgatgcctatctcaacgcttccgaaacaacaacacttagtccttccgggagtgccgtcatttcaaccaccaccatagccaccactccatcaaaacctacttgtgacgagaagtatgcaaacatcaccgtggactacctctacaataaagagacaaagctattcactgctaagctcaacgtcaacgaaaacgtggaatgcggaaacaacacgtgtaccaataatgaagtgcacaatctgaccgagtgcaaaaacgcttctgtgtccattagtcacaatagttgtactgccccagataaaacgctcatcctcgacgtgccaccaggcgttgagaagttccagttgcactag

SEQ ID NO: 30381 - DNA, 351 bp, synthetic construct
  misc_feature 1..351: note = Description of Artificial Sequence: Synthetic coding sequence
  source 1..351: mol_type = other DNA
atgtatctgtggctcaaactcctggctttcggtttcgcatttttagacacggaggtattcgtgaccggacagagtcccaccccaagccccaccggacttaccaccgccaagatgcctagcgtgccgctgtcttcagacccattaccgacacatactaccgcctttagtccggcttctaccttcgagcgggagaacgacttctccgaaaccacaacaagtctgagcccagataacacctctacacaggtaagtccagatagccttgataatgcatcggcgtttaacacaacaggtgtcagctctgttcagacaccccatctgcccacgcacgctgattcacagacgccatag

SEQ ID NO: 30382 - DNA, 3915 bp, synthetic construct
  misc_feature 1..3915: note = Description of Artificial Sequence: Synthetic coding sequence
  source 1..3915: mol_type = other DNA
atgtacttgtggctcaagctgcttgcttttggatttgcattcctggacaccgaggtgttcgttacggggcagtccccaaccccttctcccaccggtcttacaaccgccaagatgcccagcgtgcctctgagctccgaccctctccctactcatacgaccgcatttagcccagcttccacttttgagcgagaaaatgatttttctgagactacaactagtctctcacctgacaatacctccacacaggttagccctgattctctggataatgcgtcagcctttaacaccacaggcgtatcctctgtgcagacaccccacctgcccactcacgcggatagccaaacacctagcgccggtaccgacactcagacgttcagcgggtcagcagcaaacgcaaagcttaaccccacgcctgggagtaacgcgattagcgatgttcccggagagcggagcactgcatcaaccttccctaccgatcccgtctctccactgaccaccacgcttagtttagctcatcattcctctgccgcactgcccgcaagaacctcaaataccacaataacggcaaacaccagtgatgcatacctgaacgcgtctgaaacaacaacactctcgccaagcggttcggctgttatttccaccactaccatagccacgaccccgtcaaagcccacatgcgatgaaaaatatgccaatatcaccgtggactatctatataataaagaaacaaagttatttacggcaaaactcaacgtcaacgagaatgtggagtgcggcaataatacttgcacaaacaacgaagtgcataatcttaccgaatgcaagaacgcttccgtttccatcagtcacaactcatgtactgctccggacaaaactttgattcttgatgtccccccaggcgtggagaagttccagctgcacgactgcactcaggtggagaaggccgatacaactatttgcctcaagtggaagaacatcgaaacatttacttgtgatacacagaacattacgtaccgatttcaatgcggtaatatgatctttgataataaggagataaaacttgagaacctcgagccagaacacgagtataagtgtgactcagaaattctgtacaacaaccacaagttcaccaacgcctcgaagattatcaagactgattttggctctcccggtgagccgcagatcatcttctgtcgcagcgaagctgcccaccagggcgtgatcacgtggaacccccctcagaggtcattccacaacttcactttgtgttacataaaggaaacagagaaagactgtcttaacctggacaagaatctgatcaagtacgatctgcagaatctgaagccatatacaaagtacgtcctttcccttcatgcctacattattgccaaggtgcagcgaaatggttccgcagcaatgtgtcacttcacaaccaagagcgcccctccatcccaggtgtggaacatgacagtgtctatgactagtgacaacagcatgcatgtcaagtgccgacctccccgtgatcgcaacggcccacatgaaaggtaccatctggaggtcgaggccggtaataccctggttcgtaatgagtctcacaagaactgtgactttagagtgaaggacttgcagtattctactgattacacttttaaggcctactttcacaacggcgattatcccggagagccctttattttgcaccattccacttcatataactcgaaggcacttattgctttcctcgccttcttgatcattgtaacatccatcgcgttgctggtagtactgtacaagatctacgacttacataagaaacgctcctgcaatttagacgagcagcaggaactcgtggagagagatgacgagaaacaactcatgaatgtggaaccaattcacgctgatattctcctcgagacctacaagcggaagattgccgacgaaggcaggctgttcctcgccgaattccagagcattcccagagtgttctccaaattccccattaaagaagctcgaaagccctttaaccaaaacaaaaatcggtatgtagatattcttccttatgactataatcgggtcgaattgtccgagatcaacggcgacgctggaagcaactatattaacgcctcgtacatagacggttttaaagagcccaggaagtatattgcggcacagggtcccagggacgaaacagttgacgatttttggagaatgatctgggagcaaaaggctaccgtaatcgtcatggtcactaggtgcgaggagggcaaccggaataagtgtgccgaatattggccctctatggaggagggtactcgcgctttcggggatgtcgttgttaagatcaaccagcacaagaggtgcccagattacatcatccaaaagctaaacatcgtgaataagaaggagaaagctactggtcgcgaagttacgcatattcagttcaccagctggcctgatcatggggtgcccgaggatccacacctgctgctaaagctgagacgtcgagttaatgcgtttagcaactttttcagtggacctatagttgtccactgttctgcaggagtcggcaggaccggcacctatatcggaattgatgccatgttagaggggctcgaagcggaaaacaaggtagatgtgtacggctatgtggtcaagttaaggagacagaggtgtcttatggtgcaggtcgaggcgcaatatatcctcattcatcaggccctcgtcgaatataatcaatttggagaaaccgaggtgaacctgtcagagctccatccctacctgcataatatgaaaaaaagagaccctccatccgagcccagtcccctcgaagccgaatttcagaggctgccttcatataggtcttggcggacacaacatatcgggaaccaggaagaaaacaaaagtaagaataggaattcaaatgtgatcccatacgactacaaccgggtccctctgaaacatgaattagagatgagcaaagaatctgagcacgactcagatgagtctagcgacgatgattcagatagtgaggaaccaagcaagtatattaacgcctcgttcatcatgtcgtactggaaacctgaagtgatgatcgcggcacaaggccctctcaaggagacaataggcgacttttggcagatgatttttcagaggaaggtgaaggtcatcgtcatgctaacggaactcaagcacggcgaccaggagatttgtgctcagtactggggagagggaaaacaaacttacggtgatatcgaagtggatctgaaagacacagacaagagtagcacgtatacactaagagtgtttgaattgaggcacagcaagagaaaggacagcaggaccgtctatcagtaccaatatacaaattggtcggtcgagcagctgcccgctgagcccaaggaactgattagcatgatacaagtcgtcaagcagaagctacctcagaagaatagtagtgagggcaacaaacaccacaaatctacacctttactgatacattgccgggatggtagccagcagactggtatcttctgtgctcttctgaaccttctagagagcgctgagacagaggaagtcgttgatatttttcaagtggtcaaggccttacgcaaggcccgtcccggaatggtgagcactttcgaacagtaccaattcctgtacgatgtgatcgccagcacctaccccgctcagaatggccaggtcaaaaaaaacaatcatcaggaggataagattgagttcgataatgaggttgataaggttaaacaggacgcgaactgcgtaaacccactgggagcgccagaaaagttgcctgaagccaaagaacaggctgaaggctctgagcccaccagcggcacagagggtccagagcacagcgtcaatgggcctgccagtccagcactgaaccaaggcagctag

SEQ ID NO: 30383 - DNA, 1797 bp, synthetic construct
  misc_feature 1..1797: note = Description of Artificial Sequence: Synthetic coding sequence
  source 1..1797: mol_type = other DNA
atgtatctgtggctgaagttactggcctttggattcgcgttccttgataccgaagtattcgtcaccggtcagtccccaacccctagcccaactggggtctcaagtgtgcaaaccccccatctgcccacccacgctgattctcaaactccctcagctggcacagacacgcagactttttccggtagcgctgctaatgccaagctgaatcccacacccggatcaaatgcaatttctgacgcatacctaaatgcctcagaaacaactaccctttctccgtcaggatctgcagtgattagcacaaccaccatagcaacaaccccttctaagcccacttgcgatgagaaatatgcaaatataacagttgactatctgtacaacaaggaaacaaagctgtttaccgccaagctaaacgtgaacgaaaacgtcgaatgtggtaataatacgtgtacaaataacgaggtacataacttgacagagtgcaagaatgcctcagtcagcatttcccacaatagctgcaccgcccctgataagacacttattttggatgtccctccgggagtggagaagttccagctgcacgattgcacgcaggtagagaaggcagacaccaccatctgcctgaaatggaagaatatagaaacctttacatgtgatactcagaacattacatatagattccagtgcggtaatatgatatttgataacaaagaaatcaagctggagaacctggaaccagagcacgagtataagtgcgattccgagatcttatataataaccataaattcacaaacgcgtctaagattataaagacagattttggctcacccggagagcctcagattattttttgtcggtctgaagcagcccaccagggcgtgatcacctggaatcccccacagaggtcatttcacaatttcactttgtgttatattaaagagacagaaaaggactgcttgaacctcgacaagaaccttatcaagtacgacctgcaaaaccttaaaccctacacaaaatatgtcctatctcttcatgcctatatcatcgccaaggtgcagaggaatggcagtgctgccatgtgtcactttacaaccaaaagcgctcctcctagtcaggtctggaacatgaccgtttcaatgacttcggataattctatgcacgtgaaatgccgtccgcctcgggacaggaacggccctcacgaaagatatcatctcgaggtcgaggccggaaatactctcgtccggaacgagagtcataaaaactgtgactttagagtgaaagaccttcaatactccaccgactatacgttcaaggcctatttccacaacggggactatccaggtgaaccctttatccttcaccatagcacttcctacaactccaaagcccttatagcctttttggccttcctcatcattgtgacctctatcgccctgctggtggtgctctataaaatttatgatctccacaagaagcggtcctgtaatcttgacgaacagcaggaactggttgaaagagacgacgagaaacagctgatgaatgtggagccgatccatgccgacatcctcttggaaacctacaagcgcaaaattgccgacgagggcaggttgtttctggccgagtttcagtctatccctcgggtgttcagcaagttccctattaaagaagccaggaagccttttaaccagaataaaaatcgctacgtcgacatcctcccctatgactataaccgcgttgaactgtccgagataaatggggacgcgggatccaactatatcaatgcttcctatatcgattag

SEQ ID NO: 30384 - DNA, 2271 bp, synthetic construct
  misc_feature 1..2271: note = Description of Artificial Sequence: Synthetic coding sequence
  source 1..2271: mol_type = other DNA
atgtacctttggctgaaactgctagcttttgggtttgcttttctcgacacagaagttttcgttaccgggcagtcccccaccccaagtcccacgggcctgactacagctaagatgccaagcgtgcctttgtcaagcgatcccctccccacgcacacaactgccttcagcccagctagcacgtttgagcgcgagaacgacttctcagagaccaccacttcactgtcccctgacaatactagcacccaggtctcccctgactccctggataacgctagtgcttttaacacaacgggtgttagcagcgtgcaaacaccccaccttcctacccacgcagactctcagacaccttcggccggtaccgatacacagaccttctcagggagcgcggctaatgccaaattgaaccccaccccgggaagtaatgcaatttccgatgcttatctgaacgcaagcgagaccaccacgctgagtccctcaggatcggcagtcatttcaacaacaacgattgcgactacgccaagtaagcccacatgcgacgagaaatatgcaaacataaccgtggactacctgtacaataaggagaccaagctgttcacagctaagctgaacgttaacgagaacgttgagtgcggcaacaatacttgcacgaacaacgaggtgcataatttaaccgagtgcaaaaatgcctccgtaagcatcagccataattcgtgcacagccccagacaaaacactgatcttggatgtgccccctggcgtggagaaatttcaactgcacgattgcacacaagtagagaaggccgatacaaccatctgcctgaaatggaagaacattgagacttttacttgtgacacccagaacattacttatcgctttcagtgtggcaacatgattttcgacaacaaggaaataaaactggaaaatcttgagccagaacatgagtataagtgcgactcagagatactgtataataatcacaaatttacaaacgctagtaagattattaaaacagatttcggctcaccgggagagccccagataattttctgccggtcagaggctgcccaccaaggagtaatcacatggaatccgccacagaggtctttccataactttactctgtgctatatcaaagagacagagaaggactgccttaacctggataagaatctcattaagtacgacctgcagaacctgaaaccatacactaagtacgttctcagcctgcacgcctatatcattgccaaagtccagaggaatggcagcgcagctatgtgtcatttcaccacaaagagcgccccaccttcccaggtctggaacatgactgtttctatgacgtcagataacagcatgcacgtgaagtgtcggcctcccagggacagaaatggaccgcacgaaaggtaccacttggaagtggaggctgggaacacccttgttaggaacgaaagccacaagaattgtgatttccgcgtgaaagatctccagtacagtactgactatacctttaaagcctatttccacaacggcgattaccctggcgaacccttcatactgcatcactcgacctcctacaattctaaggccctcattgcgtttctggcattcttaattatcgtaactagcattgcccttttggtggttctctacaaaatatacgaccttcataagaagcgcagctgtaaccttgatgagcagcaggagctggtcgagcgagacgatgaaaaacagctgatgaacgtggagccaatccacgcagacattctgctcgaaacatataagcgcaagattgccgatgagggccgtctatttctcgccgagttccagagtattcctcgggtgttcagcaaatttcccataaaggaggccagaaagcccttcaatcagaataagaataggtatgttgatatcttgccatatgactacaatcgcgtcgaacttagcgagatcaatggcgacgctggaagtaactacattaacgctagctatattgatggatttaaggaaccacgtaaatacatcgccgcacagggaccgagagatgagactgtggatgacttttggcgcatgatctgggaacagaaggccaccgtgattgtgatggtaacccggtgtgaggagggcaatcgcaataaatgcgctgagtactggccctcaatggaagagggtacacgagccttcggcgatgtggtggtcaaaatcaaccaacataagcggtgcccagactacatcattcagaaactgaacatcgtcaacaagcaaaagtctaagtag

SEQ ID NO: 30385 - DNA, 1662 bp, synthetic construct
  misc_feature 1..1662: note = Description of Artificial Sequence: Synthetic coding sequence
  source 1..1662: mol_type = other DNA
tctgactatatgatcattaaaaagaagtccaattatgaggtgctggagaaagatgtgggtctgaaaaggttctttcccaagtcactgcttgatagtgtgaaggccaagactttgaggaagttgattcagcagaccttccgccagttcgctaacctcaaccgagaagaaagcatccttaaattcttcgagattctaagtcccgtgtaccgcttcgacaaggaatgttttaaatgcgccctcgggtccagctggataatcagtgtcgaactagccatcggccctgaagagggcatatcttatttaaccgacaaggggtgtaatcctacccacctcgccgactttactcaggtccagacgatacagtactcgaattctgaagataaagatcggaagggcatgctccagcttaaaattgccggtgctccagagccactgaccgtgaccgcaccctctctgactattgcagaaaacatggctgatctaattgacgggtactgtaggttggttaacggtacctctcagagcttcattatcaggccgcagaaggagggggagcgggctctaccttcaatccccaagctggcaaatagcgaaaagcaggggatgcgaacccacgcagtgagcgtgtctgaaaccgatgactacgccgagatcatcgatgaggaagacacatacacgatgccttctacgagggattacgagattcaacgcgagcgcatagagctcggtagatgtataggcgaggggcaattcggagatgtccaccagggtatttacatgtctcccgagaatccggctctggcagtggcaataaagacctgcaagaattgtaccagtgacagtgtgcgtgagaagttcctccaggaagcctgccattacacgtctttacactggaactggtgtaggtacatatcagaccccaacgtcgactgccccgatccacgcaacgcagaggtgacaatgagacagtttgaccatcctcacatagtgaagttaatcggagtaatcacagagaatccggtctggataatcatggaactctgtactctgggtgaactgagaagttttttgcaggtgcggaaatattcccttgatctggcaagtctgattctctatgcctatcagctgtctacagcgctagcctacctcgagagtaagaggtttgtgcacagagatatcgcagcgagaaatgtcttagtttcaagcaacgactgtgtgaagcttggcgactttggtctctccagatacatggaggattccacctactataaagcaagcaagggcaaactcccaatcaaatggatggcccctgagtccataaacttccgcaggttcacgtccgcctctgatgtgtggatgttcggggtctgtatgtgggaaattttaatgcatggggtgaaacctttccagggggtgaaaaacaatgacgtgatcggacggatcgagaacggagagcgactgccgatgcctccaaactgcccgccaaccttgtactcactcatgaccaaatgctgggcctacgatccatccaggcgcccacggtttactgagctaaaggctcagctgtcttttcaaaacccagcccagatgctcccagcctcaggcagactgccaaaccagccatgcccggagcgggaaaactactcatttgcgaccttttag

SEQ ID NO: 30386 - DNA, 2931 bp, synthetic construct
  misc_feature 1..2931: note = Description of Artificial Sequence: Synthetic coding sequence
  source 1..2931: mol_type = other DNA
cggagctttatcatacttaaagcaatcgttagccagccaccagggcctgtcctgagcggaatggaaatgcttctgatgagtggctacgaattgcggattcggtatttgcctaaaggttttctgaaccaattcaccgaggataagcccacgctgaattttttttaccagcaggtaaagtctgattacatgctggagatcgccgaccaggttgatcaggagattgctctcaagctggggtgtctggagatccggcgatcttactgggaaatgaggggcaacgcactcgaaaagaagagcaattacgaagttcttgaaaaggacgtcggactcaaacggttttttccgaagtctctgttagactcagttaaagccaaaactttgcggaagctgatccagcagacattccgacagtttgctaacttaaatcgagaggaatcaatcctgaagtttttcgagatcttgtctcctgtatatcggttcgacaaagagtgttttaagtgtgccctaggcagctcttggatcatctcggtggagctggccatcggaccagaagagggaatatcgtatttaacagataaagggtgtaatccaacacacctcgcagattttacacaggttcagacaatccagtatagcaacagcgaggacaaagatcggaaggggatgcttcagctcaagatcgctggcgctccagaacccctgaccgtgacagccccttccctgaccattgcggaaaacatggcagatctgatcgatggatattgtcggctggtcaacgggacatcacagagtttcattattcgcccacagaaagaaggagagcgcgctctgccttccattccaaaactggctaacagtgaaaagcagggcatgagaacccacgctgtctctgtatccgacgaaattcccggtgctgaaactgacgactacgccgaaataattgacgaggaggatacatacaccatgccgagtattaagtcctactgtatcgatgtggccagagactacgaaattcaacgggagcgcattgagctgggccgatgtatcggagagggtcagttcggggatgtacaccaaggtatatatatgtccccagagaatcctgcgctagccgtcgctatcaaaacatgcaaaaactgtacatccgatagcgtcagggaaaagtttctgcaagaggccctcacgatgcgacaatttgaccatccgcacatcgtgaaactcatcggcgtaattactgaaaatcccgtgtggataattatggagttatgtactctgggcgaactgagaagctttctgcaagtccggaagtactctctcgacttagcttccctcatcctgtacgcctaccagctgagtactgccctggcctatcttgagagcaaaagattcgttcatagagatatcgccgcacgcaacgtactcgtcagcagcaacgattgcgttaagctcggagactttggactgtctcgctatatggaggacagtacatattataaagcttccaaggggaagctgccgatcaaatggatggccccagaatctatcaatttccgtagattcactagtgccagtgatgtttggatgtttggggtttgcatgtgggagattcttatgcatggcgtaaaacccttccagggcgtcaagaataatgacgtcatcgggagaatcgaaaatggcgagaggctgcccatgccacccaactgtccgccaaccctatactccctgatgaccaaatgctgggcttatgacccaagtaggaggcctcggtttacggaactgaaagcccagctgtcgaccatccttgaggaagaaaaggcccagcaagaggagcgaatgcggatggaatcacgtcgacaggctactgtgtcatgggattccggtgggagtgacgaggcccctccgaagccatcccggcctggctatcccagccctcggagttccgaaggcttttacccatccccccagcacatggtgcagacaaaccactaccaggtgtccggctaccccggatctcatggcatcaccgccatggcgggatcgatatatcctgggcaagcatctctcctggatcaaaccgactcctggaatcatcgacctcaggaaatcgcaatgtggcagcccaacgtggaagacagcaccgtgttagacctgcgcggaatcgggcaggtcctgccaacgcacctgatggaggagaggttaattcgacaacagcaggaaatggaggaggatcaaagatggctcgagaaggaggaaaggtttcttaaaccagacgtccggctctctcgaggatcaattgacagagaagacggcagcctgcaggggccaataggaaatcaacatatttaccagccagtggggaagcccgatccggcagcccctcctaagaagccacccagaccaggggcacctggccatttaggctcgctcgccagcctctcaagcccagcagattcatacaacgagggcgttaagcctctccgccttcagccacaggagataagccccccacccacagccaacttggatagaagcaacgataaagtttacgaaaacgtcaccgggttggtgaaagccgtgatcgagatgtcttctaagatccaacctgcaccacctgaggagtacgtccccatggttaaggaagtcggacttgcgctcagaaccctgttagccactgttgatgaaaccatcccattactacctgcatccacccaccgagagatcgagatggcccagaagttgctcaacagtgacttgggcgagctgatcaataagatgaagctcgcccagcagtatgtcatgacaagcctccaacaggaatacaaaaaacagatgctcacggctgcacatgccttggctgtagacgctaagaacctgctggatgtgattgaccaggccagactgaagatgttgggccaaacgcgcccacattag

SEQ ID NO: 30387 - DNA, 3024 bp, synthetic construct
  misc_feature 1..3024: note = Description of Artificial Sequence: Synthetic coding sequence
  source 1..3024: mol_type = other DNA
aaagctgaatatgatcggtatctggcatcaagtaagatcatggccgcagcatatctcgatccaaatttgaatcatacccccaaagaatggaagtacgaactgcgcatcagatatctgcctaaaggttttctcaaccagtttacagaagacaagcctactcttaacttcttttatcagcaggtgaaatcagattatatgctggaaattgctgaccaggtcgaccaagaaattgccctcaagttaggctgcctggagattcgccgaagttactgggagatgcggggaaacgccctggaaaagaaatccaactacgaggttttggagaaggatgtcggccttaaaagattctttcccaagtctctgttggatagtgtaaaggcaaagacgttgcgaaagctaatccagcaaacgtttaggcagttcgccaacctgaaccgggaggagtccatcctaaaattttttgagatattatcacccgtgtaccgttttgataaagagtgtttcaagtgcgccctgggatcctcctggataatctcggtggaactggctattggtcctgaagaaggaatctcctacctgaccgataagggttgcaaccctacccatctggctgacttcacgcaggtccagacgatccaatatagtaactcagaagacaaagataggaaaggaatgcttcagttgaagattgctggcgcacccgaacccctcaccgtgacagcaccttctctcactatagctgagaacatggccgatttgatcgatggttactgcagactggttaatggtaccagccaatcctttatcattagaccgcagaaagagggggaacgtgccctgccaagcattccaaaacttgctaactccgaaaagcaggggatgcggacccacgccgtctccgtgagtggggttagccactgccagcacaaggttaagaaggctcggaggtttctgcccctggttttttgttcccatgacccaccatctacagacgagatcagtggcgacgagactgatgactacgctgagatcatagacgaggaggatacatacacaatgccgtcaattaagagctattgcattgatgtggcccgagactatgagatccagcgcgagcgaattgagctgggaagatgcattggagagggtcagtttggagacgttcaccaggggatttatatgagtcctgagaatccagccctggctgtggcaattaaaacctgtaagaactgtacctccgactccgtacgggagaagtttttgcaggaggctctgactatgagacaatttgaccacccccacatcgtgaagctgattggagtcattactgaaaaccctgtttggattattatggagctctgcactttgggagagttgagatcattcttacaggtgcggaagtattccctggatctcgcgtcactgatactgtatgcatatcagctgtcaacagcccttgcctacttggagagtaagcggtttgtgcacagggacatcgccgcacgcaacgtgctggtgtctagtaacgactgtgtgaaactgggcgatttcggcctttctcgctacatggaggactcaacctattataaggcctccaaagggaaactccccattaaatggatggctcctgaaagcattaatttcagacggtttacatctgcgagcgatgtttggatgtttggcgtgtgcatgtgggagattctaatgcatggcgtaaaacccttccagggcgtaaagaataatgatgtgatcggcagaatcgaaaacggggagagattgcccatgcccccaaactgtcctcccacactgtatagtctgatgacaaagtgttgggcctatgatccaagcaggcgaccacggtttacagaactcaaagcccaactttccactattctcgaggaggagaaggcccaacaggaagagagaatgcggatggaaagtaggcgtcaggcgacggttagctgggactcaggcggatccgatgaggcacctcccaagccttcgcgtcccggataccccagcccacggtcctccgaaggattttatccttcgccccagcatatggtgcagacaaaccactaccaagtttctggctaccccggaagccatggcattactgcaatggcaggctcaatctatccaggacaggcctcacttctggatcaaacagattcctggaaccaccgaccccaagaaatcgcaatgtggcagcccaacgtagaagactcgacagttctggacctccgtggaattggccaggtgttgcccacgcatctcatggaggagcgactcattaggcaacagcaagagatggaagaggaccagaggtggcttgagaaggaggagcgttttcttaagcccgacgttagactgagtagaggctcgatagatagggaggatggatctctgcagggccctatcgggaatcagcacatttatcagccagtgggcaagcccgaccctgccgcacctcctaaaaaacccccaaggccaggggcacccggtcacttagggtccctcgcttccttaagttctcccgcagatagttacaatgaaggcgtaaagcccctgcggctccaaccacaggagatctctcccccaccaaccgccaatttagaccggtccaacgataaagtctacgaaaatgtgaccggcctcgtgaaagcagtgattgaaatgagttcaaaaatccagcccgctccgcctgaggagtacgttcctatggtgaaagaagtcggattagcattgcgcaccctattggccactgttgacgagacaatccctcttcttcccgcaagcacccacagggagatcgagatggcccaaaaattgctcaactccgatctcggcgagctgatcaataagatgaaactggcccagcagtatgtaatgaccagcctgcagcaggagtacaagaaacaaatgttgacagctgcccacgccctcgctgtcgacgccaaaaatctcctcgatgttatcgaccaagctagattaaagatgctggggcagaccagaccgcattag

SEQ ID NO: 30388 - DNA, 3198 bp, synthetic construct
  misc_feature 1..3198: note = Description of Artificial Sequence: Synthetic coding sequence
  source 1..3198: mol_type = other DNA
atggctgcagcctaccttgatccaaatctgaaccacaccccaaatagctcgactaagacccacctgggtaccgggatggaacgatctcccggtgcaatggaacgcgtgctaaaagtctttcactattttgaatccaattccgagcccaccacgtgggcttccataataaggcatggggacgcaactgacgtgaggggaataattcagaaaatcgtggacagccacaaggtcaaacacgtggcctgctacggctttcgcctgtctcatcttcgctccgaggaggtccattggctgcatgtcgatatgggagtgtcgtctgtccgggaaaagtacgagcttgcccatcctcctgaagagtggaagtatgagttacggattcggtatctgcccaagggattcctcaatcagtttaccgaggataaaccaacgctgaatttcttctatcaacaggttaaatcagactacatgcttgagatagctgatcaagtggaccaggagattgccctcaaattggggtgcctcgaaatacggaggtcttactgggaaatgcgcggaaatgcgttagagaaaaagagcaattatgaagtgcttgagaaggacgtcggcttaaagcgcttctttccaaaatcactgctcgacagcgtgaaagcgaagactttgcggaaactaattcaacaaacctttcgtcaattcgccaaccttaaccgggaggagagcattttgaaattcttcgagattcttagcccggtgtacagattcgataaggagtgttttaagtgtgcccttggcagttcttggattatatccgtcgaactggctatcggtcccgaggaggggatctcatacctgacagacaagggatgcaatcctacacaccttgcagattttactcaagtccagaccattcagtacagcaactccgaggacaaagaccgcaaagggatgttacagcttaagattgcaggtgccccagagccacttacggtcactgccccatcacttaccatagcggaaaatatggctgatctgatagatgggtactgccgcctcgtaaacggtactagccagtcctttataattcggcctcagaaagagggtgagagggccctgccaagtatcccaaaattagccaattccgagaaacagggcatgcgcactcacgccgtctcagtgtccgagacagatgattacgctgagataattgatgaagaggatacatataccatgccgagcaccagggattacgaaatccagagggagcggattgagctgggtaggtgcataggtgaaggacagttcggagatgtccatcagggcatttatatgagccctgaaaacccagctttagccgtagccatcaaaacatgtaaaaattgcacctcggactccgtccgagagaaatttctgcaagaggcgctgactatgagacagtttgaccacccccatattgtgaagctgataggggtcattaccgagaacccagtgtggataatcatggagctctgcacgctgggagagctgcgctcattcctgcaggtgcgcaagtactcccttgatctggctagtctgatcttgtatgcataccaactgagcacagctcttgcctatttagaatcaaagaggtttgttcaccgggatatagccgctcgaaacgtattggtttcttccaacgattgcgtgaagcttggcgacttcggactgtccaggtacatggaagactccacatactataaagccagcaaaggtaaactgccaattaaatggatggcacctgagtccatcaatttccgcagatttacctcagcttccgacgtgtggatgttcggcgtgtgcatgtgggagattctgatgcacggagtgaagccattccaaggcgtaaaaaataacgatgtgattggtcgcatcgaaaatggtgaaaggcttcccatgccccctaactgccctccgaccttgtacagtcttatgaccaagtgctgggcatatgaccccagcagacggccacggttcaccgaactgaaggcgcagctttctacaatcttggaggaagaaaaagcccagcaagaagagaggatgcgcatggaatcgagaaggcaggctacagtctcctgggactccggcggatcagacgaggcaccccctaaaccctcacgccctggctacccatcacctagatcatctgaagggttttatccttccccgcaacacatggtgcaaaccaatcactatcaggtgtctggctacccaggatctcacggaatcacagctatggcgggttccatctacccaggccaggctagtcttttggatcaaaccgattcctggaatcatagaccacaagagatagctatgtggcagcctaacgttgaggatagcactgtgttagatcttagaggaatagggcaggtgctccctacacatctgatggaggagcgacttatccgacaacagcaagaaatggaagaggatcagcgctggttggagaaggaggaaaggttcctcaagcccgacgtgcggcttagtcggggaagcatagatcgcgaggacggctccctacaaggaccaataggaaaccagcatatctaccagccggtgggtaagcctggaaaggaagagaaaaattgggccgaacggaaccccgctgccccacctaagaaacctccacgcccaggagcaccgggtcaccttggcagcctggcctcgctatcatcccctgccgatagctacaacgaaggcgtgaagcctaaccagctccagccacaggagatctcccccccaccaactgctaatctggatagaagcaacgacaaggtctatgagaacgtcactgggctggtgaaagcagtgatagaaatgagcagcaagatacagccagcacccccagaggagtacgtacctatggtcaaggaagtaggcctggctctgcgcaccctgctcgctaccgtggatgaaaccatccctttactgccagcttccacacaccgagagatcgagatggcccagaaactactgaactccgaccttggcgaactcattaacaaaatgaaattagcacagcagtatgtcatgacatccctgcaacaggagtacaagaagcagatgcttactgccgcacacgcactggcggttgatgccaaaaacctgctggatgtgattgatcaggcaaggctcaagatgctggggcaaacaagaccacattag

SEQ ID NO: 30389 - DNA, 2253 bp, synthetic construct
  misc_feature 1..2253: note = Description of Artificial Sequence: Synthetic coding sequence
  source 1..2253: mol_type = other DNA
atggccgatctgatagacggatattgtcgcctcgtgaacggcactagccagtccttcattattaggcctcaaaaggagggcgagcgcgcactgccttctattcctaaacttgcgaatagtgaaaaacagggaatgcgtacacatgctgtgtccgtctctggggttagccactgtcagcataaggttaaaaaagccaggaggttcctgcctctggttttttgttcccacgatcctccctcaaccgacgagatcagcggtgatgaaacagacgactatgcggaaattatcgatgaagaggacacctataccatgccaagcacacgcgactacgagattcaaagagagaggatagagctgggccgatgcattggtgagggccagtttggcgacgtgcaccagggtatttacatgtcaccagagaaccccgcattggcagtcgcgataaagacatgcaaaaactgcacaagcgacagcgtgcgtgagaaatttttgcaggaggcgttgaccatgcgtcaatttgaccacccacatatcgtcaagctgatcggcgtcatcacggaaaatccagtctggatcatcatggaactctgcaccctgggggagctgcggtctttcctgcaggtacgaaaatatagtctggacctggcttccttaatattgtacgcttaccagttgagtacagctctggcttacctggagtctaagcggttcgtgcaccgcgacatcgcagcacggaatgtgttggtgtcgagcaacgattgcgtcaaattgggcgacttcggcctctcaagatacatggaagactctacatactacaaggcgagcaaggggaagctccccatcaagtggatggctccggaaagtatcaactttcgacggttcacatctgcctcagacgtgtggatgttcggagtgtgtatgtgggagatattaatgcatggagtgaaaccatttcagggcgtcaagaataacgacgtcattggtcggattgaaaatggcgagaggctcccaatgccccctaactgtccccctactctgtactctctcatgactaagtgctgggcttacgacccctctaggcgacctaggtttacagagctcaaagcacagctgtctaccatccttgaagaggaaaaagcccagcaggaagagaggatgagaatggagagccgacgccaagccactgtctcctgggactcggggggatcagacgaagcacccccaaagccaagtcggcctggatacccatccccacgcagctccgagggattctatccctccccacagcacatggtccagaccaatcactaccaggtgtcgggctaccccggttcccatggcatcaccgctatggcgggatccatttatcccggacaggcatccctgctggaccagacagacagctggaatcaccgccctcaggaaatagcgatgtggcaacccaacgtggaggactcaaccgtgttagatttgcgcggtataggtcaggtactgcctactcacctcatggaggaaagactcattagacaacagcaagagatggaggaggaccaacggtggctcgagaaagaggagcgatttctgaaaccggacgttagattatccagggggagcattgaccgcgaagatggctctctccaaggccctatcggtaaccagcacatctaccagcccgtggggaaaccagatcctgctgccccacctaagaagcctcctcgacctggggcaccagggcacttgggttcactggcaagcttaagttcacccgctgacagttataacgaaggggttaaaccatgtcgactgcagccacaggaaatttcaccacctccgacggccaatttagacaggagcaacgataaggtttatgaaaacgtgacaggtctggtaaaggccgtgatagaaatgagcagtaaaatccaacccgctcctcctgaagagtacgtgccaatggttaaagaggttggtttggccctgcgaacattactcgcaaccgtggacgaaaccatccccttactgccagcttccacacatagagaaatagagatggcacagaagttactgaacagtgatcttggggaactgataaacaaaatgaagctggctcaacagtatgtgatgacctcgctgcagcaggaatacaaaaaacagatgctgaccgccgcacatgctcttgctgtggatgcaaagaatttacttgacgtgatcgatcaggctaggctgaaaatgctggggcagactagacctcactag

SEQ ID NO: 30390 - DNA, 1089 bp, synthetic construct
  misc_feature 1..1089: note = Description of Artificial Sequence: Synthetic coding sequence
  source 1..1089: mol_type = other DNA
atgagaatggaatcaagacgtcaagccactgtgtcctgggacagcgggggtagtgacgaagcccctcctaagccctcgcgcccaggataccctagtccaaggtcatcagagggcttttacccatccccccagcatatggtgcagacaaaccattatcaggtgtccggctaccccggttctcatggcattacagctatggccggaagtatttaccccggacaggcaagtttgctggatcaaaccgattcctggaaccatcgcccacaggagatcgcaatgtggcagcccaatgtggaagactcaacagtgctggatctgcgcggaatcgggcaagttctgcctacccacctgatggaggaaaggctaattcgccagcaacaggagatggaagaggaccagcgttggctcgagaaagaggagaggttcctgaagcctgacgtgagactgagtcggggaagtatcgacagggaggacggatctttacaggggccaatagggaaccagcacatatatcagcccgtaggcaaacccgatcctgctgccccaccaaagaagcctcccaggccgggagcacctgggcacctgggaagtttggcttccttgtctagtcccgctgattcctacaacgagggagtgaagttgcagcctcaggagatctccccccctccaaccgcgaatcttgacagaagtaatgacaaagtgtacgagaacgttaccggcctggtaaaagctgtcattgaaatgtcaagcaaaattcaacctgctcctcccgaagagtatgtgccaatggtgaaggaagtcggcctcgctcttagaactcttctggccacagttgacgagactatcccactcctgcccgcatccacccaccgggaaattgagatggcacagaaactgctgaacagcgatctgggagagcttattaacaagatgaagctggcacagcaatatgtcatgacatccctgcagcaggagtacaaaaagcagatgctcacagcagcgcacgccctcgctgtggacgcaaagaatctgctggatgtcatcgatcaggcgcgtctgaaaatgctgggccagacacgcccacattag

SEQ ID NO: 30391 - DNA, 354 bp, synthetic construct
  misc_feature 1..354: note = Description of Artificial Sequence: Synthetic coding sequence
  source 1..354: mol_type = other DNA
atggcagctgcatatctggatcccaacctcaaccacactccaaatagctctaccaagacccacctaggcaccggtatggaaagaagtcctggcgcaatggagagggtgctcaaggtgttccactacttcgaatctaatagcgagcctaccacatgggctagcatcattaggcacggcgacgcaaccgacgtgagggggatcattcagaagattgtggactctcacaaagtgaaacacgtcgcatgctatggattccggctctcccatctcagaagcgaggaggtccattggctacatgtcgacatgggagtgagttctgtgcgggaaaagtacgagctggctcaccctccctag

SEQ ID NO: 30392 - DNA, 3291 bp, synthetic construct
  misc_feature 1..3291: note = Description of Artificial Sequence: Synthetic coding sequence
  source 1..3291: mol_type = other DNA
atgctgctggagctagcaggccaggaagcccttaagcctgctggggctatatatatggagaaatctgggtgttcgcctttcccggtatgttgggccaaagagtatgaccgctacctggcctcatctaaaattatggccgcagcttacctggatccaaacctgaaccatacgccaaacagcagcacgaagacacatctgggcaccggcatggaaaggtccccaggggctatggagagagtgctgaaagtgtttcattacttcgaatctaatagcgagcctaccacctgggcctccattattaggcatggggatgcaaccgacgtgcgaggcatcatccagaagatcgtggactctcataaggtgaagcatgtggcatgctacggattcaggctttcacacctccggagtgaggaggttcactggttacacgtagatatgggagtttcctctgtgcgagaaaaatatgagctggcccacccgccagaggagtggaaatatgagctcaggatccggtacctgcctaagggctttctgaatcaattcacggaggacaagccgactctgaattttttttaccaacaggtcaagagcgactatatgctggaaatcgctgatcaggtggaccaggagattgccctgaagctaggttgtctcgagatacgcaggtcctattgggaaatgagaggaaatgccctggagaagaaatctaactatgaggtcttggaaaaagacgttgggctgaaaagattcttccctaagagccttctggattcagtgaaggccaaaacactgcgcaagttgattcagcagacatttcgtcagttcgctaacctgaaccgcgaagaatcaattctgaagttctttgaaattttatccccggtgtacaggtttgacaaagagtgttttaaatgtgcgctggggagcagctggatcattagcgttgaactcgcaatcggtccagaggagggcatcagctatttgacagataaagggtgtaaccccactcatctggctgatttcacacaggttcagaccatccagtacagtaacagtgaagacaaagacagaaaaggcatgcttcagctgaagattgccggagcccctgagccactcacagtgaccgccccttctctgaccatcgccgagaatatggccgacctgatcgatggatattgtagactggttaacgggacatcgcagagctttattattagaccacagaaggaaggagaacgcgctctccccagcatcccaaagctggccaatagtgaaaagcagggtatgagaacccacgctgtgtctgtctcagagacggatgattacgctgaaatcattgacgaggaggacacatacactatgccctctacgcgtgattacgaaatccaacgggagcggatcgaactgggacgctgcattggagagggtcaatttggcgatgttcatcaaggcatctatatgtccccagagaatcccgctctggctgtagccatcaagacatgcaaaaactgtacctccgatagtgtccgggagaagtttctgcaggaggcactgactatgagacagtttgatcatcctcacatcgtgaagctgattggcgtgattacagagaatcccgtatggataattatggaactttgcaccctaggggagttgaggtcgtttctacaggtaagaaagtactccctggatttagcctccttgattctctatgcatatcagctatccactgccttagcctatctagagtctaagaggtttgtgcatcgggacatagctgccagaaatgttctagttagcagcaatgattgtgtgaagttgggcgattttggattgagtcggtatatggaagactctacttactacaaagccagcaagggaaagctgcccattaagtggatggccccagaatcaattaatttcaggagattcaccagcgccagtgacgtgtggatgttcggcgtttgcatgtgggagatactgatgcacggcgttaagcctttccagggcgtgaagaataatgacgttatcgggagaatcgagaatggggaacggctccccatgcctcccaactgccctccaactctgtacagtcttatgacaaaatgctgggcctacgatcctagcagacgacctaggtttactgaattaaaggcccagctgtcaaccattctggaggaggagaaggcccaacaagaagagcgcatgagaatggagagtcgtcggcaggcgactgtctcatgggactcgggcggttctgacgaggccccacccaagcccagtcgccctggatatccgagcccaagatcctccgaagggttttatccatccccccagcacatggtgcagacaaatcattatcaggtctccggttatcccggatcccatggaatcaccgctatggcaggatcaatatatcctggacaagcatcattgcttgatcaaacagacagctggaatcatcggccacaggagattgcaatgtggcagccgaacgtggaggatagcactgtgctggatctgaggggcatcggccaggtactcccaacacatctgatggaggagcgtctgattcgacagcagcaggagatggaagaggaccagcggtggctggagaaggaagagaggttcttgaagcccgacgtcaggttgtcccggggatccattgatcgcgaagatggcagcctgcaagggccaatcggtaaccagcatatctatcagcccgtcggcaaacctgatcctgccgcaccccctaaaaagcctcctagaccgggagcgccaggtcatctggggtctctcgcctctctgtcatcaccagccgactcttacaatgagggtgtgaaactccaaccgcaggagatatccccaccacctacagccaaccttgaccgtagcaacgataaagtctatgagaatgtgaccgggctggtgaaggcagtcatcgaaatgagctccaagattcagcccgctccccctgaggaatatgtgcccatggtgaaggaagtagggcttgcgttgcgaactctccttgctactgtggacgaaactattcccctgctgcctgcgtctacccaccgggaaatagagatggcccagaaacttttgaactcagacttgggtgagctaatcaacaaaatgaagcttgcacagcaatatgttatgacatccctacagcaggaatacaaaaagcaaatgctgacggctgcacatgccctggccgtggatgcgaagaacctgcttgatgtgattgaccaggccaggctgaagatgttggggcagacaagaccacattag

SEQ ID NO: 30393 - DNA, 3291 bp, synthetic construct
  misc_feature 1..3291: note = Description of Artificial Sequence: Synthetic coding sequence
  source 1..3291: mol_type = other DNA
atgctgcttgaattagccggtcaagaagctttaaagcccgctggggctatttatatggagaagtccggatgtagcccttttcctgtgtgctgggccaaagaatacgataggtacctggcatcttcaaaaatcatggccgcagcttatctggaccctaacctgaatcatactccaaactcgagcaccaaaacccacctgggcaccgggatggagcgatccccaggagccatggaacgggtcttgaaagtgttccactatttcgaatccaattccgagcccaccacctgggccagcatcattcgccatggcgatgccaccgacgtccgagggatcattcagaaaatcgtggatagccataaagtcaagcatgtcgcctgctacggattcaggttatcccacctgcggtctgaggaggtacattggttacatgtcgatatgggagtatccagcgtacgagagaagtatgagctggcacacccccctgaagagtggaaatacgaactgcgcatcagatatctgccaaagggattcctgaaccaattcaccgaagataaaccgacactaaattttttttaccaacaagtgaaatctgactatatgctggagatcgctgatcaagtggaccaagaaatcgctctgaagttgggttgcctcgaaattcgaaggtcgtattgggagatgcgcggaaacgccctggagaagaaaagcaattacgaagttcttgaaaaggacgttggcctgaagcgctttttccctaaaagcctgctcgactccgtgaaggcaaagactttgcgcaagttaattcaacagacttttcgccagttcgctaacctaaacagggaagagagcattctgaagttttttgagatactgtctccggtgtaccgctttgataaggaatgtttcaaatgcgcgctcggctcaagctggataatctccgtggagcttgcaatcgggcctgaggaaggcatttcttacctgactgacaaaggatgcaaccccactcacttagcagattttactcaggtgcaaactatccagtactctaatagcgaagataaagatcgcaagggcatgctgcaattaaagattgccggagccccagagccactcaccgtcacagctccatcactgacaatcgcggaaaatatggccgacctgatcgacggatactgccgtctggtgaacggtactagccaatcttttatcatccgtccacaaaaggaaggagaaagagctttgcccagtatacccaaactggctaatagcgagaaacaagggatgcggacccatgcggttagcgtgtccgaaaccgatgattacgctgagatcatcgatgaggaggacacctacaccatgccatcgacccgggattatgagattcagagagagagaatcgaactgggcagatgcattggagagggtcagttcggagatgtgcaccagggtatttatatgagcccagagaaccctgctctggccgttgctataaagacatgcaagaattgcacttctgactccgtccgcgaaaagttcctccaagaggccctcactatgcgacagtttgatcacccccatatagtaaaattaatcggggtgattacagaaaatccggtctggatcatcatggaactatgtaccctcggtgagcttcgatccttcttgcaagtacgcaaatacagcctagatctggcctcactgatcctttatgcttaccagctgagtaccgctttggcctatcttgagagcaaacgattcgtacaccgggacattgccgctcggaatgtcctggtgagttccaatgactgcgtcaaactgggtgactttgggctgagtaggtacatggaagactccacatactataaggcatccaaaggcaagctgccaattaagtggatggcccctgagagcatcaattttcggagattcacctctgcctctgatgtgtggatgtttggagtgtgtatgtgggagatcctgatgcacggagtgaagcccttccaaggggtgaaaaacaacgatgtgatagggagaatcgaaaacggtgagcgactgcctatgcctcccaactgcccgccaaccctgtatagcctcatgaccaaatgttgggcctacgacccatcccgcagaccacggttcacagagctgaaggcccaattaagcactattctggaagaggagaaagctcaacaggaggagcgcatgcgaatggagagccgaaggcaagcaacagtctcatgggacagcggtgggtccgacgaggctcccccaaagccttctcgaccagggtaccctagccctcgatcttcggaaggtttctacccgagtcctcaacacatggtgcaaacgaaccattaccaggtttcgggttatcccggaagccacgggattaccgcaatggccggttctatctaccccggacaagcatctctgcttgaccaaacggattcatggaatcatcggcctcaggagatcgctatgtggcagcctaatgtagaggactccactgtcctagatctgcgaggcatcggacaggttctgcctacccacctgatggaagaaagactgatccggcagcagcaggaaatggaagaagatcagagatggttggaaaaggaggagaggttcctgaaacctgatgtccgcctctctagagggtcaatcgacagagaagacgggtcacttcaagggccaatcgggaaccagcacatctaccagccagtcggcaagcctgatccagccgctccgcctaaaaagcctccacgccctggcgcaccaggtcatctgggctccctggccagtctcagctcccctgcggactcctacaacgaaggcgtgaagctgcagccacaagagatctctccacccccaacggcaaacctcgacaggagcaacgataaggtgtatgagaatgtcacagggctcgtgaaggcggttatcgagatgagtagcaaaattcaacctgctccacctgaagaatatgttcctatggtcaaagaggtcggactagcgttgcgcacacttctcgccacggtagatgagacaataccgctcctgcccgcaagtacacatagggagatcgaaatggcccaaaagctgctgaatagtgatctaggggaactgattaacaagatgaagcttgcccaacagtatgtgatgacctcgctgcagcaggagtacaagaagcagatgctcacagctgctcacgcactggccgttgacgctaaaaacctactcgacgtcatagatcaggccagactgaaaatgcttggccaaacgcggcctcactag

SEQ ID NO: 30394 - DNA, 2043 bp, synthetic construct
  misc_feature 1..2043: note = Description of Artificial Sequence: Synthetic coding sequence
  source 1..2043: mol_type = other DNA
atgaaataccaggaagtgaggtgtctgacctcattcaacataagtgtgagttttcccgctgaaactgatgactatgctgagatcattgatgaagaggacacctacaccatgccctctacgcgggattatgagatacagcgagagcgcatcgagctcggccgttgcataggagagggacagtttggtgatgtccatcagggcatttacatgtcaccagaaaacccagccctcgcggttgcaattaagacgtgtaaaaactgtacctcggactccgtgcgggagaaattcctacaagaggcactgaccatgcgacagttcgaccacccgcacatcgtgaaattaattggggtaatcacggagaatcccgtctggataattatggaactgtgcaccctcggggaactgaggagctttctgcaggttagaaagtattctctggacttggcctccctgatcctttacgcctaccagttatcaactgctttagcttatctcgagagcaagcgattcgttcatcgcgacattgcggcaagaaatgttctggtgagttccaacgactgtgtgaaactgggcgatttcggactatcaaggtacatggaggactctacttactacaaggctagtaagggcaagctaccgattaagtggatggcgccagagtcgattaacttccgccgtttcaccagcgcaagcgacgtctggatgtttggagtctgcatgtgggaaatacttatgcacggagtgaaaccattccaaggcgtgaaaaataatgatgtgattggacgcatcgaaaacggtgaaaggctgcccatgccaccaaactgtccacctactctttacagtctgatgacgaagtgctgggcttacgacccaagccgacgaccaaggttcacagagttaaaagcacagctgtcaaccatactcgaagaggaaaaagcacaacaagaggagcggatgcgaatggagagtcggcgacaggcaaccgtgtcttgggatagcgggggatcagacgaggcaccgccaaagcctagtagacctgggtatcccagcccacggagctctgaaggcttctacccctccccccagcatatggtacagaccaaccattaccaggtgagcgggtatcctggatcccatggcatcaccgcaatggcaggctcaatttatcctgggcaggcctcactcctcgaccaaaccgattcatggaaccataggcctcaggaaattgccatgtggcagccaaacgtggaagatagcactgtcctcgatcttagggggatcgggcaggttctgcccacacatttaatggaagagcggctcattcgtcagcagcaagagatggaggaggatcagaggtggctggaaaaagaagagcggttcctgaagcctgatgttcgcctgtctagaggcagtattgaccgggaagatggctccctccagggtccaattggaaatcagcatatttaccagcccgtaggcaaaccggaccccgcagctccaccaaaaaaaccccctagaccaggagccccaggccacctgggctcactcgcctccctgagcagccctgcagattcctacaacgaaggggtgaaactccagcctcaggaaatctcaccgccacccactgctaatttagacaggtctaacgacaaagtgtatgaaaacgttaccggcctggtgaaggcggtgattgagatgagttccaaaatacaacccgcaccccctgaggagtacgtccctatggtgaaagaggtggggttagcccttaggacactcttagctactgtggatgaaaccatccccctgctaccggcaagcactcacagagagatcgaaatggcacaaaagcttcttaattccgacctcggcgaactgattaataagatgaaattagcccagcagtatgtgatgacttccctgcaacaggaatataagaagcaaatgctgactgcagcccatgctctggcagttgacgccaagaacctgttggacgtcatcgaccaggccagactcaagatgctaggtcagacccgcccacactag

SEQ ID NO: 30395 - DNA, 3054 bp, synthetic construct
  misc_feature 1..3054: note = Description of Artificial Sequence: Synthetic coding sequence
  source 1..3054: mol_type = other DNA
tgatatgaccgctatctcgcctctagcaagattatggcggcagcctaccttgatcccaacttgaaccacacaccaaactcttctaccaaaactcatctcggaacaggcatggagcgcagtcccggagccatggagcgcgtcttaaaggttttccactactttgaaagcaacagcgaaccaaccacatgggccagcataatccgtcatggcgatgcaaccgacgtgcggggtatcatccagaaaattgtggattctcataaggttaagcatgtcgcctgctatggctttcgtttatctcacctgcgcagcgaagaagtccattggctgcacgttgatatgggcgtgagtagcgtgagggagaaatatgaactcgctcaccccccagaggaatggaagtacgaactccgtatacggtacctgccaaaaggattcctgaaccagtttacagaggacaaaccaacattgaactttttttaccagcaagtgaaatctgactacatgctggaaatagccgatcaggtggaccaggaaatcgcgcttaagttgggctgcctggagatccggaggagctactgggagatgcgcggaaacgcactcgagaaaaagtcaaattacgaggtactcgaaaaggacgtgggccttaagcgctttttccccaaaagtttattagactccgtcaaagccaaaacacttcgcaagttgatccaacagactttccggcagtttgcaaacctaaaccgggaagaaagcatcctcaaattttttgagatcctgtccccagtctaccggttcgataaggaatgtttcaagtgtgcactgggttctagttggattatcagcgtggagctggcgattgggccagaggaggggattagctacctgactgacaaggggtgcaatcccacgcacctggccgactttactcaagtccagaccattcaatattctaacagcgaagacaaggacagaaagggaatgctgcagttgaaaattgctggggcaccagagcctttgacagtgactgccccatcactgacaatagcggaaaatatggcggatctgattgatgggtactgcagacttgtgaacggcacttctcagtctttcatcattcggccacagaaagagggtgaacgcgcactgccaagtatccccaagctagccaattctgagaagcagggaatgcgcacccacgcagtttctgtgtctgaaactgacgattatgctgagatcatcgatgaggaagatacttatacgatgccatccacgagagattatgagatccagcgagaaaggatcgagttgggacgctgtatcggcgagggtcagtttggagatgtccaccagggcatttatatgtctcctgagaatcccgctttagccgtggctataaagacctgtaagaactgtacaagtgactcagttagagagaaattcctccaggaagctctgacgatgagacaattcgaccatccacatatcgtcaagcttattggggtgatcaccgaaaatccggtgtggattattatggagttgtgcacacttggcgaacttcgaagcttcctgcaagtgcgtaaatacagcttagacctggcatccctgattctttatgcatatcaattgtccacggcgctggcatacctggaaagcaaaaggttcgtccatagagatatcgctgccaggaacgttctggtttcctccaacgactgcgtcaagctaggagactttggcctctccaggtacatggaggattccacctattataaggcttcaaaaggcaaactgccaattaaatggatggccccagaatctatcaattttcgcaggttcacgtctgctagcgatgtttggatgttcggagtatgcatgtgggagatattgatgcacggggttaaaccatttcaaggcgttaaaaataatgacgttattggcagaatcgaaaatggtgagagactgcctatgcctccaaactgtcccccaactctttattcccttatgacgaagtgttgggcttatgacccgtcacgaaggcctagatttacagagctgaaagcccagctgagcactattttggaggaagaaaaggcacaacaggaagaacgtatgcgcatggagtcacgcagacaggccactgtgtcctgggattccggtggaagcgacgaggcaccccctaaaccctctaggccaggttaccctagtcccagatcatctgaaggtttttacccttccccacaacatatggttcagaccaaccactaccaggactccaccgttcttgatctgaggggcattgggcaggttcttcccactcatctgatggaggagcgccttatccgccaacagcaggaaatggaggaggaccagcggtggttggagaaggaagaaaggtttttaaagccggacgtgcgactctctcgaggatctattgaccgggaggacggttctttacagggaccaatcggaaaccagcatatctatcagcctgtgggaaaacctgatcctgctgcccctcccaagaagcccccacgcccaggcgcacctggccacctcggctctttggccagcctgagtagtcccgctgattcctacaacgagggcgtcaaattgcagccgcaagaaatctccccccctcctaccgccaatctggatcgatcaaacgacaaagtttatgaaaatgttacaggactagttaaggccgtgattgaaatgtcttccaaaatacagccagccccacccgaggagtacgtgccaatggtgaaggaggtgggccttgcactccgcaccttattagcaactgttgatgagaccataccattgttacccgctagcacccacagggagattgagatggcccagaagctgctcaattctgatctgggtgagttaattaacaagatgaagcttgctcagcagtacgttatgacatccttacagcaggagtataagaagcagatgttgacagctgcccacgccctcgccgtcgatgctaaaaacttactggatgtcatcgaccaggctcgcctgaagatgttgggccagaccaggccccactag

SEQ ID NO: 30396 - DNA, 354 bp, synthetic construct
  misc_feature 1..354: note = Description of Artificial Sequence: Synthetic coding sequence
  source 1..354: mol_type = other DNA
atggccgctgcgtacctcgatcctaacctgaaccacacaccgaatagctctacgaaaacccatctagggactgggatggaaaggtcaccgggagccatggaacgggtgttaaaggtcttccattatttcgagtctaatagcgagcctaccacatgggcttccataatacggcatggcgacgctaccgatgtccgtggcataatccaaaagatcgtggactcacacaaagtgaaacatgtcgcgtgctatggcttcaggctcagccatctcagatccgaagaggttcactggcttcacgtcgacatgggagtctcatccgtgcgcgagaagtatgaacttgcccatcctccatag

SEQ ID NO: 30397 - DNA, 471 bp, synthetic construct
  misc_feature 1..471: note = Description of Artificial Sequence: Synthetic coding sequence
  source 1..471: mol_type = other DNA
atggctgccgcatacctggacccgaatctcaaccataccccaaattcgtccaccaaaacgcacctgggtacgggcatggagcgtagccccggagccatggaacgggtgctgaaagtcttccactacttcgaatcaaattctgagcccactacttgggccagcattattcggcatggggatgccaccgacgtcagaggaataattcagaaaattgtagacagtcacaaagtgaaacatgtcgcttgctatggcttccggctgtcccacttgcgcagtgaagaggtccattggctacatgtggacatgggcgtgagcagtgtccgcgaaaaatatgaactggctcacccgccagaggaatggaagtacgagcttagaattagatatctgccaaaagggttcctaaaccaatttaccgaagacaaacctacactcaactttttctaccaacaagtgaaaagcgactacatgtag

SEQ ID NO: 30398 - DNA, 3159 bp, synthetic construct
  misc_feature 1..3159: note = Description of Artificial Sequence: Synthetic coding sequence
  source 1..3159: mol_type = other DNA
atggcagccgcttacctcgatcccaatctcaatcatactcccaatagcagcactaaaacccacctggggaccggcatggaaaggagccctggcgcaatggagagggtgctaaaggtgtttcactatttcgagtcgaattccgagcctaccacatgggcctcaatcatcaggcacggagatgcaactgatgttcggggaatcatccagaaaatcgtcgatagtcacaaggttaagcatgtggcgtgctacgggtttaggctgtcccatctcagatccgaagaagtgcattggctacacgtggatatgggagtgagtagcgtgagagagaagtacgagctagcccaccctccagaagagtggaagtacgaactgagaattcgttacctccctaaaggtttcctgaatcagttcaccgaggacaagcccacactgaacttcttctaccagcaggttaagtcagattatatgttagagattgctgaccaggtggaccaagagattgccttaaaactcggttgcctggagatccggaggtcctactgggagatgcgaggcaacgccctggaaaaaaaaagtaattacgaggtgctcgagaaagacgtggggctgaaacgtttttttccaaaaagtctgttggattctgtcaaggcgaagacgcttcggaaactgatccagcaaacgttccgacagttcgcaaacctgaatcgcgaagagtccatacttaagttctttgaaattctatccccggtgtacaggttcgacaaagagtgttttaagtgtgcactggggtcttcgtggattatttccgttgagctggctatcggaccggaagagggcatcagctatctgaccgacaaagggtgtaacccgactcatcttgccgactttactcaagtgcagacaatacaatattctaactcagaagacaaggatcggaagggcatgttgcagctcaagattgcgggagccccagaaccactcaccgtcacagccccaagtctcacaattgccgagaacatggccgaccttattgacgggtactgtcgcctcgtaaatggaacaagtcagagtttcatcattcggcctcagaaggagggggagcgcgctttaccgagtattcccaaacttgctaattcggaaaagcagggtatgcggacccacgcagtgtccgtctctgagacagatgattatgccgagataatcgacgaagaggatacttatacaatgccttccactcgtgactatgaaatacaacgggagaggatagagctgggccgatgcatcggcgagggacagtttggggatgtacatcagggtatctatatgtcccccgagaacccagctctggccgtggcaattaagacttgtaagaactgtaccagtgatagtgtgcgagaaaaattcctccaggaagcacttaccatgcggcagtttgaccatccccacatcgtgaaactgatcggtgtgattaccgagaatcctgtttggataatcatggaattatgcacgctaggagagctgcgcagcttcctgcaggtccgcaagtactcactggatcttgcatcactgattctgtatgcgtaccagctgtcgacagctctggcttacctggagagcaagcggtttgtgcaccgcgacatagctgccagaaatgttctggtttcatctaatgattgcgtgaagctgggcgatttcggactctccagatatatggaagactccacatactacaaggcgagcaaaggaaaacttccaatcaaatggatggctccagaatctatcaactttagacgattcacctcagcttcagacgtctggatgttcggagtatgcatgtgggagattctgatgcatggcgtgaaaccttttcagggagtaaagaataatgatgtcattggcaggatcgaaaacggagaacggctaccaatgccaccgaactgtccccctaccctttacagcctgatgacaaagtgttgggcctacgatccttcgcgcagacctcggtttactgaattaaaggcacagctgagcacaatcctggaagaagagaaagcccagcaggaggagaggatgaggatggagtcaaggagacaggcaacagtaagttgggactctggaggctctgatgaggcacctcccaagccctcccgcccaggctatccatcccctcgctctagtgaaggtttttacccaagtccacagcatatggtccagaccaatcactaccaggtgagcgggtatcccggaagccatggaattaccgctatggccggatccatttaccccggacaggctagcttattggatcagacagattcctggaaccatcggcctcaagaaatcgccatgtggcagcccaatgtggaggatagcactgtactcgatctccgcggaattggacaggtactccccacgcatctcatggaggaaaggctgattcggcagcaacaggaaatggaagaagatcagaggtggctggaaaaggaggagcgctttcttaagcccgatgttagattatcgcgaggatccatcgacagggaagatggttctttgcagggacctattggaaaccagcacatctaccagcctgttggcaaacccgacccagctgctccccctaagaagcctccacggcctggggcacccggacacctcggatcattggcctcactgtcgagccccgcagatagctataacgaaggggtaaaactccagccgcaggagatttccccgcctcccacagctaatctggaccggtctaacgacaaggtgtacgagaatgtcaccggcctcgttaaagccgtgatcgaaatgtctagcaagattcagcctgcgcctcctgaagagtatgtgccgatggtaaaggaggtggggctggctctgcgcaccctgttagccaccgtcgacgagactatacccctacttccagcttctacacatagagaaatagaaatggcccagaagctcctgaactccgacctcggcgaattaataaacaaaatgaagctggcccaacagtacgttatgacaagcctgcaacaggagtataaaaagcagatgctcacggcggctcatgccttggctgtggatgctaaaaatctgttagatgtcatagaccaagccaggctgaagatgctgggccagacaaggccacactag

SEQ ID NO: 30399 - DNA, 198 bp, synthetic construct
  misc_feature 1..198: note = Description of Artificial Sequence: Synthetic coding sequence
  source 1..198: mol_type = other DNA
atggccgctgcctatctggaccccaatctcaaccacactcccaactcctctactaagacacacctaggtactggaatggagcgctcccctggcgcaatggagagggttctgaaagtgttccattactttgaaagtaattctgagcctaccacctgggcttccattattcgccacggcgacgccaccgacgtgcgctag

SEQ ID NO: 30400 - DNA, 324 bp, synthetic construct
  misc_feature 1..324: note = Description of Artificial Sequence: Synthetic coding sequence
  source 1..324: mol_type = other DNA
atggcggcagcctatctcgatccaaatttaaatcatactccaaattcttccacaaagacccacttgggaactggcatggaacgctcaccaggagctatggagagagtgttgaaggtattccattattttgaatcaaatagcgagccaacaacctgggcatctatcatccgccacggagacgccactgatgtcagagggattattcagaagatagtggatagccataaggtgaaacatgtcgcatgttacggtttcagactgtcacacttgagaagcgaagaggtgcactggctgcacgtagatatgggtgtgtctagtgtgtag

SEQ ID NO: 30401 - DNA, 360 bp, synthetic construct
  misc_feature 1..360: note = Description of Artificial Sequence: Synthetic coding sequence
  source 1..360: mol_type = other DNA
atggccgctgcatatctagaccccaatcttaaccacacgccaaactcatcgactaagacccacctggggacggggatggagaggtctcccggagccatggagcgggttctcaaagtcttccactattttgagtccaattctgaaccaacgacatgggccagcattattcgccacggtgacgccacggacgtcagagggatcatacagaagatcgtagacagccacaaagtgaaacatgtcgcatgctacggattccgtctaagccaccttaggtcagaagaagttcactggttgcatgtggacatgggtgtcagctcggtacgggagaagtacgagcttgctcaccctcctgaggagtag

SEQ ID NO: 30402 - DNA, 2262 bp, synthetic construct
  misc_feature 1..2262: note = Description of Artificial Sequence: Synthetic coding sequence
  source 1..2262: mol_type = other DNA
gcagagaacatggcagatcttatcgatggctattgccgtctggtcaacggaacaagtcagagctttattatcagaccccagaaagaaggcgagcgtgcactcccaagcatccctaagctggccaatagcgaaaagcagggtatgcgaacccacgctgtgagcgtcagcggagtgtcacactgccagcataaagttaaaaaagctagaagatttttgcccctggtcttttgcagtcatgacccaccatcgaccgatgagatctcaggcgacgaaacagatgactacgctgaaattatagacgaggaggacacttatacgatgccgtccactcgagactacgagatccagcgcgagagaatcgagctcggcagatgtatcggtgagggtcagttcggggatgttcaccagggaatatacatgtctcctgaaaatcctgccctggctgtagccattaaaacttgtaaaaactgcacgtctgactcagtgagagagaaattcttacaagaggctctcaccatgcgacaattcgatcacccgcatatagtaaagctgatcggagtaatcactgaaaatccagtatggattataatggagttgtgcactctaggggagctgaggagctttttgcaggtgcggaagtattccctggatcttgcatcgttaatcctatacgcctatcagctttcgacagcgcttgcctatttggagagtaaacgcttcgtgcatagggatatcgctgctcgaaatgtcttggtgagctctaatgactgtgtaaaacttggcgacttcggcctttcgaggtacatggaagactccacctactacaaggcatcaaaagggaagttgcctataaagtggatggccccagagtcgatcaatttccggaggtttactagcgcaagcgatgtgtggatgttcggcgtgtgtatgtgggagatccttatgcatggggttaaacctttccaaggggtaaaaaacaacgacgtgattggccgtatagagaacggcgagagactgccaatgcctccaaattgtcctccaacactctattctctgatgacaaaatgctgggcatacgacccatcgcgacggccaaggttcacagaattaaaggctcagctatccactatcctcgaggaggagaaagcgcagcaggaggagcgaatgcgcatggagagcaggaggcaggcaacggtaagctgggacagcggcggatctgacgaggcacctccaaaaccatctagaccgggatacccctcgccgaggagttcggagggcttttaccctagccctcagcatatggtccagactaatcattatcaggtgtcgggctacccaggcagtcacgggatcacagccatggcgggatccatctatcccggacaggccagcttactggatcagacggattcctggaatcacaggcctcaggagatcgccatgtggcaacccaatgttgaagacagtacagtgctagacttgcgcggaatcggtcaggtcctacccacccacttaatggaagagagactgatcaggcaacagcaggagatggaagaggaccaacgctggctcgagaaggaggagagattcttgaagcccgatgtacggctgagccgaggtagcatcgaccgcgaggacggaagcctgcaaggcccaatcggcaatcagcacatataccagcccgtagggaaacccgacccagcagcgccacccaagaagccacccagacctggagctcccggacacctggggtctctggcctctctgtcctcccctgccgattcttacaacgagggggttaagccatggaggctgcagccccaggaaataagtccgccacctacagcaaatctagacaggtccaatgacaaggtctacgaaaacgtaaccggcctggtgaaggccgtcatagagatgtccagcaagatccagcccgctccccctgaggagtatgttcctatggtgaaggaggttgggctcgctctgcggaccctgcttgccacagtggacgaaacaatcccactcttgccggcttctacacatagagagatagagatggctcaaaaacttctgaactcagacttaggcgaactgattaataagatgaagctcgcccagcagtatgtgatgacatctcttcagcaggaatacaaaaagcagatgttgactgccgcacacgccctggctgtcgacgcaaagaacttactggacgtgatcgatcaggccagactgaagatgcttgggcagactaggccgcactag

SEQ ID NO: 30403 - DNA, 3159 bp, synthetic construct
  misc_feature 1..3159: note = Description of Artificial Sequence: Synthetic coding sequence
  source 1..3159: mol_type = other DNA
atggctgctgcctacctggatcctaatttgaatcacacacccaactcgtccactaagactcatctcggcaccggaatggagcggtctccgggagccatggagcgagtcttgaaagtatttcactattttgagtcaaactctgagccgaccacatgggccagcatcatcagacacggagatgccactgatgtacgtgggattattcagaaaatcgtggattcacacaaggtgaagcacgtagcttgttatgggttccggctgagtcacctccggtccgaagaagtccactggcttcacgtcgatatgggggtgtcatcagtgagagagaagtatgagcttgcacatccccctgaagagtggaagtatgaactgcgaatcagatacctgccgaaagggtttctaaaccaatttaccgaggataaaccgaccctgaacttcttctaccagcaggtgaaatctgactatatgctggaaattgcagaccaggtggatcaagagatcgccctcaagctcgggtgcctggagattcggcgatcctactgggaaatgcgcggaaatgccttagaaaagaaaagcaactatgaggttctggaaaaggacgtgggcctgaagcggttctttccaaagtctctactagacagcgttaaagccaagacactgcgaaaactaatacagcagacctttaggcagtttgcaaatctgaatcgcgaggaatcgatactgaaattttttgaaattttgtctcctgtgtaccggttcgataaagagtgctttaagtgcgccttaggatcttcctggataatcagcgttgagctcgctataggccctgaagagggcatttcctatctaaccgataaggggtgtaatccaacccacctagcggatttcactcaggtacagaccatccagtactcaaacagcgaagacaaggacaggaaaggaatgcttcagctgaagattgcaggagcgcctgaacctttgaccgtcactgcgcctagtttgactattgcggaaaacatggctgacctaattgatggctactgcaggctggttaatgggacgtcccagtccttcataattcgccctcagaaggagggagaaagagccctgccaagcatccccaagctcgctaattctgaaaaacagggtatgcgtacacatgcagtgagcgtgtcagagaccgacgactacgcagagatcatcgacgaggaagacacttacactatgcctagcacgagggactacgagatccaacgagaaagaatagaactaggacggtgcattggagaaggtcaatttggagatgtgcaccaggggatctacatgtctcccgaaaatccggcactggcagtggctatcaagacgtgcaagaattgcacctccgacagtgttcgagaaaagtttctacaggaggccctcaccatgcgacaattcgaccaccctcacatagtgaaactgatcggtgtgatcaccgagaatcctgtgtggattataatggagttgtgcacactgggggaactccgttcattcctgcaggttcgtaagtattcacttgacctggcgtctctgatcctgtacgcctatcagttatctacagctctggcctatctcgaaagcaaaagatttgtccaccgggacattgcagcaagaaatgtgctagtgtcctcaaatgactgcgtcaaattgggtgatttcggcctgagccggtacatggaggattccacttattacaaagcttctaaagggaaactccccataaagtggatggcccctgaaagcatcaatttcagacgttttacgtcggcctccgatgtgtggatgtttggagtgtgcatgtgggagattttgatgcatggcgtcaagccatttcaaggggtgaaaaacaacgacgtgataggtcggatagagaatggagaacgtctccctatgcctcccaactgtcctcccaccttgtatagcctcatgacgaaatgctgggcctatgacccttcgagacggcctcgcttcacggaactcaaggcacagctgagcacaattctcgaagaggaaaaggcccagcaggaggaacgcatgcgaatggaatcccggaggcaggcgacagtctcctgggattctgggggatctgatgaagctcctccgaaacctagtaggccaggctacccaagtccgagaagctcggagggcttctaccctagccctcaacacatggtccagaccaatcattaccaggttagcgggtacccgggtagtcacgggatcacagccatggcaggctccatctatccgggtcaagcctctctgctcgaccagacagacagctggaatcacaggccccaggagatcgctatgtggcagcccaatgttgaggactccaccgtgctggacttgagaggtattggtcaggtgctgccaacccatttaatggaggaaaggctgatcaggcagcagcaggagatggaggaggatcagcgttggcttgagaaggaggaaaggttcctcaaacctgacgttagactgtcccgagggtctatcgatcgcgaagatgggtcactgcaggggcctattggcaaccaacatatctaccagcccgttggaaaacctgaccctgctgcaccacctaagaaacctcctcgaccaggcgcaccagggcatctgggcagcctcgcttccctgtctagtcctgcggatagctacaatgagggcgtgaagctgcaaccacaggagattagtccaccacctaccgcgaacctggacaggtcaaacgacaaagtgtatgagaacgtaacaggtctcgtcaaggctgtgatcgaaatgtcttcgaagattcaacccgctcccccagaagagtacgtcccgatggtcaaggaggtagggttagcactgcgcacgctcctggctacagtagatgagacaattccgttactgcccgcttcaactcatagagaaattgagatggctcaaaaacttctgaactctgacttaggtgagttgatcaacaaaatgaaactcgcccagcagtacgtgatgacatctctccagcaggagtataaaaagcagatgcttacagcagcccacgctttggccgtcgacgccaagaatttactcgatgtgattgatcaggctagattgaagatgctgggtcagactaggccccactag

SEQ ID NO: 30404 - DNA, 2175 bp, synthetic construct
  misc_feature 1..2175: note = Description of Artificial Sequence: Synthetic coding sequence
  source 1..2175: mol_type = other DNA
atcgccgagaatatggccgatcttatcgacggttattgtaggctggtgaacgggacatcccaaagctttatcatacgaccccagaaagagggggagcgcgcactccccagcatcccaaaactcgcaaactccgaaaagcaaggaatgcggacgcacgcggtatcagtatccgagacagacgactacgctgaaatcatagatgaagaggatacctacaccatgcctagtaagtcttacggaatcgatgaggcaagagattacgaaatccagcgagagcgcatagagctaggcagatgtatcggggaagggcagttcggtgatgttcaccaaggcatttatatgtcgcccgagaacccagctctcgcagtcgcaatcaagacctgcaagaattgcacctccgattcggttcgggagaaattcctacaggaggccctcactatgcgacagttcgatcatccccacatagtgaaattaatcggggtaataaccgagaatcctgtttggattattatggagctgtgtacgctgggagaacttcgatccttcctgcaagtgcggaagtacagcctcgatcttgcgtccctgatcctctatgcttaccagctgtctactgccttagcataccttgagtcaaagagatttgtgcaccgggacatcgccgctcgcaacgtactcgttagcagtaacgactgtgtgaaactcggcgattttgggctgagcaggtacatggaggattctacctattataaggccagcaaggggaagctcccaatcaaatggatggcgccagagtccattaatttcagacgatttacatccgcaagcgacgtgtggatgttcggcgtgtgcatgtgggagattttgatgcatggggtgaagccattccagggagtgaaaaataatgacgtaattggccgaattgagaatggggagcggcttcctatgcctccgaattgtcctcctaccctgtattctcttatgacaaagtgttgggcctacgacccctctcggaggcccagattcaccgaacttaaggcccagctgtctacaatcctggaggaggaaaaagcccagcaagaggaaagaatgaggatggagtcgcggaggcaagcgacagtatcttgggacagtggtggctcagacgaggcccctcctaaacctagtcgcccagggtaccctagccccagatcatctgaagggttttatccatctccccaacacatggtccaaaccaaccactaccaggtgtcagggtatcccggatcccacgggataaccgcgatggctggttcaatctatcccggacaggcttcattgctcgaccagactgattcctggaaccacagaccccaggagatagccatgtggcagccgaatgtggaagactcaacagtacttgacttgcggggaataggccaagtcctcccaactcacctgatggaagagaggctgatcaggcagcagcaggagatggaggaggatcagcgatggctcgagaaagaagagcgcttccttaaacctgacgtgcggttgtcaagagggagtatcgacagggaggacggctcgctgcagggtcccatcggaaatcagcatatctaccagccagttggtaagcccgaccctgcggcaccacccaaaaagcctccccgtcctggagcaccaggacacttgggttccttagcatcgctatctagtcctgcagacagctacaatgagggggtgaaacttcagccccaggagatctctccacctccaaccgccaacctggatcggtctaacgataaggtatatgaaaatgtcactggactggtgaaggcggtaattgagatgtcctcaaaaattcagccagcaccacctgaagagtacgtaccaatggtgaaggaggtcggactggcactccgtactctgttggcaacggtagatgaaacgattccgctattgccggcatccacacaccgcgagatcgagatggcccaaaagcttctgaactcagacctaggagagctgataaacaagatgaaactcgcccagcagtacgtcatgacaagcttacaacaagaatataagaaacagatgctaactgccgctcacgccctggcagttgatgcaaaaaacctcctggatgtgatcgatcaagcaagactcaagatgctggggcaaacacgtccacactag

SEQ ID NO: 30405 - DNA, 363 bp, synthetic construct
  misc_feature 1..363: note = Description of Artificial Sequence: Synthetic coding sequence
  source 1..363: mol_type = other DNA
atggcagccgcttatcttgacccaaacctcaatcacacacccaacagcagcacgaagacccatttgggcaccggcatggagcggtctccgggagctatggagcgggtgctgaaagtgtttcactatttcgaatcaaattctgaacccacaacctgggcctccattattaggcacggtgatgccacagacgtcaggggtatcatccaaaaaattgtcgatagccataaagtcaaacatgtagcttgctacgggtttaggctgagtcacttgcggtctgaagaagtccactggctgcacgtcgatatgggtgttagcagcgttagggaaaagtacgaattggcgcaccctcccgaggagtggtag

SEQ ID NO: 30406 - DNA, 156 bp, synthetic construct
  misc_feature 1..156: note = Description of Artificial Sequence: Synthetic coding sequence
  source 1..156: mol_type = other DNA
atggcggctgcctatctagatccaaacctaaatcatacgcctaattcatcgactaaaacacatctcggtaccggcatggagcggagccccggtgccatggagagggtcctcaaagtgtttcattatttcgaaagcaactccgagccaaccacatag

SEQ ID NO: 30407 - DNA, 3021 bp, synthetic construct
  misc_feature 1..3021: note = Description of Artificial Sequence: Synthetic coding sequence
  source 1..3021: mol_type = other DNA
atggcggcagcatatctcgatccaaatctgaatcacacacccaattcctcaacaaagacccatcttgggaccggaatggaaagatcccctggggcaatggagagggtccttaaggtgttccactattttgaaagcaactctgaacccacaacttgggccagcatcatcaggcatggggacgccacagatgtgagagggattatccagaagatcgtggacagtcacaaggtaaagcacgtggcctgctacgggtttcgccttagccatctgcggagtgaggaagttcactggctccatgtcgatatgggcgttagctccgtgagggagaaatacgagcttgcccaccccccagaggaatggaagtatgagctacgtattcggtatctgcccaaaggctttctgaaccagtttaccgaggacaagcctaccctcaattttttctaccagcaagtgaaaagtgactacatgttagaaatagccgaccaggttgatcaagaaatcgcgctcaagctaggttgcctggagattcgacgatcatattgggaaatgaggggaaacgccttggagaaaaaatccaactatgaggtactggaaaaagatgttggcctgaagcgcttctttcctaagtctctactggattcagtcaaagctaagacactccgcaagctgatccagcagacctttaggcagtttgcaaacctgaaccgcgaggagtcaatcctaaagttcttcgagattctcagccccgtgtataggtttgataaggagtgtttcaagtgcgctttggggagctcttggattataagcgtcgaactcgccataggccctgaagaggggatcagctacctgactgataaaggctgcaatcccacacatttggctgatttcacacaagtgcagactattcagtattccaactccgaggacaaagataggaagggaatgttacagctcaagattgccggtgctccagaaccccttacagtgactgccccatctctcacaattgcagagaacatggcagacctgatcgatggatactgtaggctggtaaacggcactagtcagtccttcattataaggcctcagaaagagggagaaagagctttgccatccataccgaaactggctaactctgagaaacagggtatgcggacgcatgccgtgtcagtctcagaaacagacgactacgcggagattatcgacgaggaagacacatacactatgccaagtacacgcgactatgaaatacagagagaacggatcgagctgggcagatgtatcggagaaggccaatttggggacgtgcaccaggggatatacatgagtccggagaacccggctctggccgtcgctataaaaacttgcaaaaactgtacatcagattcagtccgcgaaaagtttctacaagaggcactgaccatgaggcagttcgatcacccgcacatcgttaagctgatcggcgtgattacagagaaccctgtgtggattatcatggaactgtgtaccttaggcgagctgagatctttcctccaggtcagaaaatatagcctcgatttggcttccctaattctgtatgcgtatcagttgtctacagccctggcatatctggaatccaagaggtttgtgcatcgggacatcgctgccagaaatgtcctcgtgtcctcaaacgactgcgtcaaactgggggactttgggctcagtcggtatatggaagatagcacgtattacaaagcgagcaagggtaaactacccatcaaatggatggcacccgagagtattaactttagacggtttacatctgcttcagatgtttggatgtttggagtgtgtatgtgggagattttgatgcacggggtcaagccattccaaggggtgaagaacaacgacgtaataggtcgcattgaaaatggtgagcgtcttcccatgccccctaattgcccgccaacgctgtactcattaatgacaaagtgttgggcttatgatccctcaagacgccctcgcttcacagagttgaaagcccaattaagtaccatattggaagaggaaaaggcccagcaagaagagagaatgagaatggaatccaggcgtcaggcaaccgtgagttgggacagcggcggttctgacgaggcccctcccaaaccgtcaagaccgggatacccgtccccaaggtcttcagagggcttttacccttctccccagcatatggtgcagaccaaccactaccaggacagcaccgtcttagatctgaggggtattggacaggtcctgcctactcacctgatggaagagcgccttattcgacaacagcaagagatggaggaggaccagagatggctggagaaggaggaaaggtttctcaaaccggacgtcagattgagcagaggaagcattgatcgcgaggatgggtcactccaagggcctataggcaatcagcatatctaccagcctgtgggtaaacctgatcccgctgcccctccgaagaagccgcctagacctggcgctccaggccacctggggtcattggcctctctgtcatctccggctgacagctacaacgagggtgtgaaactgcagccccaggaaatttccccccctccaacagcaaatctagatagatcaaacgacaaagtgtacgaaaatgtcacggggctggtaaaagcagtaatcgaaatgtcatcaaaaatacagcctgctccgccagaagaatacgttccgatggtgaaggaagtcgggcttgcccttaggacactgctggccacagtggacgaaacgattccattgcttcccgctagtacacaccgggagattgagatggcccaaaagttgctgaactccgacttgggcgaactgataaacaagatgaaactggcccaacagtatgtcatgacatctctacagcaggaatataaaaaacagatgctcactgcagcgcacgcactggccgtggacgctaagaatctgctggatgtcatagatcaggctagacttaagatgctcggacaaacacgaccccattag

SEQ ID NO: 30408 - DNA, 2163 bp, synthetic construct
  misc_feature 1..2163: note = Description of Artificial Sequence: Synthetic coding sequence
  source 1..2163: mol_type = other DNA
atggcagacctgatagacggatactgtaggctggtcaatggcaccagccagtcgttcataattagacctcaaaaggagggcgagagggcacttcccagcatccccaagctggctaacagcgagaaacagggaatgagaacacatgccgtttctgtgtccgaaactgatgattatgccgagatcattgacgaagaagatacttacaccatgcctagcaaaagctacgggattgacgaagccagagattacgagatccagcgcgagagaatcgagttgggccgatgcatcggggagggccaatttggagatgtgcatcaaggaatatatatgtcccctgagaatcccgctctcgctgtcgcgataaaaacgtgcaaaaactgcacctcagatagcgtccgagaaaagttcctccaagaagctttgacaatgaggcaattcgatcacccacacattgttaaattgatcggagttataactgaaaacccagtgtggatcatcatggagttgtgtacattgggagagctgcgctcttttcttcaggttcgtaagtattctttggacctggcatctctgattctgtatgcctaccagctgagcactgcgctagcgtacctggagtctaaaagatttgtgcacagagatatagcagcacgcaacgtcctggtatcttccaacgactgcgtcaaattgggggacttcgggctgtcccgctatatggaggactccacctattataaagcttccaaaggcaaattgcccattaagtggatggcgcctgaaagcatcaattttagacggtttacatccgcttctgatgtgtggatgttcggcgtctgtatgtgggaaatactaatgcacggcgtgaaaccatttcagggtgtcaagaataacgatgtgattggcagaattgagaacggcgaaaggttgccaatgcccccaaattgcccccctaccctttactctttgatgacaaaatgctgggcctacgatccctcccgtcggcctcgcttcaccgaactgaaggcccagctgagcacgattctagaagaggaaaaggctcagcaagaggagcggatgcgaatggagtctcggagacaggcaactgtatcctgggacagcgggggtagcgatgaggcacctccaaaaccgtctcgcccaggttacccaagccctcgcagctcagaggggttctacccctccccccagcacatggttcaaaccaaccattatcaagtcagtggttatccaggtagccatgggattacggcgatggcgggatccatctatcccggacaggccagcctcctggatcagacagatagctggaatcatagaccgcaggagatcgcaatgtggcagccaaacgtggaggacagtaccgtgttagacttgagaggcatcgggcaggtgttgcccactcacctcatggaagaaagactgatcagacagcagcaggaaatggaagaggaccaacgctggctggaaaaggaagagcggtttctcaagcctgatgtgcgactgagtcgtggttccattgacagagaagacggatcactccagggcccaattggaaatcagcatatctatcagcccgttgggaaacctgaccctgccgcaccccctaaaaagccgcctaggcctggagcacccggtcatcttggctcacttgccagcttgtccagtcccgcagacagctataatgagggagtgaagttgcagccccaggagatcagcccgccacctaccgctaacctagaccgttccaatgataaagtttatgagaacgtcacgggtctggttaaagcagtaatcgagatgagctcaaaaatccaaccagcgccaccagaggaatacgtgcctatggtcaaagaggtggggctcgcgttgaggaccctcctggcgactgtggatgaaacgatcccgctccttccagcatctacacaccgtgaaattgaaatggctcaaaagttattgaatagcgatctaggtgaactcattaacaaaatgaagcttgcccaacagtatgtgatgacctcactccaacaggagtataaaaaacaaatgctgaccgccgctcacgctctggcagttgatgcaaagaacctgctggacgtgatcgaccaggcaagactaaaaatgctaggacagacccgaccgcactag

SEQ ID NO: 30409 - DNA, 3198 bp, synthetic construct
  misc_feature 1..3198: note = Description of Artificial Sequence: Synthetic coding sequence
  source 1..3198: mol_type = other DNA
atggcagctgcttaccttgatccaaatctgaaccacactccaaattcctctacgaaaacacacctcggaaccgggatggagcgaagccccggagctatggagcgcgtgctcaaagtgttccactacttcgaaagtaactctgaaccaaccacctgggccagcatcatcaggcatggcgacgccacagatgtaagggggattattcagaaaattgtagatagccacaaggtgaaacacgtggcctgttatggtttcaggctgagccatcttcggtctgaagaagtccactggctccatgttgatatgggtgtcagttcggttcgcgagaaatatgagttggctcatcctcccgaagaatggaagtacgagctgcgcatccggtatttgcccaagggatttctcaatcagttcaccgaagacaaaccgactttaaactttttttaccagcaagtgaagtccgactacatgctagaaatcgctgatcaagtggaccaggagattgctttaaagcttggctgcttagagatccggagatcttattgggaaatgcgaggcaacgcgcttgaaaagaagtctaattatgaggtactagaaaaggatgtgggcctgaagcgcttcttcccaaaaagcttgctggactctgtgaaggctaaaacactccgcaagctcatccagcagacgtttcgccagtttgctaatctgaaccgggaggaatccatcctgaagttctttgaaatactctcccccgtttatagatttgataaagaatgttttaagtgtgcgctcggtagtagctggataattagcgtggagctggcaatcggacccgaagagggcatttcgtatctaacggacaagggctgcaatcccacacatctggctgactttactcaggtccagaccattcagtatagcaattctgaggacaaggataggaagggaatgttgcaactgaagatagctggtgccccagagccactgactgttaccgcgccaagccttaccatcgcagagaatatggccgacttaatagatggctactgtaggctggtcaatggaacctcacaatccttcattatccgtccacagaaggagggcgaaagagcccttcctagcatacctaaactggccaattctgagaaacagggtatgagaacacatgccgtctcagtgagtgagacagatgactacgctgagatcatcgacgaagaagatacatacactatgccttccaccagggattatgagattcaacgagagagaatcgaactcggcaggtgtatcggtgaaggccaatttggggacgtacatcagggcatctacatgtctcctgagaacccagccctcgccgtggctattaaaacctgcaaaaattgcacgtccgattccgtgcgtgagaagtttctccaggaagctctgaccatgcgacaattcgaccacccacacatagtgaagttgattggcgtgatcacagaaaatcccgtttggataattatggagctgtgtacactcggcgagttgagatctttcctccaggtaaggaagtattcactggacctggcgtctctgatcctgtacgcttaccagttatctaccgccttggcttacttggaaagcaagcgtttcgttcaccgcgacatcgccgctcggaatgtgttagtgagttctaatgattgcgttaagctgggggacttcggactttcccgatacatggaggatagcacctactacaaagcatccaaagggaagctaccgatcaaatggatggcgcctgagtccattaattttaggcgcttcacatccgccagcgacgtgtggatgttcggcgtgtgcatgtgggaaatcttaatgcacggagttaaacctttccagggtgttaagaataatgacgtaatcggcagaattgagaacggtgaacgcctcccaatgccacctaattgccccccaacactttacagcttaatgacgaaatgctgggcctacgacccttctaggagaccacgatttactgagctaaaagctcagctgagcactatcctcgaagaggagaaggcccagcaggaagagaggatgcgtatggagtccaggcggcaggctacagtaagttgggattccggcggtagcgacgaagccccacctaaaccttctcgcccagggtacccgagcccaagaagctccgaagggttttatccatctcctcagcatatggttcaaactaatcactatcaggtgtcgggctacccagggtcccacgggattactgccatggcagggagtatctacccaggacaggcttccctgctcgatcagacagattcttggaatcaccggccacaggagattgcaatgtggcaacctaacgtggaagacagtaccgtgttggacctacgcggtatcggccaggttctaccgacacacctgatggaagaaaggcttatccggcaacagcaggagatggaagaggaccagcggtggctggaaaaagaagagaggtttcttaagcccgacgttagattatcgaggggctccattgatagagaagacggctcgcttcagggcccaattggtaaccagcacatctaccagcccgttggcaaaccaggcaaggaggaaaagaactgggccgaacgtaatccggctgctccaccgaagaaaccaccacggccaggggcaccaggacacctcggatcactggcatccctgtccagtccagcagattcttataatgagggcgtaaaaccatggcgccttcagccgcaggaaatctctccgccacctaccgcaaacctagaccggagcaacgacaaagtttatgagaacgtgacaggcttggtgaaggccgttatagagatgtcctcaaagatccagcctgccccacccgaggaatacgtccctatggttaaggaggtggggctcgctttgagaacactgcttgccaccgttgacgaaacaattccactgctccctgcctcaacgcatcgcgaaatcgagatggcccaaaagctactgaattcggaccttggcgaactaattaataagatgaaacttgcccagcagtatgtaatgacctccctgcagcaggagtacaaaaaacaaatgttaacagctgcgcatgcactggccgtagatgcgaagaatttactggatgtgatagatcaagccagattgaaaatgctcgggcagacgaggccacactag

SEQ ID NO: 30410 - DNA, 2904 bp, synthetic construct
  misc_feature 1..2904: note = Description of Artificial Sequence: Synthetic coding sequence
  source 1..2904: mol_type = other DNA
atgagtggcgttagtgagccactgtcaagagtcaaactgggcactctacgcagacctgaaggacctgccgagcctatggttgtcgttccagtggacgtggagaaggaggatgtgaggattctgaaggtgtgtttctatagcaattccttcaacccaggaaagaatttcaagctagtcaagtgtaccgtgcaaacggagataagagaaattattacatcaatcctgttgtccggtcggattggaccaaacatccggctggctgaatgttatggccttcgactcaagcatatgaaatccgacgaaatacactggcttcatccccagatgaccgtgggagaagtccaggataagtacgaatgcctgcacgtggaagcagaatggagatacgacctccaaattagatacctgccagaggacttcatggagtccttaaaagaggaccggactacactcctgtacttttatcagcagttgaggaacgactatatgcagaggtacgcctcgaaggtctcggagggtatggccctgcagctgggttgcttagagctgcgacgcttttttaaggatatgcctcataatgctctggataagaagtccaattttgagctgcttgagaaggaggtcggcttagatctattctttcctaagcagatgcaggaaaatctcaagcccaagcagtttcgtaagatgatccagcagaccttccagcagtacgcatctctgcgcgaggaggagtgcgtgatgaagttctttaacaccctcgccggatttgcgaacatcgaccaggagacctaccggtgcgaactgatacagggatggaatattactgttgacttggttattggtcccaaaggcatcaggcaactgacaagtcaggatgctaagccgacatgcctcgctgaatttaaacagataagatcaataaggtgcctgcctctcgaggaaggccaggcagtcctgcagctcggaatagagggtgctccgcaggccctttcaattaaaacttcctcacttgcggaggcggaaaatatggccgatctgatcgatgggtattgccggctccagggcgagcaccagggctccctgatcatccatcctagaaaggatggagagaagaggaacagcctgccccaaatcccaatgctgaatctggaggctagaagatcccacctgtcggagtcttgtagcatcgaatccgatatctacgccgaaattcctgatgagacgttgcggagaccaggcggacctcagtatggtattgccagagaggacgtcgtcttgaatagaatcctgggggagggcttcttcggggaagtgtacgagggtgtctacacaaaccacaagggagaaaagattaatgtggcagtcaagacatgcaaaaaagattgcacactagacaacaaagagaaattcatgtccgaggctgttattatgaagaacctcgatcacccgcatattgttaaactgatcgggatcattgaagaggagccaacgtggatcattatggagctgtatccatacggagaacttggccattacttggagaggaataaaaacagtctgaaagttcttactctggttctgtactctctacaaatctgcaaagcaatggcgtaccttgagtctattaattgcgtacaccgggacatcgctgtaagaaacatactggtggcttcacccgaatgtgtgaaattaggcgacttcggactgagccgatatatcgaggatgaagactattataaggccagcgtgacccggttaccaataaaatggatgtcgcctgagagtatcaactttaggcgtttcactaccgcctcagatgtttggatgttcgccgtgtgcatgtgggagatactttctttcggcaaacagcctttcttttggctggagaacaaggatgtgatcggggtgcttgagaagggcgaccggctgcccaaacccgacttatgccctcctgtgctgtataccctgatgacaaggtgctgggattacgacccaagcgaccgacctcgcttcacggagctggtgtgttccctgtctgacgtgtatcaaatggaaaaggacatagcaatggagcaggaacgaaatgcacgctatagaacaccaaagattttggaaccaacagcatttcaggagccaccacccaagccctctcggccaaagtaccgacctcctccgcagaccaaccttcttgcccctaagctccagtttcaggaggaagactttatccaaccttcatccagggaagaggctcagcagctgtgggaggctgaaaaggttaaaatgcgtcaaattctggacaagcagcagaaacagatggttgaggattaccaatggttgaggcaggaagagaagtctttagatcccatggtctatatgaacgataagagtcctcttacccccgagaaggaggttggctatctggagttcactggccctccccaaaagcctccccgtctgggggctcagagtattcaacccactgctaatctggacaggactgacgacctggtgtacttaaacgtgatggagttggtgagagctgtccttgagctgaagaatgaattatgccagctcccgcctgaggggtatgtggtggtggttaaaaacgtcggcctgactcttcgcaagctgataggaagcgtggatgatttgttaccatccttgccatcttcctctcgtacagaaatcgaaggaacgcagaagctgcttaataaggacctcgcagaactgattaacaagatgcgtctcgcccagcagaatgccgtgacctcgctcagcgaggagtgcaaacgacagatgctaaccgcctcgcataccctggctgtggacgctaagaaccttctggacgccgtggaccaagctaaagttctcgccaatctcgctcacccccctgctgagtag

SEQ ID NO: 30411 - DNA, 3030 bp, synthetic construct
  misc_feature 1..3030: note = Description of Artificial Sequence: Synthetic coding sequence
  source 1..3030: mol_type = other DNA
atgagcggtgtgtccgagcccctctctagggtgaagctcggtaccctgagacgaccagaagggcctgcagaacctatggtggtggtcccagtagacgttgagaaggaggacgtaaggattctgaaggtgtgcttctattctaactctttcaatccaggcaagaattttaaactcgtgaagtgtaccgttcagacagaaattcgagagattattacgtcaatactgcttagtggacgcattggaccaaacatccgtttggccgagtgctacgggctgcgcttgaaacacatgaaatctgacgagatacactggttgcatcctcagatgacagtgggggaggtgcaggacaagtacgagtgtctgcatgtagaggctgaatggcgctacgatttgcagatccggtacctacctgaagatttcatggagagcctcaaagaggataggacaactcttctctatttttatcagcagttgaggaacgattacatgcagcgctatgcttcgaaagtatcagaggggatggccttgcagctggggtgtttggagctgcgaaggttctttaaggatatgccgcataacgctctggataagaagagtaattttgaactgctggaaaaagaggtggggcttgatcttttcttccccaagcaaatgcaggaaaacttgaaacctaagcagttcagaaagatgatccagcagaccttccagcagtatgcttcactgagggaagaggagtgcgtgatgaaattcttcaacacgctagcgggattcgccaatatagaccaggagacttacagatgcgaactgatacagggatggaacatcaccgttgatttggtgatcgggcctaagggaatcagacaacttacatcacaggatgccaaacccacatgcctcgcagaattcaagcagattcgaagcatccggtgcttgccgctggaagaaggccaggcggtcctgcagctgggtattgagggggctccacaggccctctccattaagacgtcaagcctggcggaagctgagaatatggcagacctgatcgatggatactgtcggctccaaggagaacaccaaggatccctgatcatccatccaagaaaagacggggagaagagaaattctctgcctcaaatacccatgttgaaccttgaggccaggcgatcacacttgagcgaatcatgtagcatcgagtccgatatctatgctgaaattcccgatgagacactcaggaggccaggtggccctcagtatggcattgctagggaggatgttgtgctcaatcgaatccttggtgagggttttttcggcgaggtgtatgagggcgtgtataccaatcataaaggcgaaaaaatcaatgtggccgtgaagacctgtaagaaagattgtactctggataataaagagaagttcatgtctgaggccgtcatcatgaaaaacctggaccatccacatatcgttaaactgatcgggatcattgaagaggaacccacgtggatcatcatggaattatacccctatggggagcttggccattatctcgaacggaataaaaacagtctcaaggtcctgaccttggtgctgtattcccttcagatttgtaaggctatggcatacctcgagtccataaactgcgttcaccgagacattgcggtacgcaacatcctcgtggcgagccctgaatgcgttaaactgggggattttgggttgagccgctatatcgaagatgaggattactacaaggctagcgtaacaagacttccaatcaaatggatgtcacctgagagcatcaactttcgccgatttactacagcatcagatgtgtggatgtttgccgtgtgcatgtgggagattcttagttttggaaagcagcccttcttctggctggagaataaggacgtgattggagtgctggagaaaggcgataggttgcctaagccagacctgtgtcctcccgttctttacacactgatgactcgctgctgggattatgaccctagcgaccgcccaaggttcacggagcttgtgtgttcactgtctgatgtataccagatggaaaaggatattgctatggagcaggagaggaacgcccgatatagaacgccgaagattctagagccaaccgcctttcaggagcccccaccaaagccgagccgtcccaagtacagacccccacctcagaccaatctgctggccccaaagctgcaattccaggtgcccgagggactctgcgctagctccccaacactgacatcccctatggaatacccaagcccagtcaactccctccatacgcctccccttcatcgccacaatgtgttcaagcgccactcgatgcgtgaagaagacttcattcagccttctagtcgagaggaggcccagcagctttgggaagccgagaaggtgaaaatgcggcagattcttgacaagcaacagaagcagatggtggaagattaccagtggcttcggcaggaggagaagtcactcgatcccatggtttatatgaacgacaaaagtcctctgacaccggaaaaagaagtgggctacctggagtttacagggccaccacagaaaccaccgcgtctgggcgctcagtctattcagcccactgcgaacctagacaggaccgacgaccttgtgtacctaaatgtcatggagctggtaagggccgtgctggaattgaaaaatgaactgtgtcaattgccacctgagggctatgttgttgtggtaaaaaatgtgggactgactctccgtaagctcattggtagcgttgatgatctgttacctagcctaccatcctctagtcgaactgagatcgaaggcacacaaaaactgctcaataaggatctggccgaattaatcaacaagatgcgcttagcccagcagaatgccgtgaccagccttagcgaagaatgcaagcggcagatgctgactgctagtcacactctagccgtcgacgcaaaaaatcttctcgacgccgtggaccaggccaaggtcttagcaaatctagctcacccgccagccgagtag

SEQ ID NO: 30412 - DNA, 3030 bp, synthetic construct
  misc_feature 1..3030: note = Description of Artificial Sequence: Synthetic coding sequence
  source 1..3030: mol_type = other DNA
atgtcaggagtgtccgagccactatctagggtgaagcttgggaccctacgcaggcccgaggggcctgccgaacccatggttgtggtgccggttgatgtggagaaagaagacgtgcgcatactcaaggtgtgtttttattcaaacagtttcaatcctggaaagaacttcaagctggtgaagtgtaccgtgcagacagagattcgagaaataatcacgtcaattttacttagtggccgaattggtccaaatattagacttgccgagtgttatggcctaaggttgaagcacatgaagtccgacgagatccactggttgcacccacaaatgactgtaggggaagtgcaggacaaatacgaatgtctacatgtcgaggctgaatggcggtatgatctgcagatccgctatctgccagaagatttcatggaatctctgaaggaagaccgcaccacgctcctatatttttaccagcagctgagaaatgactacatgcagcgctatgctagtaaggtttctgagggcatggctctacaactcggctgcttagagttgaggcgtttctttaaggatatgcctcataatgccctggacaaaaagtcaaatttcgagctgctcgaaaaagaggtggggctggatctcttcttcccaaaacagatgcaggagaacctcaagcctaagcagtttagaaaaatgatccagcagacgtttcagcagtatgcctctctgcgggaagaagaatgtgtgatgaaattttttaacactctcgccggattcgctaatatagaccaggagacctatagatgtgagctgatccagggctggaatattacagtcgatctggtcattggcccaaaaggcattaggcagttaacttcgcaggacgccaaacccacctgcttagctgagttcaagcaaatacggagcatccgctgtctcccactcgaagaaggccaagccgtgctgcaactgggtatcgagggggcacctcaggcactctccattaaaaccagctctctggcagaggcagagaacatggccgatctcatcgacggttattgtcgcctgcaaggtgagcaccaaggttctttaatcattcaccctcgaaaggacggggagaagagaaatagcctgccccagattccaatgctaaatctggaggccagacgctcccaccttagcgaaagctgttctattgagagcgacatctacgccgaaattccggatgaaactctgagaagacccggaggcccacagtatggcatcgcccgagaggatgtggtgctcaaccggattctcggagagggatttttcggtgaggtctatgagggcgtctacaccaatcataagggcgagaagataaacgtggccgtcaaaacctgcaaaaaggactgcacattggacaataaagaaaagtttatgagtgaagctgttatcatgaagaatctggatcacccacacatcgtgaagcttatcggtataatcgaagaagagcctacatggattatcatggagctgtatccctatggggaactgggacactatttggaacggaacaagaactcactaaaggtgctaactctggtactgtattctctgcaaatttgcaaagcaatggcctacctggagtccataaactgcgtgcaccgagacattgcggtgcgcaacattcttgtggcatcccctgaatgcgttaaattgggggattttggtctgagcagatatatcgaggatgaggattattataaagctagcgtgacgcgcctgcccattaagtggatgtctccagaatcaattaattttcgcaggtttacgactgcgagtgacgtctggatgtttgctgtatgtatgtgggaaatactgtccttcgggaaacaaccctttttctggttggagaacaaagatgtcataggcgtgctggagaaaggcgatcgcctgccaaaaccagacctctgcccccctgtgctttacactctaatgaccagatgctgggattatgacccatccgatagaccacggtttactgaactggtgtgtagcctgtctgatgtgtaccaaatggaaaaagatattgccatggaacaggaacgcaatgccaggtaccggacaccaaagatactggaaccgactgcatttcaggagcccccaccaaaacccagccggccaaagtacagaccgccaccccagactaacctgctggctcctaaactgcagtttcaagtgcctgaggggctttgcgcgtctagccccacactgacatctcctatggaatacccgtctccagtcaactccctgcatacacccccattacataggcataatgtattcaagaggcacagcatgagagaagaagacttcatccagccaagtagccgcgaggaagcccagcagctgtgggaggctgaaaaagtgaagatgcggcagatacttgacaagcagcagaagcaaatggtagaagattatcagtggttgcgtcaagaggagaagtctttagacccaatggtttacatgaacgacaagagcccattgactccagagaaggaggttggttatctcgaatttacgggacctccccagaagccgcctcgactgggtgcacaatctattcagcctacagccaacctggatcgcaccgacgatctcgtatatcttaacgtcatggagctcgttcgcgctgtgcttgaactgaaaaatgaattgtgtcagctgccacccgaggggtatgtcgtcgtggtcaagaatgtgggattgacccttagaaaactgataggctcggtggatgacttactgccttctctcccttcatcaagccggactgagatcgaaggaactcaaaaattactgaataaagacctcgccgagctgattaacaagatgcgactcgctcaacagaacgccgtcacatctctctctgaggagtgcaagaggcagatgctgactgcctcccatactctggctgtggacgccaagaatctactcgacgcagtggaccaagccaaagtcctggctaacctggcgcatcccccagcggagtag

SEQ ID NO: 30413 - DNA, 2904 bp, synthetic construct
  misc_feature 1..2904: note = Description of Artificial Sequence: Synthetic coding sequence
  source 1..2904: mol_type = other DNA
atgagcggggtgagcgaacccctgagtcgggtgaaacttggcaccctgagacgaccagaagggcctgccgagcccatggtggttgtgcctgtggacgttgagaaggaagatgtgaggattctgaaggtgtgcttttactccaactccttcaatccaggaaagaatttcaaattagtcaagtgcacggtgcagaccgaaatccgggaaatcatcacatctattttactgtcgggcaggattgggcctaatattcgcttggcagaatgttacggtctcagactgaagcatatgaagtcagatgagatccactggctacaccctcagatgacagtgggcgaggtccaagataagtatgagtgccttcacgtggaagcggagtggcgctacgatttgcagatccgttatctgcccgaggattttatggagtccctgaaagaagatcgcacgacattactgtacttctaccagcagctccggaatgactatatgcagagatacgcttcaaaggtgagcgagggcatggccctgcaattggggtgtctggagctccgcaggttcttcaaggatatgccccacaatgccctggataagaagagcaactttgaactcctggaaaaagaggtggggcttgatctcttcttcccgaaacagatgcaggaaaatctgaagccaaaacaatttcgtaagatgattcagcagaccttccagcagtacgccagcctgagggaggaggagtgtgtcatgaagttcttcaatacactggcgggattcgcaaatatagaccaggaaacatacagatgcgaattaatccagggctggaatatcacagtggacctcgtgatcggaccaaaaggaatacgacagttaacctcccaggatgctaagccaacttgcctggccgagtttaagcagataagatccattagatgtcttccactcgaggaagggcaggctgtgctgcagctggggatcgaaggtgctccccaggccctgagcattaagacatcctccctggccgaggctgaaaatatggccgacctgatcgacggctactgccgtctgcaaggtgagcatcagggttcccttatcatccacccacgcaaagacggggagaaacggaatagtctgcctcagatacctatgctgaatcttgaggctagacgatcgcacctcagtgagtcttgcagtatcgaatccgacatttatgctgaaattccagatgaaactttacgcaggcccggtgggcctcagtatggtatcgcacgagaagatgtggttctgaaccggattttgggagagggtttcttcggtgaggtgtacgaaggcgtgtacactaatcataaaggtgagaagatcaacgtcgccgttaagacctgcaagaaagattgtacccttgacaataaagagaaattcatgtctgaagctgtaatcatgaagaacctggaccatccacacattgtcaagctcattgggatcattgaggaagagccaacctggattatcatggagttgtacccttatggcgagctaggtcactatttagaacgtaataaaaattcactcaaggttcttactttggtcctatacagtttacagatatgtaaagcaatggcctatctggaaagtatcaattgcgttcatcgcgacatcgctgtgcgcaatattctggtggcatcaccggaatgcgtgaaactgggtgattttggtctgtctcgctatattgaagacgaggactattacaaggcatctgtgaccagactgcccatcaaatggatgagccctgagtctatcaatttcagacgtttcaccacagccagtgacgtttggatgtttgccgtatgtatgtgggagatcctcagctttgggaagcagcctttcttttggctagagaataaggacgtaattggagtgcttgaaaaaggagacagattaccaaagcccgatctctgccctccagttctttacaccctgatgactcggtgttgggattatgacccaagcgaccgccctcggttcacggagctcgtttgcagtctgtctgatgtgtaccaaatggaaaaagacattgccatggagcaggaacgtaatgccaggtaccgaacccccaaaatcctcgagcctacagccttccaggagcctccccctaagccaagtagacccaagtatagacctccgccacagactaacctcctggctcctaaattacagttccaggaagaggatttcattcaaccgagcagtcgggaggaggcccaacaactgtgggaggctgagaaggtgaaaatgagacagattttggataaacagcagaagcaaatggtcgaagactaccagtggttaaggcaggaagagaaatcgctggacccaatggtgtacatgaatgataaaagtcctcttactcccgagaaagaagtaggatatttagagtttaccggcccaccacaaaagccccctaggctaggtgcccagtcaatccaaccgacagcaaacctggaccgcactgatgacctagtttatcttaacgtaatggaactcgtcagagccgtgttagaactaaaaaacgagctctgccagctgccaccggaggggtatgtcgtagttgtgaagaatgtgggtctcaccttgaggaagttgattggaagcgtagatgacctgcttccttcgctgcctagctcctccaggacagagattgaaggcacccagaagctgctgaataaagaccttgcagaattgattaacaagatgcgactggctcagcagaacgcggtgaccagcctcagcgaggaatgcaaaagacaaatgttgacggccagtcacacgctggccgtggatgccaagaaccttctagatgccgtggaccaagctaaagtgttggcgaatttagcccatcccccagctgagtag

SEQ ID NO: 30414 - DNA, 2904 bp, synthetic construct
  misc_feature 1..2904: note = Description of Artificial Sequence: Synthetic coding sequence
  source 1..2904: mol_type = other DNA
atgagcggcgtctctgaacctctctccagagtaaagcttgggacccttcgacgacccgagggacccgctgagccaatggttgtggtgccagtggatgtggagaaagaggatgtccgtattctgaaggtctgcttctactccaacagtttcaaccccggaaaaaatttcaagttagtgaagtgtaccgtgcagaccgagatccgagaaattattacaagcattttactgtccgggcgaattgggccaaacatcagactggcagagtgttacggccttcgcctaaagcatatgaaatcagacgagatccactggttgcacccccaaatgacggtcggagaggtgcaagacaagtacgaatgccttcacgtagaggcagaatggcggtacgaccttcaaatcagatacctgccggaagatttcatggaatccttaaaggaggatcgcaccaccctactgtatttttaccagcagctcagaaatgactacatgcagagatacgcatccaaggtgtctgaagggatggcccttcagcttgggtgtctcgagcttcgcagattcttcaaggacatgcctcataatgcgctcgacaagaagagcaattttgaactcttggaaaaagaggtgggactcgacctctttttcccaaagcagatgcaggaaaatttgaaacctaagcagtttagaaagatgattcagcagaccttccagcagtatgctagtttacgggaggaagagtgtgtcatgaaattctttaacacactcgcgggattcgccaacatcgatcaggaaacataccgctgcgaattgattcagggctggaacatcactgtagatctcgtgattggcccaaaagggatccgtcagctgacaagccaggacgccaagcctacctgcctggctgagtttaagcagattaggtctatcaggtgtcttcctctcgaagagggacaggctgtcttgcagctgggcatcgaaggcgctccacaggctctgtcaataaagaccagctcactggcggaggccgagaacatggctgatctgatagacgggtattgtaggctccaaggtgaacatcaaggctctctaatcatacacccaagaaaggacggcgagaaaaggaattcccttccacagattcccatgctgaacctggaagcaaggcggtcccacctgtccgagtcctgctcaatcgagtccgacatttatgcagaaattcccgacgagaccttgaggaggccaggcggacctcagtacgggattgcccgagaggacgtggtgctgaataggatcctcggcgaagggttttttggtgaagtatacgaaggcgtttataccaaccataagggagaaaaaataaatgtggccgtcaagacctgcaagaaagattgcacattagacaacaaagaaaaattcatgtcagaggcggtgatcatgaagaacctggatcatccacacattgtcaaacttattggcataatcgaagaagaacccacctggatcattatggagctctatccttatggtgagctgggccactacctggagcggaacaaaaacagcctcaaagttctcacactggtcttgtacagtctgcagatttgcaaagctatggcctaccttgagagcataaactgtgtgcacagggacattgccgttcggaatatcctggtagcctccccggagtgtgtaaagttaggggactttggcctctcacgctacatcgaagatgaagattattacaaggcatcagttacaagactccccattaagtggatgtcacccgaatcgatcaatttcagacgcttcactactgccagcgatgtctggatgtttgccgtctgcatgtgggagattctgtcctttggaaaacaaccctttttttggctcgaaaataaagacgttattggcgttcttgagaagggcgatcggctgccaaaacctgacctctgtccccctgtgctatataccctgatgaccagatgctgggactacgatccaagtgatagacctcgcttcacagaattagtttgctctctgtccgacgtctatcaaatggaaaaagatattgccatggaacaagagcggaatgctaggtataggactccaaaaatcctagagcctaccgccttccaggagcctccaccaaaaccctcccgacctaaatacagaccccctcctcagaccaacctcttggcacccaagctacagttccaagaagaagacttcatccaaccatcctcccgagaggaggcgcagcagctctgggaagcagagaaggtgaagatgaggcagatcctggacaaacagcagaaacagatggtagaagattatcaatggctgcgccaggaggagaagagcctggacccgatggtctacatgaacgacaaaagcccattgaccccagagaaggaagtgggctatctcgagtttactggtccaccacagaagcctcccaggctcggggctcagagcatccagcccaccgcaaacctagaccgaaccgacgatctcgtgtaccttaacgttatggaactggtgcgcgcagtgctagaattaaagaatgagttgtgccagctgccaccagaagggtatgtcgtcgtggtcaaaaacgtcggtctcactttgcggaagctgatcggatccgttgacgacctgttgccaagtctgcccagctccagtcgaaccgaaatcgaaggcacccagaagctgttaaataaagacctcgccgagctcattaacaagatgagactagcacaacaaaatgcggttactagtttgagcgaggagtgcaaaagacaaatgttaaccgcttcgcataccctggctgtggacgccaaaaatctgttagacgcagtcgaccaggcgaaggttctcgccaacctggcgcatcctccggctgagtag

SEQ ID NO: 30415 - DNA, 2409 bp, synthetic construct
  misc_feature 1..2409: note = Description of Artificial Sequence: Synthetic coding sequence
  source 1..2409: mol_type = other DNA
ctcctgccggaacggatgtcaggcgtcagtgaaccgttgtcaagggtgaaactgggaaccctgcggagacctgagggaccagctgaacccatggtggtggtccccgtcgatgttgagaaggaagacgtccgcatactgaaagtatgcttttattctaactcttttaatcctggaaagaactttaaactggtgaagtgcaccgtccagactgagatccgtgagatcattacaagtattctcctctctggcagaatcggccctaacatcaggttggctgagtgctacggtctgagactcaagcacatgaagagtgatgaaatccactggctacaccctcagatgactgtgggcgaagtgcaagataagtatgaatgcctacacgtggaagctgagtggagatacgatttacagattcgttatcttccagaagactttatggagtctttaaaggaggatcgtacgactctgctctatttttaccagcagctaagaaatgattatatgcaacgctatgctagtaaagtctctgagggcatggccttgcaactaggttgcttagagctcaggcggttcttcaaagacatgccgcacaatgccctagacaagaagagcaacttcgagctcctggaaaaggaggtgggattggacttgttcttcccaaaacagatgcaagagaatctgaagcccaagcagttccgaaaaatgatacagcagacttttcagcagtacgcttcgttgcgcgaggaagagtgcgtgatgaagttcttcaatacactggcaggctttgcaaacattgaccaagagacataccggtgcgagctgatacaggggtggaacatcaccgttgacctggtcattggccctaagggaatacgtcagcttacctcgcaggacgcaaagccgacctgcctcgcagagttcaagcaaattcgatccatacgatgcttaccattggaagaaggccaggctgtgttgcagctgggaattgagggcgcaccacaggccctcagtatcaagacttcgagcctagcagaggcagaaaacatggcagatctgatagacggatactgtcgtctgcagggtgagcatcaaggctctctcatcatccacccgagaaaagacggagaaaagcgcaattccctgccacaaattcctatgcttaacctggaagcgagacgaagtcatctgtctgagagctgttcaatcgagtcagacatttacgctgaaattccggacgagacactaagaaggccaggcggaccccagtatggcatcgctagagaagatgtcgtactgaatcgcatacttggcgaaggcttctttggggaagtgtacgagggggtttacacgaatcataaaggggagaaaattaatgtagccgtcaagacatgcaaaaaggactgcaccctggacaataaagagaagttcatgtccgaggctgtcatcatgaagaaccttgaccacccccatatcgtaaagctcatcgggattatcgaagaggaacccacttggatcatcatggaactgtacccatatggagagctaggccactatctcgaacgaaataaaaacagccttaaggtgctaactcttgtgctgtacagtctgcagatttgtaaagcaatggcatatctcgaatcaatcaactgcgtgcacagagacatcgctgtgcgcaatattcttgtcgcaagcccagagtgcgttaagttgggagatttcgggctttcccggtatattgaggacgaggattactacaaagcttctgttactaggctgcccatcaaatggatgtcccctgagtctatcaactttcgaaggttcacgactgctagcgacgtttggatgtttgctgtctgcatgtgggagatcctgtcctttggaaagcagccgtttttctggctggagaataaagatgtgattggagttctcgaaaaaggcgatcgcctccctaagcccgacctctgccctcccgtgctttacaccttgatgacccgctgttgggattatgatccaagtgatcgacctaggtttaccgagctggtgtgtagcctgtcagacgtctatcaaatggagaaggacattgctatggagcaggagaggaatgccaggtacaggacccccaaaattctggagcccacagcctttcaagaacctccgccaaagccaagcagaccaaaatatcggcctccgccacagacgaatttgcttgccccaaagctgcaatttcaggttcccgaggggctgtgtgcatcctctcctactttgacgtctcccatggagtacccttcgcccgtcaacagcctccataccccgccactgcacaggcataacgtgtttaaacgccacagcatgcgtgaggaagacttcattcagccatccagtagggggcctgccgctgtgggcggatag

SEQ ID NO: 30416 - DNA, 3030 bp, synthetic construct
  misc_feature 1..3030: note = Description of Artificial Sequence: Synthetic coding sequence
  source 1..3030: mol_type = other DNA
atgagtggggtgtctgagcccctctctagggtcaaactcgggaccctgcgccgtccggaagggcctgctgagcccatggttgtggttccagtggatgtagagaaggaagatgtcaggatactgaaggtatgcttctactctaatagctttaatcccggtaaaaacttcaagttagtgaagtgtacagtgcagactgagattagagaaattattacgtccatcctattgagcgggagaatcggtccgaacatacgcctcgcagaatgctacgggctccggctaaaacacatgaaatcagacgaaatccattggctgcaccctcaaatgacagtgggggaagtgcaagacaaatatgagtgtctgcatgtcgaggccgagtggagatacgatctgcaaatacgatatctacccgaagatttcatggaatccctaaaggaggacaggacgaccctactgtatttctaccaacagttgagaaacgattatatgcagcgttatgcatcaaaggtctccgagggaatggcactgcagctgggttgcctcgaattgcgcagatttttcaaggacatgccccacaacgcgttagacaagaagtccaacttcgagctgctcgagaaagaggtcggtttagacctgttctttccgaagcagatgcaggagaatcttaaaccaaagcagttccgaaaaatgatccaacagacgttccagcagtacgcatcccttcgcgaggaggagtgtgtgatgaagttctttaacacgctggccggatttgctaatattgatcaggaaacgtaccggtgtgagctcattcaagggtggaatatcacagtggacctggttatcgggcctaaggggatcaggcagctcacctctcaggatgccaagccaacatgcttggccgaattcaaacaaattagatcaatacgctgcctaccactggaggaaggccaggctgtgctgcagctggggatcgagggggcaccacaggcacttagtatcaaaacatcaagccttgcagaagctgagaacatggctgatctgattgacgggtattgtagacttcagggagagcaccaagggtcattgattatacacccgaggaaggacggcgagaagcggaatagccttcctcaaattcccatgctgaatcttgaggcgaggcgctctcacctatccgaatcgtgttcgattgaatccgacatttacgctgagattcctgacgagaccctcagacgtcccggagggcctcagtatgggatcgctcgagaggatgtcgtcctcaaccgcattctgggggagggattttttggagaggtatacgagggcgtttacaccaatcataaaggtgaaaagattaacgtcgctgtgaagacatgtaaaaaggattgtacactggacaacaaagagaaatttatgtcagaggccgtgattatgaaaaacctagaccaccctcacatcgtgaaactgatcggtatcatcgaagaggaaccaacatggataatcatggaactctatccatacggagaacttgggcattacctggaacgcaataagaattctctgaaggtgctgaccctggtgctgtactccctccaaatatgcaaggctatggcttacctcgaatcaattaattgtgtccatagagatattgctgttcgcaacatcctcgtggcaagcccagagtgcgtcaaacttggcgatttcgggctgtccagatatattgaggacgaggattattacaaggcctccgtgactcgtctccccattaagtggatgagccctgagtctattaactttcggcgttttacaaccgcctccgatgtgtggatgtttgctgtttgtatgtgggagatccttagtttcggcaagcaaccttttttttggctggagaataaggatgtgattggagtgctagagaagggagacagactgcccaaacccgatctctgcccgccagttctgtacacattaatgacacggtgctgggactatgaccccagcgaccgccctaggtttaccgagttggtctgctcactgtctgatgtataccaaatggaaaaggatattgcaatggagcaggagcgaaacgcccgataccgcacacctaagatcctggaaccaactgctttccaggagccaccacccaagcccagtaggccaaaataccggccaccacctcagaccaacctccttgcacccaagctgcagtttcaggtgcctgaaggcctttgcgcttcttctcctacgctgacgtctcccatggagtatccaagtcccgtgaactcattacacacgcctccgcttcaccggcataatgtatttaagagacactcaatgagggaggaggacttcattcagccttcgtctagggaggaagcccagcagctatgggaggctgaaaaggtgaaaatgcggcaaatactcgataagcaacagaaacagatggttgaggactatcaatggttgaggcaggaagagaaaagtttagaccctatggtttatatgaacgataagtcacctctgactcctgagaaggaagtgggttacctagaatttaccggtccgcctcaaaaacccccaagattgggggctcagtcaatccaaccgactgccaatctagaccgtaccgacgacttagtgtacctgaacgtgatggagctggtgcgagcagtcctggaactgaaaaacgagctttgccaattgcctccggagggctacgttgtcgttgtgaaaaatgtgggtctgacactgaggaagcttattggcagcgtggatgacctattaccatctctcccctcatcctccagaacagagatcgaagggactcaaaagctgctcaataaagacttggctgaactgattaacaagatgaggttggcccagcagaatgcagtgacgagtctgagtgaagagtgtaaacgacagatgctaacagcctcacatactttagccgtggacgctaagaatctgctggatgctgtcgaccaagccaaggttctcgccaatctcgcgcatcctccagcagagtag

SEQ ID NO: 30417 - DNA, 969 bp, synthetic construct
  misc_feature 1..969: note = Description of Artificial Sequence: Synthetic coding sequence
  source 1..969: mol_type = other DNA
atggccgatagagactccgggtcggagcaaggtggggctgctttggggagtggcggttccctcggacaccctggaagcggaagtggcagcggaggagggggaggaggtgggggtgggggaggcggatccggcggagggggaggcggagcgccagggggtttacaacatgaaacacaggaactcgcttcaaagcgagtggacatccagaacaaacgcttctatctggacgttaagcaaaacgccaaagggcgttttcttaagatcgccgaagtcggcgcaggagggaacaaatctcgcctgaccttgagtatgtctgtcgccgtcgaattccgagactatttgggagattttatcgagcactacgcccagctgggcccaagtcagccgcctgacctggctcaggcccaggacgagccgcgacgtgccttgaagagtgagtttttagtgagggaaaacagaaaatattacatggatttgaaggaaaatcagaggggcagattcctgagaattagacagacagtgaatagaggtcctgggcttgggagtactcagggacagaccatcgctttgcctgcccaaggacttattgaattccgggatgcactggctaagctgatcgatgactatggggtggaagaggagcccgcagaactgccagaaggcacatctctcacggtcgataataaacgtttttttttcgacgttggaagcaataaatacggagtgttcatgcgcgtgtctgaggtgaaaccaacctacagaaactctattacggtcccatacaaagtctgggccaaattcggacatacgttctgcaagtactcggaagaaatgaagaagatccaggaaaagcagcgtgagaagcgagcagcctgtgagcagttgcatcagcagcagcagcagcaacaagaagagaccgcagcagctacactgttgctgcagggggaggaagagggcgaggaagactag

SEQ ID NO: 30418 - DNA, 588 bp, synthetic construct
  misc_feature 1..588: note = Description of Artificial Sequence: Synthetic coding sequence
  source 1..588: mol_type = other DNA
atgggtcgagcacgcgacgccatcctcgacgctctggagaacctgacagcagaggagttaaaaaaattcaagttgaaactgttgtccgtgccattgcgcgaaggttacgggaggatacccaggggtgcactgctgagcatggatgcgctcgacttgacagacaagcttgtgagtttttatctggagacatacggcgcagagctcactgccaatgtcctgcgagacatgggactccaggaaatggctggtcagctccaagcagccacacatcaaggaagtggcgctgctcctgcagggatccaggcacctcctcaatccgctgctaaaccaggtctccatttcattgatcagcatcgagcagccctaattgcaagggtaacaaatgtggaatggttgctcgatgctctgtacggtaaagttctcaccgatgagcagtaccaagcagtcagggccgagccaactaaccccagcaagatgcgcaagctctttagttttactccagcttggaactggacctgcaaagacttgttactccaagcgctcagagagagtcaatcttacctagtggaagaccttgagcgctcctag

SEQ ID NO: 30419 - DNA, 531 bp, synthetic construct
  misc_feature 1..531: note = Description of Artificial Sequence: Synthetic coding sequence
  source 1..531: mol_type = other DNA
atgggcagggccagggatgctattctggacgctctggagaatcttacagccgaggagctgaaaaagttcaagcttaaactcctgagcgtccccctccgcgaaggctacggtaggatccccagaggagccctcctgtcaatggatgccctggatctcaccgacaagctggtcagcttctacctcgagacctatggggctgaactgaccgcaaacgtgctgagggatatgggcttgcaggaaatggctggacaacttcaggccgctacccaccagggcctgcattttattgaccaacatagagccgctctgatcgcaagggtgaccaatgtggagtggctcctcgatgcattatacgggaaggtgctgacagatgagcagtatcaggcggtccgtgcagagccgacgaatcctagtaagatgaggaagttgttctccttcacaccagcttggaactggacatgcaaagacctgcttctgcaagcactgagagagtctcaatcgtaccttgtggaggaccttgagcgttcatag

SEQ ID NO: 30420 - DNA, 408 bp, synthetic construct
  misc_feature 1..408: note = Description of Artificial Sequence: Synthetic coding sequence
  source 1..408: mol_type = other DNA
atgggtagggctagagatgccatcctggatgctctggagaacttaacagcggaggagttaaaaaaattcaagttacaagcagctacacatcaggggagcggggcagctcccgctggaattcaagccccacctcagtcagccgcaaaacctggcctgcattttatcgaccagcacagagccgctttgattgctcgcgtgacgaacgtcgagtggctgctggacgcgctgtacggtaaagtgctgactgatgagcaatatcaagccgtacgcgcagaacccactaatccctctaagatgcgcaagctgttctcgttcactcctgcgtggaattggacgtgcaaggacctcctgctccaggcgcttagggagagtcaatcttatctggtcgaagacctggagcgtagctag

SEQ ID NO: 30421 - DNA, 1311 bp, synthetic construct
  misc_feature 1..1311: note = Description of Artificial Sequence: Synthetic coding sequence
  source 1..1311: mol_type = other DNA
atgaggctggcccgtctgctccggggagcagccctcgccggtccaggacccggtctgagggctgctggattttcgcgttcatttagttcagactccgggagcagtcctgcgtccgagcgaggtgtacctgggcaagtagacttttacgccaggtttagcccctcgccgctctctatgaagcagtttctggacttcggatccgtcaacgcatgtgaaaagacgagtttcatgtttcttcgccaggaactgcctgttcgtctagccaacattatgaaagagatttctcttttgcctgacaacctgctgcgcaccccctcagtgcagctggttcagtcctggtatatacagtctctgcaagagctgttggatttcaaggataagtccgccgaggatgcaaaggcaatttatgattttactgacacagtcatccggatacgcaacagacataatgatgtgataccgactatggcacagggggtcatcgagtacaaggaaagcttcggcgttgaccctgtgaccagccagaacgtccaatactttctagaccggttttacatgtctagaatttccattcggatgttgctgaatcagcactctctgctgtttggtggcaaggggaaggggtctccctcgcatcggaagcacatcggatccatcaatcctaattgcaacgttctcgaggtgattaaggatggctacgagaacgctagaaggctgtgcgacctctattacattaacagcccagaacttgaacttgaggaactgaacgccaaaagtcccggtcagcctatccaggttgtgtatgtaccctcccacctctatcatatggtgttcgagctctttaagaacgccatgcgagccacgatggagcatcatgctaaccgcggtgtctaccctcccattcaggtgcacgtcactctggggaatgaagacctcactgtcaagatgtccgaccggggtggtggagtgccgttgagaaagattgaccgtctgttcaactacatgtactcaactgcgcctcggccaagagtggaaacatcgagggccgtcccactagctggatttgggtatggcttacccatttcgaggctctacgctcagtacttccagggagatctgaaattgtactccctggaaggctacggcacagacgcagtgatttatattaaagctctttctacagattcaatcgaaagattacctgtctataataaggcagcttggaaacactataacactaaccatgaggccgacgattggtgtgtgccttctcgggagcccaaggacatgactacttttcgcagcgcatag

SEQ ID NO: 30422 - DNA, 1371 bp, synthetic construct
  misc_feature 1..1371: note = Description of Artificial Sequence: Synthetic coding sequence
  source 1..1371: mol_type = other DNA
atgaggcttgcgcgactcttgcgcggagcagcactcgctggtcctggccctgggctcagagccgcaggattttccaggtctttctcctcagatagcggctcctctcctgcgagcgaaagaggagtgcctggacaagtagatttctacgctaggttctccccaagtcctctctctatgaagcagttcttggattttggatcagttaatgcatgtgaaaagacgtcgttcatgttcctgcgacaagaactgccagtcagacttgcaaacattatgaaagagatctctctattgcctgacaacctcctccggacaccaagcgtccagctcgtacagtcttggtatatccagtctctgcaggagttattagatttcaaggacaaatcggccgaagacgctaaagccatctatgagcggcctagacgaacgtggctccaggtctcttcgctttgttgtatggcctgcaaaatgatatttaccgacacagtaattcggattaggaaccgccacaatgatgtcattccaacaatggctcagggcgtgatcgaatacaaagaatcctttggcgtggaccctgtaaccagccagaacgtgcagtattttcttgacagattttatatgtcccgaattagcatacgcatgctgctgaaccagcactccctgctgtttggaggcaagggaaagggctcgccctcccataggaaacacattggctccatcaatcctaattgcaatgtcctggaagtgataaaggacggctacgagaatgcccgtaggttatgcgatctttactacataaacagtcctgaactagagctagaggaactcaatgccaaaagcccgggacagcccatccaggtggtgtacgtcccctcccacctttatcatatggtgttcgaactttttaaaaatgctatgcgcgctaccatggagcatcacgcaaacagaggcgtatacccccctatccaggtccacgtaacactcggcaacgaagatctgactgttaagatgagcgatcgcggagggggagtgcctctccgaaagatagacaggttgttcaattacatgtattctactgctccgagacctcgggtggagactagccgggcagtgccgctcgcaggattcggctacggtttacctatctctagactctatgcacagtatttccaaggcgacctcaagctttacagcctggagggatatggcactgatgccgtcatttacatcaaagcacttagcacagacagtattgagcggctgcctgtgtacaataaggctgcctggaagcattacaatactaaccacgaggccgacgactggtgcgtgcctagcagagaacctaaggatatgactaccttccgcagcgcttag

SEQ ID NO: 30423 - DNA, 1311 bp, synthetic construct
  misc_feature 1..1311: note = Description of Artificial Sequence: Synthetic coding sequence
  source 1..1311: mol_type = other DNA
atgaggttggcgaggctgctccgcggagcagctttggcagggccaggaccaggtttgagagccgcaggcttcagcaggagtttctcctctgattctggttcttccccagcttcagagcgtggcgtgccaggacaggtggacttctacgccaggttcagtccttcgccactatccatgaagcagtttctagatttcggatccgtgaatgcctgcgaaaaaacgtcattcatgttcctgaggcaggaattacccgtccgactagccaacatcatgaaggaaatttctctcctgcccgacaacctcctgcgaacaccgtcggtccagctggtacagagttggtatatccagagtctccaagaactgctagacttcaaggataagtcagctgaggatgctaaagccatctatgatttcaccgatacggtcatcagaatcagaaacaggcacaatgacgtcattccaactatggcacagggggtcatagaatacaaggagtcattcggggtggacccagttactagtcaaaacgtccagtacttcctcgaccgtttttacatgtccaggatcagtatcagaatgttgctgaaccagcacagcctgctctttggagggaaaggcaagggctccccttctcataggaagcacattggatccattaatcctaactgcaatgtattggaagtaataaaggacggctacgaaaatgcaaggaggctttgcgatctctactacattaacagccccgagctggaactagaagagctaaacgcgaagtcgccagggcagccgatccaggtggtgtacgtgccatctcatctctaccacatggtgtttgaattgttcaagaatgctatgagggcaactatggaacaccatgccaacaggggagtctatcccccaatccaggttcatgtcactctaggcaatgaagacctcacagtcaaaatgtcagaccggggtgggggagtacctttgcgcaagatagacagactatttaattacatgtactccacagccccaagaccgagagtggagacctcccgcgctgtccctctagcagggtttggatacgggctgccgataagccgcctatatgctcaatatttccagggtgacctgaagttatattcactcgaggggtacggaactgacgctgtgatttatatcaaagcgctcagcactgatagtatcgagagactccctgtgtataataaggctgcttggaagcactacaataccaatcacgaggccgacgattggtgcgtgccatctagggaaccgaaggatatgacaacttttcgttcggcatag

SEQ ID NO: 30424 - DNA, 1083 bp, synthetic construct
  misc_feature 1..1083: note = Description of Artificial Sequence: Synthetic coding sequence
  source 1..1083: mol_type = other DNA
atgtttctaaggcaggaactgcctgtccgcctggcaaatatcatgaaggaaatttcccttctccccgacaaccttctcagaactccaagtgtccaactcgtgcagtcctggtacatccagagtctgcaagagctgctggacttcaaagataaatctgcagaggatgccaaagcgatctacgattttacagacaccgtgatacgcataagaaaccggcataatgatgtgatcccaactatggcacagggagtgatcgagtacaaggagagttttggagtggatcccgtcacatctcagaacgtgcagtatttcctcgataggttctatatgtccagaatcagtatcagaatgctcttgaatcaacacagcctattattcgggggtaagggtaaaggctcgccctcgcatagaaagcacatcgggtcgattaaccctaactgcaatgttctcgaggttatcaaagatggttatgagaatgcaagacgcttatgcgacctgtactatatcaactcccccgagctggaacttgaagagctcaatgccaagagccccggtcagccaattcaagtggtatacgtgccgtcccatctctatcacatggttttcgagttgttcaagaacgctatgcgcgcaacaatggagcaccacgcaaatcgtggagtatatccgcctatccaagtgcatgtaacgctgggcaacgaagatctgaccgtgaagatgtccgacagaggaggaggtgtccccctgagaaagatcgaccgactgttcaactacatgtattctaccgctccaagacccagagtcgaaacatcacgcgcagtgcctcttgcaggattcggctacggcctccctatcagtagactttatgcccagtattttcagggggatctgaaactgtattctttggagggctacggtactgacgcagtcatctacatcaaggccctgagcaccgactcaatcgaacggctccccgtctataacaaagcggcttggaagcattacaacacaaaccacgaggctgacgattggtgtgtgccttcaagggagccaaaggatatgaccacattcagatccgcctag

SEQ ID NO: 30425 - DNA, 846 bp, synthetic construct
  misc_feature 1..846: note = Description of Artificial Sequence: Synthetic coding sequence
  source 1..846: mol_type = other DNA
atggcccagggagttatcgagtacaaggagtcttttggagttgatccggttactagtcagaatgtgcagtactttctagacagattctatatgtccagaataagtatccgaatgcttctgaaccagcatagtctgctgtttggaggtaaaggcaaaggatccccttctcaccggaagcacattgggtctataaacccaaattgcaatgtgctcgaagtgatcaaagacgggtacgagaatgccagaaggttgtgtgacctctattacatcaattcccctgagctggaactcgaagaactcaatgctaagagccccggacaacccattcaggtggtctacgtccccagccatctttatcacatggtgtttgagctctttaagaacgcaatgcgcgcaaccatggaacaccacgcgaaccggggtgtataccctccgatacaggtccatgtgaccttggggaacgaggatctgaccgtgaaaatgtccgaccggggaggcggagtccctttgcgcaagatcgatcgtctgtttaattatatgtactccacggccccaaggccaagggtggagacatcaagagctgtgccactggccggattcggctatggtctgcctatttcccgactgtatgcacaatactttcagggagatttaaagctctacagccttgagggatacggaaccgacgccgtgatctacattaaggctctcagtacagattctatcgaacggctgcctgtctacaacaaggcggcttggaagcattacaacacaaatcatgaggctgacgactggtgtgttccctccagagaacctaaggacatgaccactttcagatcagcttag

SEQ ID NO: 30426 - DNA, 1032 bp, synthetic construct
  misc_feature 1..1032: note = Description of Artificial Sequence: Synthetic coding sequence
  source 1..1032: mol_type = other DNA
atgaaagagatcaatcttctccccgaccgggtgctcagcactcctagcgtgcaacttgtacaatcctggtatgttcagtcattgttggatattatggagttcctggataaggaccctgaggaccaccgcactttaagccagttcacggatgctctcgttaccatccgtaataggcacaatgacgtggtgccaaccatggcccaaggggtccttgagtacaaagacacctacggagatgatcctgtaagtaaccaaaacatccagtatttcttagaccggttttatctgtctagaattagtatcaggatgctcataaaccagcataccctcatatttgacgggtctacgaacccagcacaccccaagcacatcggttccatcgaccccaattgtaacgtctcagaagtagtaaaagacgcttatgatatggccaagctcctgtgtgataaatattatatggcttctccagatctggagatacaggaaatcaatgccgcaaactctaaacagcccatccacatggtgtatgttcccagccatctctaccatatgctgttcgagttgttcaagaacgccatgcgcgctaccgtcgagtcacacgagtccagccttatactcccaccaatcaaggtaatggtcgccctgggcgaagaagatctgagcattaaaatgtccgacaggggagggggagtgcccctcaggaaaatagagcgtctgtttagttatatgtactcaaccgcccctactccacaaccagggactgggggaactcccctcgctggctttggctacggcctgccaatcagccgtctgtacgcgaagtactttcagggagacctgcagctcttctctatggaaggtttcggcacagatgcagtcatttatttgaaggctctcagcaccgacagcgttgagcgtctgcccgtctataataaaagcgcctggaggcattaccagacaattcaggaagccggagattggtgtgtgcccagtacagagcccaagaatactagcacctatcgggtctcttag

SEQ ID NO: 30427 - DNA, 1224 bp, synthetic construct
  misc_feature 1..1224: note = Description of Artificial Sequence: Synthetic coding sequence
  source 1..1224: mol_type = other DNA
atgcgttgggtgtgggcgctactgaagaatgcttctcttgccggagccccaaaatacatagagcacttctcaaagttcagtccgagccctctgtcgatgaagcagttccttgattttggatccagcaatgcgtgtgagaaaacttctttcactttcctccgccaggaattgccagtaagactggctaatatcatgaaggagattaacctccttcccgatagggtgctctcaacaccaagcgtccagttggttcagtcatggtatgtccaatctctgctggacatcatggagttccttgacaaagatcctgaggaccaccggacactaagccaatttaccgatgcgctggtgacgattcgaaaccgtcataatgacgttgtgcccaccatggcccaaggagtgttagagtataaagatacctatggggacgatccggtcagtaaccaaaacatccagtacttcctggaccgtttttaccttagcagaatatctatccgcatgctgatcaaccagcacacactgatctttgacggttctacaaatcccgctcatccaaagcacattggctctatcgatcccaactgcaatgtgagtgaggtggtcaaggatgcctacgacatggctaagctgctttgcgataagtactatatggcctccccagacctggagatccaggagatcaatgccgctaacagcaagcaacctatccacatggtctacgttccgagtcacctttatcatatgctctttgaattatttaaaaatgccatgagggctaccgtagagtctcatgagagcagtctgatcttacccccaattaaggtgatggtggcgttgggagaggaagacctttccattaagatgagcgaccgcggtggaggcgtgccattaaggaaaatcgagaggctcttctcgtatatgtattctactgcccctaccccacaaccagggacaggcggtactccactagcgggatttggctatgggctgcccatctctcgattatacgctaaatatttccagggagatctccaacttttttcaatggagggattcggtaccgatgcagtgatctacctgaaggccctgagtaccgatagcgtagagaggctgccagtgtataataaatcagcctggagacactaccagactatccaggaagcgggagactggtgtgtcccctccacggagccaaaaaatacaagcacctatcgggttagctag

SEQ ID NO: 30428 - DNA, 849 bp, synthetic construct
  misc_feature 1..849: note = Description of Artificial Sequence: Synthetic coding sequence
  source 1..849: mol_type = other DNA
atgcctctgctgacacagcagatacaagacgaggacgaccagtattctcttgttgccagcctcgacaacgtcagaaacttatccacaatactgaaggccatacattttcgagaacacgctacctgcttcgctaccaaaaatggcatcaaagtgactgtcgaaaacgcaaaatgcgtccaggctaatgcttttatccaggccggaattttccaggagttcaaagtgcaggaggaatcggtaacattccgcatcaacctgactgtgctgttggactgcttgagcatcttcggctcgtcaccaatgccagggacgctgaccgcattgagaatgtgttaccagggatatggatatccccttatgctcttcttggaggaaggcggagtcgtgacagtgtgcaaaatcaacacacaggagccagaagagaccttagacttcgacttctgctctaccaatgtgatcaacaagatcattttgcaatccgagggtcttcgcgaggcgttttcggagttggacatgacctcggaagtgctccaaatcactatgtctccggacaagccgtactttaggttgtccacattcggtaatgctggctccagccacctcgactaccctaaggattccgatctgatggaggcgttccattgcaaccaaactcaggtgaaccgctataagatctccctcttaaaaccaagcacaaaagccctggtgctgtcttgtaaggtgagcatccgaacagataacagaggatttttgagcctgcagtatatgattcgtaacgaagacggccagatttgctttgttgagtactattgttgcccagacgaagaggtgcctgaaagcgagtcatag

SEQ ID NO: 30429 - DNA, 849 bp, synthetic construct
  misc_feature 1..849: note = Description of Artificial Sequence: Synthetic coding sequence
  source 1..849: mol_type = other DNA
atgccccttttaacacaacagattcaggacgaggacgatcagtactcgctggtggctagcctagataatgtgcggaaccttagtacgattctgaaggcgattcattttagagagcacgccacctgttttgccaccaagaacggaattaaagtcacggtcgagaacgcgaagtgtgtccaggcgaacgccttcattcaagcaggtatattccaggagttcaaggtccaggaggagagcgtgaccttccgcataaacctaaccgttctccttgattgcctgtcgatttttgggagctccccaatgcctggcaccctgaccgcccttcggatgtgctaccagggctacggatacccacttatgctgtttctggaggaaggcggtgtagtgacggtctgcaagatcaacacccaggaacctgaggagaccctggattttgatttttgcagtaccaacgtgatcaacaaaataatcctccagagcgaaggtctgcgagaggcattctcggaattggatatgactagtgaagtgctccagattaccatgtctccagataaaccttactttcggctctccactttcggaaacgccggaagcagtcatctggactacccaaaggactccgatctgatggaggcttttcactgcaatcaaacccaggtcaacaggtataagatatctttactcaaaccgagcaccaaagccctagtgctgtcctgtaaagtttctatacgcactgataatcggggattcctatccttgcagtacatgatcagaaatgaggacgggcagatttgtttcgtagagtattactgttgtcccgatgaagaggttcccgagagtgaaagctag

SEQ ID NO: 30430 - DNA, 741 bp, synthetic construct
  misc_feature 1..741: note = Description of Artificial Sequence: Synthetic coding sequence
  source 1..741: mol_type = other DNA
atgccgctgctaactcagcagattcaggatgaagacgaccagtacagcttagtagcttccctcgataatgttcggaatctgagcacaatcctaaaagctatacatttccgggaacacgccacatgcttcgccactaagaacggaattaaggtcaccgttgaaaacgccaagtgtgtgcaggccaatgctttcatacaaggaacgctaactgctttgcggatgtgttaccagggctacggctatccattgatgctctttctagaggaaggaggggtggtgactgtctgcaaaatcaatacacaagaaccggaagaaacattagattttgacttttgttccacaaatgtaattaataagatcattttacagtcagaagggcttcgcgaggccttcagcgagttggacatgaccagtgaagtgttgcagatcaccatgagtcccgataagccctatttcaggctctcaactttcggaaatgcgggttccagccatttggactatcccaaagactccgacttaatggaggctttccactgcaaccagacacaggttaatagatacaaaatttctctgttaaagccaagtactaaggctctggttcttagctgcaaggtgagtattcgaaccgacaatagggggttcttgagcctgcagtacatgattagaaatgaggatggacaaatctgttttgtggagtactattgttgtcccgatgaagaggtaccagagagcgagagttag

SEQ ID NO: 30431 - DNA, 1755 bp, synthetic construct
  misc_feature 1..1755: note = Description of Artificial Sequence: Synthetic coding sequence
  source 1..1755: mol_type = other DNA
atgaatcagcacgagctggctgtgcacaagaagaagattgaagaagtcgagacatggctcaaagcccaggtgctggaaagacagcccaagcagggcggatccatattactgattacagggccaccaggctgtgggaagactactaccctcaaaatcctttctaaagaacacggcatacaagttcaggagtggattaacccagtgttacctgatttccagaaagatgacttcaagggaatgtttaacacagagagcagcttccatatgtttccttaccagagtcagattgccgtttttaaggagttcttgctgagggccactaaatataataaattgcagatgcttggcgacgaccttaggactgacaagaagataatccttgtggaggatctgcctaatcaattttatcgcgattcccacaccctgcatgaggtcctcaggaagtatgtgcgcatcgggcgttgtcccctgatctttatcatatctgattcactgagcggagataacaaccagagactcctgttccccaaggagattcaggaagaatgttccatttccaacatcagtttcaatcccgtcgcaccgacaatcatgatgaagtttctcaaccggattgtgacaattgaggcgaacaaaaacggagggaagattacggtgccagataagacttcactggagttactctgtcagggctgttcaggtgatatcagaagtgccattaactcactgcagtttagctctagtaagggcgagaataatctgagaccgcgaaagaagggaatgtctctgaaaagcgatgccgtcctgagcaagtctaagagaagaaaaaagcctgaccgagtgttcgaaaaccaggaagtgcaggctattggcggaaaagacgtgtccttgtttctgtttagagcacttggaaagatactatactgtaagcgggcaagcctcacagaactagacagcccccgtctgccttctcacttatcagagtacgagagagatacgctgttagtcgaaccagaggaggtagtggaaatgagtcacatgcccggagacctctttaacttgtacttacatcagaactatatcgacttcttcatggaaattgatgacattgtccgcgctagcgaattcctgtcatttgccgacatactgtccggagactggaataccaggtctctgctccgggagtacagtacatcgatagccacaagaggtgtcatgcactcaaataaagccagggggtatgcgcattgccagggagggggatctagtttccggccactacataagccacagtggttcctgataaataagaaatatagagaaaattgcctggccgctaaggccctattcccggacttttgccttcctgccctgtgcctccaaacgcagttgctgccttacttagccttgctcacaataccgatgagaaaccaggctcagataagctttatccaggacattgggagactgccccttaaacgacacttcgggcgactcaagatggaggcgctgaccgaccgggagcacggtatgatagaccccgactcaggcgatgaggcccagttgaatggtggacactcagcagaagaaagtcttggcgaaccaacccaagccactgtccccgagacttggtccttacctctgtcacagaatagcgcctctgagctgcccgctagtcagcctcaaccattttccgctcagggcgatatggaagaaaacattattatcgaagactatgaaagcgatggaacatag

SEQ ID NO: 30432 - DNA, 2013 bp, synthetic construct
  misc_feature 1..2013: note = Description of Artificial Sequence: Synthetic coding sequence
  source 1..2013: mol_type = other DNA
atgaatcaggtcaccgattgggttgacccaagctttgacgactttttagaatgctccggcgtatctaccattacagccacctcgttgggtgtgaataactcttcccaccgcagaaaaaacggccctagcacactggaaagctcacgctttccagcaagaaagcgcggtaacttgtcttctcttgaacaaatttacggactggagaattcaaaagagtacctgtccgagaacgagccatgggttgacaaatataaacccgagactcagcacgagctcgcggtccataagaagaaaattgaagaggttgaaacctggcttaaggctcaggttctcgagcggcagcccaagcagggaggcagcatcttgctgataacaggcccacctggatgcggaaagacaactaccttgaaaatcctttcaaaagagcacgggatccaggtccaggagtggattaatcctgttttgccagactttcaaaaggacgactttaaaggcatgttcaacacggaatcgagctttcacatgtttccatatcagtcacagatcgccgtgttcaaagagtttctactcagagcaactaagtataacaaattacagatgttaggtgacgatttacgaacagacaaaaaaataattcttgtggaggatctcccaaatcagttctaccgcgattcccacactctgcatgaggtgttacgaaagtatgtgagaattggaagatgtccactgatatttatcattagtgattcgctgagcggcgacaacaaccagcggctgctgtttcccaaagaaattcaagaggagtgtagcatcagtaatatcagtttcaacccagtcgcaccgaccattatgatgaaattcctaaaccggattgtcacaattgaggcaaataaaaacggtgggaagattaccgtcccagataaaacaagccttgaactgttgtgtcagggctgttctggcgatatacggtctgcaattaatagtctgcaattctcaagtagtaaaggtgaaaacaatctccgtcccaggaagaaaggcatgagccttaagagtgacgccgttttgtcaaagagtaagaggcggaaaaaacccgacagggtgttcgagaaccaggaggttcaggctatcggtgggaaagacgtttcactcttcctctttagggcccttggaaagattttgtactgtaaacgggcatccctgactgagctggatagcccacgactcccctcccacctgtcagaatacgagagggataccctgctggtggagcctgaggaagtcgtggagatgagtcatatgcctggtgacctgttcaacctgtatcttcatcaaaattacattgacttttttatggaaattgacgacatcgtccgagcgtcagaattcctatctttcgccgacatcttatccggcgactggaatacaagatctcttctcagggagtacagtacctctatcgccacacgaggggtgatgcactccaacaaggctcgcggatatgcccactgccagggtggaggctcttccttccggcctctccataaaccacaatggttcctgatcaataagaaataccgagaaaattgtctggcagcgaaggccctgttccccgacttttgtctcccggctttgtgccttcagacccagttactcccttatttggcccttttgacaattcccatgcgcaatcaggctcagatctccttcatacaggatattggacgcctgcctttgaaacgacacttcggcaggctgaaaatggaggccctgactgaccgagaacatggtatgattgatccagatagtggcgacgaagcccagctgaacggcggacactccgcggaggaaagcttgggcgagcccacacaggccacagtgcctgaaacgtggtccctgcccctcagtcagaatagcgcgtcggaactgcctgcgagccaaccccagcccttttctgctcagggcgatatggaagaaaacatcataatcgaggactacgaaagcgacggcacctag

SEQ ID NO: 30433 - DNA, 2013 bp, synthetic construct
  misc_feature 1..2013: note = Description of Artificial Sequence: Synthetic coding sequence
  source 1..2013: mol_type = other DNA
atgaaccaggtgacggattgggtcgatccaagttttgatgacttcctggagtgctctggggtttctaccataacagctacatccctgggagtgaataacagcagccataggcgcaaaaacggtccttcaacactggaaagtagccgcttccccgctcggaagagaggcaacttgagcagcctggaacagatctacggattggagaactccaaggagtacctgagcgaaaatgagccatgggtcgataagtacaagccggagactcagcacgaactggcagtccataagaaaaagattgaggaggttgaaacatggcttaaggcacaggtgttagaacggcagccgaagcaaggaggctccatacttctgatcaccggccctccaggttgtggcaagacaactactttaaagatcctttccaaagagcatgggatacaggtccaggagtggatcaatcctgtgcttcccgacttccagaaggatgattttaaaggaatgttcaatacagagtcctccttccacatgtttccatatcagagccagatcgccgtttttaaggaattcttattacgggctacaaaatataacaaattacagatgctcggcgacgacctgcggacagataagaagatcatccttgtggaagatctcccaaaccagttctacagggactctcacaccctgcacgaagtactcagaaagtatgtcagaatcgggaggtgtccccttatcttcattatttcagacagcctgtccggagataacaatcagcgcctactctttccaaaggagattcaagaggaatgctccatatccaacatttcttttaatcctgtcgctcccacaattatgatgaagttcttaaatcgaatcgtaaccatagaagcaaataaaaatggcggtaaaatcaccgtcccagataaaaccagcctggagctgctgtgtcagggatgcagtggtgatatcaggtccgcgatcaatagcctgcagttctcctcatccaaaggagaaaataacttgcgccctcgcaagaagggaatgtccctgaagtcagacgcggttctgagcaagtcgaagaggagaaagaaaccagatcgtgtgtttgagaaccaagaggttcaggcaatcggcggaaaggacgtatcgttgttcctgttcagggcactgggcaaaatcttgtactgtaaacgggcttctctcacggagctggactccccaaggctcccctctcacctgtctgagtatgagcgtgataccctgctagtggaaccagaagaggtggtggagatgagccatatgcccggagacctgtttaacctctatcttcaccaaaactatattgacttcttcatggagattgatgatattgtgagggcaagcgagtttcttagtttcgccgacatcctttctggggactggaatacccgatcattattgagggaatattcaacatcaattgccacaaggggcgtaatgcattctaacaaagccagaggctacgcccattgtcagggtggaggcagcagcttcaggcctttacataaaccacaatggtttctgatcaacaagaagtatcgcgagaattgtttggcggcaaaggccctgttccccgacttctgtctgcctgcgctatgcctgcagacacaactgttgccctatctggctctcctgaccattcctatgagaaatcaggctcagatttcctttattcaagacattgggagactccctttaaagaggcatttcggtcggttgaaaatggaagccctaaccgaccgcgagcatgggatgatcgatcccgacagtggagatgaagctcagctgaatggcggacactcggctgaggagtcattaggcgagcctacccaggctactgtgccagaaacctggtcactcccattgtcacaaaattcagccagcgaattgcccgcttcccagccccagccctttagcgcccaaggggacatggaagaaaacatcatcatcgaggattacgaatcggacgggacctag

SEQ ID NO: 30434 - DNA, 2013 bp, synthetic construct
  misc_feature 1..2013: note = Description of Artificial Sequence: Synthetic coding sequence
  source 1..2013: mol_type = other DNA
atgaatcaggttacagactgggtcgatccttcttttgatgacttcctcgaatgttcaggggtttccactattacagccacgagcttgggagtcaacaactctagccaccgccgaaaaaacggtccctcgacgctggagtcctctcggtttcccgctcgaaagaggggaaatctgagttctctcgagcagatatatggtctggagaacagtaaggagtatctgtccgaaaatgagccctgggtggataagtacaaaccagagacacagcacgagctggccgtccataagaagaagatcgaggaagtggaaacatggctgaaggctcaggtcttagaaagacaacctaaacagggtggctccattctacttataacgggtcctcccggatgcggaaaaaccactacattaaagatcctgagtaaagaacacggaatccaggtgcaggagtggattaaccccgtgctgccagactttcagaaggatgactttaaaggcatgtttaacacagagagtagctttcacatgttcccctaccagtctcagattgcagtgttcaaggagtttctattaagggcaacaaaatacaataaactgcagatgttgggcgatgatctgagaacggataagaaaattatacttgtggaggatttgccgaatcaattttaccgtgacagccatacgctgcacgaggtattgcggaaatatgttagaatcggcaggtgcccactgatattcattattagtgactctctctccggtgacaacaaccagaggctgctgttccccaaggagattcaggaggagtgctcaatctcaaatatcagtttcaacccagtggcacctaccatcatgatgaagtttctgaacagaattgtgacgatcgaggccaacaagaatggcggtaagatcaccgtaccagacaaaacctcgctggagcttctgtgtcaaggctgctccggggacattaggagtgccataaactcactacagttttcatcgtccaagggcgagaacaatcttagacctcgtaaaaagggtatgagtctgaagagcgacgccgtcctaagcaagtcaaaaaggcgcaaaaaaccagaccgggtgtttgaaaatcaggaggtccaggcgattggaggaaaagatgtttcactgttcctgttccgggctttagggaaaatcttgtactgcaaacgggcatcgctcaccgagttggattccccgcgtctcccgtctcacttatccgaatatgagagagatacattgcttgttgagccagaggaagttgtggagatgtctcacatgcctggagacctatttaatttgtatctgcaccagaactacatagactttttcatggaaattgatgacatcgttagagcttccgagttcctgagtttcgcagacatactgagcggagattggaatacgcggagtctgcttcgggaatacagtacatctattgccacccggggtgtaatgcattccaacaaggcgaggggatacgcccactgccagggcggagggagcagctttcggcctttacacaagccgcagtggttcctgattaacaagaaatacagagagaattgcttagccgctaaagccctatttcctgacttttgtctgccggcattgtgcctccagactcagctgcttccatacctggcactgttaactatacctatgagaaaccaagctcagatttcattcatccaagatattggccgtctccctcttaagaggcacttcggaagattgaagatggaggcacttaccgatcgcgagcatggaatgattgatcctgattccggagatgaagcacaattgaacggaggtcatagtgcagaagagtcactgggtgaaccgacccaagcaaccgttcctgaaacatggagcctgccactgtcccagaactcggcctcagagcttccagcttcacaaccacagccttttagcgcccagggggacatggaggaaaacatcataattgaagactatgagtccgatgggacatag

SEQ ID NO: 30435 - DNA, 2013 bp, synthetic construct
  misc_feature 1..2013: note = Description of Artificial Sequence: Synthetic coding sequence
  source 1..2013: mol_type = other DNA
atgaaccaggtgaccgactgggtcgatccttcgtttgatgactttctggagtgctctggcgtgtccacaattaccgctaccagcctgggggttaataactccagtcaccgacgtaagaacgggcctagtacgttggaaagcagccgcttcccagcacgcaagaggggcaacctgagttccctcgagcagatttatggccttgaaaacagcaaggaatatctgtccgagaatgagccctgggtggataagtacaaacccgagactcagcacgagcttgcggtccataagaagaagatagaagaagtggaaacttggctgaaagcccaggtgctcgagagacagcccaaacaggggggatcaatcctcctcatcactggtccaccgggttgtggaaaaaccacgacactgaagatcctgtctaaggagcatggcattcaggtacaggagtggatcaaccctgtgctgcccgatttccagaaggacgattttaaggggatgttcaacacggaaagctcctttcatatgttcccctaccaaagccagattgccgttttcaaagagtttcttctccgagccaccaagtacaacaaactgcaaatgctgggcgacgacctgcgcactgataagaagatcatcctggtagaagatctgcccaaccagttttatagagacagtcacaccctccacgaagtgctacggaaatatgtgcgaatcgggagatgtccgctgatcttcataatttccgatagcctaagcggagacaataaccaacgcctgctgtttcccaaggagatccaagaggaatgctccatctctaatattagctttaaccctgtagcacctactatcatgatgaaattcctcaatagaatcgtgactattgaagccaataaaaatggtggcaagattaccgtgccagataaaactagcctggaactgctttgccagggatgttccggcgacatccggtccgctattaatagcctgcagttttctagttccaagggtgaaaataacctaagacctagaaaaaaaggcatgtccctgaagagtgatgccgtcctgtccaaaagcaagaggcgcaaaaaacccgatcgggtcttcgaaaatcaggaagtacaggccataggtggcaaagatgtgtcattatttctgtttcgagccctcggcaagatcctgtactgcaaacgcgcatctctcacagaactggattcaccacgtcttccttcccatctcagcgagtatgaacgtgacaccctcctggtggaaccagaagaggtggttgaaatgtcccatatgcccggagatctctttaatctgtatcttcaccagaactacatcgacttctttatggagatagatgacattgttagggcatccgaatttctgagtttcgcagacatccttagtggagactggaacacccggtccctgttacgggagtacagcactagtattgcaactcggggagtcatgcactcgaataaggcacgcggatatgctcactgccaagggggtggatcctccttcaggcctttacacaagccgcaatggttcctgattaataagaaataccgggaaaactgtctcgcggctaaagcactttttcccgatttctgtttgcccgctctctgtttgcagacccagctactgccgtacttggccctgctgacaattcctatgcggaaccaagcccagatctctttcatacaggacatcggcaggctacccctgaaacgccatttcggcagattaaaaatggaggccctgacagacagggaacatggcatgattgatcccgactccggggatgaagcacaattgaacggtgggcatagcgccgaagagtcactgggagaacctactcaagccactgtacctgaaacttggagtcttccgctgtctcagaactctgctagtgagctgcctgcctcacagcctcaacctttttcagcacagggtgatatggaggaaaacatcattatcgaggactatgaatccgatggtacttag

SEQ ID NO: 30436 - DNA, 1518 bp, synthetic construct
  misc_feature 1..1518: note = Description of Artificial Sequence: Synthetic coding sequence
  source 1..1518: mol_type = other DNA
atgttcaacaccgaaagttcttttcacatgttcccatatcagagccagatcgcggttttcaaggaatttctgcttcgagccacaaagtacaataaacttcagatgttgggagacgacctgagaaccgataaaaagatcatcctggtggaagatttgcccaatcagttttatagggactcccatactctgcatgaggtgctgagaaagtatgttaggatagggcgttgcccactgatctttattatctcagactctttatccggtgacaataaccaacggctcctctttccaaaagagatccaggaggaatgttccatctcaaacatctctttcaacccggttgctccgacgatcatgatgaagtttcttaaccggatagtaaccattgaggcgaataaaaatggaggaaagatcaccgtacccgacaaaacctcattggaacttctgtgtcaaggctgctctggggacatacgctccgcaataaattctcttcagttttcatcttccaagggcgaaaataacttacgtcctagaaagaagggcatgtcgctgaaatccgatgccgtgctgtccaaaagtaagagacggaagaagcccgaccgcgtgttcgaaaatcaggaagtgcaagcaatcggaggcaaagacgttagcctgtttctgttccgcgcactcggcaagatactgtattgcaaaagagccagtctgacggaactggactcgcctaggttaccaagccacctgtccgagtacgaacgagacacattactcgtcgagcctgaggaagtagtggaaatgtcacacatgcctggagatttatttaacctgtatctccaccagaattatatagactttttcatggaaattgatgacattgtgagggcaagtgaattcttatctttcgctgacatcctgtcgggggattggaacacgcggtctctgttgcgcgagtactctaccagtatcgcgacccgtggtgtgatgcattcgaacaaggcacgaggatatgctcattgccagggaggaggcagtagctttcgacccctgcacaagccccaatggtttctgatcaacaagaagtacagggaaaattgtctggcagccaaggcactattccctgacttctgcctcccagccctctgtctacagacgcaactgctgccgtacttggccctgttgacaattcctatgaggaatcaagctcagattagttttatacaggacatagggagactcccactaaaaagacacttcggtcgactcaagatggaggctctcacggacagagagcatggaatgatagaccctgactcaggcgacgaggcccagctgaacggaggacatagcgccgaggaaagtcttggtgaaccaacacaggctaccgtcccagaaacatggtctctgccgctttcccagaattccgccagcgagctccctgcctcacagcctcagccgttcagtgcccaaggagacatggaagagaacatcatcattgaggattacgagtcagacggcacatag

SEQ ID NO: 30437 - DNA, 2013 bp, synthetic construct
  misc_feature 1..2013: note = Description of Artificial Sequence: Synthetic coding sequence
  source 1..2013: mol_type = other DNA
atgaatcaggtaaccgactgggtggatccctcatttgatgattttctcgagtgttccggagtgagcaccatcacagcaacatctctcggcgtcaataattcctcacatcgcaggaagaacgggcctagcaccctcgaatccagtaggttcccagcgagaaaacgcggaaatctcagctccctggagcagatctatgggctggagaactccaaggagtatttaagcgaaaacgaaccctgggtcgacaagtataaacccgaaacccagcatgaactggccgtccataaaaaaaaaatcgaagaggtagagacctggcttaaggcccaggtgctcgagcgccagccaaagcagggcggttccatcctgcttattactggccctccaggttgtggcaagactacaaccctgaagatcctctcaaaggaacacgggattcaagtacaagagtggattaacccagttctgcctgactttcaaaaggacgatttcaagggcatgtttaacacagagtcatcattccacatgttcccatatcagtcacaaatagctgtgttcaaggagttcttgctgcgggctactaaatataacaagttgcagatgctgggcgatgatttgcggacggacaagaagatcatcctggtggaggatttgcctaaccagttctatcgcgatagtcatactttacacgaagttttgcgcaagtatgtccggatcggccgatgcccactgattttcatcatttctgactccttgagtggcgataataatcagagactgctgtttcccaaagagattcaggaggagtgttctatttctaacattagctttaaccctgtcgcccctaccattatgatgaaattccttaatcggattgtgaccatagaggcgaataagaacggcggaaaaataaccgtgcccgacaaaacatcactggagctactctgccagggatgttctggcgacatcagatcagctatcaattcactccagttctctagctccaagggagagaataacttgagaccgagaaaaaagggcatgagtctcaagtccgatgcagttctatcaaagtccaaaaggcgaaaaaagcccgatagggtgttcgaaaaccaggaagtgcaagctattggcggaaaagatgtaagcctttttctgtttcgagctctgggaaagatactgtattgcaaaagagcttccctgactgagctggatagccccaggttaccctcccacctcagcgagtacgagcgtgacaccctgcttgtggagcccgaggaggttgtggaaatgtcacacatgcctggagatctattcaatctctacctccaccaaaattacatcgacttttttatggagatcgacgatatagtgagagccagtgaattcctgagttttgctgacattctgagcggggattggaacactcggtctctcctccgcgagtacagtacctcgatcgctacacgtggagtcatgcacagcaataaagccaggggttatgcccattgtcagggcggagggagctctttcaggccgcttcacaagccacagtggtttctgattaacaagaaatatcgggaaaactgcttagccgctaaagctctttttcctgatttttgtctgcccgctttatgtctccaaacacagcttctcccttacctggcattgctgaccatacccatgcgtaaccaggcccagatcagctttatacaggacattggccgactgccactgaagcgccacttcggtagactcaaaatggaagcacttacagatcgagagcatggtatgatagacccggattctggcgacgaggcccaactgaacggaggccattcagccgaggagtctttgggtgaacctactcaggcgaccgtacccgagacttggtccttacccttgtcgcagaacagtgcttcagagctgccggcatcccagccccagcccttctctgcccaaggagacatggaagaaaacattattatcgaggattacgagtcggatggcacttag

SEQ ID NO: 30438 - DNA, 2046 bp, synthetic construct
  misc_feature 1..2046: note = Description of Artificial Sequence: Synthetic coding sequence
  source 1..2046: mol_type = other DNA
atgtcgaagacttttctaaggcctaaggtgagttccaccaaggtgaccgattgggtggacccctcttttgatgatttcctggaatgcagcggtgtgtctaccatcaccgctacctccctgggggtgaataactcctcacatcgcaggaaaaatggacccagcacgctagagtcatctcgatttcccgctcggaagcgtggcaatctctcaagcttagaacagatttatgggcttgaaaattctaaagagtacttgtctgaaaatgaaccctgggtggacaaatataagcccgagacacagcacgaattagccgttcataagaagaagatcgaagaggtagagacctggctcaaggcacaagtcctggaacgccagcctaagcagggaggctccattctgctgattactggtcccccaggttgtggaaagaccacaacccttaagattttgagtaaagaacacggaatacaggtgcaggaatggatcaaccccgttttgcctgattttcagaaggacgactttaagggaatgttcaataccgagagtagctttcacatgttcccgtatcagtcccagatcgctgtgttcaaggaatttttgctgcgagccaccaagtacaataaattgcagatgcttggagacgacctcaggacggataagaaaatcatcctcgtggaggatctgccaaatcagttctaccgcgacagccacactcttcatgaggtccttcgtaaatacgttagaattggcaggtgtcccctgatatttatcatttctgacagcctatctggagataataatcaacggctgctctttccaaaagagattcaggaagaatgctccattagcaacatatcctttaacccagtggctccaaccatcatgatgaagtttttaaacaggattgtgacaattgaggccaacaagaacggtggtaagattaccgtgcccgacaaaacttctctagagctgttatgtcaggggtgctccggggacatacggtccgcaatcaactccctgcagttcagcagctccaaaggcgaaaacaacctcaggcctcggaaaaagggcatgtcgctgaaatccgatgcagtgctgtctaagagcaagagaaggaaaaagcccgatcgtgtctttgaaaatcaggaggtgcaggcgattgggggaaaggatgtatctctctttctgttcagggctttaggcaagatcctgtattgtaaacgagcgtccctcacagagctggacagtccaaggctgcctagccacctaagcgagtatgagagggatacactcctggtcgaaccagaagaagtggttgagatgagtcatatgccaggagatctttttaatctgtacctccaccagaactacattgactttttcatggagatagatgatattgtgcgtgcttctgaatttcttagcttcgctgatatcctatcgggagactggaacactcgatctctgctgcgcgagtacagcacttcaatcgctactcggggagtgatgcactcgaacaaagcccgagggtatgcccactgtcagggcggaggttccagcttccgcccattacacaaaccccagtggttcctgattaacaaaaagtatagagaaaattgtcttgccgctaaggctttatttcctgatttctgcctgcctgctctctgcctgcagactcagctgcttccatatttagctttactcaccatcccaatgcgcaatcaggcccagatttctttcatccaagacatagggaggctgcccttaaagaggcattttggcaggcttaagatggaggccctgacagacagagagcatgggatgatcgaccctgactctggtgatgaggctcagctgaacggaggccattctgcagaggaatcactaggggaacctacccaagccacagtaccggagacatggtcgctgcctctgtctcagaactctgcttccgagctccctgcaagtcagccccagcccttcagcgcccagggagatatggaggagaatattatcatcgaagattatgagtccgatgggacctag

SEQ ID NO: 30439 - DNA, 510 bp, synthetic construct
  misc_feature 1..510: note = Description of Artificial Sequence: Synthetic coding sequence
  source 1..510: mol_type = other DNA
atgaatcaggtgactgactgggtggaccccagttttgacgacttcctggaatgttccggggtgagcacgattaccgctacgagcctgggtgtgaacaactcttctcacagacgtaaaaacggcccttcaaccctggaatcttcacggttccctgcccgaaaaagagggaacctgtcatcactggagcagatttatggtctcgaaaatagtaaggaatacctgtctgagaatgagccatgggtagataagtataagcccgagacacagcacgagttggctgttcacaagaaaaaaatcgaggaggtcgagacatggcttaaagcccaagtgcttgaacggcagcctaagcaggggggtagcattctgctcatcacagggcctcctggctgcggaaagactacaacactcaagatcctgtctaaggaacatggcatccaagtgcaagaatggatcaatcccgtgttacccgatttccagaaagacgacttcaagggaatgtttaatacttag

SEQ ID NO: 30440 - DNA, 66 bp, synthetic construct
  misc_feature 1..66: note = Description of Artificial Sequence: Synthetic coding sequence
  source 1..66: mol_type = other DNA
atgaatcaggttactgactgggtggacccgagctttgatgacttcctggaatgctctggtgtgtag

SEQ ID NO: 30441 - DNA, 2046 bp, synthetic construct
  misc_feature 1..2046: note = Description of Artificial Sequence: Synthetic coding sequence
  source 1..2046: mol_type = other DNA
atgtccaagacattcctcagacccaaggtgagctctactaaagtgacagactgggttgacccaagcttcgacgatttcttggagtgctccggcgtgagcacaataaccgcaactagtttaggtgtgaataactcttctcatcgacggaagaacggaccttctactctggagtctagcagattccccgcaaggaaacgagggaacctgagttctctggagcagatttacggactggagaattcaaaggagtaccttagtgaaaatgaaccttgggtagataagtataaaccagagacacagcacgagctggcagtgcataaaaaaaagatagaagaggtggagacgtggcttaaagcccaggtcctggaacgccagccgaagcagggaggaagcatcctcttaattacaggaccccctggctgcggtaagaccacaactttgaaaatcctctccaaggaacacggaatacaggtgcaggagtggattaaccccgtgctccctgatttccagaaagatgatttcaagggaatgtttaataccgagtcaagcttccacatgttcccctatcagtcacagattgccgtgttcaaggaatttttactgcgggcaacgaaatacaataagttgcagatgcttggggacgatctgagaactgataagaagatcatccttgtcgaagacctgccaaatcagttctatcgcgacagccataccttgcacgaagtgctgagaaagtacgtccgcattgggagatgcccactaatcttcattatctccgactctctgagtggggataacaaccagcggctgctttttccaaaggaaatccaggaggagtgctccattagcaacattagcttcaaccccgtggcacccaccatcatgatgaagttcctgaatagaatcgtgaccatcgaagccaataaaaacggagggaagatcaccgtaccagataaaaccagtctggagctgctctgccagggatgctcaggagacatcagaagcgctataaatagcctgcaattcagctcttctaaaggtgaaaacaacctgaggcctagaaagaaggggatgagcctgaaatctgatgccgtcctttcaaagagtaaaaggcgcaagaagcccgacagggtgttcgagaatcaggaggtgcaggccatcgggggaaaagatgtcagcctgttcttgttccgggctcttgggaaaatcctgtactgtaaacgcgctagcttgaccgagctagattctcccaggctgccctcccatctgtctgaatacgagcgcgataccttgctggtggaacctgaggaggttgtagagatgagtcatatgcctggggatctgtttaacctctatctgcaccagaactacatagacttcttcatggagattgacgatatcgtccgggcaagcgaatttctctcgttcgccgacatcctatctggcgactggaatacccgaagcctactgagagaatacagcacatccattgcaaccaggggagtgatgcattccaataaggcccgaggatacgcacattgtcaggggggtggctcctctttccggcctctacacaagccgcaatggttcttaatcaataagaagtatagggaaaattgtctggccgcaaaagccttattccccgacttctgtcttcctgccctgtgtctacaaacacagcttctgccttatctggcactgttaactataccgatgcggaatcaggcgcagatctcttttatccaggatattggcagacttccccttaaacgccattttgggaggttgaagatggaggctctgacagatcgtgaacacgggatgatcgaccctgattcaggggatgaggcacagttaaatgggggtcacagtgccgaagagtctctaggagaaccgacccaagccaccgtccccgagacttggtccctcccgcttagccaaaactctgcaagtgaactcccagcctctcagccacaaccatttagtgcccagggtgacatggaggaaaatataattatcgaagactatgaatctgatggcacttag

SEQ ID NO: 30442 - DNA, 1518 bp, synthetic construct
  misc_feature 1..1518: note = Description of Artificial Sequence: Synthetic coding sequence
  source 1..1518: mol_type = other DNA
atgttcaacaccgagtccagctttcacatgtttccatatcaatcgcagattgcagtgtttaaggagtttcttctcagggccacaaagtataataaattgcagatgttgggagatgatctccggaccgacaagaaaataatcttggttgaggacctgccaaatcaattctatcgtgacagtcacacactgcatgaggtgctgcggaagtacgtgcggattggaaggtgtcctctcatcttcattattagcgactcactgtcaggggacaacaatcaaaggcttctgtttccgaaagaaattcaagaagagtgtagcattagcaacattagctttaatcctgtggcacccacaattatgatgaagttcctcaaccgcattgtgactatcgaagcaaacaaaaatggaggcaagatcactgtccctgataagacttcactcgagcttctgtgccagggatgttccggcgacatcagatcagccattaattctcttcaattcagctcctccaaaggggagaataatctgagacccaggaagaagggaatgtctctcaaatctgatgctgtactgagcaagtccaagcgaaggaagaaacctgatagggttttcgagaaccaggaagtccaagctattgggggaaaggacgtgtcgctctttctgttcagagccctcgggaagattctttactgcaagagagcctctctcaccgaactggattctcctcgactcccatcccatttaagcgaatacgagcgggacactctgctcgtggagcccgaggaagttgtcgagatgtctcacatgccaggcgatctgtttaacctctatctacaccagaattatattgacttcttcatggagatcgatgacatcgtgagagcgagtgaattcctgtctttcgccgatattctgagcggagactggaatactaggtccctgcttagggaatacagcacgtccatcgcgacccgaggtgtaatgcacagcaataaggcacgcggttacgcccactgccagggtggtggatcaagtttcaggccactgcacaagccgcagtggttcttgatcaacaagaaatatagggaaaactgtttagctgcaaaggcgctgtttccagacttctgcctgccagcactgtgccttcagacacagctgctgccctacttggctttgctcacaatacctatgagaaatcaagcccaaatttcttttattcaggacattggtcgtctgcctcttaaacgtcacttcggcagactgaagatggaagcactgaccgatcgcgaacacggcatgatcgacccggacagcggtgacgaggcacagctgaatggcggacattctgccgaagaaagcctcggtgaacccacccaggccaccgtacccgagacctggagtctaccactctcccagaacagtgcatcagagcttcccgcttcccaacctcagcctttctcagctcagggagatatggaggagaatattatcattgaagactatgaaagcgatggaacctag

SEQ ID NO: 30443 - DNA, 1488 bp, synthetic construct
  misc_feature 1..1488: note = Description of Artificial Sequence: Synthetic coding sequence
  source 1..1488: mol_type = other DNA
atggactccctcgctgaatcacgctggcctcccggactggcggttatgaagactatcgacgacttgctccgatgcggaatctgctttgagtacttcaatattgcaatgatcatcccgcagtgttcgcacaattattgctcattgtgcatccggaaatttctatcatataaaacccagtgcccgacttgctgcgtcactgtgacagagcctgatttgaaaaataacagaatccttgatgaactcgtgaagagtctgaattttgctcggaaccacctcctacagtttgctctcgagagccccgctaaatccccagcgagttcttctagcaaaaacctggccgtgaaagtgtacactccagtggcatcaagacagtcactgaagcagggatcaagactgatggataatttccttatccgtgaaatgtccggttccacatccgagctcttaatcaaggaaaacaagagcaagttcagcccccagaaagaggcctctcctgccgctaagaccaaggaaacgcgcagtgtggaagaaattgcaccggacccatctgaggccaagcggccagaacccccaagcacaagcacccttaagcaggtaaccaaggttgactgccccgtttgtggtgttaacattcccgagtcacacattaacaagcacctggactcatgcctgagccgcgaggaaaaaaaagagtccctgcgctcctccgttcacaaacgtaagcccctcccaaagaccgtgtataacctcctgtcggaccgcgacttaaagaagaagctgaaggaacatggcttgtctatccaggggaacaagcagcagctaataaagcggcaccaggaattcgtgcatatgtacaacgcacagtgcgatgcactacaccctaaatccgccgcagagatagtccgcgaaatcgagaacattgagaagacaagaatgagattggaggcatctaaacttaatgagtctgtgatggtatttaccaaggaccaaacagaaaaggaaatagatgaaattcatagtaagtacaggaaaaagcataaaagtgagttccagttgttggtcgaccaagcccgaaaaggctataaaaaaatcgctggcatgtcacagaagaccgtaaccatcaccaaggaagatgaatctactgaaaaattgagttccgtatgcatgggccaggaagataatatgacatccgtgaccaaccacttcagtcagtccaagttagactcccctgaggagttggagcctgatcgcgaagaggattccagctcctgtatcgacatccaagaagtgctctcctcctctgagagcgactcatgcaattcgtccagttccgacattattcgggatctgctagaggaggaagaggcctgggaagcctctcataagaatgacctccaggacaccgaaatcagcccgagacagaaccgacgcacgcgagctgccgaaagtgcagagatcgagccaaggaacaagcgcaatcgcaactag

SEQ ID NO: 30444 - DNA, 279 bp, synthetic construct
  misc_feature 1..279: note = Description of Artificial Sequence: Synthetic coding sequence
  source 1..279: mol_type = other DNA
atggactcccttgctgaatctagatggccacccggattggctgtgatgaagacaatcgacgaccttctgagatgcggcatctgtttcgagtactttaacattgcaatgattatacctcagtgttcccacaactattgtagcttatgcataaggaagtttctctcatataaaacgcagtgcccgacctgttgtgtgactgtaaccgagcccgatcttaagaataatcgcatcctggatgagctggtgaaatcattaaacttcgcgaggaaccatttgtag

SEQ ID NO: 30445 - DNA, 1092 bp, synthetic construct
  misc_feature 1..1092: note = Description of Artificial Sequence: Synthetic coding sequence
  source 1..1092: mol_type = other DNA
atggctgtgacaattacactgaagaccctgcaacagcagacctttaaaatccgcatggaaccagacgagactgtcaaagtcctgaaagagaagatcgaagcggagaaaggacgggatgcgttccccgtggctggacaaaagctcatctacgccggaaagatcctatctgatgatgtcccaatccgggactatagaattgacgaaaaaaatttcgtggttgtcatggtgacaaaaacgaaggcagggcaaggaacttcagccccacccgaagcttcaccgacagcagcgccagagtcatctacctcattccccccagcccctacttccgggatgtctcatcctcctcccgctgctcgggaggataaatctccctccgaggaatccgcccctacaacgagccccgagtcagtgtccgggtctgtgccatccagtgggtcctccgggcgtgaggaagatgctgcatccacgctggtcacaggctcagaatacgaaacaatgctgaccgagatcatgtccatgggctatgagagggagagagtggtggcggctcttcgggcttcctataataacccccacagagctgtcgaatatctgcttacgggtattcccggaagtcctgaacctgagcatggatctgtgcaggagtctcaggtctctgagcaaccagctaccgaggccgcaggagagaacccccttgaattcctacgggatcagccgcaattccagaatatgagacaggttattcagcagaatcctgcacttctgcctgccttactgcagcagttggggcaggagaacccacagctgctgcagcagattagtcgacatcaggaacagttcatccagatgctcaacgaaccacctggggaactcgccgacatcagtgatgtagaaggagaggtcggagccataggggaagaggcaccgcaaatgaattatatccaggtgaccccgcaggaaaaggaggctattgagagactgaaggctctgggatttcctgagtccctcgtgatccaggcttactttgcatgtgaaaagaacgaaaacctggccgctaattttctgctgtcccagaattttgacgacgagtag

SEQ ID NO: 30446 - DNA, 597 bp, synthetic construct
  misc_feature 1..597: note = Description of Artificial Sequence: Synthetic coding sequence
  source 1..597: mol_type = other DNA
atgttgacagagattatgtccatgggttatgagcgcgaacgcgtcgtggcggcactgcgcgcttcctacaacaatccccatcgggctgtggaatatcttctaacaggaatccctggttcacctgaacctgagcatggcagcgtccaggagagccaagttagcgagcagcctgccacagaggccgcaggcgagaatccgctcgaatttctccgcgaccagcctcagtttcagaatatgcgtcaggttatccagcagaacccggcattgctgcccgctctgctgcaacagctggggcaggaaaatccacagctcctgcagcagatttctagacaccaggaacaatttattcaaatgctgaacgagcctcccggagaacttgccgatattagcgacgtggagggggaagtcggcgctattggtgaagaggccccacagatgaactacattcaggtgactccacaggaaaaagaagccatcgagaggctgaaggcacttggttttcctgaatccctcgtaatacaggcctattttgcttgcgagaaaaacgagaacttggccgcaaatttcttgctctctcaaaattttgatgacgagtag

SEQ ID NO: 30447 - DNA, 1092 bp, synthetic construct
  misc_feature 1..1092: note = Description of Artificial Sequence: Synthetic coding sequence
  source 1..1092: mol_type = other DNA
atggcagtcactataacgctgaaaacactgcaacagcagacattcaagatcaggatggaacctgatgagaccgtgaaggtgttgaaggaaaaaatcgaagcagaaaaaggaagagacgcgtttcccgtggccggtcaaaagctcatttacgccggtaaaatcctgagcgatgacgtgccaatacgcgactatcgtattgatgagaagaattttgtggtcgtgatggtcacaaagactaaagctggtcaggggacctccgcccctccagaggcgtcacctacggcagcccctgagagctccacttcctttccacccgctcccactagcgggatgtctcacccgccacccgcagccagggaagataagtctccctccgaagagagtgcccctaccacaagtcctgaaagcgtaagcggtagtgtgccaagcagtggaagcagtgggagagaagaagatgccgctagtacactcgtgactggctcagagtacgaaaccatgttgactgaaatcatgtctatgggatacgagagggaaagagtggtggcggcactgcgcgctagctacaataatccccatagggccgtagaatacctgcttaccgggatccccggaagccccgaacctgaacacggatccgttcaagagtcacaggtctcggaacaaccagccaccgaagcagctggagaaaaccccttggagtttcttagagaccaaccacagtttcagaatatgagacaggtaatccagcagaatcccgcacttctgccagccctcctgcagcaactcggtcaggagaatccgcaactgctgcagcagatctcccgtcatcaggagcagttcattcaaatgctgaatgaacctccgggtgagttagccgacatctcagatgtggaaggcgaggttggggctatcggggaggaagctccacagatgaattacatccaggtgacaccgcaagagaaggaagctatcgagaggctgaaggcgcttggttttcctgaatcattggtcatccaggcgtattttgcttgtgagaagaatgagaatctcgcggctaactttttactgagtcagaactttgatgacgaatag

SEQ ID NO: 30448 - DNA, 927 bp, synthetic construct
  misc_feature 1..927: note = Description of Artificial Sequence: Synthetic coding sequence
  source 1..927: mol_type = other DNA
atggctgtgacaattaccctgaaaactctccagcagcaaacatttaaaataaggatggaaccagatgagacggtgaaggtgctcaaagagaagattgaggcagagaaaggaagagatgcctttcctgtagctggacagaagcttatatatgcaggaaagattctcagtgatgatgtcccaattcgcgattaccggatagatgaaaaaaactttgtggtcgtgatggtgactaagacgaaggcgggacagggaacgtccgctccaccagaggcatcccctacagctgcacctgagtcctctaccagctttccccctgccccaacgtcaggaatgagccaccctccgccagccgcacgggaggataaatctccaagcgaggaaagcgctcccacgacatcgcccgaaagtgtgtcaggatctgttccatcatccggctcatcaggccgagaagaagacgcagcttctacactggttacaggatcagaatacgagactatgctgacagagatcatgtccatgggctatgagcgtgaaagagtcgtggctgcactgagggcttcttataataaccctcaccgcgctgtggagtacctgctcacggggatccctggttccccggagcctgagcatgggtccgtccaggaaagtcaggtgtcagagcaacccgctacagaggcggctggtgagaacccgcttgagtttttgcgagatcagccccagttccagaacatgcgacaggtaatacagcagaatcccgcacttcttccggcattactacaacagttaggccaggaaaaccctcagttactgcagctaaaggccctcggattccccgaaagcctcgttatccaagcttacttcgcctgtgaaaagaacgaaaatttagctgccaattttctgcttagtcagaactttgacgatgagtag

SEQ ID NO: 30449 - DNA, 1230 bp, synthetic construct
  misc_feature 1..1230: note = Description of Artificial Sequence: Synthetic coding sequence
  source 1..1230: mol_type = other DNA
atgcaagtgactttgaagaccctacagcagcagacattcaagatcgatatcgaccctgaggagaccgttaaagctctcaaggagaaaattgagtctgaaaaaggcaaagacgcattcccagtagctggacaaaaactgatatacgccggaaaaattctgaacgatgacacagccctgaaagagtacaagatcgacgagaagaactttgttgtggttatggttacaaagcccaaggctgtgtctaccccagcacctgccaccacccagcagtctgcgcctgcctccaccacagcagtgacgtcgtctaccacaaccacagtggcccaggctcctacgccagtgcccgctctggccccaacaagcacccccgcttcgatcacacctgcatccgcaaccgcatccagtgaaccggcacctgcctcggctgccaaacaggagaaaccggctgagaagcccgctgagacacccgtcgcgacaagtccaacagccaccgactcaacgagcggagactcatccagatccaacctgtttgaagacgccacttctgctctcgttaccggccagagttatgaaaatatggttacagagattatgtctatgggttatgagagagaacaagttatagcagcactgagggctagttttaacaaccccgacagggctgtggagtatctgctgatgggcattcccggtgatcgggagtcacaggcagtggtggatcctcctcaagctgcatctacaggcgctccccagtcttcagccgtcgcagccgcagccgcaacgaccactgccacaacgacaaccacaagttcaggaggacaccctctcgagtttctgcgcaatcagccacaattccagcagatgcgtcagataatccagcagaatccaagtctccttcctgcattactgcaacagattggcagagaaaacccacagctgttgcagcagatcagccagcatcaagagcactttattcagatgttgaacgaaccagtgcaagaggcaggcggacagggagggggaggcggtggcggatcgggcggaattgccgaagcagggagcggtcatatgaattatatccaggttacaccccaggaaaaagaggcaatcgaaaggctaaaagcgttgggttttcccgagggactcgtaattcaggcctacttcgcgtgcgaaaaaaacgaaaacctcgcggcaaattttctattgcagcagaatttcgatgaggactag

SEQ ID NO: 30450 - DNA, 519 bp, synthetic construct
  misc_feature 1..519: note = Description of Artificial Sequence: Synthetic coding sequence
  source 1..519: mol_type = other DNA
atggttactaaacccaaggccgtcagcactcctgcccctgcaacgacacagcagagcgccccagcttcaactacggctgtcaccagttcgacaactactacggtagcacaggccccaacaccggtcccagctctggctcccacctccacacctgcaagtatcacccctgctagcgccacagcgagctctgaacctgctcctgcttcagccgcaaaacaagagaagccggcagagaagccagccgagactcccgtagctacctccccaacagcaactgatagtaccagtggagactccagtcgctcaaacctgtttgaagatgccacatcggccctcgttactggacagtcatatgaaaacatggtgacggaaattatgagtatgggctacgagagagaacaggtgattgcagcgcttagagcatcatttaacaaccctgatcgggctgtggagtacctgcttatgatcatcgttaagaccggtaacaaaaagaaaaagcagccgctattagggaagtag

SEQ ID NO: 30451 - DNA, 1014 bp, synthetic construct
  misc_feature 1..1014: note = Description of Artificial Sequence: Synthetic coding sequence
  source 1..1014: mol_type = other DNA
atggtcacaaagccaaaggctgtgtcaactcctgcaccagctaccacgcagcagtctgccccagccagcactaccgccgtgactagcagtacaacgacaaccgtcgcccaggcacccacccccgtccccgcactggctccgacctcaactcctgcttctatcactcctgcatcggccacagcatcatctgagcctgcacccgcttctgccgctaagcaggagaaacccgctgagaaacccgctgagactcccgttgctacatcgccaactgctactgacagtacatccggagactcatcgcggtcaaacctctttgaggacgccacttctgcgttagtaacaggccagtcatatgagaatatggttacggaaatcatgtcaatgggctatgagcgggagcaagtgattgctgctctgcgggcatccttcaacaaccctgatagagcggttgagtaccttctaatgggcatcccaggggaccgggaatctcaggctgttgtagacccacctcaggccgcttccactggagctcctcagtctagtgcagtcgcagctgctgctgccaccaccaccgccaccaccaccacaacgagctccggtggccatcctctagagttccttcggaatcagcctcagtttcagcagatgcggcagatcatccagcagaatccctccctactgcccgcattgctgcaacaaatcggcagagagaacccgcaactgctgcagcaaatatcccagcaccaagagcattttatccagatgctcaatgagccagtgcaggaggcaggcggtcaaggcggaggtgggggtgggggatctggcggtatcgccgaggccggttctggacacatgaactatattcaggtcactccccaggagaaagaggctatcgagcgcctgaaggctctgggtttccctgagggactcgttatccaggcatacttcgcgtgtgagaagaatgaaaacctggctgccaatttcttactgcagcaaaattttgacgaggactag

SEQ ID NO: 30452 - DNA, 441 bp, synthetic construct
  misc_feature 1..441: note = Description of Artificial Sequence: Synthetic coding sequence
  source 1..441: mol_type = other DNA
atgcaagtgaccctgaaaacactccaacagcagaccttcaagatagacattgacccagaagaaaccgtaaaagccttgaaggaaaaaatcgaatcagaaaaaggtaaggacgcgtttcctgtcgctggccagaaattgatctacgctggaaaaattttaaacgatgatactgctctgaaagagtacaagattgatgagaaaaatttcgtagtggtgatggtgacaaaacccaaggccgtgtcaacgcccgcacctgcgaccacacagcaaagtgctcctgccagcacgactgccgtgacttcttctactacaacaacggttgcgcaggctcctactcccgtgccagcgcttgcacccacaagcacgcccgctagcattactccggcaagcgcgaccgcatcctccgagcccgctcctgctagcgccgctaagcaggaatag

SEQ ID NO: 30453 - DNA, 243 bp, synthetic construct
  misc_feature 1..243: note = Description of Artificial Sequence: Synthetic coding sequence
  source 1..243: mol_type = other DNA
atggtgaaggccctcaaagagaagatcgagtcagagaagggtaaagacgcttttccagtggctgggcagaagcttatctatgccggaaagattctcaatgatgataccgctctgaaagagtataagattgatgaaaaaaacttcgtggtcgtaatggttacaaagcccaaagccgtgagtaccccagctccagccactacacaacagtccgcccctgcaagtaccaccgctgtcacgagttag

SEQ ID NO: 30454 - DNA, 345 bp, synthetic construct
  misc_feature 1..345: note = Description of Artificial Sequence: Synthetic coding sequence
  source 1..345: mol_type = other DNA
taaactgcgtctagtgagccagccccagcttccgcggcaaaacaggagaaacctgccgagaagcctgccgaaactccggtggcaactagcccgactgccaccgatagcacctccggagactcttctcggtcgaatctctttgaagatgccacaagtgcgctggttacaggacaaagttatgaaaacatggtgacagagattatgagcatgggctatgagagagagcaggttattgccgcactgcgggcaagtttcaacaatcctgatagagcagtggagtacttacttatgatcatcgttaaaactggcaacaaaaaaaaaaagcagccccttctggggaaatag

SEQ ID NO: 30455 - DNA, 3939 bp, synthetic construct
  misc_feature 1..3939: note = Description of Artificial Sequence: Synthetic coding sequence
  source 1..3939: mol_type = other DNA
atgagcagaatagaaaaaatgtcaatcctgggagttagatctttcggaattgaggataaagacaaacagattatcacattttttagccctttgactatacttgtggggccaaatggggcaggaaagacaaccattatcgagtgtttgaagtatatctgtacaggggactttccaccgggaacgaagggaaatacctttgtgcatgaccctaaggtagcccaggagactgatgttcgagcgcaaattaggctgcagttcagagacgtcaacggagaactgattgctgtacagcgatccatggtgtgcacgcagaaaagcaagaagactgagttcaagacactggagggcgtaatcacacgaaccaaacatggggagaaggtgtccctgtcatccaaatgtgcagaaattgaccgtgaaatgatatcctcccttggagtttctaaagctgtgctcaacaacgtgatcttctgccatcaagaagactccaactggcccttgtctgaaggaaaagcccttaagcagaaattcgacgaaattttctcggccacgagatatatcaaggccttggaaaccctgcgccaggttcgccaaacccagggacagaaagtgaaggagtaccagatggaattaaagtatctgaagcaatacaaagagaaggcctgcgaaatcagggaccaaattactagtaaggaagctcaactgacatcctcaaaggaaatagtgaaaagctacgaaaatgaactggacccgttgaagaatcggctgaaggaaattgagcataatctgtcaaagattatgaaactggataacgagatcaaggctctagactcgagaaaaaagcagatggagaaagacaacagtgagctggaagaaaagatggaaaaagtcttccagggcactgatgagcagctcaacgacctctaccacaaccaccagaggactgttagagaaaaagaacggaaactggtcgattgtcatcgcgaactcgagaaactcaataaggagagccgactgcttaaccaggagaagtctgaactgctggtggaacagggacgattacaactgcaagccgacagacatcaagaacatatcagagccagggattctctcattcagagccttgccacgcaacttgaactggacgggttcgagcgaggaccattttccgagcggcagataaagaacttccataaattggtcagagaacggcaggagggggaagccaagaccgccaatcagttaatgaatgattttgccgaaaaggagaccttgaaacagaagcagattgatgaaatcagggacaaaaagactgggttgggccgaattattgagctcaagtcagagattctgtccaagaagcagaacgaactcaagaacgtgaaatatgagctgcagcagcttgagggtagcagcgaccggatactcgaactggaccaagaattgattaaagctgagcgggagctgagcaaagcagaaaagaatagtaacgtggaaaccttgaagatggaggtgatctccctgcagaacgaaaaggctgacttggataggactctgcgaaaactggaccaagagatggaacagctgaatcaccatacaaccactcgtacccagatggaaatgctgacgaaggataaggcagacaaagatgaacagatccggaaaattaagagccgccacagtgatgagcttacttctctgctgggctattttccgaataagaaacagctcgaagattggctgcactctaaatccaaagagataaaccagacacgcgacagactggctaagctcaataaggagctggcttcatccgaacagaataagaatcatatcaacaatgagctgaagcgtaaggaagaacagttatctagctacgaagataaactgttcgatgtctgtggttcacaggacttcgaatctgacttggatcgcctgaaggaagagatcgagaagtcctctaagcagcgcgcaatgctggccggagcaactgctgtttattctcagtttattacccaattgactgacgagaatcagtcatgttgtcccgtttgccagagggtttttcaaacagaggccgaacttcaagaggtgataagcgatttacaatccaagctgaggctggcacctgataagctgaaatctactgaatccgaactgaaaaagaaggaaaaaaggcgggacgagatgttaggcctcgtgcccatgcgccaatctattatcgacctcaaggagaaagagatacccgagctcagaaacaaactgcaaaacgtgaatagggacattcagcggttgaagaacgatattgaggagcaggaaacgctgctggggaccatcatgcctgaagaagagtcagcaaaagtgtgcctaaccgatgttaccataatggagaggtttcagatggaactgaaggatgttgagcggaagattgcccagcaagcagccaaactccagggaatcgacctggaccggacagtccagcaagtcaaccaggagaaacaggaaaagcagcacaaattggacacagtgtccagcaagattgagctgaatagaaaactgatccaagatcagcaggagcagatccagcatctgaagagcacaaccaacgagcttaagagtgagaagcttcagatctcaactaatttacaaagaagacagcagcttgaagaacaaactgtagagctgtccaccgaggtgcagagcctgtacagagagataaaggacgcaaaggagcaggtctctccccttgaaaccacgctggagaaattccaacaggagaaggaagaacttatcaacaagaagaatacctcaaacaagatcgctcaagacaaactgaacgacataaaggaaaaagtcaagaatattcatggatacatgaaggacatcgaaaactacattcaggacgggaaggacgactataaaaagcagaaggagacagaactaaacaaggtcatcgctcaactctccgaatgtgagaaacacaaggaaaaaatcaatgaagacatgcgcttaatgcgtcaggacattgacacacaaaagattcaggagcgctggcttcaagacaacctgacattgaggaagagaaacgaggagctgaaggaggtggaggaggaacggaagcaacacctgaaagagatgggacagatgcaggtcctgcagatgaagagtgagcaccaaaaacttgaggagaatatagataacatcaagagaaaccacaacctcgcacttggacgacagaagggctatgaggaagaaatcatacatttcaagaaggagctgcgcgaaccccagttccgggatgccgaggaaaagtatagagagatgatgatcgtcatgcgcaccactgaactggtgaacaaggacctcgatatttattataaaacacttgatcaagctataatgaaattccattcaatgaaaatggaggagataaacaagattatccgtgatttatggagatccacttaccggggacaggatatagaatacattgaaatccgaagtgatgcggacgagaatgttagcgcgagcgacaagaggaggaattacaactatcgcgtggttatgcttaaaggcgatacagccttggatatgagagggcgttgtagcgcagggcagaaagtccttgcttctcttataataagactggccttagctgaaactttttgcctaaattgcggcataattgccttagatgagcctacaacaaatttagatcgtgaaaacattgaaagccttgcccacgccctagttgagatcatcaagtcacggtctcaacagaggaattttcagttgctggtgattacacacgacgaagacttcgtggagcttctcgggcgttcagagtacgtggagaaattttaccgaatcaaaaaaaatatcgaccagtgctctgaaatcgtaaagtgttcagtttcttcactcgggtttaatgtgcactag

SEQ ID NO: 30456 - DNA, 3522 bp, synthetic construct
  misc_feature 1..3522: note = Description of Artificial Sequence: Synthetic coding sequence
  source 1..3522: mol_type = other DNA
atgatctcaagcctcggagtctccaaggcggtccttaataacgttatcttctgtcaccaggaagactctaattggccattgtccgagggcaaggccttgaaacagaagttcgatgagattttctcggccaccaggtatatcaaagccttagaaacattaaggcaggtgcggcagacacaggggcagaaggtgaaggaataccagatggaacttaagtatcttaaacagtacaaggaaaaagcctgtgaaataagagaccagattactagtaaggaggcccaattgacctctagtaaggaaatcgttaaatcatacgaaaatgagctggatccactgaaaaatcggttaaaggagattgaacacaacctaagcaagatcatgaagctggataatgagattaaagcgcttgactcacgcaaaaagcagatggaaaaggataatagtgagttggaagagaagatggagaaagtgtttcaggggaccgacgaacagctgaatgatctgtatcataaccatcaacgtacggtgcgggagaaagaacgaaaattggtagactgccatagggagctggaaaaattaaataaagaaagtcgtttactcaaccaggaaaagtctgaactcttggttgaacagggaaggctccagttgcaagccgaccggcatcaggaacatattcgcgcaagagacagtctgatccagagcctggctacacaactcgaactggatggattcgaaagagggccattctctgagaggcagatcaagaactttcacaaattggtgcgcgagagacaagagggtgaggccaagacagcaaatcagcttatgaacgacttcgctgagaaggaaaccctcaaacagaaacagatcgacgagattagggacaagaagaccggattggggagaattatcgagttaaaaagcgagatactcagtaagaagcagaatgaactgaagaacgtcaaatatgaactccagcagctcgaaggcagtagcgacaggatattggaactggatcaggaactcattaaagccgagagggagctttccaaggctgaaaaaaattccaacgtggagaccctcaagatggaagtgatctccctgcagaatgaaaaggccgatttggatagaacattgagaaaactggaccaggagatggagcagttgaaccatcacaccacaacccgtacacagatggagatgctaaccaaggacaaagcggataaagatgagcagataaggaagataaaatcgcgtcattctgatgagttgacctctttactaggctacttccccaacaaaaagcagcttgaagactggctacattccaaatccaaggagattaaccagactcgagacagattagccaaattgaataaggaactcgcctccagtgaacaaaacaaaaaccacattaacaatgagctcaaaagaaaggaggaacaactaagtagctacgaggataaattatttgatgtctgcgggtcccaggacttcgagagcgatctggacagactgaaggaagagatagagaagtcttccaagcagcgcgcaatgctcgccggagccacagctgtatacagccagttcatcacgcagctcactgacgagaaccaatcttgctgtcctgtgtgtcagagggtgtttcagacggaggctgaattacaggaggttatttccgatctccagtccaagttacggctggcaccggacaaattaaaaagtacagagtctgaactcaagaagaaagaaaaacgtcgggatgagatgcttggtcttgtgcccatgaggcagagcattatcgatctgaaagaaaaagagatccccgagttgcgaaacaagctgcagaacgtcaatagagacatccagcgactcaagaatgatatcgaggaacaggagacgctcctgggcacaatcatgcccgaggaagaaagcgccaaggtatgcctcacagacgtaaccattatggagcgatttcagatggaattgaaggacgtggaacgcaaaatcgcccaacaagctgctaagctccagggaatcgatttagatagaactgttcagcaggtgaaccaggaaaagcaggaaaagcagcacaagctggacacggtgtcttcaaagattgagcttaacagaaagctgatccaggatcagcaggagcaaatccagcacctgaagtctaccaccaacgaactgaagtccgagaagctgcagatcagtaccaatctccagaggcgccaacagctggaggaacaaactgtggaactgtccacagaggtccaatcattgtacagagagattaaggacgccaaggaacaggtaagtcccctggagaccaccctggaaaaattccagcaggagaaagaggagctgattaataagaagaacacgtctaataaaattgcacaggataagttgaatgatataaaggagaaggttaagaacatccatgggtacatgaaggacattgaaaactatattcaggacggtaaggacgattacaaaaagcaaaaggagactgagctgaataaggtgatcgcccagctgagcgagtgcgaaaaacataaagagaagattaacgaagacatgagactcatgcgacaggatattgatacgcagaagatccaggaacggtggctgcaggacaacctcacactgcgcaagaggaacgaagaacttaaagaggtagaagaagagcggaaacagcaccttaaagagatgggccaaatgcaagtcctccagatgaagtctgagcatcagaagctagaggagaacattgataacattaagcggaatcacaaccttgctctggggagacagaagggatacgaagaagagatcatccatttcaagaaggagttgcgggagccacagttcagggatgctgaggagaagtacagagagatgatgatcgtcatgagaacgacagaactggtgaataaagatctcgacatctactataagacgttagatcaggccattatgaaatttcactccatgaaaatggaggagatcaacaagatcatccgcgatctctggagatcaacctacaggggacaggatattgagtatatcgaaatccgttccgacgctgatgagaacgttagcgcctcagacaagcgcagaaactataattatagggttgtcatgctaaaaggtgatacggcactggacatgaggggccgatgttcggcaggacagaaagttctggcctctctcattattcgcctcgccctggctgaaaccttctgcctgaattgtggtatcattgcattagacgaacccacaaccaatctggaccgtgagaacatcgagtccctcgcccatgctctggtggagatcataaagtcgcgtagccagcagcggaactttcagctgctggttattactcacgacgaagacttcgtagagcttctggggcgatccgagtatgtggagaagttctatcgcatcaaaaagaatatagaccagtgctccgagatcgtcaaatgttctgtctcctcacttgggttcaatgtgcactag

SEQ ID NO: 30457 - DNA, 1020 bp, synthetic construct
  misc_feature 1..1020: note = Description of Artificial Sequence: Synthetic coding sequence
  source 1..1020: mol_type = other DNA
atggccatgcagatgcagcttgaggcaaatgccgatacctcagtggaggaggaaagcttcggccctcagccaatctctcgcctggaacagtgtggtatcaacgctaacgatgtgaagaagctagaggaggcgggatttcacactgtggaagctgtggcctacgctcctaagaaagaattaatcaacatcaaagggatcagcgaggccaaggccgacaaaattctggcagaagcagctaagttagttccaatgggatttacaacggcaactgagttccaccagagacgcagtgagataatccagataaccacaggctctaaagaactggataaactgctccagggaggaatcgaaactggcagcattacggagatgtttggtgaatttagaaccgggaagacccagatctgccacactctcgcggtgacttgccagttacccattgaccgtggcggaggggagggtaaggctatgtacattgacacagaagggacattccggccagagcgtctgttagctgtggccgaacggtacggcttgtccggttctgacgtgctcgacaatgtagcgtacgcacgtgcctttaataccgaccatcagacccaactgctgtatcaagctagtgccatgatggttgagtctagatacgccttgctcatagtcgattcagctactgcactgtatcggaccgactacagcggaagaggggagctgtcggccaggcagatgcacctggccaggtttttgcgaatgttgttacggttagccgacgaattcggagtggcagttgtgataacgaatcaggtggttgcccaagttgatggggctgcaatgttcgctgccgatcctaagaaacccatcggaggaaacattattgcccacgcctcgactacgaggctctatcttagaaagggcagaggcgagacccgcatttgcaaaatatatgactcaccctgtctccccgaagcagaggccatgtttgcaataaacgccgacggggttggagatgctaaggactag

SEQ ID NO: 30458 - DNA, 729 bp, synthetic construct
  misc_feature 1..729: note = Description of Artificial Sequence: Synthetic coding sequence
  source 1..729: mol_type = other DNA
atggccatgcagatgcagctggaggcgaatgcagatacctccgtcgaagaggagtcttttggaccgcaaccaatctcgcggttggaacaatgtggcatcaacgcaaacgacgtgaaaaaactcgaggaggccggtttccacactgtggaggcagttgcatacgcccctaagaaggaactcattaacataaagggaatcagcgaagccaaagccgacaaaatcttgttactgagccataggtatggactttccggctcagatgttttggacaacgtggcatatgcgagagcgtttaataccgaccaccagacacagttgctttatcaggccagcgccatgatggtagagtcccggtatgccctcctgatcgtggacagcgccaccgctctgtacagaacggactatagcggacgcggtgagcttagcgcgcgtcagatgcacctcgcacgattcctccgtatgctgctccggttagccgacgagttcggcgtagccgttgtaatcacgaaccaagtagttgcccaggtcgatggggctgcaatgtttgccgctgatcctaagaaacccattggaggcaacatcatcgcacacgcctctacaacgaggctgtatctgcgcaagggccgaggtgagactcggatttgcaagatctacgattctccctgtttacctgaggccgaggccatgttcgccatcaatgcagacggcgtcggggacgccaaggattag

SEQ ID NO: 30459 - DNA, 1023 bp, synthetic construct
  misc_feature 1..1023: note = Description of Artificial Sequence: Synthetic coding sequence
  source 1..1023: mol_type = other DNA
atggcaatgcagatgcagctggaagccaatgccgacacctctgtggaggaagaatctttcggccctcagcctatctctaggcttgaacaatgcgggatcaacgcaaacgacgtgaagaaactcgaggaagcagggttccataccgtggaggccgtcgcatacgcaccgaaaaaggaattgatcaacataaaaggtatcagcgaggcaaaggccgacaagatcctaacggaatcacggtccgttgcacgattggaatgcaacagcgtgatcctggtctactgcacactgcggctcagcggcagtagtgactcgcccgctagtgccagcagggtggttggaactactggaggcatcgagactgggtctatcactgagatgttcggagagttccgaactggcaagacacagatttgccacacacttgcagtgacatgccagttgcccatagatcggggtgggggagaaggcaaagccatgtacattgacacggagggaactttccgccctgagcgactcctcgctgtagcagagcgatacgggctcagtggctccgacgtcctggataacgttgcctatgcccgagccttcaataccgatcaccagacgcagctcttgtaccaggcctcagctatgatggtcgagtcgcggtatgcacttctcattgtggattctgcaacagcactttatcggaccgattactctggtcggggtgagctatccgccaggcaaatgcacctggcgaggtttttacgcatgctgctgaggctcgcggatgaatttggtgtagccgtggtgatcaccaaccaagtcgtggcgcaggtcgatggggctgcaatgttcgccgcagaccctaagaagccaatcggcggaaacattatagcacatgctagcactacgagattgtaccttcgcaagggcagaggcgaaactcgcatctgcaaaatttacgatagtccttgtttgcctgaggccgaggctatgttcgcgatcaacgctgacggagttggcgatgccaaggattag

SEQ ID NO: 30460 - DNA, 843 bp, synthetic construct
  misc_feature 1..843: note = Description of Artificial Sequence: Synthetic coding sequence
  source 1..843: mol_type = other DNA
atggccatgcagatgcagctggaggcaaatgctgatacctctgtggaagaggagtcttttggacctcagccaatctcacgtctggagcagtgcgggataaacgccaacgatgtaaagaagctcgaggaggcagggtttcatacagttgaggcggtcgcatacgctcctaaaaaggaactgataaacattaaaggaatttcagaggcaaaggccgacaaaattctggctgaggcagctaagcttgtccctatggggttcacgaccgcaacagagttccaccagcgccgatctgaaatcattcagattactactggttccaaagaactggataagctcttgcagggtggtattgagaccggcagcattacagagatgttcggcgagtttcgtactgggaaaacccagatctgtcacaccctggcggtgacttgtcagttacctattgaccggggtgggggagaggggaaggcaatgtacatcgatacagaaggtacctttagacccgagcgcttattagctgttgccgagagatacggactttccggaagcgacgtcctggataatgtggcctatgctcgagcttttaatacagaccaccaaacgcaattactctaccaggcctcagcaatgatggtggagtcgagatacgcactattgatcgtcgacagcgcaaccgcactgtataggaccgactacagcggacgcggagagctgagcgcacgacagatgcatttagctcgatttctgaggatgctgctgaggctcgctgacgaaatcgtgagtgaagaaaggaaaagaggcaaccagaacctgcaaaatctccgcctgtcgctgtcctcgtag

SEQ ID NO: 30461 - DNA, 456 bp, synthetic construct
  misc_feature 1..456: note = Description of Artificial Sequence: Synthetic coding sequence
  source 1..456: mol_type = other DNA
atggcgatgcaaatgcagctggaagccaacgctgatacgagtgtggaagaagagtccttcggacctcagccgatcagtcgcctcgaacaatgtgggatcaacgccaacgatgttaagaaattggaagaagctggtttccatactgttgaggccgtggcctatgcaccaaaaaaagagctaataaacattaaagggatttctgaggccaaggctgataaaatcctcgccgaagccgcaaagctggtgccaatgggcttcacaaccgctactgagttccaccaacggcgttcagaaatcatccagatcactaccggcagcaaagagctggataagcttctacagggcggaattgaaaccggttccattaccgagatgttcggtgaattccgcaccggaaagacccagatctgccacactctggcggttacctgtcaggtgtggagcctgtggcagtag

SEQ ID NO: 30462 - DNA, 228 bp, synthetic construct
  misc_feature 1..228: note = Description of Artificial Sequence: Synthetic coding sequence
  source 1..228: mol_type = other DNA
atggccatgcaaatgcagttagaggctaatgctgacacctcggtggaggaggaatcctttgggccacaaccaataagtcggctggagcagtgtgggatcaatgcaaatgacgttaagaaattggaggaggccggtttccatacagtggaggctgtggcatacgcccctaagaaagaattgattaatatcaagggtatcagcgaggccaaagctgacaaaattctgtag

SEQ ID NO: 30463 - DNA, 519 bp, synthetic construct
  misc_feature 1..519: note = Description of Artificial Sequence: Synthetic coding sequence
  source 1..519: mol_type = other DNA
atggcgatgcagatgcagctagaggccaacgccgatacttctgtcgaggaggaatccttcggacctcagcccattagtcgactggagcaatgtggaatcaatgccaatgatgtgaaaaaactggaggaggcaggatttcatactgtcgaggcggtggcctacgcacctaagaaggaactgatcaatatcaaaggtatttccgaggccaaagccgacaaaattcttgctgaggccgctaagttggttcctatgggatttactacagccacggagtttcatcagcggagatccgagattatccagatcaccaccggatccaaagagctcgataaactgctccagggaggaatcgaaacaggatcaatcactgagatgttcggcgaatttaggacgggaaaaacccagatttgccacactctcgcagttacctgccagctgccaatcgacaggggtgggggagagggcaaggccatgtacatcgacactgaaggtacatttagacctgaacggctgttgtag

SEQ ID NO: 30464 - DNA, 303 bp, synthetic construct
  misc_feature 1..303: note = Description of Artificial Sequence: Synthetic coding sequence
  source 1..303: mol_type = other DNA
atggccatgcaaatgcaactcgaggccaatgccgacacctcggtggaggaggagtcattcggccctcagcccattagtcgcctggagcagtgcggtatcaacgcgaacgacgtgaagaagctcgaagaagccggatttcacaccgtggaggcggtggcgtacgctcccaagaaagaactcatcaatataaagggaatcagtgaagccaaggcagataaaattctggtcgagttgaggttggacctgtcacagaaatgcctggagaatagcgaattgggacggcctcgttctgtcatccgctag

SEQ ID NO: 30465 - DNA, 1023 bp, synthetic construct
  misc_feature 1..1023: note = Description of Artificial Sequence: Synthetic coding sequence
  source 1..1023: mol_type = other DNA
atggccatgcagatgcagctggaggccaacgcagacacctcagttgaagaggagagcttcggcccacagccaatctcccgactggagcagtgtggaattaacgccaatgacgtcaaaaagctcgaggaggccggtttccatactgtggaagcagtcgcatacgccccaaagaaagagttgatcaatattaaggggatctccgaagcgaaagccgacaaaatactcaccgaatcgagaagtgtcgctagactggagtgcaactccgttatcctggtctattgcactctacgtctaagcggcagctcagactctccggcaagcgcatcccgcgtggtaggtacgacaggcggaatcgaaaccggctcgattactgagatgtttggtgagtttaggaccggcaagactcagatctgccacaccctcgctgtcacatgtcaactgccaatcgatcgaggcggtggcgaaggcaaggcaatgtacatcgatacggagggaacatttcggcctgagcgcctcttagctgtggcagaaaggtacggtctttcaggctctgatgtgctggacaacgtggcttatgcacgcgcttttaacactgatcaccaaacacagttattgtatcaggcaagcgcaatgatggtagaatcacgctatgcccttttgattgtggactccgctaccgccctgtaccgcactgattattccggcaggggcgaactctcagcgaggcagatgcatctcgcacgcttcctgagaatgctgctgcgcctggctgacgaatttggtgtggccgtcgtgataacaaaccaggtggttgcccaggtcgacggcgcagctatgttcgctgcggaccccaagaagcccatcggaggcaatatcattgcgcacgcctccacgacccgactctacctgagaaaaggaagaggtgagacgcggatctgcaagatctacgattctccctgcctgccggaggccgaggctatgttcgctattaatgctgatggagtgggcgacgccaaggactag

SEQ ID NO: 30466 - DNA, 729 bp, synthetic construct
  misc_feature 1..729: note = Description of Artificial Sequence: Synthetic coding sequence
  source 1..729: mol_type = other DNA
atggccatgcagatgcaattagaagccaatgcagatacctcagtagaagaagagtccttcggcccacagcccatcagccgcctggaacagtgtgggattaacgccaacgatgtgaagaaactcgaggaagcagggttccacaccgtcgaagctgtcgcttacgcccctaagaaagaactcattaacatcaaaggaatttccgaagctaaagctgacaaaatcttggcagttgccgaaagatatggtctctccgggagcgacgtcttggacaatgtggcttacgccagagcatttaacaccgatcatcagacccaacttctgtaccaagcctccgctatgatggttgagtccagatatgccctgctcatcgtggattctgccacagcactgtatagaactgactactcaggaaggggtgaactttctgctcgccagatgcacctcgcaaggtttctgcggatgttactcagactcgctgatgagttcggcgtcgccgtagtgattactaatcaagttgtcgctcaggttgacggcgcagccatgtttgcagctgaccctaagaaacccataggagggaatatcatcgctcatgcctccaccactcggctttatttaaggaagggtcgaggggaaacccgcatatgtaaaatctacgattccccctgcctccctgaagctgaggcaatgttcgcaattaatgctgacggcgtgggcgacgccaaagactag

SEQ ID NO: 30467 - DNA, 1053 bp, synthetic construct
  misc_feature 1..1053: note = Description of Artificial Sequence: Synthetic coding sequence
  source 1..1053: mol_type = other DNA
atggggagcaagaaactgaagcgggtgggtctgagccaagaactgtgtgatagactgagccgacaccagattcttacgtgtcaggactttctttgcctgtccccgctcgaacttatgaaggtgaccggtctttcttaccgcggagtgcatgagttgctttgcatggtgagcagggcctgcgctccgaaaatgcagactgcttacggaatcaaggcccagcgaagtgccgatttctcaccggctttcctgtcgacaaccctgtctgccctcgatgaggcacttcatgggggtgttgcatgtggtagcctgactgaaattaccggaccccctggctgtggaaagacgcagttttgcatcatgatgagtatcctagccactttacctaccaatatggggggactcgagggagctgtcgtttatatcgatacggaatcggccttctctgccgaacgactagtggaaatagctgagtcaaggttccctcggtactttaacactgaggagaagctgcttctgacttcttcaaaggtccacctgtacagagaacttacttgtgatgaggtgttgcagaggatcgagtccctcgaggaagaaatcatcagcaaaggaataaagctcgtaatcctggattccgtggcttcagttgtgcgaaaggaattcgacgcacagctgcagggtaacttaaaggaacggaacaagttcttagcgagggaagctagttcgctgaagtaccttgccgaggagttcagtattccagtgatcctcactaaccaaattacaacacacttgagcggggctttggcctcacaagccgatctggtatcccctgccgatgatctgtctctgtctgagggtacaagcggctctagctgtgtgattgctgcgctggggaacacatggtcacattctgtgaacacaaggcttattctacagtatctggattcagaacgaagacagattctgattgcaaagagtccgctggccccttttacctctttcgtttatacaattaaggaagagggactggtgctgcaggcatacgcacagtgctag

SEQ ID NO: 30468 - DNA, 1101 bp, synthetic construct
  misc_feature 1..1101: note = Description of Artificial Sequence: Synthetic coding sequence
  source 1..1101: mol_type = other DNA
atgggctcaaagaagcttaaacgggttggcctgtctcaggaactctgtgatcgtctcagtagacaccagatcctaacctgtcaagacttcctctgcctaagtccgctggaacttatgaaggtgactggcctgtcttacagaggagtgcacgagctgctgtgcatggtctcccgagcctgtgccccaaagatgcagacagcatatgggattaaagcacaaagatccgctgacttttcacccgcattcctgtccacaaccttgtccgccctggacgaggctctgcacggcggtgtggcatgcgggtcactgactgagattaccggtccccctggctgcggcaaaacccagttttgcattatgatgtccattctggccaccttgccgactaatatgggaggactggaaggcgcagtcgtatacatagatactgaatccgctttttccgctgagcggctggtcgagattgcagagagtcgattcccacggtactttaacactgaagagaagctcctgttgacatcatctaaggtgcatctgtaccgcgaactgacgtgcgacgaggtgctgcagcgtattgaatctctggaagaggaaatcatcagcaaagggatcaaattggtgatcctggactccgtagcaagcgtggtgaggaaggaatttgacgctcagttacagggaaacctcaaagaacgcaacaaattccttgcgagagaggcctcttctttgaaatatttggcagaggaattctcgattcctgtaatattaactaatcagattacgacccacttaagtggagctctggcctctcaagccgacctggtgtcccccgctgacgatctgagcctgagcgaaggcacctccgggagctcctgtgtcattgcagctctgggcaacacgtggtcccactccgtcaacacccgcctgatcctccaatatctggattcggagcggaggcagattttaatagctaaatcccccctcgcgccttttacaagctttgtgtatacgattaaagaggagggactcgtgctccaggagttttggcacatctgtattagtggcttctccatccagaaccgcctgaaggagaacgagtcatag

SEQ ID NO: 30469 - DNA, 1053 bp, synthetic construct
  misc_feature 1..1053: note = Description of Artificial Sequence: Synthetic coding sequence
  source 1..1053: mol_type = other DNA
atgggttctaagaagcttaaacgagtcggacttagtcaggaattatgcgaccgactgagtcggcaccagattttgacttgccaggattttctgtgtctcagtccgctcgagcttatgaaagtgaccggcctgtcataccgaggagtccacgagctgctgtgcatggtgtccagggcgtgtgccccaaaaatgcagaccgcctatggcatcaaagcgcaacggtccgccgattttagcccagccttcctgtccaccacactgtccgctttagatgaggcactgcacggcggagtggcatgcggcagcttaacggaaatcaccggaccccctgggtgcggcaagactcagttctgcattatgatgagcatactggcaacgcttcccactaatatgggaggactcgagggtgctgtcgtgtatatagataccgaaagcgccttctctgccgagcgcctggtcgaaatcgccgagtcccggtttcctaggtatttcaacaccgaggaaaaactactgctgacaagttccaaggtgcacctttaccgggaactcacttgtgatgaggtgttgcagcgaatagaatctctggaggaagaaatcatcagtaaaggtattaagctcgttatcttagatagtgtggcctcggtcgtgagaaaagagttcgatgctcagctccaagggaatcttaaagagagaaacaaatttctcgctagagaggcatcatctctgaagtacctcgcagaggaattctccatccccgtcatcctcaccaaccaaattactacccacctgtccggcgctctggcgagccaggccgacctggtgagtcccgcagacgatctgtcactgtcagaaggtactagtggctccagttgtgtgatcgccgcactgggaaacacttggtcccacagcgtgaacacacggttaattcttcagtatttggactcagagaggcgccagatccttatcgcaaagtcccctctggcaccttttactagctttgtctatactataaaggaggaggggttggtgcttcaagggcaggagacgccctag

SEQ ID NO: 30470 - DNA, 1053 bp, synthetic construct
  misc_feature 1..1053: note = Description of Artificial Sequence: Synthetic coding sequence
  source 1..1053: mol_type = other DNA
atgggctctaaaaaattaaaacgcgttggcctgtcccaggaattatgcgaccgtctgagtcggcaccagattctgacctgtcaggactttctgtgtctgagcccactcgagctcatgaaagtgacaggactgtcgtacaggggggtccacgaactgctgtgcatggtctcccgagcatgcgctcctaaaatgcagaccgcctacggaataaaggcccaaaggagcgccgacttttcacccgctttcctgtctacaaccttgagcgcacttgatgaggccctgcacggtggggtggcttgcggcagtctcacagaaatcacaggaccaccgggttgtggcaagacccagttttgtataatgatgtccatcctggccacccttcctaccaatatgggaggtttggagggcgctgtcgtgtacattgacaccgagagcgccttttccgcagagcgcctggtggagatcgctgagtctagatttccgagatactttaatacagaggaaaagctgctgttgacaagttcgaaggttcatctttacagggagttgacatgtgatgaggtcctgcaacggattgagtcactggaggaggagataatatctaaggggatcaagctagttattctagatagtgtggcgtctgtggtgagaaaagagtttgacgcccagctgcagggtaacttgaaggaaaggaacaagttcttggctcgggaggcctcgtctctgaagtatctggcagaggaattctctatccccgtgatcctcaccaaccagattacaacccatttaagtggggcactggcctctcaggccgacttggtttccccagcagatgatctgtccctgtccgaaggaacgtccgggtctagctgtgttatcgcagcgttaggcaatacctggagtcactcggtgaacacgcggctcatcttacaatatttagactctgagcgacgtcagatcctaatcgctaaaagcccactggccccatttacctcatttgtctacaccatcaaggaggagggactcgtactgcagggacaggaaaaaccctag

SEQ ID NO: 30471 - DNA, 402 bp, synthetic construct
  misc_feature 1..402: note = Description of Artificial Sequence: Synthetic coding sequence
  source 1..402: mol_type = other DNA
atgggaagcaaaaagttaaagagggtggggctttcacaagaactctgtgatagactctctcggcaccagattctcacctgccaagattttctgtgtctgtcccctctggaacttatgaaggtgacaggactcagctaccggggagtccacgaactcctgtgtatggtctcgcgggcatgtgctccaaaaatgcagaccgcctacggcatcaaggcacaaagaagcgccgatttttcacccgcttttctgtccaccacgttatccgccctcgacgaagcattacacgggggagtcgcttgtggatccctcaccgaaatcacaggtccacccggttgcggaaagacccagttttgcatcatgatgtctatcttggccaccctgcccaccaacatggggggatag

SEQ ID NO: 30472 - DNA, 1155 bp, synthetic construct
  misc_feature 1..1155: note = Description of Artificial Sequence: Synthetic coding sequence
  source 1..1155: mol_type = other DNA
atgggaagcaagaagctgaagagagtaggacttagccaggagctgtgcgatcggctaagccggcatcagatattaacttgtcaggactttttatgcttgagccccctggagttgatgaaagtgactgggctgtcctatcgcggtgtccatgagttactatgcatggtaagtagagcttgcgcccctaaaatgcagaccgcatatggtattaaagcacagagatcagctgacttctctccggcatttctgtccacgacactcagcgccctggacgaggcgctccacggtggggtcgcatgcgggtctcttactgaaatcacgggtcctcctggctgcggcaaaacgcagttctgcattatgatgtctatcctggcaacccttccaacgaacatgggagggctcgaaggagcagtggtgtacatagataccgaatcggccttctccgctgagcgattggtggaaatagcggagtcaaggtttcctcggtatttcaacacggaggaaaaactgctcttgacctcaagcaaagtccatctgtatcgtgaacttacatgtgacgaggtactccaacgcattgagagccttgaagaagaaataatttctaaaggcatcaagctggtcatcctcgatagcgtggcttccgtggtgcggaaagagtttgatgcccagctgcagggcaacctgaaagaaagaaataagttcttggcccgagaagcctcatcactgaaatacttagctgaagaattctcgatccccgtgatactgactaaccagatcactacacatctgagcggcgcactggccagccaggccgatctcgtgtccccggcagacgatctaagtctaagcgaagggacaagcggctcctcctgtgtgatagccgcactgggtaacacctggtcccactcagtgaacacgcggttgatccttcagtaccttgacagcgagaggagacagatcctgatcgccaagtctcctttagctccctttacgtctttcgtctacacaatcaaggaagaagggctggttttgcaggagaccaccttttgctcagttacccaggccgagctgaactgggccccagaaattttgccccctcaacctcctgagcagttggggctgcagatgtgtcaccatactcagctcattttttag

SEQ ID NO: 30473 - DNA, 1101 bp, synthetic construct
  misc_feature 1..1101: note = Description of Artificial Sequence: Synthetic coding sequence
  source 1..1101: mol_type = other DNA
atggggtccaaaaagttgaaaagggtcggcctctcccaggagttgtgcgacaggctgtcaaggcaccagatcctcacttgccaggatttcctctgtttatctcctctggaactaatgaaagtcaccggactatcttacagaggagtacacgagctgttgtgtatggtgtctcgcgcttgcgccccaaagatgcagacggcgtacggtatcaaggcgcagaggtccgccgacttttcccccgcattcctatccacaaccctaagtgcactggacgaagccttgcacggcggtgtcgcatgcggcagcctgaccgaaatcaccggtccaccgggttgcggaaagacccagttttgtattatgatgtccatccttgctaccctcccgactaatatgggtggacttgagggagctgtcgtgtatatcgatactgagagcgccttctctgcagagagactcgtggagatcgccgaatctaggttccctagatatttcaatacggaggagaagctgctgctgacaagttcgaaagtgcacctctatagggagttgacttgtgatgaggtcttgcaaaggattgaaagcctcgaagaagagatcataagcaaaggcattaaactggtgatcttggactcagtagcttcagtggtcaggaaggagttcgacgcccagttgcaggggaacctgaaggaacgtaataagtttctggctcgggaagcatcttctctgaaatacctcgccgaggagtttagcatccctgtgatccttaccaaccagatcaccacccatctgtcgggagccctagcttcgcaagctgacctggtctcccctgctgatgacctctcgctgtccgaggggacatccggaagctcctgcgttattgctgccctaggtaatacttggtcccacagtgttaatactcggctaattctgcaatatttggactccgagcgacggcagatcttgattgcaaaaagccctctggcgccatttacgtctttcgtatatactatcaaagaggaagggctcgtgctgcaagagttttggcatatttgcatttccgggtttagcatccagaatcgtctgaaggaaaacgagtcttag

SEQ ID NO: 30474 - DNA, 228 bp, synthetic construct
  misc_feature 1..228: note = Description of Artificial Sequence: Synthetic coding sequence
  source 1..228: mol_type = other DNA
atgggtagtaagaagctcaagcgagttggactctcgcaggagttgtgcgatagactctcaagacaccagatccttacctgtcaggatttcctttgcttatcacccttggaattgatgaaagttacaggcctgtcttatcgtggcgtgcacgagttactttgcatggtgtctcgggcttgtgctccgaagatgcagaccgcctatgggataaaggcacagaggtcttag

SEQ ID NO: 30475 - DNA, 1131 bp, synthetic construct
  misc_feature 1..1131: note = Description of Artificial Sequence: Synthetic coding sequence
  source 1..1131: mol_type = other DNA
atgagagggaaaacctttaggttcgaaatgcagagagatcttgtgagttttcccctgagtcccgctgtgcgagtcaagttggtaagcgccggtttccagacggccgaagagctgcttgaggttaagccttctgagctctctaaggaggttggcatctccaaggccgaggctcttgagactctccagataatccgcagggaatgcctgactaacaaaccacgctacgctggcacgagtgaaagccacaagaagtgcacagccctggaactgttggagcaggaacacacccaggggtttattataaccttttgctccgctctcgacgacatccttggcggtggggtgccattaatgaagaccacagagatctgcggggcaccaggcgtggggaagacacagctgtgcatgcagctcgctgtcgatgtgcagatccccgaatgttttggcggagtggccggagaggccgtcttcattgatacggagggtagcttcatggtggaccgcgttgttgacctggctaccgcatgtatccagcatctgcaactgattgccgaaaaacacaagggcgaggagcacaggaaggcgctcgaagattttaccctggacaacatcctgtcccacatatattacttcaggtgcagagattataccgaactcctggcccaggtatatttattgccggactttctgtccgagcattccaaagttcggctggtgatcgtagatggcatcgcctttccattccgtcacgatctagacgatctgagcctcaggactcggttattgaatggactggcccagcagatgatctcacttgcaaataatcaccgactggctgtaatcttaaccaaccagatgaccacaaagatcgaccgcaatcaggcacttctggtgcctgctctgggggaaagctgggggcacgccgctacaatccggctgatctttcactgggaccgtaagcagcgcctcgccaccttgtacaagagcccaagtcagaaagagtgcaccgtactgtttcagatcaagcctcagggatttagggatactgttgtgacgagcgcgtgttctctgcagaccgagggtagcctctctacccgcaagaggtctagggatccagaagaggagctgtag

SEQ ID NO: 30476 - DNA, 987 bp, synthetic construct
  misc_feature 1..987: note = Description of Artificial Sequence: Synthetic coding sequence
  source 1..987: mol_type = other DNA
atgggcgtcctgcgcgtcgggttgtgccccggtcttactgaggaaatgatccagctgttacggagccacagaatcaagacagtcgtcgaccttgtcagtgccgatctggaagaggtggcgcaaaaatgcggtctgtcctataaggctcttgttgccctgaggcgcgtactgctcgcacagttttccgcgttccctgtcaatggggctgacctctacgaggaactaaaaacctctactgcaattctctcaacaggcatcggtcggatcagactcagtggcaatgccagatggctgatgccaaaggttacagagattgtggggggacccggttccggtaaaacgcaggtgtgtctgtgcatggccgcaaacgtggctcatggcttgcagcagaatgttctgtatgtggactcgaatggagggctcaccgcgtcacggttattgcagcttctgcaggcgaaaacccaggatgaagaagagcaggccgaagctctaagacgcatccaggttgtgcacgcgttcgacatatttcagatgttagacgtgcttcaggaacttcgtgggaccgtcgctcagcaggtgaccggctcctccggcaccgtgaaggtggtggttgtcgactccgtaaccgcagtggtcagtccactgctgggaggacagcagcgagaagggctagcgttgatgatgcagttggcccgagaacttaaaaccctagcacgtgacctgggcatggctgtagtagtgacaaatcatataacaagggaccgggactctggtcgcctcaagccagcactgggcaggtcctggtcttttgtcccaagcacacggatcttgttggacaccattgaaggggcaggggcatctggaggtcgcaggatggcttgtctcgctaagagctcccggcagccgaccggcttccaggaaatggtggacattggcacatggggaacttccgagcaaagcgccactctgcagggggaccaaacctag

SEQ ID NO: 30477 - DNA, 987 bp, synthetic construct
  misc_feature 1..987: note = Description of Artificial Sequence: Synthetic coding sequence
  source 1..987: mol_type = other DNA
atgggggttttgcgcgtggggctgtgtcccggtctcacggaggaaatgatacagctcttgcgcagccatcgaatcaaaacagtagtggacctggtgagcgccgacctggaagaggtggctcagaagtgcggcctgagctacaaggcactggtggccctgaggagggtgttgctcgcacaatttagcgctttccctgtgaatggcgctgacctgtacgaagaacttaaaacctccactgccatcctcagtacgggaataggctcactcgacaaactgcttgacgccggtctctacaccggcgaagtgacggaaattgtgggcggacccggtagcggcaagacccaggtatgtttatgcatggccgcaaacgttgcacacggcttgcagcagaatgtactgtatgtggatagcaacggcggtcttacagcttctagactgctgcaacttcttcaggcaaaaacacaggatgaagaagagcaggcggaagcactgaggagaattcaggtggtgcatgctttcgatatattccagatgctggatgtgcttcaggaattacgaggcaccgtggctcagcaggtgaccggctcttccggcacggtgaaagtggtcgttgtggacagcgtgactgccgtggtctctcccctgcttggtggacagcagcgagaaggactcgctctgatgatgcagctggcaagggaactcaaaactctcgcacgagacctgggcatggctgtagtggtcacaaatcacattactagggacagagatagcggcaggctcaagcccgcactaggacgttcgtggtcatttgtcccaagtacaaggatcctgttagataccatcgagggcgcaggcgctagcggaggacggcgaatggcatgcctcgccaagagctccaggcaacctacaggatttcaggaaatggtggacataggaacgtgggggacatcagaacagtcagcgacattgcaaggtgatcaaacttag

SEQ ID NO: 30478 - DNA, 651 bp, synthetic construct
  misc_feature 1..651: note = Description of Artificial Sequence: Synthetic coding sequence
  source 1..651: mol_type = other DNA
atgggagtgctcagagtgggtttatgtcctggcctcactgaggaaatgatccagcttctcaggagtcaccgtataaagaccgtggtcgatctggtatcagcggacctggaggaagtggcccagaagtgtggcttatcttacaaggccgaggccctccgtcggatccaggttgtacacgcattcgatatcttccagatgctggatgtgttacaggagctgagagggaccgtggcccagcaggtaacaggatccagtggaacggtaaaggtggttgtcgttgattcagtaacagctgtcgtaagccctctgctgggtggccagcaacgcgaaggcttggcgctgatgatgcagcttgcacgggagctgaagactctggccagggatctgggaatggccgttgtggtgacgaaccacattacaagagatagagacagcgggcgattaaagcctgcactcggacgctcatggtccttcgtaccctccacacgaattctactggatactattgagggagcaggagcttcaggtggcaggcggatggcctgcctggccaagtcttcccgacagccgacaggtttccaagaaatggtggatattggtacctggggtacttccgaacagtcagcaacactgcagggcgatcaaacatag

SEQ ID NO: 30479 - DNA, 357 bp, synthetic construct
  misc_feature 1..357: note = Description of Artificial Sequence: Synthetic coding sequence
  source 1..357: mol_type = other DNA
atgggagtcttgagggtgggactgtgccctggccttaccgaggagatgattcaactcctgcggagccacagaattaaaaccgtggtcgatctcgtctctgccgacctggaggaggtggcccagaaatgcgggctgtcatataaagcacttgtggcactaaggcgcgtgctgttggctcaattttccgcgtttccagttaatggggctgacctctacgaggaattaaaaacgtcaacagccattctgagcaccggaattggacgtcatggcggtcgtactcaggtgggtacgtgggaagattgtagttgcctccgtagtccccagggcgataggggcgtgggaagcggtatgctttag

SEQ ID NO: 30480 - DNA, 852 bp, synthetic construct
  misc_feature 1..852: note = Description of Artificial Sequence: Synthetic coding sequence
  source 1..852: mol_type = other DNA
atgggcgtgctgagagttggcctgtgtcccggtttgaccgaggaaatgatccagctactgagatcccaccggatcaagacggtggtggatctagtttctgccgatctggaagaggtcgctcagaagtgcggattatcatataaagccctggtagctctgcgccgtgtgctcctggcacagttctctgccttcccagtgaacggggcagacttgtacgaggaactaaagacatccacagcaatcctcagcaccggcataggttcacttgacaagttactggacgcgggtctgtacaccggagaggttacggagatcgtgggaggaccgggatcggggaagacacaagccgaagcattgcggagaattcaggtcgtacatgcatttgatatctttcaaatgttggatgttctgcaggaactgagaggtactgtagcccaacaggttacaggaagctctggtacagtgaaagtggtggtagtagactcggtcactgctgtggtgtccccactgttagggggacagcagagggagggcctggccctgatgatgcaactggctcgagagctgaaaacacttgcaagggacttgggcatggcagtggttgtgactaatcacattactcgcgacagagacagcgggcgactgaagcctgcccttggcagatcgtggagctttgtgccaagtactcgaattctgctcgacaccatcgaaggcgcaggggctagcggtggacgacgaatggcctgcctggctaaatcttcgcgccaaccaactggcttccaggaaatggttgacatagggacttggggcacatctgagcagtccgcgactttacaaggcgaccagacttag

SEQ ID NO: 30481 - DNA, 1047 bp, synthetic construct
  misc_feature 1..1047: note = Description of Artificial Sequence: Synthetic coding sequence
  source 1..1047: mol_type = other DNA
atgggagtcctccgggtgggcctctgcccagggctgacagaggaaatgatacagctcctgaggtcccatcgcattaagacagtcgtggacctggtttctgccgatctggaggaggtggcccagaaatgtggcctcagttacaagacgtggcgcgctcactctagtggcaacctgggaggcctgcagctgccacaagtcccagcaggcaggagctggagtggcgtgcgcaatgccctgaaaaaggcaggcctcggccatggaggtacagatgggttatctctcaacgcttttgatgagagaggaaccgcagtttcaaccagtaggttggacaagctgctggacgcaggcctatacaccggcgaggtgaccgagattgtgggtggacctggctccggaaagactcaggtgtgcctgtgtatggccgctaatgtggcccacggactccagcagaatgtcctttatgtggacagcaacggtggccttacagccagccgtctactgcagctcttgcaggccaagactcaggacgaagaggaacaggcagaagccctcagacgaatccaggttgtgcacgcatttgacattttccaaatgctcgacgttctacaagagctcagaggcacagttgcacagcaggttactggtagttctgggaccgtgaaggtggtggtggtggattcagtgacagccgtggtttcaccccttctcggcggtcagcagagagagggcctcgccttgatgatgcagctggctagagagcttaaaactctggcccgtgacctggggatggcagtcgtcgtaacaaaccatatcacccgggacagggatagtggcaggcttaagccggctttgggtagaagctggagcttcgtgccctcaactcgtatcctgctcgatacaatcgaaggtgccggtgctagcgggggtcgcaggatggcatgcctggccaagtcatcgagacagcctacagggtttcaggagatggtggatataggcacctggggaacttccgagcagtctgcgactctccagggcgaccagacatag

SEQ ID NO: 30482 - DNA, 648 bp, synthetic construct
  misc_feature 1..648: note = Description of Artificial Sequence: Synthetic coding sequence
  source 1..648: mol_type = other DNA
atggtgatggcggcactccccttcagcgaggacctgaagatgccagatacatgcgtactgccccactgccctgggaaggaaaacaaggatgtggtcgacctggttagtgcggatctagaagaggttgctcaaaagtgcggactgagctacaaagcactggtggccctgcggagagtcctgctcgcccagttttccgccttcccagttaacggggctgacctctatgaagaactgaaaaccagcactgccatattgtcaactggcataggctcacttgacaagctcttggacgcaggactttataccggcgaggtgactgagatagttggagggcctgggtcaggaaaaacacaggtgtgtctttgtatggccgcaaatgtagcacatggcctgcaacagaacgtgctgtatgtagatagtaacggaggcctgacagctagcagactgttacagctcctgcaggccaagacccaagacgaggaggaacaggctgaagcactgcggagaattcaggttgtgcacgccttcgacatcttccagatgttggacgtactgcaggagctgcggggaactgttgcccagcaagacggcattcccgagcatctgaaccatattccacactgtctgcatgttcatctgccatgctag

SEQ ID NO: 30483 - DNA, 711 bp, synthetic construct
  misc_feature 1..711: note = Description of Artificial Sequence: Synthetic coding sequence
  source 1..711: mol_type = other DNA
atgggcgttctgagggtgggtctttgcccaggtcttactgaggaaatgattcagctcctgcggtcccaccgaattaaaactgttgtggaccttgtgagcgccgacctagaggaggtggctcaaaaatgcgggctatcctacaaagcgctggtagctctgcggagagtgctgctagcacagttcagtgcttttccggtgaacggagcggatctgtatgaagaactcaagacctcaacagccattttgtctacagggatcggctcactggataaattactcgacgcaggcctttacaccggggaggtgaccgagatcgtcggaggtccagggagcggaaagacccaggtctgcttgtgtatggctgctaacgtggcccatgggctgcagcaaaacgtcttgtacgtcgacagcaatggcggtttgactgcctccaggctgctacaactgctccaggcgaagacacaggacgaagaagaacaagctgaggcattacgaagaatccaggtggtccacgctttcgatattttccaaatgctcgatgtcttgcaggagctgcggggaaccgtggctcaacaggttacaggaagctccggcaccgttaaggttgtcgtcgtggattctgtgacggccgtggtgtcacccttactcggcggacaacagcgagagggacttgcccttatgatgcagctagctcgagagctgaaaacatag

SEQ ID NO: 30484 - DNA, 1047 bp, synthetic construct
  misc_feature 1..1047: note = Description of Artificial Sequence: Synthetic coding sequence
  source 1..1047: mol_type = other DNA
atgggtgttttgagggtgggactgtgccccggtctgactgaggaaatgatacaactgctgaggagccaccgcatcaagactgtagtagacttggtgagcgccgacttagaagaggttgcccagaagtgcggcctgagttacaaaacctggagagcacatagctctgggaatctcggcggactgcagctgccccaggtgcctgctgggagatcttggtccggcgtgagaaatgcgctcaagaaggcgggactagggcatgggggaacggatggtctgagtctgaatgcatttgatgagcgaggcaccgccgtgtcaacttcccggttagataagctgcttgacgccggtttatatactggtgaggtgaccgagatcgtcgggggtcctggtagcggcaaaacccaggtttgtctgtgcatggcagccaatgtcgcccacgggcttcaacagaatgtcctgtatgtcgactctaacgggggactgaccgccagtagactcctgcagctgctacaggctaaaacccaggacgaggaggaacaagccgaagcgctgagaaggattcaggtggttcacgcctttgacatcttccagatgctggatgtactccaagaactgagaggtactgtcgcccagcaggtaacaggctcctctgggactgtgaaggtagtggtcgtggacagcgtgacggccgtggtctccccgctgcttggaggtcagcagcgagagggcctggcattgatgatgcagctggccagggagcttaaaaccctggctagagacctagggatggctgtggtggtgactaatcacattacaagggaccgggacagtggccgactgaagcccgcactggggagatcgtggagcttcgtgccctcgacgagaattttactcgacaccattgagggagctggagcatccggtggtcgccgaatggcctgtttggccaaaagctcgagacaacctaccggctttcaggagatggttgatataggcacttggggtactagcgagcaatctgctaccctccagggcgaccagacctag

SEQ ID NO: 30485 - DNA, 1257 bp, synthetic construct
  misc_feature 1..1257: note = Description of Artificial Sequence: Synthetic coding sequence
  source 1..1257: mol_type = other DNA
atgagcgggactgaagaggctattctgggcggtagagattctcatccagcagccggtggaggttccgtgttgtgttttggccagtgccagtacacagccgaggaataccaggcaattcaaaaggccttacgtcaacgactaggacctgaatacattagcagccgtatggcagggggtggccagaaagtgtgctacattgaagggcaccgcgtgatcaatcttgccaacgaaatgttcggatataatggctgggcccattccatcacccagcaaaacgtggactttgtggatctcaacaacgggaaattctacgtcggagtgtgcgcattcgtgcgagtgcagttgaaagatggttcctaccacgaggacgtcgggtatggagtgagcgaaggcctgaagtctaaggccttgagcctggaaaaggcgagaaaggaggctgtgactgatgggctcaaacgggcactcagatcgtttggaaatgccctagggaactgtattctggacaaagactatctaaggagcctgaacaaactgccacggcagctccctctcgaggtggacctgactaaagcaaagcgccaggatctggaaccatctgtggaagaggcaaggtacaactcatgtcgccctaacatggccttagggcaccctcaactgcagcaagttacctccccgtcacggccaagtcacgcagtaattcctgccgatcaggattgttcaagcaggtctttatcctccagtgccgtggaatctgaagcgacccaccagcggaaactaaggcagaagcaactgcagcagcagtttcgtgagaggatggaaaagcagcaggtgagagtgtcaacccctagcgcagagaaaagtgaggccgctccccctgcccctcccgttacccatagtactccagtgaccgtctcggaacctcttctggaaaaagattttctggcaggggtgacccaggagctcatcaaaactctcgaggataactccgagaagtgggcagttactcccgacgccggagatggcgtcgttaagccatcctctcgagcagatcctgcacaaacgagtgacactctggcgctgaacaatcagatggtgactcagaacaggacgcctcattctgtgtgccatcagaagcctcaggcaaaaagcggctcctgggacttgcagacatactcagcagatcagaggacaacaggcaattgggaaagtcacaggaaatcacaggacatgaagaaaagaaaatatgaccccagctag

SEQ ID NO: 30486 - DNA, 1257 bp, synthetic construct
  misc_feature 1..1257: note = Description of Artificial Sequence: Synthetic coding sequence
  source 1..1257: mol_type = other DNA
atgagtggaacagaggaagctatactcggcggaagggacagtcatccagccgctggcggtggaagcgtcctctgtttcggccaatgccagtatactgcagaggaatatcaggcaatacagaaagccttgagacagcgattgggtccagagtacatttcctcacgtatggcgggaggtggacaaaaagtatgttacattgaaggacatcgtgtgatcaatttagccaacgaaatgtttggctacaatggctgggcccacagcataacacaacagaatgtggatttcgtcgacctgaataacgggaagttctacgtgggcgtttgcgcttttgttcgcgtgcagcttaaggacggaagttaccatgaagatgtgggatatggcgtttcagaggggcttaagtccaaagcacttagcctggaaaaagccaggaaggaggcagtcacggacgggctcaaacgagccctgcggtcattcggcaacgccctaggaaactgcatattagataaagattacctgcgttctctgaacaaactgccccgtcaactgcccctggaagtggacctgacaaaagcaaagaggcaggatctagagccctctgtagaagaagcgagatataatagttgccggccaaatatggctctcggacaccctcaactgcagcaggtgacatcgccatcacggccatctcatgccgtgatcccggcagaccaggattgtagtagcaggtctctctcttcaagcgcagtcgagtccgaggcaacacaccagagaaagcttcgacagaaacaactgcaacagcagtttagggagagaatggagaagcagcaggttagggtgtccacaccctccgccgaaaaatccgaggctgccccaccggcacctccagtcactcactccacccccgtgacagtctcagaacccttgttagagaaggacttcctggctggtgtcacccaggagctgatcaagactctcgaagataactcagagaaatgggctgttacaccggacgccggtgacggcgtcgtgaagccatccagtagagccgatccagcgcagaccagcgacacccttgccctgaataaccaaatggtgacacagaaccgcacgcctcactcagtttgccaccagaaaccccaggccaagtccggatcttgggatctacagacatatagtgccgatcagcgaactactggcaactgggagtcacaccgaaagagccaggacatgaagaagcgcaagtacgatccctcctag

SEQ ID NO: 30487 - DNA, 1026 bp, synthetic construct
  misc_feature 1..1026: note = Description of Artificial Sequence: Synthetic coding sequence
  source 1..1026: mol_type = other DNA
atgttcggctataacgggtgggctcattctatcacacagcaaaacgttgatttcgtggatctgaataatggaaagttttacgtgggcgtgtgcgcattcgtgcgtgtacagctgaaagatggatcctaccacgaggatgtgggttatggtgtgagcgaaggcctgaaatctaaggcgctgagcctggagaaggcacgaaaagaggccgtgacagacgggctgaagcgcgcactccgatccttcggcaacgccttaggcaattgtattctggacaaggattatctcaggtcattgaacaagctgccccgacagctgcccttggaggtagacctgacgaaggccaaacgacaggatctagaaccatctgtcgaagaggcacgctacaacagttgccgccctaatatggccctgggtcacccccagttgcagcaggttacgagtccgagtcgcccttctcatgccgtgatccccgctgaccaagactgctccagtaggtctttaagttcttccgccgtggagagcgaggcgacacaccagcgcaagctaagacagaagcagctgcagcagcagtttcgtgaacgcatggagaaacagcaagtccgcgtttcgactccttctgccgagaagtctgaggccgcaccaccagcacctccagtgactcactcgactccagtcacagtatcagagccccttctagaaaaggactttcttgctggcgtgacgcaggaactcataaaaaccctggaggacaattccgagaaatgggctgtgactccagacgctggggacggcgttgtgaagccatcctcacgtgccgaccccgctcagacatctgacacacttgctttgaataatcagatggtcacgcagaataggactcctcacagcgtgtgccatcagaagccccaggccaaatctggaagttgggatttgcagacatactccgcagatcagcggacaaccggaaactgggagagccaccgcaagagccaggacatgaagaagcgcaagtacgacccttcatag

SEQ ID NO: 30488 - DNA, 681 bp, synthetic construct
  misc_feature 1..681: note = Description of Artificial Sequence: Synthetic coding sequence
  source 1..681: mol_type = other DNA
atgtctggcacagaagaggctattctgggtggtcgcgactcccatcccgctgccggtggaggctccgtgctgtgttttgggcagtgccagtatactgccgaagagtatcaggccatacaaaaagccctgcgacaacgcttgggtcccgagtatatcagtagcagaatggcaggaggcggacagaaagtgtgttatattgaaggccaccgcgtgattaacctcgctaacgaaatgtttggatacaacggttgggctcacagcatcactcaacaaaatgttgattttgttgatctcaataatggtaaattctacgtgggtgtgtgtgcattcgtgcgcgtgcagctgaaggatggttcctaccacgaggatgtcggatacggtgtaagcgaaggcctcaagtccaaagcactgtccctggaaaaagctaggaaggaggccgttactgatgggctgaaacgggctttgaggctgccactgctgggtgtctcaggacgcatactctatagtctcttctccgtacattccgtaatgtgcgctgggggtctgcccacaccgacggcttctgcccagaccgccccatcaagtccatgctcatcagctgttttacggtatgcacaggaattttgggagtgtacttggaagctgtactctggccaacgcttgccagaaattacaaaatag

SEQ ID NO: 30489 - DNA, 2244 bp, synthetic construct
  misc_feature 1..2244: note = Description of Artificial Sequence: Synthetic coding sequence
  source 1..2244: mol_type = other DNA
atgcggagaagtctcgcgcctagccagctggctaaaaggaaacctgaggggagatcctgcgacgacgaagattggcagcccggacttgttacaccacgcaaacgtaagtcctcatcagagactcagattcaggagtgctttctgtcccccttccggaagcccctctctcagttaacaaatcaacccccttgcctcgattcctcccagcacgaagccttcatcaggtccatcctttctaagcctttcaaagtgccgatccctaattatcagggccctctcggatctagggctctggggctcaagagagctggcgtgcgcagggcactacacgaccctttggaaaaggatgccctcgtcctttatgagccaccccctttgtctgcacacgaccagctgaagctcgataaggagaagctacctgtccatgtggtagtcgatcctatactcagcaaggttctgcgaccacaccagcgggagggggtgaaatttttgtgggaatgcgtgacctcccgtcgcatccccggatcccacgggtgcatcatggccgacgagatggggcttgggaagacattgcaatgtattacccttatgtggaccctgttgcggcagtcccccgaatgcaaaccggagatcgataaggccgttgtggtatcccctagctccctggtgaaaaactggtataacgaggtagggaaatggctaggcggacggatccaaccgctggccatagacggcggatctaaagatgagattgatcagaaattggaaggttttatgaaccagagaggcgcacgggtgagctccccgatcttgataattagctacgagacatttagactccatgttggcgtgcttcaaaagggtagtgtggggctggttatttgtgatgagggccaccgcctgaagaacagcgaaaaccaaacataccaggctctggacagtcttaacacgagtaggcgcgtgcttatctctggcacgcccattcaaaatgacctgcttgaatacttctcgctcgtacattttgtgaacagtggcatcctaggtacagctcacgagttcaagaagcatttcgaactccctatcctgaaagggagggacgcggctgcatctgaggcagatcggcaactaggggaggaacggctccgagaactcacatccattgttaacaggtgcctcatcagacggacatccgatattctgtctaagtacctgccggttaagatagaacaagtcgtgtgttgccgtttgacccccctgcagactgagctgtacaaaagattcctgaggcaagccaagcctgccgaggagttgttagagggcaagatgtctgtctcttcgttgtcttcaatcacatcgctgaaaaagctgtgcaaccatcctgcattgatttacgataagtgtgtcgaagaggaagacggtttcgtgggcgcactggacctcttcccacccggttattcatctaaagcgttggaaccccaattgtctggcaaaatgttagtgttggattacattcttgccgtgacacgtagtaggtctagcgacaaagtcgtgctggttagcaattatacccaaaccctggacctctttgaaaagctatgtcgggctagacgttacttgtatgttcggctcgacggcacaatgagtatcaagaagcgggcaaaggttgtcgagagatttaattcacctagcagtccggactttgtgtttatgctgagctcaaaagccggtgggtgcgggctcaatctgatcggggcaaataggctggttatgtttgatcctgactggaatcccgcaaatgacgagcaggccatggcccgagtgtggagggatggccaaaagaaaacgtgttacatttaccggctactgagtgctggtactatcgaggaaaagatctttcagagacaaagccacaagaaagcactttcatcttgcgtggtcgacgaggagcaagacgttgaacgccatttcagcctgggcgagcttaaggaactgtttatactggacgaggcgagcctcagtgacactcatgatcggctacattgccgtagatgcgttaactcccggcagattcgtccccctcccgacggcagcgattgtacgtccgacttggcgggatggaatcactgtaccgataaatggggacttcgtgatgaagtcttgcaggccgcatgggacgccgcatccacagccattacctttgtgtttcaccagcgctctcacgaagagcagagaggcttgaggtag

SEQ ID NO: 30490 - DNA, 2244 bp, synthetic construct
  misc_feature 1..2244: note = Description of Artificial Sequence: Synthetic coding sequence
  source 1..2244: mol_type = other DNA
atgcgtagaagtctggcccctagccaactggcgaaaagaaagcccgaggggaggtcctgcgatgatgaggactggcagccagggctggtaactccgagaaagcgcaagtccagctcagaaacgcaaattcaggagtgttttctgtctcctttccgcaaaccgctgtcccagctgaccaatcagcccccatgcttggattcttcccagcacgaggcattcatcagatctatcctgtctaagccctttaaagtgcctattcctaactaccaaggacccctgggctcaagagccctgggccttaagagggcaggggtgcgtcgcgctctacacgacccgctggaaaaagacgccctggtactctacgaacccccaccgctgagtgcacacgaccaactcaaattggacaaagagaagttgcctgtgcatgtggtcgtcgatcccatcctgtcaaaagttttaaggccccaccagagagagggcgtcaagtttctctgggagtgcgtgactagcagacggatccccggaagtcacggttgcatcatggcagatgagatgggcctcggaaagacccttcagtgtatcacccttatgtggaccctcctcaggcagagcccggagtgcaaaccggaaattgacaaagctgtggtggtgtcgcctagttccctggtgaaaaactggtacaatgaggtgggcaagtggctgggcggacggatacagcccttagctatcgacggaggttctaaagacgaaatagaccagaagctggaaggcttcatgaatcagaggggagctcgagtgtcatctccgatcctcataatcagctatgagacgttcagactgcacgtcggcgtgctgcagaaggggagcgttgggctcgtgatctgtgatgaagggcatcgtctgaagaatagtgagaatcaaacataccaagccttggatagcctgaacacctcccggagagtgctgatttctggcactcctattcagaacgatcttctggagtatttttctctcgtgcactttgtgaattcaggcatcctggggaccgcacatgaatttaagaaacactttgaactgcccattctcaagggtagggacgcagccgcttctgaagccgaccgccagctgggtgaggagaggctgcgtgaactgacaagcatagttaataggtgcctgatccggcgaacctccgacatactcagcaagtatttaccagtgaagatagaacaggtagtgtgctgtcgcctgacaccattacagacagaactgtataagcgctttttgaggcaggcgaagcctgccgaggagctgctcgagggaaagatgtctgtttctagtctgtcctctattactagcctcaagaaactctgcaatcatccagcgttgatttacgacaaatgcgtagaagaggaagatggattcgtgggcgctctcgacctattccctccgggatactccagtaaagccctggaacctcagctttctggaaagatgctggtgcttgactatatcctggccgtgacaaggtcccgaagctcggacaaggtcgttctcgtgagcaactacacgcagaccctggatctctttgaaaagctatgtagagccaggcggtatctgtacgtcaggctcgacggcacaatgtccattaagaaaagagctaaggttgtcgagcgttttaattcaccatcaagtccagacttcgtgttcatgctgagtagtaaagccggtgggtgtgggctaaatctgataggcgctaaccggttggtcatgtttgatcctgattggaaccccgcaaatgatgaacaggctatggcaagggtatggcgagacgggcagaagaaaacatgttacatctaccgtctgctgagtgccggaaccattgaggaaaagatttttcagcgtcaatctcataaaaaggccctgtcaagctgtgtggtggacgaagagcaggacgtggaaaggcatttctccctgggagagctgaaggagctcttcatcctcgacgaggcctccttgagcgacacgcatgacaggttgcactgtcggcgatgcgtgaactccagacaaatcaggccccctccagatggaagcgattgcactagcgatttagctggctggaaccactgcaccgacaagtggggactgcgcgatgaagttttgcaggcagcgtgggacgctgccagtaccgccatcaccttcgtcttccatcagcgcagccacgaggagcaacggggtctgaggtag

SEQ ID NO: 30491 - DNA, 1704 bp, synthetic construct
  misc_feature 1..1704: note = Description of Artificial Sequence: Synthetic coding sequence
  source 1..1704: mol_type = other DNA
atggctgatgagatggggctgggtaaaaccctgcagtgcatcactctgatgtggactttactgaggcagtcgcctgagtgtaagccagagatagacaaagccgtggtggtttcaccaagctcccttgtaaaaaattggtacaatgaagtcggaaagtggctcggcggtcgcatccagcccctcgctattgatggaggatccaaagacgaaatcgaccagaagcttgagggttttatgaaccaaagaggcgcacgcgtttctagcccaatccttatcatcagttacgagaccttccggcttcatgtgggcgtgctgcagaagggcagcgtgggtttggtgatctgcgatgagggtcatagactgaagaatagtgaaaaccagacctatcaggctctggatagtcttaacaccagtagacgagtcttgatttccggaactcccattcagaatgatttactcgagtacttctccttagtccatttcgtgaacagtgggatactaggtaccgcccacgagttcaagaagcattttgagctgcctatcctgaaaggcagagacgctgctgcgagcgaggctgatagacaattgggcgaggagcgtcttagggaactgacaagcatagtcaaccggtgcctcatcaggcgcacctcagacattctgagtaagtacctgcctgtgaaaattgaacaggtggtctgctgtaggctgacgccattgcagacagaattatataagcgcttcctgaggcaggcgaagccagcagaagagctgctcgagggaaagatgtcagtgtcttcactgagctccataacttccctaaaaaaactctgcaaccacccagctctgatttacgacaagtgtgtggaagaggaagatgggtttgtcggggcactcgacctgtttcccccaggatactcgtcaaaggcacttgagcctcagctgtctggaaagatgctggtcctggactacattctggctgttacaagaagcagatcctcagataaggtggtgttggtgagcaattacacacagacactggatttatttgaaaaactttgccgggctaggaggtatctctacgtgaggctggacgggacaatgagtatcaagaagcgagcaaaagtggtggaaaggttcaactccccctcctcccctgactttgttttcatgttaagttccaaggccggagggtgtggactcaacctcatcggcgctaaccgactcgtgatgtttgatcccgattggaacccagctaatgatgagcaggctatggcacgagtgtggagggacgggcagaaaaagacatgctatatatatcggttactgagtgcgggaactatagaggagaagatctttcagcggcagagccataagaaagcgctcagtagctgtgtggttgatgaggagcaggatgtggagaggcatttttcgctgggagagcttaaagaactgtttatcttggatgaggcgtcattatccgacacccatgacagactgcactgtcggagatgcgttaattcacgacaaataaggccaccaccggacggcagtgactgtacttctgatctagctgggtggaatcactgtactgataagtggggcctccgcgatgaagtgctgcaagccgcttgggacgccgcaagcaccgccataacctttgtcttccaccagcgcagccacgaggagcagagagggctgagatag

SEQ ID NO: 30492 - DNA, 1176 bp, synthetic construct
  misc_feature 1..1176: note = Description of Artificial Sequence: Synthetic coding sequence
  source 1..1176: mol_type = other DNA
atgaaatgcctcgtgaccggaggaaacgtgaaggtcctggggaaagccgttcattccctcagccggatcggagatgaactgtacttggagccccttgaagacggattatccttaagaactgtcaacagctcgcgctccgcttatgcttgttttctgttcgctcccttgttttttcagcagtatcaggccgcaacccctgggcaggaccttctccgctgtaagatcctgatgaagagttttctgtccgtctttcggtccctggctatgctggagaaaacagtggaaaagtgttgcatatctcttaatgggaggtccagcagactcgttgtgcagttgcactgtaaattcggagtgcgcaagacacacaacttatcattccaagactgtgagtccctgcaggctgtgtttgacccagcttcatgtccccacatgctgagggcccctgcaagagtacttggggaagccgtcctgccgttctcccctgcgctggcagaagttaccctgggcatcggaagggggcgacgagttatacttcgttcctaccatgaagaggaggctgattctactgccaaggcaatggttaccgaaatgtgcctgggcgaggaggactttcagcagcttcaggcccaggagggggttgcaattaccttttgcctcaaggagttcagaggactcctaagctttgctgagtccgccaacctgaacctctcaatacactttgatgctccaggccgtccggcaattttcaccattaaggatagtctgctggatgggcacttcgtgctggcaacactctctgacactgacagccatagtcaggacttagggtcccccgaacggcatcagcccgtgccccaactccaagctcacagcactccccatccagacgatttcgctaacgatgacatagactcatacatgatcgctatggagacaacaattggcaacgagggatcgcgcgtgctcccttcaattagcctgtctcctggcccacagccaccgaagagcccagggccacactccgaggaagaggatgaggccgagccaagcacggtccctggaacacctcctcctaaaaagtttcgtagtcttttcttcgggtcaatcctggccccagtgcgctcccctcaaggtccttctcccgtgctggcagaggactcagaaggcgagggctag

SEQ ID NO: 30493 - DNA, 1752 bp, synthetic construct
  misc_feature 1..1752: note = Description of Artificial Sequence: Synthetic coding sequence
  source 1..1752: mol_type = other DNA
atgcctaaacctatcaatgtcagagttaccacaatggatgcggaattagaattcgcaatccagcctaatacaacaggaaaacagctgtttgaccaagtcgtgaaaactgtgggactacgtgaggtgtggttttttggactgcaatacgtcgatagcaaagggtactctacatggctgaagctgaacaagaaggttacacagcaggacgtcaaaaaggaaaacccactccagttcaagttccgggcaaagtttttcccagaagacgtgagtgaggaactcattcaggaaatcacacagaggcttttcttcctccaggttaaagaagcgattctgaatgatgaaatttattgcccccctgagaccgctgtacttctcgccagctacgcagtgcaggcgaagtatggagactacaacaaggaaattcacaaacctggatatctggccaatgatcgtctcttaccccagcgagtgctcgaacagcacaaattaaccaaggagcagtgggaggaaagaatccagaactggcatgaggaacacaggggcatgctgagggaagactctatgatggaatatcttaaaatcgcccaggacttagaaatgtacggcgtcaactatttcgaaataaagaacaaaaaagggaccgaactatggctgggtgtggatgccctggggctcaatatctacgagcatgatgataagctcacaccaaaaataggcttcccttggtccgaaatacgaaatataagtttcaacgacaagaagttcgtaataaaaccaattgataaaaaggccccagactttgtcttttatgctcccaggctgagaatcaacaagagaatactggccctctgcatggggaaccatgaactctatatgagacgtcgaaaaccagacaccattgaggtgcagcaaatgaaagcccaggcacgcgaagagaaacatcagaaacagcttgagcgggcacaacttgaaaacgaaaagaaaaaacgcgagattgcggagaaggagaaagaacgaattgaaagggaaaaagaggaactgatggagaggctcaagcagattgaagagcagaccattaaagcacaaaaagaattggaggagcagacaagaaaggcattggaactggatcaggaaaggaaaagggccaaggaagaggctgaacgactggagaaagagaggagagccgctgaggaggctaaaagtgccatagccaagcaggcggctgaccagatgaagaatcaggagcagcttgctgccgagctggccgagtttaccgcaaaaattgcactgctggaggaggcaaagaagaaaaaggaggaggaggccaccgagtggcaacacaaagcttttgctgctcaggaagacttagaaaagacaaaggaggagttaaaaaccgtgatgagtgcccctccacctcccccacctcccccagtgattccacctactgagaatgaacatgacgagcacgatgaaaacaacgccgaggccagcgcagagctttctaatgagggcgtgatgaaccaccggtctgaggaagagcgggtaacagagacgcagaagaatgaaagggtaaagaaacagctccaggcactgagtagtgagctcgcacaggccagagacgagaccaagaagacgcagaacgacgtgctgcatgctgagaatgttaaagctggcagagataaatacaagacactacggcagattagacaggggaataccaagcaaaggatcgacgagttcgaagctatgtag

SEQ ID NO: 30494 - DNA, 1815 bp, synthetic construct
  misc_feature 1..1815: note = Description of Artificial Sequence: Synthetic coding sequence
  source 1..1815: mol_type = other DNA
atgcctaagccaatcaatgttagggtcactaccatggacgccgagctggaatttgcaatacagcccaacacaaccggaaagcagctgttcgatcaggtcgtgaaaacggtggggctgcgggaagtgtggttctttgggctgcagtatgttgactccaagggatactcaacctggctgaaattaaataagaaggttactcagcaagacgtgaagaaggagaatcctctgcagttcaagtttcgtgctaagttttttccagaagacgtatctgaggagctcatccaggaaatcacccaaaggctcttttttcttcaagtgaaagaggctatcctcaacgacgagatctattgtccacccgagaccgctgttctacttgctagctacgccgtgcaggccaagtacggagactacaataaggagattcataagcccggttacctggcaaatgacagactgctcccacaaagagttctggagcagcataagctgactaaggaacagtgggaggagagaatacagaattggcatgaggagcacagaggaatgctgcgcgaggatagcatgatggagtatctgaagatagctcaagacctggaaatgtacggcgttaactacttcgaaatcaaaaataaaaaaggcacagaattgtggttgggtgtggatgccctcggtctcaacatatacgagcacgacgacaaactgacccctaagattggtttcccttggtccgaaattaggaacatcagtttcaacgacaaaaagttcgttattaagcccatcgataaaaaagctcctgatttcgtcttctatgctcctcgtttgcggatcaataagaggatcttagctctatgcatgggcaatcatgagctatatatgaggcgtaggaaacccgacactattgaagtccaacagatgaaggcccaagctagagaggagaaacatcagaaacaactcgagagagcccaactcgaaaatgaaaaaaagaaacgggagatcgctgagaaagagaaagaacgcatcgaacgtgaaaaggaagagctcatggagcgtttaaagcaaatagaagagcagacaatcaaggcacaaaaggagcttgaggaacagacgcgcaaagcactggagctggatcaagagcgtaaacgggctaaagaggaggccgaaagactcgagaaagagcggagagccgctgaagaggccaagtccgccatcgctaagcaagccgcagatcagatgaagaaccaagagcagctggccgctgagttagccgaattcaccgccaagatcgccttactggaggaagccaagaaaaaaaaggaagaggaagccactgagtggcagcataaggccttcgcggcacaggaagaccttgaaaagacaaaggaggaactgaagacagtgatgtcagctccacctcctccccctcctccgcctgtcattcccccaaccgaaaatgagcatgatgagcacgatgaaaacaacgccgaagccagtgcggagttgtcaaatgagggggtcatgaaccatcgcagcgaagaagaacgggtaactgaaacacagaaaaacgaacgcgttaaaaagcagcttcaagccctctcaagcgagcttgcccaggcccgtgacgagactaagaaaacccaaaatgatgtcctgcacgcagaaaacgtcaaagcgggtagggataagtacaaaacactgcgtcagatcaggcagggcaacaccaaacagcggattgatgagttcgaagcaatgtggggacccaaactgtacgcattgtttcagatgcgcagttgtcaatccagcattaaacagatgtag

SEQ ID NO: 30495 - DNA, 1020 bp, synthetic construct
  misc_feature 1..1020: note = Description of Artificial Sequence: Synthetic coding sequence
  source 1..1020: mol_type = other DNA
ccccaccccaagattaacgttagagtgacaacaatggacgcagaattggagttcgctatccagcccaacactaccggaaagcagctgtttgaccaggttgtgaagacagtgggtttgagggaggtatggtttttcgggctgcagtacgtcgattctaaaggttactcaacttggcttaaactgaataagaaggtgacccagcaggatgttaagaaggaaaatcccctccagttcaagttcagagccaaattctttccagaggacgttagcgaagagttgatccaagaaatcacccagaggctgttctttctgcaggttaaggaggccatactgaacgatgaaatatattgccctccagaaacagccgtgctattagcctcgtatgcagtgcaggcgaaatatggggattataataaagagatccacaagcctggctatctggctaatgaccggctcctcccccagagggtcctggaacaacacaaattaacgaaggaacaatgggaggagcgtatccagaattggcatgaagagcaccgtggcatgctcagggaagacagcatgatggagtacctgaaaatcgctcaggatctggaaatgtacggcgtgaactattttgaaataaagaataaaaaaggaaccgaactgtggcttggagtggatgcccttgggctgaatatttacgaacacgatgataagctgacaccaaaaatcgggttcccctggtctgaaatccgaaacataagttttaacgacaaaaagttcgtgataaaacctatcgataaaaaagcacccgactttgtcttttatgcccctcgactccggattaacaagcggattctggcactctgcatgggaaatcatgaattgtatatgcgacgccgtaaacctgatactattgaggtccagcagatgaaggctcaagccagagaagagaagcatcagaaacagttggagcgctcccgcctgagtaagatcaagaagaaaaagaggaagaagaagaaaaaaaagaagaagtag

SEQ ID NO: 30496 - DNA, 1815 bp, synthetic construct
  misc_feature 1..1815: note = Description of Artificial Sequence: Synthetic coding sequence
  source 1..1815: mol_type = other DNA
atgcctaaaccaattaacgttcgggtcaccaccatggatgccgagttagagttcgccattcaaccaaatactactggcaagcaactgttcgatcaagtcgtaaagacggtggggcttagagaagtatggttctttggactccagtacgtggattctaaaggatattcgacttggctgaaactcaataagaaggtcacccagcaagacgtcaagaaagaaaacccccttcaatttaagtttagggctaaattttttcctgaagacgtcagtgaagagctcattcaggagattactcaaaggctgtttttcttacaagtgaaagaagcgattctcaatgacgagatttattgtcctcccgagaccgcagtccttcttgcgtcatatgcagttcaagctaaatatggagattacaataaggaaatccacaaacctgggtatctggccaacgacaggctgcttccacagcgcgttctggagcaacataaacttaccaaagaacagtgggaggaacgcatccaaaattggcatgaagagcatcggggaatgctgcgcgaggacagcatgatggaatacctgaagatcgcccaggacttggagatgtacggcgttaactattttgagattaagaacaagaagggaactgaactgtggcttggggttgacgccctcggcttaaacatctacgaacacgatgacaagctaactcctaaaatcggatttccgtggagcgaaatccgtaacattagcttcaatgataagaagtttgtaattaagcctatcgacaagaaggcccctgattttgtgttttatgctccacgcctccgcatcaacaaacgtattctggctttgtgcatgggcaaccatgagctttacatgcggaggcggaaaccggatactatagaagtgcagcagatgaaggcacaggccagggaagagaaacaccaaaaacagcttgagagggcccagctggagaacgaaaagaaaaagagggaaattgcagagaaggaaaaggagagaatcgaaagagaaaaagaagagttgatggaaagactcaagcagatcgaggagcagacaattaaagcccagaaggaactggaggaacagacccgtaaggctctcgagttggaccaagaacggaaacgcgctaaagaagaggctgagagactcgaaaaggagaggagggctgctgaggaggccaagtctgccattgccaaacaggcagccgaccagatgaaaaatcaggaacagctggctgctgagctggcagagttcactgcgaagatcgccctcctggaggaggctaagaagaaaaaggaggaagaggctaccgagtggcaacacaaggcgttcgcagctcaggaagaccttgaaaagaccaaagaggaactcaaaaccgtgatgtctgcacctccccctcctccgcctccacctgtcatccctcccacagagaatgagcacgacgagcatgatgaaaataatgccgaggcgtctgcagaactgtcgaatgagggagttatgaaccacaggtccgaggaggaacgggtaacagagacgcaaaaaaacgagcgagttaagaagcagctgcaagccctgtcgtcagagctcgcccaggctcgagacgaaactaagaaaactcaaaatgatgtgctgcatgccgaaaacgtgaaggccggaagagataagtacaagaccttgcgacagattcggcaaggcaacaccaagcagcggattgacgagttcgaggctatgtggggccctaaactttacgccttattccagatgagatcctgccagagcagcatcaaacagatgtag

SEQ ID NO: 30497 - DNA, 774 bp, synthetic construct
  misc_feature 1..774: note = Description of Artificial Sequence: Synthetic coding sequence
  source 1..774: mol_type = other DNA
atggaacgcctcaaacagattgaagaacaaaccattaaggctcagaaggaacttgaggagcagacacgtaaggccctcgaactggatcaggaacgtaagcgggctaaagaggaggcagagcggcttgaaaaggaacggagggctgcagaggaggccaagtccgctatcgccaagcaggctgccgatcagatgaaaaaccaggaacaactcgccgcagaactggccgaatttaccgcaaaaatcgcactgctggaagaagctaagaaaaaaaaggaagaggaggcaaccgagtggcagcacaaagcttttgctgcacaggaagacttagaaaagaccaaggaggaactgaaaacggtgatgtcagctcctcctccacctccacccccacccgtgatcccacctacagagaacgagcacgatgaacatgacgagaataatgctgaagcctctgccgaactgtccaacgaaggagtgatgaatcaccgctccgaggaggaacgagttaccgagactcaaaaaaacgagcgcgttaagaaacaacttcaggctctcagctccgagctcgcccaggccagggatgaaaccaaaaagacgcagaatgacgtgctgcacgccgaaaatgtgaaagccggtcgggataagtataaaaccctccgccaaatcaggcagggaaacacaaagcagcgtatagatgaatttgaggcgatgtggggaccgaagctgtacgctctttttcaaatgaggtcatgccaatcttccattaaacagatgtag

SEQ ID NO: 30498 - DNA, 762 bp, synthetic construct
  misc_feature 1..762: note = Description of Artificial Sequence: Synthetic coding sequence
  source 1..762: mol_type = other DNA
ggaggcaggattgctcgtgcccacgagtttgaagccgcagtttcattctgcacgtcggcgtgggctacagagcgcgacccagtcagcaggaagcaaagagagctggaggagcagacaagaaaagccttggagctagaccaggagaggaaaagagccaaagaggaggccgagaggctggaaaaggagaggcgagcagccgaggaagcaaaaagtgccatcgccaagcaagctgcagaccaaatgaagaaccaggaacagctagcagccgagctcgccgagtttaccgcaaagatcgcccttcttgaagaggccaagaaaaaaaaggaagaagaggctacagagtggcagcataaggcttttgctgcacaggaggacctcgaaaaaacaaaggaggagttgaaaacagtgatgtctgcgcctccacctccaccacccccacctgttatccctcctactgagaacgaacacgacgagcatgacgaaaacaacgcagaggcctccgccgagttatcaaacgagggagtgatgaaccaccgctccgaagaggagagagtcactgagacccaaaaaaacgaacgcgttaagaagcagctgcaggccctcagttccgaactggcccaagcacgggatgagactaaaaagacccaaaacgatgtacttcatgccgagaatgtgaaggcaggcagagacaagtataagacactgcgtcagataagacagggtaacaccaaacaacggatcgacgaattcgaggcaatgtag

SEQ ID NO: 30499 - DNA, 603 bp, synthetic construct
  misc_feature 1..603: note = Description of Artificial Sequence: Synthetic coding sequence
  source 1..603: mol_type = other DNA
atgcctaagcccataaatgtacgagtgaccaccatggatgcggagctggaattcgcaatacagcccaatacaacaggcaaacagctctttgatcaggtgactcagcaggacgtaaagaaggagaatcccctgcaattcaaatttcgtgcaaaattctttcctgaagacgtgtctgaggagctcatccaagagatcactcagcgcctctttttcttgcaggtaaaggaggcaattttgaatgatgaaatctactgccctcccgagaccgctgtgctgctggctagttacgcagtgcaggccaaatacggtgattacaataaagaaatccataaaccaggttacctggccaatgatcggctgcttccccagcgggttcttgagcaacataaattgacaaaagagcaggatgagactaagaaaacacaaaatgatgtactccacgcagaaaatgttaaggcgggaagggacaaatataaaactctgcgccagatccggcagggaaatactaaacagagaattgacgaattcgaggccatgtggggccctaagctctacgcactgttccagatgaggtcatgtcagagctccattaaacaaatgtag

SEQ ID NO: 30500 - DNA, 1815 bp, synthetic construct
  misc_feature 1..1815: note = Description of Artificial Sequence: Synthetic coding sequence
  source 1..1815: mol_type = other DNA
atgccaaaacccataaatgttcgggtgacaaccatggacgcagaacttgagtttgctattcaaccaaacactaccggcaagcagttgttcgaccaggtggtcaagaccgttggcttgagggaagtgtggttcttcggtctgcagtatgttgacagcaagggctatagcacgtggctcaagttgaacaagaaggtgacacagcaggacgttaagaaggagaatcccttgcaattcaagtttagagccaaattcttcccagaagatgtgtcggaggaacttattcaggaaattacccaacgtcttttcttcctccaggttaaagaagctattctcaacgatgaaatctattgccccccagaaaccgctgtacttttggccagctacgctgtgcaggccaagtacggcgattataacaaagagatacataagcctggttatcttgcgaatgatcggctgttaccccaacgcgttttagaacaacacaaactcacgaaagaacagtgggaggagcgaattcagaactggcacgaagagcataggggcatgcttagagaagatagcatgatggagtatttgaagattgcacaagacctggagatgtatggcgtgaattactttgagattaaaaacaagaagggcactgaactgtggctcggcgtggatgcactagggttaaatatctacgaacatgatgataagttaactccaaagatcggctttccctggagcgaaatcagaaacatatctttcaatgacaagaagttcgtcatcaaacccatcgacaagaaagctcccgactttgtgttctacgctcccaggctaagaatcaataaacgtatccttgccctttgcatgggaaaccacgagctgtacatgagacgccgaaagcccgacactatcgaggttcagcagatgaaggctcaggccagggaggaaaagcaccaaaagcagctcgaaagagcccagttggagaatgaaaaaaagaaaagggaaatcgccgagaaagagaaggaacgtattgagcgtgaaaaggaagagctaatggaacgcctaaaacagattgaggaacaaacgattaaggcacaaaaggagctcgaggagcagaccaggaaggccctggaacttgatcaggagaggaaacgggctaaggaggaggcggagcggctggagaaagaaagaagggctgccgaggaagcaaaatctgccattgctaagcaggcagcagatcaaatgaaaaatcaggagcagctggccgctgaactggccgagtttacggcaaagatcgcacttctggaggaggccaaaaagaagaaggaggaagaggcaacagagtggcagcacaaagctttcgcagcccaggaagaccttgagaaaacaaaggaggaactgaaaactgtgatgagtgccccaccaccgcctcctccaccacccgtgatcccacccacagaaaatgaacacgacgaacacgatgaaaataatgccgaagcttctgcggagttatctaatgaaggcgtgatgaaccaccgctcagaggaagagcgggtgacggagacccaaaagaacgagcgggttaagaaacagctgcaagctctgtcatccgaactcgcccaagcacgagatgaaacaaagaagactcaaaacgacgtgctgcacgctgaaaatgtaaaagctggcagggataagtacaagaccttgcgacagatccggcaaggtaatactaagcagaggatagacgagttcgaagcaatgtgggggccaaagctttacgccttattccagatgaggagttgtcagagctctattaagcagatgtag

SEQ ID NO: 30501 - DNA, 1344 bp, synthetic construct
  misc_feature 1..1344: note = Description of Artificial Sequence: Synthetic coding sequence
  source 1..1344: mol_type = other DNA
atgctgtcatggaaccttcccttctcacccattcagctggcaaataattttctgacgtcggtgctggaacagcataagttaactaaggaacaatgggaggaaaggatccagaattggcacgaagagcataggggaatgctaagagaagattcgatgatggaatacctcaagatcgcccaagatttggagatgtacggtgtgaattacttcgagatcaaaaataaaaaggggacagagttgtggttgggtgtcgacgctctgggcctgaacatctacgaacatgacgacaagcttacacctaagatagggtttccttggtcagagatccgtaatatctcattcaatgataaaaaattcgtgatcaagcccatcgacaagaaggccccagatttcgttttttacgcacctaggctccggatcaacaaacgcatattagctctctgcatgggaaatcacgaactttacatgcgacgaagaaagccagatactatagaggtgcagcaaatgaaggcccaggccagagaggaaaagcaccagaaacagctcgaaagagcccagcttgagaacgagaaaaaaaaacgcgagattgctgagaaggagaaggaacgaattgagcgagaaaaggaggagctgatggaacgattgaagcaaatcgaggagcaaactataaaagcgcaaaaggagctagaagagcaaaccagaaaggcactggagctggaccaggaacgcaagcgcgcaaaggaagaggcagagcggctggagaaagagcggagagctgctgaagaggccaaatcagcaattgctaagcaggcagccgaccagatgaagaaccaggagcagctggcagccgaattggccgagttcactgccaaaattgcactgctggaagaagccaagaaaaaaaaggaagaggaagctaccgagtggcaacataaagcctttgcagctcaagaagacctcgagaaaaccaaagaggaactaaagaccgttatgagcgctccccctccccctccgccaccccctgttataccccctaccgaaaatgagcatgacgaacatgacgagaataacgctgaagcttccgctgagctgtccaatgaaggagttatgaaccacaggagcgaggaagaacgagtgaccgaaacacagaaaaacgaaagggtaaagaaacagctgcaggccttgtcatcagaactagcccaggccagagatgaaacaaaaaagacccaaaacgacgtgcttcatgccgaaaatgttaaagcaggccgtgacaaatataaaactttgcgtcagatcagacaagggaacaccaagcagaggatagacgagttcgaagccatgtag

SEQ ID NO: 30502 - DNA, 3234 bp, synthetic construct
  misc_feature 1..3234: note = Description of Artificial Sequence: Synthetic coding sequence
  source 1..3234: mol_type = other DNA
atggataccgactctcagcgcagccacctgagctctttcactatgaaactgatggataaattccatagtccaaagatcaagcgcactcctagtaaaaaggggaagcctgccgaggtatccgtcaaaatccctgagaagccagtgaacaaagaagccactgaccgcttcctgccagaggggtatcccctgcctctcgaccttgaacagcaggctgtggaattcatgtcaacctccgccgtggcctcaagatcccagagacagaaaaacctctcatggctggaggagaaggagaaagaggttgttagtgctctcaggtattttaaaactatcgtggacaagatggcaatcgataagaaagtactagagatgctgcccggatctgctagtaaagttctagaagccatccttcccctcgtgcaaaacgatcctcggattcaacatagttctgcccttagctcctgttactccagggtctaccagtctctggccaacctgataagatggagcgaccaggttatgctcgagggcgtgaattcagaagataaagagatggttactaccgtgaaaggagtaatcaaggctgtacttgacggcgtcaaggaactcgtccgtctcaccatcgaaaagcaaggtaggccttcacctacatcccccgtaaaaccttctagtcccgcttcaaagcctgacggtcccgctgagttacccctgacagaccgcgaggtagagattctcaacaagaccacaggcatgagccaatccacagaattactgcccgacgccaccgacgaagaggtggccccacccaaaccaccgctgcccggaatccgcgtcgtggacaattcccccccacctgccctcccaccaaagaagcgccagtcagctccatcacctactcgtgtcgccgtggtcgcaccgatgtctagagccacgagtgggagcagcctgccggttggaatcaaccgtcaggactttgacgtggattgttacgcccagagacgactgtccggcggttcacactcttacggcggtgaatcccctcggctttctccatgttcctcaatcgggaaattgagcaagtccgatgaacagctcagttctttagacagggattctggacaatgttcgagaaatacttcatgcgagaccctcgaccattacgatcccgattacgagtttttgcaacaagatctgagtaatgcagaccagattccgcagcagacagcttggaatctgagtcctctgccagagagcctgggggagagcggttctccgttcctgggtccacccttccagctgcctctcggtggccaccctcaaccagatggcccactggcaccaggccagcagaccgacacacccccagccctccccgaaaagaagcgcaggtcagctgcatcacagaccgctgatggttcaggatgcagagtatcatacgagagacaccccagccagtatgataacattagcggagaggacttgcagagcacagctcccatccccagcgtgccctacgcacctttcgcggctattctgccttttcagcacgggggatcatcagctccggtagaatttgtcggtgacttcaccgcccctgaaagcaccggcgatccagagaagcccccaccactgcccgagaaaaaaaacaaacacatgctcgcctatatgcagcttctggaggattactccgagcctcaaccaagtatgttttaccagacgccccagaatgagcatatctaccagcagaagaataagctcttaatggaggtctacggcttcagtgacagctttagcggagttgactcggtgcaggagttagcgcctccaccagccctgccgcctaagcaacgccagctggagccacctgcagggaaggatgggcatccaagagacccaagtgcagttagtggagtgcccggaaaggactcccgagatggctctgagcgagctccaaaaagcccagacgccctcgaaagtgctcagtccgaggaagaggtggatgagctgagcttgatcgaccataacgagatcatgtctaggctcaccttgaagcaggagggcgatgacggccctgatgtgcgcggaggtagtggggatattcttctggtccacgcaaccgagaccgatcgcaaagaccttgtcctgtattgcgaagccttcctgacgacctaccgtacttttatttccccagaagaacttatcaagaaactgcagtatcggtatgaaaaattttcccccttcgccgatacattcaagaagcgcgtctcaaagaacacatttttcgttctggtgcgagtggtagacgaactctgcctggtggaattaacggaagaaatcttaaaactgttgatggaactcgtgtttcgattggtgtgcaatggcgagctaagcctggcccgagtcctgagaaagaacattctggataaagtcgaccaaaagaagctgctccggtgcgctacttcctctcagcctctcgcggctcggggagttgccgctcgccctgggacacttcatgattttcactctcacgaaatagcagagcagcttactctgctcgatgccgagctgttctataaaattgagatacctgaggttctgctttgggctaaggaacagaatgaggagaaatccccaaacctaactcaattcactgaacactttaataatatgtcttactgggtccggagcatcattatgcttcaggagaaagctcaggatagggagcggctgttactaaagttcataaaaattatgaaacatctgcggaagctgaataactttaacagctacctggctatcttaagcgcactggattcggccccaatccggaggctcgaatggcagaagcagaccagtgagggactggccgaatactgcacactgatagactcttcgtcatctttccgggcttacagagctgctctcagcgaggttgagccaccatgcattccttaccttggactgatcctacaagacctgacattcgtccatctgggcaaccccgattatatcgatggcaaagtaaacttctccaagaggtggcagcaattcaacattttggattcaatgcgttgttttcaacaagctcactatgacatgaggaggaatgacgacatcatcaatttcttcaacgatttttcagaccacctggctgaggaggccctgtgggaactgagtctgaagatcaaaccccgtaatataaccaggcgaaagactgaccgcgaggaaaagacctag

SEQ ID NO: 30503 - DNA, 3168 bp, synthetic construct
  misc_feature 1..3168: note = Description of Artificial Sequence: Synthetic coding sequence
  source 1..3168: mol_type = other DNA
atgtcaacaagcgccgtggcaagtagaagtcaaagacaaaagaacctctcttggctggaggagaaggagaaagaagttgtcagcgctttgcggtactttaaaaccatagtcgacaagatggccatcgataaaaaggtcctcgaaatgctaccaggttcagctagcaaagtcctggaggccattctccccttagtgcagaatgatcctcgcattcagcactccagcgcccttagcagttgctacagcagggtttatcaaagcctggcaaacttaatacggtggagtgaccaggttatgctggagggcgtgaatagtgaagataaggagatggtgactaccgtgaaaggggtgattaaagccgtgcttgacggcgtcaaggagctcgtgcgtctgaccattgagaagcagggccgtccctctcccacctctccagtgaaaccttcatcacctgcgagcaagcccgacggcccagccgagctaccactcacagatcgagaggtggaaatccttaacaaaactaccggaatgtcacagtccactgagctactccctgatgctacggatgaggaagtcgcacccccaaagccgccattgcccggtattcgtgtagtggacaattctccacccccagccctgcctcccaagaaacgccaaagcgcaccctcaccaacaagagtggcagttgttgccccaatgagccgggctaccagcggatcctccctgcctgtagggattaataggcaagattttgacgtggactgctatgcccagcgccgtctttcaggaggctctcactcttatggaggcgaaagccctcgcctgagcccatgctcaagtatcggcaaacttagcaaatcggatgagcagctgagttcactcgaccgcgatagcggccagtgtagtcggaacacttcttgtgagactttggatcattacgacccagactacgaattccttcagcaggatctgagtaatgctgatcagatcccacagcagactgcttggaatctgagccctctgccagaatcccttggagaaagcgggagccccttcttgggccctcccttccagcttcctttaggaggacacccccagccagatggtcccctggcgccaggacagcagaccgatacccccccagccctgcctgaaaaaaaaaggcgcagcgccgcatcccagacagccgatggtagcggctgtcgagtctcatacgagcgccacccaagtcagtacgataacatcagtggcgaggacctgcagtcaacggcgcctatcccgtctgttccatacgcccctttcgctgcaatcctgcctttccagcacggaggctcttctgctcccgtcgagtttgtgggcgacttcacggcgcctgagtctacaggggatcctgaaaaaccacctccccttccggaaaaaaagaacaaacacatgctggcatacatgcagctgttggaagactatagtgagccgcagccaagcatgttttatcagaccccgcagaacgagcatatataccagcagaaaaataagttgctcatggaggtgtatggcttttccgactctttttccggggtcgacagcgtgcaggagctggccccacctcctgcattgccaccaaagcagcggcagttggcttcatgtgccgcttcctccttctcctcagttagccattgtgtacagcagactaaggtagctttcacccccgaggacggatctgccgctcagggactttccgtttccgtcagcaattcattcctcagtcggcatggttctctccccgtaccgagtgagcccccagccggaaaggatggacacccacgggacccctccgcggttagcggtgtgcctggaaaagactccagagacggcagcgaacgcgctccgaagtctcctgatgcattggagtcggcacagagcgaagaagaggtcgacgagctgtccctcatcgatcacaatgaaattatgagtcggctcaccctgaagcaggaaggcgacgacggtcctgacgtacgcggaggctctggtgacatcctactcgtacatgccaccgagactgacaggaaagacttggtactgtattgtgaggccttccttaccacgtacagaacattcatttcacctgaagaactaataaagaagttgcagtataggtacgagaaattttccccatttgccgacacctttaagaagcgtgtaagtaaaaataccttttttgtgttggtgcgggtggtggatgaattgtgcctggtagagctcaccgaggaaatcctgaaactcttgatggagctggtgttcaggttggtgtgtaacggggagctgtctttagcccgagtattaagaaaaaatatcctggacaaagtggaccagaaaaaactactgagatgcgctacatcctcacagcccctcgccgcaagaggggtggcagctaggcccggtactttacatgatttccacagccacgagatcgccgaacagctgacacttctagatgccgagctgttttataaaatagaaattcccgaagtcttactctgggcaaaggaacaaaacgaagagaaatctcccaatctgacccaattcactgaacacttcaataatatgtcttactgggttagatcgatcatcatgctgcaagaaaaagcccaggaccgcgagagactcctgctgaaattcatcaaaatcatgaagcacctgaggaaattaaataactttaattcctacctcgctattctctccgctctggactccgctcccatcagacgccttgagtggcagaagcagaccagcgagggtcttgcggaatactgcacactgatcgacagttcctccagtttcagagcctatcgcgcagccttaagcgaggtcgaacctccatgcatcccctatcttggattgatccttcaggatctgacttttgtgcatttgggcaatccagattacatcgacgggaaagtgaacttcagcaagagatggcagcaatttaatatcctggattccatgaggtgtttccaacaggcccattacgatatgagacggaacgacgacattatcaattttttcaatgatttttccgatcatctagcagaggaggccctgtgggagctcagcctcaagattaaaccccgaaacatcacgcgcaggaagaccgatcgcgaggaaaagacctag

SEQ ID NO: 30504 - DNA, 3285 bp, synthetic construct
  misc_feature 1..3285: note = Description of Artificial Sequence: Synthetic coding sequence
  source 1..3285: mol_type = other DNA
atgtccggcggactggggctccggaggagccctgagatgtcaggaaaaatcgagaaagcggactcacagcgctcccacctctccagcttcaccatgaagctaatggataaatttcatagcccaaagataaagcgtaccccctccaagaagggcaagccagccgaagtgagcgtgaaaattcctgagaagccagtgaataaggaggcaacggatagattcctcccagaggggtacccactgccgcttgacttggaacagcaggccgtggaatttatgagcacttccgcagtggccagccgcagccaaaggcagaaaaacctgtcctggctggaggaaaaagaaaaggaagtggtttccgctctacggtactttaaaactatcgtggacaaaatggctatagataagaaggtcttggagatgttgccagggtcagcatccaaggtgcttgaagccatcctccccctggtccagaacgatccaagaatccagcattctagtgcccttagctcgtgctactccagggtgtaccagagtctggcaaacctgattagatggtctgatcaggtgatgctggaaggagtgaatagcgaggacaaggaaatggtaactaccgtaaaaggggtgattaaggctgttctggatggagttaaagagctcgtgcggttaacaattgaaaagcaagggagacctagtccaaccagtccagtgaaaccgtcaagccccgcatctaagccagatggacccgcagagcttccactgacagatcgcgaggtcgaaatcttgaataagacaactgggatgtcacagtcgaccgagctcctgcctgacgctactgacgaggaggtcgcaccgcctaaaccccctctgccgggaattcgcgtggtcgataatagccccccaccagcactgcctcctaagaagcggcagtcggctccatccccgacgcgggtggcagtggtcgctcccatgtcacgggcaacatccgggtctagtctgccagttggtataaataggcaggacttcgacgtagactgttatgcacagagaagactgtccggcggatcccactcgtacggaggcgaaagcccacgcctaagtccgtgtagctctattggcaaactgagcaagtcagatgagcagctgtccagtctggaccgagattctggacaatgtagccggaacacttcttgtgagactttggaccactatgatccggattacgaattcctgcaacaggatctctcaaacgcagatcagatcccgcagcagaccgcctggaacctgtcacctctgcccgaatccctaggggaatccggaagccccttcctcggaccacccttccagctacctctgggtggacatccccaaccagacggtcccctggcaccgggtcagcagacagacactcccccagcactccctgaaaaaaagcgcagaagcgcagcatcacagactgccgatggatccggctgccgcgtttcgtatgagcggcacccctcccagtacgataacatcagcggggaagaccttcagtccactgctcctatcccatctgtgccctacgcaccctttgccgctatccttccatttcaacacgggggtagcagtgcacccgtcgaatttgtcggggattttactgcgccagaatcaacaggcgacccagaaaaaccaccccctctcccggaaaaaaaaaacaagcatatgcttgcgtatatgcaactgcttgaggactactcggagcctcagccctctatgttctaccaaacaccccagaacgaacacatttaccagcagaagaataaactgctaatggaggtttacgggttctctgatagctttagtggagtggacagcgtccaagaactggccccaccgccagcccttccgcctaaacaaagacagctagagccacccgcaggcaaggatggtcaccccagagacccctccgccgtcagtggtgttcccggtaaggacagccgagacggctcagagagagctccaaaaagtcccgacgctctcgagagcgctcagagtgaggaagaagtggatgagctctcactcatagaccacaacgaaatcatgagcaggctgacccttaaacaggagggcgacgatggacccgacgtgcggggtggcagcggggacatcttgctggtgcatgccacggagactgacaggaaagaccttgtgctctattgcgaagcctttctcacaacgtataggaccttcatctcccccgaagagctgatcaaaaagctccagtacagatatgagaaattctcacccttcgctgatacatttaagaaaagggtatcaaaaaatacattctttgtgcttgtgcgagtggtggacgagctgtgccttgtggaactcacagaggaaatactgaagcttctgatggaacttgtgttcaggttagtttgcaatggagagctctccttggcaagagtcctccggaagaatatactggacaaggttgaccagaagaagttgctaaggtgtgcaacgagctcccagcccttggccgcacggggagtcgccgcacggcctggaacactgcacgattttcacagccacgagattgcagagcagctgaccttgctggacgctgaactgttttataagattgagatcccggaagttctactatgggccaaggagcagaacgaggaaaaatctcctaaccttactcagttcaccgaacattttaataacatgtcctactgggtaaggtccattatcatgttgcaggagaaagcccaggatcgggagcgcctcctgctgaaattcattaaaattatgaaacatctgaggaagctgaataacttcaattcttatcttgccatactcagcgccctggactccgctccaattagaaggctcgaatggcaaaagcaaacatcagagggcctggcggaatattgcacactgattgattcaagtagtagcttcagagcgtaccgcgctgcactctccgaggtggagcctccttgtatcccctaccttgggctcatcctgcaagatctgacttttgtacacctgggaaaccctgattacattgacggaaaggttaatttttccaagcgctggcagcagttcaatattttagacagcatgaggtgctttcagcaagcccactatgatatgaggcggaatgatgacattatcaattttttcaacgatttcagcgaccatctcgcagaagaagcgctgtgggagttatcacttaaaataaaaccacggaatatcacgcgtcggaaaacagacagggaggaaaaaacctag

SEQ ID NO: 30505 - DNA, 3234 bp, synthetic construct
  misc_feature 1..3234: note = Description of Artificial Sequence: Synthetic coding sequence
  source 1..3234: mol_type = other DNA
atggataccgactctcagcgaagccacctctcctctttcaccatgaagttgatggataaatttcacagtcctaagatcaagcggaccccttctaaaaaaggaaaacccgcagaggtttctgtgaaaattcccgagaaacccgtgaacaaagaagccactgacagattcttgcctgaaggttacccactgcctttggacctggaacagcaggccgtagagttcatgagcacaagcgctgtggcgtcaagaagccagaggcagaagaatttgagttggttagaggaaaaagagaaagaagtagtatctgctctccgatatttcaagactattgtcgacaaaatggctattgataagaaggtgctagagatgctgcctggcagtgctagcaaggttctggaagcgatcctgcctcttgtccagaatgacccacgcattcaacactcctcggcgctatcttcttgctattcccgggtgtaccaatctctggcgaatctgataagatggtccgaccaggtgatgttggagggcgtgaactccgaggataaagagatggtaacaacagtcaaaggcgtgatcaaagcggtgctggatggcgtcaaggagctagtacggctgaccatcgaaaaacagggaagaccatcgcccacatcccctgtgaaaccatcatctccggcttccaaaccagatggtccagcagaactccccctgacagaccgtgaagtggagattctaaataagaccaccggcatgtcgcagtccacggagctgctacccgacgccaccgatgaggaagtggctccgccaaaaccccctctgcccggaataagggtggtggataatagtccacccccagctctgcctcccaaaaagaggcagtccgctccctcccctacccgagttgctgttgtcgccccaatgtcccgagcaaccagcggatctagcctgccagtgggaataaatcgccaggacttcgacgtagattgctacgcacagcgtcgcctcagcggcggatcccacagctatggaggcgagtcgccacggctctcaccctgcagttctatcgggaaactcagcaaatctgatgagcagctgtcaagtttagatcgggactccggacaatgttctcgaaacacctcctgcgagacactggatcactacgatccagattacgagtttctgcagcaagatctgtcgaatgctgatcagatcccacaacagactgcatggaacttatctccccttcctgaatcactgggtgagtccggctccccctttcttggacccccttttcagctgcctctgggaggtcaccctcagcccgacggacccctcgccccaggacagcagaccgacacccccccagcccttccagaaaagaagaggcgctcggccgcttcccaaaccgccgacggctctggatgcagagtctcttacgagcggcacccctctcagtacgacaatattagcggggaggacctgcagtcgacagcccctattccaagtgtcccctatgcaccttttgccgctatccttccttttcagcatggcggatcctccgcaccggtggaattcgtgggcgactttacggcgccagagtcaaccggggatccagaaaagccaccgcctcttcctgaaaaaaaaaacaaacatatgctggcctatatgcagctcctggaagactacagcgagccccaaccctccatgttctaccagacacctcagaacgaacatatataccagcaaaagaacaaactactgatggaagtctacggtttctccgatagtttctcaggcgtggacagtgtgcaggagcttgccccacctcccgctcttccgcctaagcaacggcagctcgagcctcccgctggcaaggatggccacccccgagacccatctgctgtcagcggtgtgcccggtaaagactccagggatggctccgaacgtgcaccaaagtcgcccgacgcgctcgaatcagcgcagagtgaggaggaagtggatgagttgtcccttatcgaccataatgaaattatgagccgtttgacattgaaacaagagggcgacgacgggcctgacgtccggggaggttcaggtgatatcctgttggtgcacgctactgaaactgaccggaaagacctcgtgctgtactgtgaggcattcttgacaacctatcgtacttttatctcgcccgaagaactgatcaagaaactgcaatatcggtatgaaaagttctcaccatttgccgacaccttcaaaaaaagagttagcaagaatacattcttcgtgctggtacgagtggttgacgaactgtgcctggtcgaactcactgaagagattctgaaactcttgatggaactggtgtttcgcctggtatgcaacggtgagttgagtctcgcccgagtgctcaggaagaatatacttgacaaggttgaccagaagaagctgctccgctgcgccacaagctcccaaccactagctgctcgcggagtggctgccagacctggcacactacacgatttccacagccacgaaattgccgagcagctaactttgctcgacgccgagctattctacaaaatagaaatacctgaggtcctgctctgggctaaggagcagaacgaagagaagtcccccaatttgactcagtttaccgagcattttaacaatatgtcctattgggtgcggtccatcattatgctccaagagaaagctcaggaccgagagcgtcttctgctaaaatttatcaagattatgaagcacctgcgcaaactcaacaacttcaattcctatttggcaatcctcagcgctctggattcagctcctattcggagattggagtggcagaagcagacgagcgaaggattagctgagtactgtacattgatcgattccagcagcagctttcgtgcttatcgcgctgcattgtctgaggttgagcctccctgcatcccgtaccttggacttattttgcaggaccttaccttcgtgcaccttgggaatccagattatattgatggtaaagtgaactttagtaagcgctggcaacagttcaacatactggattcaatgaggtgcttccagcaggctcactacgatatgcggagaaatgacgacatcataaactttttcaacgattttagtgaccatctggccgaggaggccttgtgggaactgagtctgaagatcaagcccaggaacataacacgtaggaagactgatagggaggagaagacttag

SEQ ID NO: 30506 - DNA, 3288 bp, synthetic construct
  misc_feature 1..3288: note = Description of Artificial Sequence: Synthetic coding sequence
  source 1..3288: mol_type = other DNA
atgggcaacgccatagagaaacagaagcctctaaaacgctcacacttatatccctggaaacaggactcccagcggtcacacctgtctagtttcacaatgaagcttatggacaagttccacagccccaagatcaaaagaactccctccaaaaaaggaaaaccagcagaggtgtcagttaagataccagagaaacctgtaaacaaggaagccacggacagattcctgcccgagggataccccctgcccttggatctggagcagcaggcagtggaattcatgagtacatccgcagtggcctcaagaagccagcggcagaagaatctgtcatggctggaggagaaagagaaggaggtcgtgagtgccctcaggtactttaagaccatagtggacaagatggcaattgacaagaaagttctcgagatgctacctggaagcgccagtaaggttctggaggccattttgcctctggtgcagaatgatcccagaatacagcactcctccgccctctcaagctgctatagcagagtctaccagtccctggcaaacctcatccgatggagcgatcaggtgatgctcgaaggcgtgaactctgaggacaaagagatggtgacaacagtgaagggcgtaataaaggccgttctggacggagtgaaagagctggtccggctgaccattgagaagcagggtcggccatcccccacaagcccagtgaaaccatcgtcgcccgcatccaaacccgacggcccagccgagttgccacttacagatcgcgaagtggaaattctgaataagacaaccgggatgtcacagtccaccgagctgctgcccgatgccactgatgaagaagtggcacctccaaagcccccattacctggcatcagagtcgtggataactcccctccacccgcactgcccccaaaaaagagacagagcgcgccttcgcctacccgggtggcggttgtggccccaatgtcccgcgctaccagcggaagctccctgccagtcggcattaatcgtcaggactttgacgtcgactgttacgcccagcggcgattgagcggcggatcacattcttatgggggagagagcccccgactttccccttgtagcagcatcggtaagttatcgaaaagcgatgaacagctatccagtctggatcgagattccggacagtgctccagaaatacttcatgtgaaactctggatcactacgatcctgattatgagttccttcagcaagatcttagcaatgctgaccaaatacctcagcagaccgcctggaatctcagccccctcccagagagtctgggtgagagcggatcgcctttcctgggcccaccatttcaactgcctttaggtgggcatcctcagccagatggcccactggccccaggacagcagaccgacacacctcccgctctacccgagaagaagcggaggtcagcggcttctcagacggcagatggatccggttgtagagtgagttacgagagacatccgtcacagtatgacaatatctcgggggaagacctccaatctactgcccctattccctcggtgccctacgcacccttcgccgctatcctgccttttcagcatggcggatccagcgcacctgtggagtttgtcggagatttcaccgccccagaaagcactggcgaccccgagaagccccctcctctcccagagaagaagaacaagcacatgcttgcctacatgcagctcttagaggactactcagaacctcagccatctatgttttatcagacacctcaaaacgagcatatatatcaacagaagaacaaattgctgatggaagtgtacggtttcagcgatagtttttccggggtggactctgtacaggaattagcaccgcctccagccctgccgcctaagcagcgccagctggagcccccagccggaaaagacggacacccacgcgatcccagtgcggtctccggagtgcccggaaaggatagcagagatgggagtgagagagcacccaagtcacctgacgccctcgaaagtgcacagagcgaggaggaggtggatgaactgagtctcatagaccataacgagattatgtcacgcctgactcttaagcaggaaggggacgatggccctgatgtcagaggtggatcaggagatatcttgctggtccacgccaccgagaccgaccgtaaggatctcgtactctactgtgaggccttcctcaccacatacagaacatttatctccccggaagagttgataaaaaagctccaatacaggtacgagaaattttctcctttcgccgataccttcaaaaagcgggtcagcaagaacaccttcttcgtgttagttcgcgtcgtagatgaactgtgtttggtcgagttaactgaggagatattaaagttactgatggagctcgtgttccggttagtttgcaacggagagctgagtctcgctcgagtattacgcaagaatattctagataaagtggatcaaaaaaagctgttgagatgcgctaccagtagtcagccccttgccgcaagaggggtagcggctagaccagggacattacacgattttcatagccacgaaattgctgagcagttgaccttgctggacgccgaactgttttataaaattgaaatacccgaggtacttttatgggctaaagaacaaaatgaggaaaaaagccccaacttaacgcagttcacagaacatttcaataacatgagctactgggttagatctataattatgttacaagagaaggctcaggatagggaacggctgctgctcaaattcatcaagatcatgaagcatctgagaaaattgaacaacttcaactcgtaccttgcaattctgagcgcactggacagcgcccctattaggcgcttagagtggcagaagcagacctccgaaggattagctgagtactgcaccttgattgattcctcgagctcttttcgagcttatagagcagctctatccgaagttgagcccccttgcatcccatatctggggttgatcctgcaagatctcacatttgttcacttgggcaaccccgactatattgatggcaaagttaatttctccaaaaggtggcagcagtttaatatccttgactccatgcggtgttttcaacaagctcactatgacatgcggaggaacgatgatattatcaacttctttaacgatttttcagaccatctcgcagaggaggccctgtgggaactctccctgaagatcaaacctagaaacatcactcgtcggaagaccgatagggaagagaagacctag

SEQ ID NO: 30507 - DNA, 1395 bp, synthetic construct
  misc_feature 1..1395: note = Description of Artificial Sequence: Synthetic coding sequence
  source 1..1395: mol_type = other DNA
atgagtagggctacatctggctcctctctgcccgtcgggattaaccgacaagatttcgatgtcgattgctacgctcagcggcgactctcggggggatcacacagttacggcggtgagagcccaagactaagtccctgcagttctattggcaagcttagtaagtcggacgaacagctgagtagcctggatagagactctggccagtgtagccgcaatacatcttgcgagactctggaccactatgaccccgactatgagtttctgcagcaggacttgtccaacgcagatcagatcccgcagcagaccgcatggaatttgtctcctttacccgagtcattaggggaaagtggatcgcccttccttggcccacctttccagctgcctcttggcggtcatccccagcctgacggcccactcgcccctggacaacagactgacactcccccagccctgcccgagaagaagagaaggtctgctgctagccagactgccgacggatccggctgcagagtttcatatgaacgccatcccagccaatatgacaatattagcggggaggaccttcagagtactgctccaataccatccgtgccctatgccccattcgctgctatcctccctttccaacatggtggctcaagtgccccagttgaattcgttggtgacttcactgcaccagagtctaccggagacccagagaagcctcctcccctgccagagaagaagaataaacatatgcttgcttatatgcagttgctggaggattactccgagccacagcccagtatgttttaccaaacaccccagaacgagcatatataccaacaaaagaacaaactcctgatggaggtctacggattcagtgatagcttcagcggggttgactctgtgcaagaactcgcccctcccccagccttaccccctaaacagaggcagctgcaagcgagctgtgctgcttcttctttctctagcgtgagtcactgtgtgcagcagacgaaggtcgccttcaccccagaggacggaagcgcagctcaagggctttcagtgtccgtgtctaactcattcctttctcggcacgggagcctgccggtgccttcctacaagtctgtttttcgcagctacagtcaagacttcgtgccacatcatcaagcttcggtgcctcctttcctaccccctacgagttcttcatcccctcacttccctcccgcacaccagagtcagagctctgatttggccgttcccactatggcgggtccccctcctagcaccgttgatgggcctcttagtgcatcccaagagtcctcattccatggcaatacagtctgcctgccatccgagacaagttttacggatagcgaacccccagcaggcaaggacggacacccacgggactag

SEQ ID NO: 30508 - DNA, 3285 bp, synthetic construct
  misc_feature 1..3285: note = Description of Artificial Sequence: Synthetic coding sequence
  source 1..3285: mol_type = other DNA
atgagcgggggactaggcctgagacggtctcccgagatgagtggcaaaattgaaaaggcagactcccagcggtcacacctgtcatcattcactatgaaactgatggacaagttccattcacccaagatcaagaggaccccctccaagaaagggaaaccggcagaagttagcgtgaagatcccagagaaaccagtgaacaaagaagccacagaccggtttctcccggaaggctatcccctgccccttgacttggagcagcaagcggtcgagtttatgtcaacaagcgctgtggcgtccaggtcccagaggcaaaagaacctgtcttggcttgaggaaaaggaaaaggaggtggtgtcagcccttaggtacttcaagacgatcgtggacaagatggccatcgacaaaaaggtgcttgaaatgctgccaggaagtgcttcaaaagtactggaggccattctgccactggttcagaatgaccctcgtatacagcacagcagtgctctctccagttgctactctcgcgtgtaccagtctttggccaatctgattcgctggtcggatcaagtgatgctggaaggtgtgaacagtgaggacaaggaaatggtgaccacagtgaaaggagtgatcaaggcagtgctcgacggcgtcaaagagcttgtgcgcctaactatcgagaagcagggcagaccgtcacctacctcccctgtcaagccttccagcccagcgtcaaaacccgatggacctgccgagctaccgctcaccgaccgagaggttgaaatattgaacaaaaccacagggatgagtcaatctactgagctgctacctgacgctaccgacgaagaggttgcgccacctaagccacctctccctgggatccgggtggtggataactcccctcctccggctctgcccccaaaaaaaaggcagagtgcgccatcccctactagagtagcagtagtggcacccatgtcacgagctacctctggttcatctctcccggtcggaattaataggcaagacttcgatgttgactgctatgctcagaggcgactcagcgggggaagccattcttacggtggggaaagcccacgattatccccatgctcctccattggtaagctgagtaagagtgacgaacaactctcatcgctggacagggactccggacaatgctccagaaatacatcttgtgaaacactagatcattacgaccctgattatgagttcttgcagcaggacttgagtaacgctgaccagataccacagcagacagcctggaacctgtcgcccctgcctgagtcactgggggaatctggatccccatttctcgggccaccattccaactgccccttgggggacaccctcagcccgacgggcctcttgcaccaggtcagcagaccgatacaccaccagccctgcccgaaaagaagagaagatccgctgcctctcagacagctgacggcagcggctgtcgggtatcgtacgagaggcacccatcccagtatgacaatatctcaggggaagaccttcagtccactgctccaatccctagtgtcccctacgctccattcgccgcaatcctgccattccagcacggaggcagcagcgccccagtggaatttgttggggacttcaccgcgccagagagcaccggagaccctgaaaaacctccccctcttccagagaagaagaataaacatatgctcgcatatatgcagctgttagaagattactccgagccccagccaagtatgttctaccagacacctcagaatgagcacatctatcagcagaagaataaacttctaatggaggtgtacggttttagtgatagcttctcaggcgtcgactcagtgcaagagctcgccccaccccctgcacttcctccaaaacagagacagctggaacccccagccggaaaagatggccaccccagggacccgagtgcagttagcggagtcccgggaaaggattccagagacggttcagagagggctccaaaaagtcccgatgccctggaatctgcacagtccgaggaggaagtcgacgagctgtcgttgatagaccacaacgagatcatgtccaggctgacgctgaagcaggagggcgatgacgggccagatgttaggggcggatccggagacattcttctggtacacgcaaccgagacagatcggaaagaccttgtgttgtactgtgaagcctttctgaccacttataggaccttcatttccccagaggagctgatcaaaaagttacagtaccggtacgaaaagttcagcccttttgcagacactttcaagaaaagggtgagcaagaacacctttttcgtactcgtgcgcgtggtcgatgagctgtgccttgtggagttaacagaggagatactgaagctgctcatggaacttgtatttaggctcgtgtgcaacggggaactttctctcgcgagggtgttgcggaagaatatcctggataaggttgaccagaaaaaactcctgcggtgcgcaaccagttcacagcccctggctgcaaggggcgtggctgcacggccaggcaccctgcatgacttccattcccatgaaattgcggagcagctgacactgttggacgctgaattattttacaagatcgaaattcccgaagtgctcctctgggcgaaagagcagaacgaagagaaatcaccaaacctgacccagttcaccgagcactttaataacatgtcatattgggtgaggtccataattatgctgcaggagaaggcccaggatcgcgagaggcttttactaaagtttattaaaatcatgaaacatctacgaaaacttaataattttaattcctatctggctatcctgtctgccctcgactctgcccctataaggcgcctggaatggcagaagcaaacgtcggaaggattagctgaatactgcaccctaattgacagttcttcttccttccgcgcatacagagccgctctgagcgaggtcgagcccccatgcatcccttatctggggctgatacttcaggacttgaccttcgtgcatttgggcaacccagactacatcgacggcaaggtcaacttctccaagagatggcaacagtttaatatcctggattcaatgaggtgcttccagcaagcccactacgatatgaggcgcaatgacgacatcataaacttttttaacgactttagcgatcacttggctgaggaggccctttgggaactgtccctaaagatcaaaccaagaaacatcacaaggcgcaagacagaccgggaagagaaaacgtag

SEQ ID NO: 30509 - DNA, 1011 bp, synthetic construct
  misc_feature 1..1011: note = Description of Artificial Sequence: Synthetic coding sequence
  source 1..1011: mol_type = other DNA
atggaggtttacggattcagtgatagcttcagtggagtcgatagtgtgcaggaactcgcgcctcccccagcactgccccctaagcagcggcagttgtccgagaatgcttccgaagaagccggtgaaggcgaatatgtcaacctgtactcgtccgggcagtcttctgaggaattggctccgtcgaggggcgagccacctgcaggtaaggacggtcatcctcgcgacccatcagccgttagcggcgtacccggaaaggactctagggatggctctgaaagggcccctaagagcccggatgccctggagtccgcccagagcgaggaagaggtcgacgagttgagtctgatcgatcataatgaaatcatgtcccggctcaccctcaaacaggaaggagatgatgggcctgatgtgaggggtggatccggagacatcctgctggtacatgcgactgaaaccgatagaaaagacctagtactctattgtgaggccttcctcactacctataggacatttatatctccagaggaactgatcaagaaactacagtacagatacgaaaagttttctccttttgccgatacattcaaaaagcgagttagcaaaaacacctttttcgtactcgtgagagtggtggatgaactatgcttagttgaattaactgaagaaatcctcaagcttctgatggagttggtgtttagattggtgtgcaacggagagctcagcttggccagggtccttcgtaaaaatatcttggataaggtggatcagaaaaaactgctgcgatgcgccacctcctctcaacctctcgcagctagaggcgtcgcagccagaccaggaactctgcacgactttcatagtcatgaaatagcagagcaattaacccttctggatgcagagctgttctacaagattgaaatcccagaggtgctgctgtgggcgaaagagcagaacgaggaaaagtctcctaatctgactcagtttacggaacactttaataatatgtcttattag

SEQ ID NO: 30510 - DNA, 3174 bp, synthetic construct
  misc_feature 1..3174: note = Description of Artificial Sequence: Synthetic coding sequence
  source 1..3174: mol_type = other DNA
atgggaaacgccatcgaaaagcaaaaaccgctcaaaagatcccatctctacccttggaaacaggattctcagcggtcccatctctcctcattcacaatgaagctcatggataaatttcacagcccaaaaataaagcggaccccatcaaaaaagggtaaacctgcagaggtgtctgtgaaaatcccagagaaaccagttaataaaaatctgtcctggttggaagagaaggaaaaagaggtcgtctccgccttacggtactttaaaaccatcgtcgataaaatggctatcgacaaaaaggtacttgaaatgctgccagggtcggcctctaaggtgcttgaggctatcctgccactagtccagaatgacccgaggattcagcactcttcagctctcagctcctgctactccagagtctaccagtctctggctaatctgattagatggtcagatcaggttatgctcgaaggagtgaacagtgaggacaaagaaatggttacaacggttaagggagtcattaaagcagtcctcgatggagtgaaggagttggttaggttgaccatcgaaaagcagggtcgaccctccccaactagtcccgtgaagcccagttcgccagcgagtaagcctgacggaccagcagaactgcctctgaccgacagagaggtcgaaatcctcaacaagacaaccgggatgagtcagtccaccgagctgctgccagacgctacggacgaggaagtcgcaccaccgaagcctcctcttcctggtatccgagttgttgataattcgcctccaccagctctgccaccaaaaaagcgacagtccgccccttcacctaccagggtggccgtggtggccccaatgtcacgggcaacttcggggtcatccctgcctgtcgggattaataggcaagatttcgacgtggactgctatgcccagcggcgactttccggcggtagtcatagttacgggggagagtcaccgagactcagcccgtgctcctctattggaaagctgtccaagtctgacgaacagctctcaagtctagatcgtgactccggacagtgctcaagaaatacctcctgcgaaactctcgatcattacgatccagattacgaattcctgcagcaggaccttagcaacgctgatcaaattccccagcaaacagcctggaacctatctcccctgcctgagagcctgggtgaatccggatcacccttcttggggccacctttccaacttcccctcgggggacatccacagcccgatggacccctcgcacccggacagcagaccgacaccccacctgccctgcccgagaaaaaaaggcgttcagcagccagtcagacagcagacggatctggctgtagagtatcctatgagcgccatccttctcagtacgacaacatctcaggggaagatcttcagtctacagctccaattccatccgtcccttatgctccatttgccgcaattctgccttttcagcatggaggctcaagcgctccagtagagtttgtcggagactttacggcccctgagagcacgggcgatccagaaaaaccgcctccactgcctgagaagaagaacaaacacatgcttgcttatatgcagctgctggaggactactccgagccccagcccagtatgttctaccagacgccacagaacgagcacatttaccagcagaaaaataagttactcatggaagtctacggattctccgatagcttttctggtgtggatagtgtgcaggaactcgccccacctccggcactgccccctaaacagcgacagctggagcctcccgcaggtaaggacggtcacccgagggatccttccgcagtatcaggggtacccggtaaagattcgcgagacggcagtgaaagagctcccaaatcccccgacgccctcgaaagcgcccagtctgaggaggaagtagatgaactgtcactgatcgaccacaacgagattatgtcacgtctcacactgaaacaggaaggagacgatggccctgacgtgagggggggaagcggcgatatattgctggttcacgctactgagaccgacagaaaagatctggttctgtactgtgaggcatttctgaccacataccgcactttcattagtcctgaagagctcataaaaaagctgcagtaccgatacgagaagttttcccccttcgcagacacgttcaaaaagcgcgtgtctaagaacaccttcttcgtgttagttcgagtggtcgacgaactgtgcttggtagaactgacggaagagatcctaaagctgctgatggagctggtctttagactggtgtgcaacggggagctgtccctggccagggtgttacgcaaaaacattttggacaaggtggaccagaaaaagctgctgagatgcgctacatcttctcagcctttagccgctaggggggtggccgctcgccctggaaccctgcatgactttcactctcatgaaatcgccgaacagctgaccttgctcgacgcagagctattctacaaaatcgagatccctgaagtactactgtgggcgaaagaacagaacgaggaaaaaagccctaatctcactcaatttactgaacatttcaataatatgagttattgggtgaggagcatcattatgctccaagaaaaagcccaagaccgcgagcgtttgctcttaaagttcatcaagatcatgaaacaccttaggaaactgaacaatttcaactcttacctggccatcctgtccgcattggattcagccccaatccggaggctggaatggcagaagcagacgagcgagggcttagcagaatactgtacacttatcgactcctcaagcagcttccgcgcttatagagctgctctctcggaagtggaacctccttgcattccctatctgggtttgattcttcaggatctgacctttgtgcacctggggaaccctgactacattgatggcaaggtcaacttcagcaagaggtggcagcaatttaatatccttgattcaatgcggtgctttcagcaggcgcattatgatatgaggaggaacgatgacattattaacttcttcaacgatttttcagatcatctggctgaggaagccctctgggagctctcattgaaaataaaaccacgtaacataacacgcagaaagactgacagggaggagaagacctag

SEQ ID NO: 30511 - DNA, 960 bp, synthetic construct
  misc_feature 1..960: note = Description of Artificial Sequence: Synthetic coding sequence
  source 1..960: mol_type = other DNA
tagttggcaccgcctcctgcacttccaccgaaacagaggcagctgtctgagaacgcaagcgaagaggccggtgagggtgagtatgtcaatctttactctagcggacagagcagtgaagaactagccccatctagaggagagccccctgccggtaaggacgggcatcccagggaccccagtgctgtgagtggagttccaggcaaggactcccgggacggtagtgagagagcgcctaaatctccggacgcgctggagagtgcacagagcgaggaggaagtggacgagctcagccttattgatcataacgagatcatgtcaaggctgacactaaagcaagagggcgacgacggcccagatgtgcgaggcggaagtggcgacattctgctggtacatgccactgaaaccgaccgcaaggatctggtgctgtactgtgaggcgttcctgaccacttatagaacgttcatttctcccgaagagttgatcaaaaagttgcagtacaggtacgaaaagtttagcccttttgccgacaccttcaaaaagcgcgtgtcgaagaacacctttttcgtgctcgtccgcgtggtggacgagctctgtctggtggaactcacagaagaaatcctcaagctactgatggaactcgtctttcgcctagtgtgtaatggcgagctgtctctcgcaagagtattgaggaagaacatcctggacaaggttgatcaaaagaagctactccgctgtgcaacctcctctcagccactcgccgctagaggcgtagccgcacggccaggaacactacacgatttccactcacacgaaattgccgaacagctgactctcctggacgccgaactgttttataagatagagattcccgaggtcctactgtgggccaaggagcagaatgaagaaaagtcccccaatttgacccagtttaccgaacactttaacaatatgagttactag

SEQ ID NO: 30512 - DNA, 687 bp, synthetic construct
  misc_feature 1..687: note = Description of Artificial Sequence: Synthetic coding sequence
  source 1..687: mol_type = other DNA
tagttgcccgagaagaagaataagcacatgttggcgtatatgcaactgctggaggattacagcgagccacagccttccatgttttatcagacaccgcagaacgagcacatttatcagcagaagaacaagttactgatggaagtgtacgggtttagtgactcttttagtggcgtagatagcgtgcaggagctggctcccccaccggcactacccccaaaacagaggcagctacaagcttcatgcgccgcatcttccttttcgagcgtttcccactgcgtgcagcagacgaaggtggcctttacccccgaggacggttccgccgctcagggactgtccgtctcggtcagtaactcatttctgtctcgccatggatctctgccagtgccatcctataaatccgttttccgctcttattcccaggacttcgtgcctcaccaccaggcttcagtccctcccttcctgcccccaactagttcttcaagtccccactttccccctgcccaccagtcccagtccagcgatttggctgtgcccacgatggcagggccacctccatccacagtcgacgggcctctgtcggcctcccaggaaagttctttccacggcaacactgtgtgtctcccaagcgagacctccttcaccgatagcgagcctcccgcaggaaaggatggtcatcctagagactag

SEQ ID NO: 30513 - DNA, 582 bp, synthetic construct
  misc_feature 1..582: note = Description of Artificial Sequence: Synthetic coding sequence
  source 1..582: mol_type = other DNA
atgggcaatgccatagagaagcagaaaccccttaagcgctcccacctgtatccgtggaagcaggactcacagaggtctcacttgtcctcattcaccatgaagctcatggacaagtttcactctcccaagattaagaggacacctagtaagaaagggaagccggctgaagtcagcgtgaagatccccgaaaagccagtaaataaagaggccacggataggttcctgccggagggctatcctctccctctggatctcgagcagcaggctgtggaatttatgagcaccagtgccgtcgccagtagatctcagagacaaaagaatctgagttggctggaggaaaaggagaaagaagtagtctccgcgctacggtactttaagacaattgtggacaaaatggccattgataagaaggtattggagatgctcccaggctccgcaagcaaggtgctggaggcaattctgcccctggtacagaacgatcctcgcattcaacacagtagtgctttgtcctcatgctattctcgcgtctaccagagcctggccaacctaatacgctggagcgaccaagtaatgctggaatag

SEQ ID NO: 30514 - DNA, 3072 bp, synthetic construct
  misc_feature 1..3072: note = Description of Artificial Sequence: Synthetic coding sequence
  source 1..3072: mol_type = other DNA
tttaaaactatcgtagataaaatggcaatagacaaaaaggtcctggagatgttacctggatccgcatcaaaagttctcgaggcaatactcccactggtgcagaatgacccaaggatacaacacagcagcgcgctctccagttgttatagccgcgtgtatcagtcactggctaacctgatacgctggtctgaccaggtgatgctggaaggcgtaaattcagaagataaagaaatggtgacaactgtaaagggcgtcattaaagctgtacttgacggcgtgaaggagcttgtgcgcttaacaatcgagaaacagggccgaccatctcccaccagcccagtgaagccctccagccccgcaagcaagcctgacggcccagccgagctgccactcaccgaccgtgaggtcgaaattctcaacaaaacaactggaatgtctcagagtaccgaactccttccagacgccaccgatgaggaggtagctcctcctaagcctcccttgccaggaattagagtggtggacaactcacctccccctgctctcccccctaaaaagcgccagtctgcgccatcacctacacgggtggccgttgtggctcctatgagtagagccacatctgggtcctcactgccagttggcattaaccggcaggacttcgatgtggactgctatgcgcagcgtaggttgagcgggggaagccacagttacggcggagagtcccctcgactgagcccatgctcctctataggtaaactcagtaagtcggacgaacagctgtcatccctggacagagattccggccagtgctccagaaacacgtcatgcgagactctcgatcactacgaccccgattatgaatttcttcagcaggacctttccaacgccgaccagatcccccagcagactgcctggaacctgtctccgcttcccgaaagccttggagagtctggtagtccatttctgggacccccatttcagctgccccttgggggacaccctcagccggatggaccactggccccagggcagcagaccgacacgccgccagccttgcccgagaaaaaaaggcggtctgccgcaagccagaccgccgatggtagtggatgtagggttagctatgagcggcatccctcacagtacgacaacatctccggcgaggatctgcagtccaccgctcctatccctagtgtcccatatgcccctttcgcggctatcctaccttttcaacatggcggatccagcgcccctgtcgagttcgtgggcgacttcaccgccccagaaagcactggggaccctgaaaaaccaccaccgctgcccgagaaaaagaacaaacacatgctggcatatatgcagttattagaggattattctgaaccacagcctagcatgttctaccagaccccgcagaacgagcatatttaccagcaaaaaaacaaactcctcatggaggtctatggatttagcgatagctttagcggcgtggactccgtgcaggagctagcaccccctcctgccctgccgcctaaacaacgccagttggcctcctgtgcggctagcagctttagcagtgtgtctcactgcgtccaacagacaaaagttgcctttacaccggaagacggaagtgcggcacaaggcctcagtgtcagcgtgagcaactcctttctgagccggcatgggagcctccccgtgccctccgaacccccagccggaaaagacggccaccctagagatccatctgccgtgagcggcgtacccggtaaagattccagagacgggtcggaacgggcacccaaatctcctgacgcactcgagtcagctcagtcagaagaggaggtggatgagctgagcttaatcgaccacaacgaaattatgtctaggctgacgcttaaacaggagggagacgacggacctgacgtcagagggggttccggggatattctcctggttcacgcgacagaaactgatcgcaaagacttggtgctgtattgcgaggcattcttaactacataccgcacttttataagtccagaggagctgattaagaagttgcagtatagatatgagaaatttagcccgtttgccgatacattcaagaagagggtgtccaaaaatactttcttcgtcctggttcgtgttgttgacgagttgtgtctggtagagctgactgaagaaattttgaagctgctcatggagctcgtgtttaggttagtgtgtaacggggagttgtcgctggcacgcgtcctgaggaagaacatccttgacaaggtggaccagaagaagctgctccgctgcgcgacctcttctcaacccttagccgctcggggtgtagcggctcggccaggcactcttcacgattttcacagccatgaaatcgccgaacagctgactcttctggacgcagagctcttttacaagattgaaatcccagaagttctgctctgggctaaagagcagaacgaggaaaagtctccgaacttgacacagtttacagagcatttcaacaacatgagctattgggtgaggtctatcataatgttgcaggagaaagcccaggatagggaaagactcctgctcaagtttatcaaaattatgaaacacctgcgcaaactcaataatttcaattcctacctcgctatcctgagcgcactggattcggcccctatcaggcgcctggaatggcagaaacaaacctccgaaggactggccgaatactgcactctcattgattccagtagcagcttccgagcctatcgtgcagccctgtccgaagtggagccaccctgcattccctacttgggtctaatattgcaagatctcacctttgtgcacctggggaacccagactacattgacggcaaggtgaactttagtaaaaggtggcagcagtttaacatactggatagcatgcggtgctttcagcaggctcactatgatatgcgaagaaacgacgacattatcaatttcttcaacgactttagcgaccatctggctgaggaggccctctgggagctcagcctgaagatcaaaccacgtaatatcaccaggaggaaaaccgaccgggaagaaaaaacatag

SEQ ID NO: 30515 - DNA, 480 bp, synthetic construct
  misc_feature 1..480: note = Description of Artificial Sequence: Synthetic coding sequence
  source 1..480: mol_type = other DNA
atggaggtctacggcttttccgatagcttctccggcgtagattcagtccaggagctcgctcctcctcccgctctgccacctaagcagaggcaattatacaaaagcgtgttccgtagctatagccaggatttcgttcctcatcaccaggccagcgtgccccctttcctccccccaacttctagttcaagtccacattttccgccagctcatcagagccagagttccgatctggctgtcccaactatggctggcccacctccaagcactgtggacggtcctttgagtgcgtctcaggagagcagctttcatggtaacacagtgtgcctgccctccgagaccagctttaccgactccgaacctccagccggaaaagacggccatcccagagatccgtcagcagtgagcggtgtgcctggaaaagatagccgcgacgggagtgaacgagcacctaagtctcccgacgcgctggaatctgcatag

SEQ ID NO: 30516 - DNA, 696 bp, synthetic construct
  misc_feature 1..696: note = Description of Artificial Sequence: Synthetic coding sequence
  source 1..696: mol_type = other DNA
atggaggtgtacggattctcggacagtttttcaggcgttgatagcgtgcaggagctggcacctccccctgctctccctccaaagcagagacaactgcaggcttcatgcgcagccagcagtttctccagcgtgtcccactgcgttcagcagacaaaggtggccttcactccggaagatggttcagccgcacagggcctcagcgtgtccgtgtccaactcctttttgagccgccacggatccctgcccgtgccctcttacaaatctgttttcagatcctatagtcaggatttcgtaccacatcaccaggcaagcgtgccaccattcttgccaccaacttcttccagtagtcctcacttcccacctgcccaccagagtcaaagttccgatctggctgtgccaactatggcaggcccacccccatcgacggtagacggacctctgagcgccagtcaagagtcatcgtttcacggtaatacagtgtgtttaccctcggagacgagctttacagattccagtgagaacgcctctgaagaggctggtgagggcgagtacgtcaacctttattcatctggccagagctctgaggaactggctccctctagaggcgagccaccggctgggaaagacgggcaccctcgggacccctctgctgtctcaggcgttcccggaaaagattccagagacggcagcgagtag

SEQ ID NO: 30517 - DNA, 477 bp, synthetic construct
  misc_feature 1..477: note = Description of Artificial Sequence: Synthetic coding sequence
  source 1..477: mol_type = other DNA
atgtcagggggactggggctccgacgcagcccggaaatgtctggaaagatagagaaagctgacagccagagatcacatctgagctcctttaccatgaaactgatggataagtttcacagtcccaaaattaagcgcacgcccagcaagaagggaaagcctgcggaagtgtccgtgaagattcccgagaagcctgtgaacaagaacctttcctggctggaagaaaaagagaaggaggtggtgtctgccttacggtacttcaaaaccatcgttgacaaaatggctattgataagaaagtgctcgaaatgttgccaggttccgcgtccaaagtactcgaggcaatcctgcctcttgtccagaacgatccaagaatccagcatagcagcgctctctcttcctgttactcacgtgtatatcagtctcttgctaatctgatacggtggtctgaccaagtcatgcttgaaggggttaattcttag

SEQ ID NO: 30518 - DNA, 261 bp, synthetic construct
  misc_feature 1..261: note = Description of Artificial Sequence: Synthetic coding sequence
  source 1..261: mol_type = other DNA
atggaggtttacgggttttcagactcattttcaggagtcgactcggtgcaagagctggcccctccgcctgctcttccccctaaacagcgccaattggaaccacctgcaggcaaagatgggcacccacgcgatccaagcgccgttagcggagttccaggcaaggactctcgagacgggtccgagagtggaatcacatcagtctatcgctggaatatccagcggcagcagcggctttcctacgggcacacggctagccagtag

SEQ ID NO: 30519 - DNA, 7419 bp, synthetic construct
  misc_feature 1..7419: note = Description of Artificial Sequence: Synthetic coding sequence
  source 1..7419: mol_type = other DNA
atgactgctcggggacagtctcccctggctcccttgcttgaaacactggaagatccttctgcttctcacggaggtcaaacggatgcctatctgaccttgacctcccggatgacaggtgaggagggcaaggaagtgattacggaaattgagaagaagctccccaggctctacaaggtcctgaagacccacattagtagccagaactcagagctgtcatctgccgcattacaggccctcgggttctgcttatataatcctaaaatcaccagcgagctgagcgaggccaatgctctggaactcctgtcaaaactgaatgacaccattaaaaacagtgacaaaaacgtgagaacgagagcattatgggttatatccaaacagacttttcccagcgaagtggtgggaaaaatggtaagtagcattatcgactccctcgaaatcctgttcaacaaaggagagacacacagcgccgtggtggactttgaggccctgaacgtcatcgtacgcctgattgaacaagctccgattcagatgggggaagaggctgtacgctgggccaagttagtcatacctctagtagtccacagcgcacaaaaagtccacctcaggggcgcaacggccttggaaatgggcatgcctctgctcctccagaagcagcaggaaattgccagcattaccgaacaacttatgactactaagttaataagtgaactgcagaagctttttatgagcaagaacgagacctacgtgctcaagctgtggcccttgtttgtcaagctactgggtcggacactccaccggagtggttccttcatcaactctctgctgcagctcgaagagctggggttcaggtctggagcgcctatgatcaagaaaattgcctttatcgcatggaagagtcttattgacaacttcgccctgaatcctgacatcttgtgtagtgctaagcggctcaaacttttgatgcagcctctgagtagtatccatgttcgcaccgaaacacttgcgttgaccaaacttgaggtgtggtggtatctgctcatgagactcggtccccacttaccagctaattttgagcaagtgtgcgtaccactcattcagagtacaatcagtatcgacagcaacgccagtccacaagggaactcatgccacgtggccactagccccggactcaatcctatgactccggtccataaaggagcatcctcaccctacggagcaccaggcaccccccgaatgaacctgtcaagcaatcttgggggaatggccacgattcccagcatacagctgttgggtctggagatgctgcttcactttctgctcggcccagaggccctgagcttcgccaagcaaaacaaactggtgctgtcattagaacccttggagcatcctctgatctcgtccccctccttcttcagtaaacatgctaatactctgatcacagctgtccacgattcctttgtcgctgtagggaaggatgcacccgatgtggtagtaagcgcgatttggaaagagcttatctcactcgtcaaatctgtgaccgaaagtgggaacaagaaggagaaaccagggagcgaggtccttacacttttgctcaaatcacttgagtctattgtgaagtctgaagtgttccccgtcagtaagacactggtgctcatggagattacaatcaagggcttgccacaaaaagtacttgggtcgcctgcctatcaggtagcaaatatggatattctcaacggaactccagctctgtttcttattcagctcatcttcaacaactttctcgagtgcggcgtctccgatgagcggttttttctcagcctggagagtctggtgggctgtgtgctcagtgggcctaccagtccgctggccttctcggatagcgtgttgaatgtgataaatcagaatgcaaaacagcttgagaacaaggagcacctgtggaagatgtggtcagtgatcgtgacccctctgactgaactgataaaccaaaccaatgaagtgaatcagggtgatgctctcgaacacaacttttccgccatatatggagcccttactctccccgttaaccatatcttctcagagcagagattcccggtcgcaactatgaaaaccttattgagaacttggagcgaactttatcgagccttcgcacgctgcgctgcccttgtggctaccgccgaggagaacttgtgttgcgaagaactctcaagtaaaatcatgtcctccctggaggatgaaggattcagcaatctgctgtttgttgacagaattatatatatcatcacggtcatggtggactgtattgacttttcaccgtacaatatcaaatatcaacccaaggtcaagtcacctcagcggcctagcgactggtctaagaagaagaatgagcctctgggcaagctcaccagtttgtttaagttgatcgttaaggtgatttactctttccatacgttgtcttttaaagaggcccactctgacactctgtttacaataggtaacagcattaccggaattatttcatctgtcctgggccatatttcccttccttctatgattagaaaaatcttcgccacattaaccaggccactcgccttattttatgagaattcaaagctggacgaggtccccaaggtttatagctgccttaataataaactagagaaactgctgggtgaaattatagcgtgcctccagttctcatacacaggcacgtacgattctgaactgcttgaacagctttcgccactgttgtgcattatctttctccacaaaaataagcagattcgcaagcagagcgcccagttctggaacgcaacttttgccaaagtcatgatgcttgtgtacccagaggagctcaagcccgtcctgacacaggctaagcagaaattccttctcttgcttcctggcctggagacagttgagatgatggaggaaagcagcgggccttattccgatggtacagaaaatagtcagcttaatgtgaaaatctcaggtatggagaggaaatccaacggaaagcgcgacagttttcttgctcagactaaaaacaagaaggaaaacatgaagcccgcagcaaagctgaaattagagagctcaagcctgaaagttaagggcgagatccttctggaggaagaaaagagcaccgattttgtcttcatcccaccagagggcaaagacgctaaggaaagaattctcactgaccatcagaaggaagtgctgaagactaagaggtgcgacattcccgctatgtacaacaacctggacgtatctcaggatacactgtttacacagtattctcaggaggagcctatggagattccgaccttaaccagaaaacccaaagaggacagcaagatgatgatcactgaagaacagatggacagtgatatcgtgatacctcaggacgttaccgaggattgtggaatggcagagcacctggagaagtctagtctgtcaaacaatgaatgcggttctttggataaaacctctcccgagatgtccaattctaacaacgacgagcggaagaaggctctaatcagcagtcgcaagaccagcacagagtgcgccagctctactgaaaactctttcgtggtgtctagctcttccgtgtccaatactacagtggccggaacccctccatatcctacctcgcgcagacagacatttatcacactcgagaagttcgatggaagcgagaacaggcctttcagcccgtcccccctgaataacatctcaagtactgtgacagtcaagaacaatcaggaaaccatgatcaagaccgatttcctgccaaaagcaaagcagcgcgaaggaacattctccaagagcgatagcgaaaagattgtgaacggtactaagcgttcatcccgacgggcaggaaaagctgagcagactggcaacaaacgctctaagccactgatgagatcagagcccgaaaaaaataccgaagaatcggtggaaggtatcgtggtgctggaaaacaaccctcccggattgctaaatcagaccgaatgtgtctctgataaccaagtgcacctgtccgaatccactatggagcacgataacacgaaactaaaggctgccaccgtcgagaatgccgtcttactggagactaacaccgtggaggaaaagaatgtagagatcaacctggagtccaaggaaaatacaccacctgtggtcatctctgcggaccaaatggtgaacgaggatagccaggtccagatcacacctaaccagaagacacttcgcaggtcttcacggaggcgcagcgaggtcgtagagtctaccactgagagtcaggataaagagaactcccaccagaagaaagaacgccgaaaagaggaggagaagccattacagaagagccctctgcatattaaagacgatgtcctgcccaagcagaagctgatagcggagcaaacgcttcaagaaaatctcatcgaaaagggatccaatttacacgagaaaacactcggtgagacatcggccaatgcggagactgaacaaaacaaaaagaaagccgatcccgagaacataaagtcagaaggagatggcacccaggatatagtggacaaatccagtgagaagctggtccgtggacgcacaaggtaccagacccgcagggcctctcaaggccttctctcttccatcgaaaatagcgagtctgatagctccgaagccaaggaggagggcagtagaaaaaaacggtctggcaagtggaaaaacaaatcaaatgagagcgtcgacatccaggatcaggaggaaaaggtcgtcaagcaggagtgcattaaggccgagaatcaatcccatgactataaggctacatcggaggaggacgtatcgataaaatcgccgatctgcgagaaacaggatgaatcaaacacagtgatctgtcaagacagcaccgtgacatcagacctcctacaggtgcccgacgacctccctaatgtttgcgaggagaaaaacgagacgtccaaatatgccgaatattctttcacttccttgccggttcccgaatctaatctgcgcacgcggaatgccattaaacgactccacaagagagattctttcgataactgtagcctgggcgagtcctccaagataggcatttcagatatctccagcctgtcagaaaaaacattccaaacgctcgagtgtcagcacaaacgctcccgccgagtccgccgaagcaaagggtgtgattgttgcggcgagaagagtcagccacaggagaaatctctgattgggttaaaaaatacggagaataatgacgttgaaattagcgagactaaaaaagcagatgtgcaagctccggtgagtccttcagagaccagccaggcaaatccgtattcagaaggccaatttttggacgaacatcattctgtgaacttccacctcggacttaaggaagataacgataccattaacgacagcctaattgtgagcgagaccaagagcaaagagaatacaatgcaggagtcattacccagcggtatcgtcaacttccgcgaggaaatttgcgatatggatagcagtgaagcaatgtcgttggaatctcaggagtctcccaatgaaaattttaagacagttggcccttgcctcggagactctaaaaacgttagccaggagtccctggagaccaaagaagaaaagcctgaggagacaccgaaaatggaactcagcttggaaaatgtgaccgtagaaggcaacgcgtgtaaagtgacagagtctaatctggagaaggctaaaaccatggagctgaatgttggtaatgaggcttcatttcacgggcaagagagaactaaaactgggatatctgaggaagccgctatcgaagagaacaaacgcaatgacgattccgaagccgataccgcaaaactcaatgcaaaagaggtcgcaaccgaggagttcaacagcgatataagcctatcagataacacaaccccagtcaagctgaacgctcagacagaaatctctgaacaaactgcagcaggtgaactcgacggcggaaacgacgtgagtgacctccactcctctgaggagaccaacaccaagatgaaaaacaatgaggagatgatgattggagaggccatggctgagaccgggcatgacggagaaactgaaaacgagggcataacaaccaaaacctctaagcccgacgaggccgaaaccaacatgctcacggccgaaatggacaatttcgtgtgcgacaccgtagagatgtcaacagaagaggggattatcgacgccaacaaaactgagactaataccgagtactcgaagagcgaagaaaaactcgacaacaaccaaatggtcatggaaagtgacatactgcaggaagaccatcatacctcacagaaggttgaggagccttcccagtgccttgccagtggcacggccatatcagagctgattatcgaggataacaatgcaagccctcaaaagttgagggagctagatcccagcttggttagcgcaaacgattcgccctccgggatgcagacaaggtgcgtgtggtcaccgctggcttctccatctacctctatcctaaagcgcggactcaagaggtctcaagaggacgagatctctagccccgtcaataaagtgaggagagtgtcttttgcagaccccatttaccaagccggactagcggacgacatagatcgcagatgttccatcgtgcggtcccacagctctaacagcagccccatagggaagtccgttaaaacatcccccaccactcagtccaaacacaatactactagtgcaaagggattcctttccccaggtagcagatctccaaagtttaagtcttcaaaaaagtgcctgattagcgagatggcaaaggaatctattccttgtcccaccgagtcggtttacccccctctggtgaattgcgtggctcccgttgatataatccttcctcagatcacctctaacatgtgggcgagagggctgggtcaactcatcagggctaagaacatcaagacaattggtgacctcagcactctaactgcctctgagatcaaaacgctccctattcgctctcccaaggtgtccaacgtgaaaaaggcacttagaatctaccacgagcaacaggtgaaaacaaggggcctcgaagaaatccctgtatttgacataagcgaaaagaccgtgaatggaatcgaaaacaagagcttgagccctgatgaagagcgcctggtgagcgacatcattgaccctgtggcgctcgaaattcccctttctaaaaatctgctggctcaaataagcgcactggccttgcaactcgacagcgaagacctgcacaattattctggctcgcagctgttcgagatgcacgagaagttgagctgtatggcaaattctgtgatcaaaaacctccagagtaggtggagatccccctcgcatgagaactcaatctat

SEQ ID NO: 30520 - DNA, 264 bp, synthetic construct
  misc_feature 1..264: note = Description of Artificial Sequence: Synthetic coding sequence
  source 1..264: mol_type = other DNA
atgaccgccagagggcagtcacctctggcccctctgctcgaaacactggaggatccttcggcatctcacggtggccagacggatgcttatctgactctgacctcacgtatgaccggggaagaaggcaaggaggtcatcactgaaatagaaaaaaaactgcccagattatacaaggtgctcaagacccatattagttcccaaaacagcgaactcagctccgccgcattgcaggctctggggttttgcctgtacaacccaaagtag

SEQ ID NO: 30521 - DNA, 7340 bp, synthetic construct
  misc_feature 1..7340: note = Description of Artificial Sequence: Synthetic coding sequence
  source 1..7340: mol_type = other DNA
atgaccgctaggggacagtccccgctcgcacctctgttggaaactttggaggatccttcagcgagccatggaggacagaccgatgcatacctgacattgacatcgcgcatgacgggagaggaaggtaaggaggtcatcactgagattgagaaaaagctgcctagactttacaaggtattgaaaacccacatctcttcccaaaattcagagctgagtagtgccgctctgcaggcattgggattttgtctgtataacccaaagatcaccagcgagctcagcgaggcaaacgcattagaactgcttagtaagcttaacgacactattaagaatagcgataagaacgtaaggacacgcgctctctgggtgatctcaaaacagacgttccctagcgaagtcgtaggtaaaatggtgtcctcgatcatcgatagcttagaaattctctttaacaagggagaaacacattccgcggttgtagatttcgaagccttgaacgttatcgtcaggctgattgagcaggcaccaatacagatgggggaggaggctgtaagatgggccaaactagtgattccactggtggtccactcagcccagaaggtgcacttacggggtgctactgctctcgagatgggcatgccgctgctgctgcagaaacagcaggagatcgcctctattacagagcagctaatgacaacaaaactcatctctgagttacaaaagttgttcatgtccaaaaacgaaacctatgtgctgaagctttggcctttattcgtcaagcttctcggtaggaccttgcatcgatcaggttcatttataaacagcctgctgcagctggaggaattggggttcaggtccggcgctcctatgatcaagaagattgcttttattgcgtggaagtccttgatagacaacttcgcattgaaccctgatatcttatgctcggccaagcggttgaagctcttgatgcaaccactgtcctctattcacgtaagaactgaaacactggccttaaccaagttagaagtctggtggtaccttctgatgcgcctcggccctcacctgccagccaacttcgagcaggtgtgcgtacccctgatccagtcaacaatttctattgactctaacgccagtccccaaggaaatagttgccacgtagcaacctctcctggtctcaaccctatgactcccgtccataaaggcgcttcatcaccttatggtgccccagggacaccgaggatgaatttatcatcgaaccttggcggtatggcaactattccttctatccagcttcttgggctggagatgttgcttcattttttattaggacctgaagcactgtcgtttgccaaacagaataaactggttctcagtctcgagccactggaacacccactgatctcatccccatcctttttcagtaagcatgccaatacacttattaccgcagttcacgatagttttgtggcagttgggaaggatgcccctgacgtcgtggttagcgccatctggaaagaattgatttctctcgtgaaaagcgttactgagtccggtaataagaaggaaaagcccggtagtgaggtattgactctgctgcttaagtctcttgaaagtatcgtcaagtcagaggtattcccggttagtaagacattggttttaatggagataaccattaaaggcctaccgcaaaaggttcttggttcacccgcttaccaggtggctaatatggatattctcaatgggacacctgccctgttcctgatccagctgatattcaacaacttcctggagtgtggtgtgtccgatgaaaggtttttcctatccctggagtcactggttgggtgcgtgctgtccggcccaacgtcacccttagcattctctgactccgtcctgaacgtgatcaatcagaatgcaaagcagctggagaataaagaacacctgtggaaaatgtggagtgtgatagttacgccattgacagagctcataaaccagaccaacgaggtgaatcaaggcgacgctctcgagcataacttctcggccatatacggggcattaacgctgcctgtgaaccacatattttctgaacagcggtttcctgtggccactatgaaaacattgctccgcacatggtcagaactgtaccgcgcatttgctcggtgcgcggcactggttgccaccgcggaagaaaatctatgctgtgaagaattgtcttctaagataatgtcctccctggaggatgaaggcttcagtaacctcctgttcgtagaccggattatttacatcattaccgtgatggtggactgtatcgacttctcgccatataatattaaatatcagccaaaggtgaagtccccccagcgtccgagtgactggagcaagaagaaaaacgaacctctgggaaagctgacctctctgttcaaacttatcgtgaaggtgatctactcgtttcatactctgtccttcaaggaggctcacagtgataccctgttcacaattggcaactccattaccggcataatttcctctgtgctggggcatatctcccttccgagcatgattcgcaaaatatttgcgaccttaactcggccactggccttattttacgagaactccaagttggacgaggtgccaaaagtttattcctgtctaaataataaattggagaagttgcttggtgagatcatcgcatgcctccagttttcttacacaggcacttatgattccgagctcctcgaacagttgagtcctcttttgtgcattattttcctgcacaaaaataagcagatccgtaaacaatccgcgcagttttggaacgccacattcgccaaagtgatgatgctagtgtatccagaagagctgaagcccgtgctgacacaagccaagcagaagttcttactcctgctgccagggcttgagaccgttgagatgatggaagagtcctcaggaccatactccgacggcacagaaaacagtcagctgaatgtgaagataagtggaatggagcggaaatccaacggtaaacgcgattccttcctggcccagaccaagaacaaaaaggagaacatgaagcccgctgccaaactgaagctcgagtcttcttccctgaaggtgaagggcgaaatactgctggaagaggagaaatccaccgattttgtgtttatacctccggagggcaaggatgctaaggagaggatcttaaccgatcatcagaaggaagtgctcaagactaagcggtgtgatattcccgctatgtacaataatcttgacgtatctcaagacacgcttttcacacagtactcccaggaggaaccaatggaaataccaaccctaaccagaaagcccaaagaggactcaaaaatgatgataacagaggagcaaatggattccgatatcgtgatccctcaggatgtgactgaagactgtggcatggctgagcatctcgagaagtcaagtttgagcaataacgaatgcggaagtctggataagacatcccccgagatgagcaatagtaataacgacgaacgtaaaaaagcacttatctcgtctagaaaaacaagcaccgagtgtgcaagcagcaccgagaatagttttgttgtaagctcctcaagtgtgtcaaataccactgtcgccggtacccctccatacccgacctcacgtcgtcagacctttatcacgcttgaaaagtttgatgggagcgagaacaggcccttttccccaagtccactcaataacatatcctccacagtgactgtaaaaaataaccaggagactatgattaaaactgatttcctgccaaaagcaaagcagagagaggggactttctccaaatccgactctgagaaaatcgtcaacgggaccaagagaagttccagacgcgcaggcaaggccgaacagaccggaaacaaacgttcaaagcctctgatgcgctcagagcctgagaagaatactgaggaatcagtggaggggattgtagttcttgagaacaatcctccaggcctcctgaatcaaacagagtgcgtgtcagacaaccaagtccacctatctgaatcgaccatggaacatgacaatactaagttgaaagcagctaccgtcgagaacgctgtgctcttggaaactaacactgtcgaggagaagaatgttgagatcaaccttgagtcgaaagagaacacaccacccgttgtgatctccgccgatcagatggttaatgaagattcacaggtacagatcacgcccaaccagaaaacgctgcggcgaagctcacgtagaaggtctgaagttgtggagagtactaccgaaagccaggataaagagaactcgcaccagaaaaaggagagacggaaggaggaagagaagcctctgcagaaaagtccactgcacataaaagacgacgtgctgcctaagcaaaagctaatcgcagaacagacccttcaagaaaacctgatcgagaagggaagcaatcttcatgagaagacgctgggagaaacttcggccaatgccgagacagaacaaaacaagaaaaaagccgatcccgaaaatattaagagcgagggtgatggaactcaggacatcgtcgataagtcctctgaaaagctcgtaagagggaggaccagataccagactcgcagagcctcccagggattactttcctccatagagaactccgaaagcgactcaagcgaagccaaggaagaggggtcaaggaaaaaacgatcaggcaagtggaaaaacaagtccaatgaaagtgtcgatattcaagatcaggaagagaaggtggtgaaacaggagtgcatcaaggcagagaaccagtcgcacgactataaggcaacctcggaggaagacgtgagcataaagagcccgatttgcgagaagcaagatgaatctaacactgtgatttgtcaagacagcaccgtgacaagtgatttgctacaggtgccagacgaccttcctaacgtgtgcgaggaaaagaatgagacttcgaaatacgccgaatactcttttacttcattaccggttcctgagtccaacctcaggacccgcaatgcaatcaaacgtctgcacaagagggactctttcgataattgcagcctcggtgagtcgtcaaaaatagggatatctgatataagttcgctgtccgaaaaaacctttcaaactttggagtgccagcacaaaagaagtcgaagagtgagaagatccaaaggctgcgattgttgtggggagaaatcacaaccacaggagaagagcctcattggccttaaaaatacagagaataacgatgtggagatttcggagaccaagaaagctgacgtacaggcgcctgttagcccaagtgagacctcgcaggctaatccatactcagagggtcagttcctggatgaacatcattcggttaattttcatctcggacttaaggaggataacgacaccatcaatgattccttgatcgtgtcggagactaaaagcaaggaaaacaccatgcaggagagtctccctagcgggattgttaatttcagagaagaaatttgcgacatggacagttcagaggcaatgtcattggaaagtcaggagagcccgaatgagaactttaagacggttggaccttgtctgggtgattctaaaaatgtctcgcaggaaagcctggaaaccaaagaggaaaaacctgaggaaactcctaaaatggaactatctctcgaaaatgtcactgtggagggcaatgcctgcaaagtaactgaaagtaatctagagaaggcaaagaccatggagctgaatgttggcaatgaggctagtttccacggacaagagcgaaccaagacaggcatctcagaggaagctgccatcgaggagaataagaggaacgacgacagcgaggccgataccgccaaactaaacgcaaaagaggtggccactgaagagttcaatagcgacatttcgttgtcggataatactactcctgtgaaactgaacgcgcagaccgaaataagcgagcagaccgccgcaggagagcttgatgggggaaacgatgtatctgacctccactcaagcgaggaaaccaacactaaaatgaaaaataacgaagagatgatgattggtgaggccatggccgagaccgggcatgatggagaaacagaaaacgaaggcattacgaccaaaacaagcaaacccgacgaggctgagacaaatatgcttactgctgaaatggataacttcgtgtgtgatacggtggagatgagcactgaggaggggattattgacgctaataagactgagaccaacacagaatatagcaagagtgaagagaagctggacaacaaccagatggtgatggagtcagatatccttcaggaggatcaccacaccagtcagaaagtggaggaacccagccagtgcttagctagcggtacagctatttcagagctgataatagaggataacaatgccagcccgcagaaactgcgtgaactggacccaagcctcgtctctgccaatgacagtccctccggcatgcagacccgctgtgtgtggtcccctctagctagtccttcaactagcattctgaaacggggactgaagcgttcccaggaggacgagataagttctccagtgaacaaagtccgcagagtctcctttgccgacccaatatatcaggccggactggccgatgatatagaccggcgttgtagcattgtgcgctcccattcatccaattctagcccaatcggtaaatctgtgaagacctctccgacaacacagtctaaaatatccgagatggcaaaagaatctattccgtgccccactgagtcagtgtaccccccattagtgaactgtgtggcccctgtggatattattctgccacaaatcacttcaaatatgtgggctcggggactgggccagctgattcgggctaagaacatcaaaactattggggatcttagcactctgaccgctagtgagatcaagacattaccaatccggtcccccaaggtatctaacgtcaaaaaggctctgcggatataccacgaacagcaggtgaagacgaggggattggaagagattccggtgttcgatattagcgaaaaaaccgttaatggaatagagaataaaagtctaagtcccgacgaagaaaggctggtgtcagatattatcgaccccgttgccctggaaatcccattgagtaagaacctgcttgcgcagatttctgcccttgctctgcagctcgattcagaggacctccacaattactccggatctcaactcttcgaaatgcacgaaaagttatcatgtatggctaattctgtgattaagaacctgcagagcagatggagaagcccttcacacgagaacagcatcta

SEQ ID NO: 30522 - DNA, 7340 bp, synthetic construct
  misc_feature 1..7340: note = Description of Artificial Sequence: Synthetic coding sequence
  source 1..7340: mol_type = other DNA
atgaccgctagggggcagagtcctcttgccccacttttggagactttagaagatccatcagctagccacggtgggcagacagatgcatatctgactctgacatccaggatgacaggcgaggagggtaaagaagtgataaccgaaatcgagaagaagctgcccaggctatataaggtgttgaaaactcacattagtagccagaacagcgagctgagttccgctgccttacaggcgctggggttctgcttgtataaccctaagatcacttccgaactgtcagaggctaacgcactcgagttgttgtctaaactaaacgatactatcaaaaattcagacaagaatgtgaggactagggccctatgggttatttcaaagcaaacattccctagcgaagtggtgggaaagatggtgtcctccattatcgactctctcgagatactgtttaacaagggggaaactcacagtgcggtcgttgactttgaggctttaaacgtgattgtgcggttaattgagcaggcaccgatccagatgggggaggaggcagtgcggtgggccaagctcgttattccgctggtagttcacagcgctcagaaggtccatctgagaggagcaactgccttggagatgggcatgcctctgctcctgcagaagcagcaagagatcgcatccattacagaacagctgatgaccacgaagttaatcagcgagttgcagaagttgttcatgtctaaaaacgagacttatgtactgaagctgtggcccctattcgtcaagttgttaggcaggactctccatagatcaggaagtttcatcaacagtttgcttcagttagaggagctgggcttcagaagcggcgcaccaatgatcaaaaagatcgcatttatagcttggaaaagtctgatcgataacttcgccctaaacccggacatcctttgtagtgcaaaaaggctgaaactgcttatgcagcctttaagtagcatccacgtacgcactgagactctggcactgaccaagctggaagtgtggtggtatctgttgatgaggctcgggcctcatctgcctgcgaactttgagcaggtctgtgtacccctgatacaaagcacaatctctattgactcgaatgccagcccacagggcaactcatgccatgtcgctacatctccgggtcttaatccgatgacgccagtacataaaggcgctagtagcccctatggggcacccggaacaccccgtatgaatctgtcatctaatctggggggtatggcaaccatcccgtctatccagctcttgggactggaaatgcttttgcacttcctgctgggaccagaggcgctctcattcgcaaagcagaacaaactggtgctctcactggagcctcttgagcatcccctgatctcttccccaagcttcttttctaagcacgccaatactctgatcactgccgttcatgatagttttgtagccgtggggaaggacgctcccgacgtcgttgtatcagctatttggaaagagctcatctctctggttaagtccgttacagagtccggcaacaaaaaggaaaagccaggatccgaggtgctgactctactgctgaagtctctcgagagtatcgtgaaatcggaagtgttccccgttagtaaaactcttgtcctcatggagatcaccattaaggggttgccccagaaagtgctgggctcgcctgcataccaagtggcgaatatggacattctcaatggtacccctgctctgtttcttattcagctgattttcaacaatttcctcgagtgtggtgtgagcgatgaacgattttttctgtctctggagtctctcgtcggctgcgtcctgagcggacccacatcgccgctcgcctttagcgactccgttctcaatgtgataaaccaaaatgctaagcagttggagaacaaggagcacctgtggaagatgtggagtgttatagttacacccctcaccgagctcataaaccagactaatgaggtgaatcagggagatgcactggaacacaattttagtgcaatttacggggctttgacgctcccagtcaaccacattttctcagagcagcgctttcccgtggctacaatgaagacattgctgcggacgtggagcgagctgtaccgggcttttgcacggtgtgccgcactcgtggctaccgccgaagagaatctctgctgcgaggagctcagcagtaaaattatgtccagcctggaagacgagggcttttccaatctgctgttcgtggaccgcataatctacataatcacggtcatggttgattgtatcgacttttccccctataacatcaagtaccaacccaaagtgaagtccccccagcggccttccgactggtccaaaaagaagaatgagccgctgggaaaattgacttccctttttaaactgatcgtgaaagttatttatagctttcacacattaagctttaaggaggcacactctgatacactgtttacaatcggcaatagtattacagggattatatcatccgtgctaggacatatcagcctgccatcgatgatccgaaaaattttcgctactctgacaagacctcttgccctattttacgaaaacagtaagcttgatgaggtcccgaaggtctacagctgccttaataacaagctggagaagctgctgggggaaattatcgcctgtctgcaattttcctacactggaacatacgattcagaactacttgagcagctcagccctcttctttgcattatcttccttcataagaacaagcagatcagaaagcaaagcgcccagttctggaacgcaactttcgctaaagtgatgatgttggtctacccggaagaattaaaacctgttttaacacaggccaaacagaaattcttgctcctcctgcccggactggaaaccgtggagatgatggaagaatcgtcggggccttattcagacggcacggaaaattcccagctgaatgttaaaatatccgggatggagaggaaatcaaatggcaagagagactcatttctggctcagaccaagaacaaaaaggaaaacatgaaaccagcagcgaagttaaagctggagtcaagcagcctgaaggtgaaaggcgagatcctgctggaggaggagaagtctactgacttcgtgtttattcctccggaaggaaaagatgcaaaggagcggatcctaactgaccaccagaaggaggtgctcaagaccaaacgatgtgacattcctgcgatgtataacaacctcgacgtgagccaagacactctgttcacccaatactcgcaggaggagcccatggaaatccccactctaacacgaaagcccaaagaggactctaagatgatgataaccgaagagcagatggattccgatattgtgatacctcaggatgtgaccgaggattgcggaatggctgaacatctcgagaaatcctcgctcagtaataacgaatgtggatcactggataaaacatctccagaaatgagcaacagtaacaatgacgagcgaaaaaaagctctgatcagtagtcgtaaaaccagcaccgagtgtgcgagcagtaccgagaactcctttgtggtgtcctccagtagcgtcagtaacactacagtggctggcaccccgccatatccaacaagccgtaggcagacgtttatcacactggagaagttcgatggtagtgagaaccggccattcagcccttctcccctcaataacatctcctctacggtgaccgtcaaaaacaaccaggagacaatgatcaaaaccgattttctccctaaagcaaagcaacgggagggcacctttagcaaaagcgatagtgagaaaatcgtgaacggcacaaagcggtccagccgtcgagctggcaaggcggaacagacgggcaacaagagatcgaagccactaatgcggtccgagcctgagaagaatactgaagagagtgtcgaggggatcgtcgtgttggagaataatcctcctggcctgctgaaccagactgaatgcgtgagcgacaatcaggtacaccttagtgaatctaccatggaacacgataatacgaaattaaaggccgcaacagtagagaatgctgtgctcctggagaccaatactgttgaagagaaaaacgtggagatcaatcttgaatctaaagaaaatacaccaccagtcgtcatctccgcagaccagatggtaaacgaggattctcaggttcagattactccaaaccaaaaaaccctcagaaggtcttcccggaggcgttccgaggtagtggagagcactaccgagtcacaggataaagagaattcacatcagaagaaggaacggagaaaggaggaggagaagccactgcagaagagtccgctgcacataaaagatgacgttctgcctaaacagaaactcattgctgagcaaactctgcaggaaaacctcattgagaaaggaagcaatttgcacgagaagaccttaggcgaaacctccgccaatgccgagaccgaacagaataaaaaaaaggcggaccccgaaaacattaaaagtgagggcgacgggactcaggacattgtggacaaatcttccgaaaagttggttagggggaggacaagataccagacaaggcgcgcttcccagggactcttaagttcaatagaaaattcggagagtgattcatccgaggctaaagaagaggggtctaggaaaaagcgttccggcaagtggaaaaataaatctaacgagtcggtggacattcaggaccaagaggaaaaggttgtcaagcaggaatgcatcaaagccgaaaaccagagccacgattataaagcaacaagcgaggaagatgtgtccatcaagtccccaatatgcgagaaacaggacgagagcaacactgtcatctgtcaggattctactgtgaccagcgatttgcttcaggtccctgatgatttacccaacgtctgcgaggaaaagaatgagacctctaaatatgccgaatatagctttacatctcttcctgtgcccgagtcaaacttgcgcacccggaacgccatcaagaggcttcacaagcgggatagctttgacaactgtagcttaggcgaatcgtctaaaatcggaatttcggacattagcagcctgtctgaaaagaccttccaaactcttgagtgtcagcataagagatcacgaagagtccgaaggtccaaggggtgtgattgttgcggcgagaaatctcagcctcaggaaaagtccctgattggcttaaaaaacaccgaaaacaacgacgtggagatttccgagaccaaaaaggccgacgtccaggccccagtgtctcctagcgagacaagtcaggctaatccttattccgagggtcagtttctggacgagcaccacagcgtcaacttccatctgggcctgaaagaagacaacgatactatcaatgattctctgatcgtcagcgaaacaaaaagcaaggaaaacaccatgcaggagagcctgccctccgggatcgtgaatttcagagaggagatatgcgacatggactctagtgaagccatgagtctagagtcacaggagtccccaaacgagaacttcaaaaccgtgggaccgtgtctgggagacagcaagaacgtttctcaggaatccttggagaccaaagaagagaagccagaggagacaccaaagatggagctgtctcttgaaaatgtaaccgttgagggcaatgcctgtaaagtaactgaaagcaatctcgagaaagctaaaactatggagctgaacgttggcaacgaggccagcttccacggccaggagcgtaccaaaactggcatttctgaagaagccgctattgaggagaataagcgaaacgacgactcagaagccgataccgccaaactcaacgccaaggaagtggctacagaagaatttaattcagacatctccctatctgacaatacaacccccgtaaagctgaacgctcagaccgagatctccgagcaaacagcagccggagagctggatggaggcaacgatgttagtgacctgcacagctccgaggaaacaaacaccaaaatgaagaataacgaagagatgatgattggcgaagcgatggccgagaccggccatgacggggagacggaaaatgagggcatcactaccaagacctcaaagcccgacgaagctgaaacgaacatgctaacagctgaaatggataacttcgtctgcgatactgtcgagatgagcaccgaagagggcatcatcgacgccaacaaaaccgagaccaacaccgagtactctaaaagcgaggaaaaacttgacaataaccaaatggtcatggaatccgacatcctgcaggaggaccaccacacatcacaaaaggtggaggaaccaagccagtgtctagccagtggcaccgctatttcagagctgattattgaagacaacaacgcgagccctcagaagctgcgagagctcgacccttctctggtgtctgccaatgactcgccaagcggtatgcagacacggtgtgtgtggagccccctggcaagtccatctacttcaatcctcaagcgaggactgaaaaggagccaagaggacgaaattagctctccagtgaataaggtgcggcgtgtgtcctttgcggacccgatctaccaggctgggctggccgacgacattgacagacggtgttctattgtgagatctcacagttccaactcatcacctataggcaaaagcgtcaaaacgagccctacgacccagtctaaaatttctgagatggctaaagaaagtatcccgtgccccacagaaagcgtttaccctcctttggttaattgtgttgcgccagtcgacatcattctccctcaaattacatccaacatgtgggccagaggcctaggacagttgattagagctaaaaatatcaagacaatcggcgacctgtccacattgacagcatcagagatcaagaccctcccgatccgctcaccaaaagtatcaaatgtgaaaaaagccttacgaatatatcacgagcaacaggtaaaaacacgtggactcgaggagatacctgtgttcgacattagcgagaagacggtcaacgggatagagaacaagtcactgtcccctgacgaggaacggctggtaagcgacatcattgaccccgtcgcccttgagataccactctcaaagaatcttctcgcccaaatatctgctcttgccctgcagttagatagtgaggatcttcataactatagcgggtctcagctctttgaaatgcacgaaaaattgtcttgcatggccaactctgtcatcaagaacctccaatccagatggcgttcaccttcccacgagaactccattta

SEQ ID NO: 30523 - DNA, 1026 bp, synthetic construct
  misc_feature 1..1026: note = Description of Artificial Sequence: Synthetic coding sequence
  source 1..1026: mol_type = other DNA
atgacggctcggggtcagtcccccctagcccctctgctggaaacactggaggacccatccgcctctcacggcggacagacagacgcttacctgaccctgacatcccgcatgaccggggaagaaggtaaagaagtgatcacagagatcgaaaagaaattacccagactgtacaaggtgcttaaaactcacatcagctcccaaaattctgagctgtcctcggcggctctgcaggcgctcggtttttgcctttacaatcccaaaattacgtcagaactgtctgaggccaacgccctcgaattactgtcaaagcttaatgatactatcaaaaattcagacaaaaacgtgcgcactagagccctctgggttattagcaaacaaacatttcctagcgaggtagtgggaaaaatggtgagtagcataattgattcattagaaattctgttcaataagggggagacgcattcagcagttgttgactttgaagctctcaatgtgattgtgagactcatcgaacaggcgccaatacaaatgggtgaggaggccgtgagatgggccaagctggtgataccactggtggtccattcagcacagaaagtccatctgcgcggtgcaacagccctggaaatgggcatgccattactgttacaaaagcagcaggagatcgcctccattaccgagcaattaatgacaacaacactccaccgaagcggttctttcattaacagcctactgcaactagaagagcttgggttcaggtccggagccccaatgatcaagaaaatcgcctttatcgcctggaagtctctcatcgataatttcgcactgaatccggacattctgtgtagtgctaaaagactgaagcttcttatgcaacccttgagttctattcacgtgcgtactgaaaccctggccctcactaagcttgaggtttggtggtacctcctgatgagactaggcccacacctccccgctaactttgaacaggttctgcctcctagaacggagcctagggaactccctgagtag

SEQ ID NO: 30524 - DNA, 7418 bp, synthetic construct
  misc_feature 1..7418: note = Description of Artificial Sequence: Synthetic coding sequence
  source 1..7418: mol_type = other DNA
atgacagcaagaggtcagtccccgctggcccctctgctcgagaccctcgaagacccatcagcatcacacggcggacagacggacgcatatctcacactcaccagccgcatgacaggcgaggagggtaaggaagtgataaccgagatcgaaaaaaaactccctagattgtacaaggtgttaaaaactcacatttcatcccagaactctgagctctcctccgccgcactgcaggccctgggattttgtctgtataacccaaagatcacctcggaattaagtgaagctaacgccctggaattactgtccaagctcaacgataccataaagaattcggacaagaacgttcgaacgcgggctctgtgggttatctccaagcaaacgtttccttctgaggttgttggaaagatggttagtagtataatcgacagcctggaaatactgttcaacaaaggtgaaactcattccgcagtggtcgacttcgaggctcttaacgtcattgtgcgattgatcgagcaggcgccaatccagatgggagaagaagccgtacggtgggcaaagctggtaattcccctggtggtgcactccgctcaaaaagtgcatctgcggggtgcaactgcactggagatgggaatgcctctcctgctgcagaagcagcaggagatcgcttccatcacagaacagcttatgaccaccaaactgataagtgagcttcagaaactctttatgagtaagaacgagacttatgtgttgaagctgtggccactgttcgtgaaactcctgggcaggactttgcacagatctggctccttcattaattcgctgttgcaacttgaagagctaggatttaggtccggagccccaatgatcaaaaaaatagcctttatcgcgtggaaaagtctcatcgacaactttgcccttaaccccgacattctatgctcagccaagaggcttaaattactgatgcaacccttgtcgtccatccacgtgaggactgaaacgctcgcacttacaaagctcgaagtttggtggtaccttctcatgcgtctgggtccacatctgcctgccaactttgaacaggtctgtgtgcccctgattcaaagtacaatctcaattgactccaacgcttcaccacagggtaactcgtgccatgtcgccacctcgccgggtctgaatccaatgacaccagttcacaagggtgcgtcgagcccctacggtgccccaggtacgcctcggatgaatttgagctcgaatttgggaggcatggcaactattccaagtatccagctgctgggtctggaaatgcttctgcacttcctgctaggtcctgaagctctaagtttcgccaaacagaataaactggtactcagcttggagccacttgagcaccctctgatctcatcccccagttttttcagcaaacacgcaaatactttaattacggccgtgcacgacagctttgttgctgtaggaaaggacgccccagatgtcgtggtatccgccatctggaaagaattgatcagcctagtgaagtcagtgaccgagtcgggtaacaagaaggagaagcctggcagtgaggtccttacccttctgctgaagagccttgagagcattgtgaagagcgaagtttttcccgtgagcaagacactagttctcatggaaataacaatcaaaggtctgccgcaaaaggtcttgggctcacccgcttaccaggttgccaacatggatattctgaatggcacccctgccttgttcctgattcagctgattttcaataactttctggaatgcggagtctctgatgaacgcttttttctgagcctcgaatctctggtgggctgcgtcctgtctggccctacctccccactggccttcagcgattccgtgcttaatgttatcaaccaaaacgccaaacaacttgagaataaggaacatctgtggaagatgtggtctgtgattgttacccccttgaccgagctcatcaaccaaacaaacgaggtcaaccagggagacgctctcgagcataatttctcagcgatctacggcgctctgactttacccgtgaaccatatcttctctgagcagcggttcccagtggcaaccatgaaaacacttttgcggacatggtctgagctgtacagggctttcgctcggtgcgctgccctggtggccaccgccgaggaaaatctgtgttgtgaggagctcagctcaaagattatgtcctcactcgaggacgagggattctctaatctgctcttcgtcgataggattatctacattatcacggttatggttgattgtattgatttttcgccatacaatatcaaataccaacccaaggtgaaaagccctcagcgtccttccgactggagtaagaagaaaaatgagcccttgggcaagctgacctcactgttcaagctgatcgtaaaggttatctactccttccacacactgagcttcaaagaggcgcactcagatacgctcttcactatcggtaattccatcacaggcataatctccagcgttttaggccatatctctctaccctctatgattcgtaagatcttcgccacccttaccaggccactcgcattgttttatgaaaattccaaattagacgaggtccctaaggtttattcctgcctcaacaacaaacttgagaaactgctcggagaaatcatcgcatgcctacagtttagctataccgggacctacgattcagaactgctggaacagctaagcccgttgctctgtattatattcttgcataaaaacaaacaaatccgaaagcagagtgcgcagttctggaacgccacgtttgcaaaagtcatgatgctggtatatcccgaagaactcaaacctgtcctaacacaggcaaagcagaagtttttgctgctgctccctggacttgaaacagtggagatgatggaggagtcctccggcccttatagcgatggtactgagaacagtcaacttaacgtcaagattagtgggatggagaggaaatccaacggaaaaagagattccttcctggcacagacaaaaaacaaaaaggagaacatgaagccagctgccaagctgaagctggagagctcaagcttaaaggtaaagggagagatccttctggaagaagaaaaatctaccgatttcgtgtttatccccccagaaggaaaggatgcgaaagaaaggatcctgacagaccaccagaaggaggtgctcaagaccaagcgctgtgacatcccagcaatgtataataaccttgacgtgtcccaggatacactgttcacacagtacagtcaggaagagcccatggagatccccacattgactcgcaagcctaaagaagactcgaagatgatgattacggaggaacagatggactcggacatcgtgataccccaggacgtgactgaggattgcggaatggccgagcacctggagaagtccagcctgtcgaacaacgagtgtggtagcctggacaagacctcacctgaaatgtctaactctaataacgatgaacggaagaaggccctgatctcatctagaaaaacatccactgagtgtgctagcagcaccgagaatagttttgtggttagttcctcatctgtgtcgaatacaacagtagccggaacaccaccatacccaacgagcagacggcagactttcatcacactcgaaaaattcgacgggagcgaaaaccgtccattctccccgtccccactaaacaatatctcctccacagttaccgtcaaaaataatcaggaaaccatgatcaagaccgatttcctccctaaagctaagcagagggaaggcacatttagcaagtccgatagcgagaagatcgtgaatggaacgaaaaggtcctccagacgtgcgggaaaagctgaacagaccggtaataaacggagtaagcctctgatgcgctccgaacccgagaaaaataccgaggaatccgttgagggaattgtagtgctggagaataacccaccagggcttctgaaccagaccgaatgcgtgagcgacaaccaggtgcacttgagcgaaagcactatggaacacgacaacaccaagctgaaggccgcaacagtggaaaatgcagtcctgctggagacaaataccgtggaggagaaaaacgtcgagattaatcttgagagtaaggagaacacgcccccagtggtgatctcagctgaccagatggtgaatgaggattctcaagtgcagataaccccaaatcagaagacactccgtcgttcaagccgacggaggagtgaggtggtggagtcaacgacggagagccaggataaagagaatagtcaccagaaaaaggagcggagaaaagaggaggagaaacccctccagaaatctccgctgcacatcaaggatgatgtcctgcccaagcagaaactcatagccgagcagactctccaggaaaaccttatcgaaaaggggtcaaatctccacgagaaaaccctgggtgaaacgtctgccaacgccgaaacggagcaaaacaagaaaaaagctgatcctgaaaacattaaatctgagggggacggtacccaggacatcgtcgacaagagttcagaaaagcttgtgcgaggcagaactcgctaccagactagacgagccagtcaaggtttgctcagcagcatcgaaaacagcgagagtgactcctccgaggcaaaagaggaggggtccaggaagaagcgcagcgggaaatggaagaataagtccaatgaaagtgttgatatccaagatcaagaggaaaaggtggttaagcaggaatgtatcaaggccgagaaccagtcgcacgactataaagccacttctgaagaagatgttagtattaagagccccatatgtgaaaaacaggacgaatccaatacagtcatctgccaggatagcactgtgacatccgacctgctccaggtgcccgatgatctgcccaatgtgtgcgaggagaagaacgagacaagcaaatacgccgaatattcttttaccagcttaccggtgccagaatccaacctcagaacaaggaacgccattaagagacttcataaacgagactcattcgataattgttcattgggcgagagtagcaaaattgggatctctgatatcagcagcctgtctgagaagactttccaaaccctggagtgccagcacaagagatcgagaagagtgcggagaagtaagggatgtgattgctgtggagaaaagtcccagccccaggagaagtcactcatcggcctcaaaaatacagagaataacgacgtcgagatctccgaaacaaaaaaggcagacgtacaggccccagtgtccccaagcgagacaagtcaggcaaacccttacagcgagggccagttcctagatgagcaccactcagtcaacttccacttgggcctcaaggaggacaatgacactattaatgactccctcatagtttctgagactaagtcgaaagagaataccatgcaggaaagcctcccctccggtattgtgaattttcgtgaggagatttgcgacatggattctagcgaagctatgtctctggaaagtcaggagtctcccaacgaaaatttcaagacagttgggccatgtctgggtgattccaagaatgtcagtcaggagtcacttgaaactaaagaggagaagccagaagaaacacccaaaatggaactatccctcgaaaacgtcacagtggaaggcaacgcctgcaaggtgacagagtcgaacctcgagaaggccaagactatggagcttaacgtcggaaatgaggcgtctttccatgggcaggagcgaactaaaacagggatttctgaggaagccgcaattgaggagaataagcggaacgacgacagcgaagcagatactgcaaaactcaacgccaaggaggtcgccacagaagagtttaactccgacatcagtctgagcgacaataccacgcctgttaagctcaacgctcaaaccgagatctctgagcagaccgcagccggagaactagatggaggcaatgatgtaagcgacctccatagcagcgaagaaacaaataccaagatgaagaacaacgaggaaatgatgattggcgaggccatggcagaaaccggtcatgacggcgagactgaaaatgagggcattacaacaaaaacctccaagcctgacgaggcagagacaaatatgctgaccgccgagatggataactttgtgtgcgatacggtggaaatgtcgacagaagagggaatcatcgatgctaataagacagaaacgaacacagaatattctaaatcagaggagaagctggataacaaccagatggtgatggagtctgatatactgcaagaggaccaccacaccagtcagaaggttgaggagccgtcccagtgtctggcctctggcactgccatctcggagctgataattgaagacaacaacgcgagtcctcaaaaactgcgtgagttggacccctccctggtctccgccaacgatagcccttccggaatgcagaccaggtgcgtttggagccccctcgcctccccttccacctctattttaaagaggggcttgaagcgatcacaagaagacgaaattagctctccagttaataaggtcaggcgtgttagcttcgctgaccccatttatcaagctgggctggctgatgacatcgaccgcagatgctcaattgtgcgtagccactcttctaatagttctcctatagggaagtccgtgaagacttcgcccaccacgcagagcaagcataatactacatcagccaaggggttcctgagcccaggttcaaggtccccaaagtttaaaagttctaagaagtgtcttatctcagaaatggcaaaggagtccattccctgccccacagaaagcgtctaccccccacttgtgaattgcgtggcacccgtggacataattctgcctcaaattacaagcaatatgtgggccaggggcttaggtcagttgatccgcgctaagaatataaagaccattggggatctatcaaccctgacagcttcggaaatcaagactctgcctatccgatctccgaaagtgagcaatgtaaagaaggcgctccggatctaccatgagcaacaggtgaagactcggggacttgaagagatccccgtttttgatatctccgaaaaaacagtgaatgggatagaaaacaagagtctgtcacctgatgaggagaggttggttagcgatataatagaccccgttgcccttgagattcctctaagtaagaacctcctggcccagatttcggctcttgccttgcagttggattccgaagaccttcacaattattccggatcgcagcttttcgaaatgcatgagaagctgtcctgcatggcaaacagtgtgattaagaacctccagtccaggtggcgtagcccctcacacgaaaattccatcta

SEQ ID NO: 30525 - DNA, 7340 bp, synthetic construct
  misc_feature 1..7340: note = Description of Artificial Sequence: Synthetic coding sequence
  source 1..7340: mol_type = other DNA
atgaccgcgcgtggtcagtccccactagcccctctgctagaaaccttggaggacccttcggcctcacacggcggtcagaccgacgcgtacctaactctgacatcccgcatgaccggtgaggaagggaaggaggttatcactgaaatcgagaagaagcttccacggctctacaaagtgctgaagacccatataagctcccaaaatagcgagctgtcaagcgcagccctgcaggccctgggattctgtctttataaccccaaaataacttcagaattgtccgaggcaaacgctctggagttactgagcaaactgaatgatacaatcaagaattcagacaagaatgtccgtactcgcgctctctgggtgataagtaagcaaacttttcctagtgaggtggttggcaagatggtctcctctataatcgattctttggagatcctgttcaacaagggagaaacccacagtgccgtggtggacttcgaggcgctgaatgtgattgtgcgattgattgaacaggcccctatccagatgggcgaagaggcggttcgctgggcgaagctcgttataccactcgtcgtgcatagcgctcagaaagtccacttgcggggtgcaactgcgcttgaaatgggcatgcccctgcttcttcaaaaacagcaggagatagccagcattacagaacaattaatgacgactaaactcatctcggagctgcagaagctctttatgtctaagaatgaaacatacgtgctcaagctgtggcccctcttcgttaagttactggggaggactttacatagaagcggcagctttatcaactcactcctccagctagaggagttgggcttccgctcaggagccccaatgatcaagaagattgcctttatcgcctggaaatctctcatcgataacttcgccctaaatccagacatcctctgctccgccaagcgactcaagctgcttatgcagccactgtcatctattcacgtgagaaccgagaccctggccctcaccaaactcgaggtgtggtggtatctgctgatgaggctgggaccccacttacccgcaaacttcgaacaggtgtgcgttcccttaattcagtcgaccatctcgattgatagtaacgcctccccacaggggaattcctgccatgtggccacctcacctgggctcaatcctatgacaccagtgcacaaaggggcatcatctccatacggtgcacctggaacgcctaggatgaatttgtcttccaatctggggggtatggctaccataccgtcaatccagctgctcggcctggaaatgctgcttcactttttgctgggaccggaagcactgtccttcgcgaaacagaataaactggttctaagccttgaacctcttgagcatcccttaatcagttcaccttcctttttttccaaacatgcaaacacactgatcaccgctgtgcatgattcatttgttgccgtgggcaaagacgctcccgatgtggttgtgagcgcgatctggaaggagctgatttccctggtgaagagcgtaaccgaatctggcaataagaaggagaaacccggttctgaagtgttgacccttctgttaaagtcactcgagtcaattgtcaagagcgaagttttccccgtgagcaagacattagtgctgatggaaataacaataaagggtctcccgcagaaggtcctggggtcacccgcttatcaggtggccaatatggacattctcaatggtactcctgcactcttcctgattcagttgattttcaacaatttcctggaatgcggcgtatctgacgaacggtttttcctgtccttggaatccctggtgggatgcgtgttgtctggccctacttccccactcgctttctccgatagtgtcctgaacgttattaaccagaacgctaagcaactggagaacaaggaacatctatggaaaatgtggagtgttatcgttactcccctgacggagttgattaatcagaccaacgaagttaaccaaggggacgcattagagcataattttagcgcaatctacggcgctctgactttgcctgtgaaccatatcttttcagagcagcgatttcccgtggctaccatgaaaacactactgaggacctggagtgagctctacagggccttcgccaggtgtgcggctcttgttgcaacggctgaggaaaatctatgttgcgaagaactcagcagcaagatcatgtccagcctggaagacgaaggcttttctaacctgctcttcgtggatcggatcatctacattattactgtgatggtggattgcattgatttctcaccctataacattaagtaccagccaaaggtgaaatccccccagcggccttccgattggagcaagaaaaaaaatgaaccactgggaaagctcacctctctgttcaaactgatcgtgaaggttatctattccttccacactttatccttcaaagaggcccactcagacaccctattcacaataggaaactctataaccggtattatctcaagcgtgctgggccacatcagtttgccctcaatgatccggaaaatttttgccacactaacccggccactggctctgttttacgagaactccaagctcgatgaggtgccaaaggtgtactcttgtctcaataacaaactggagaagctgctaggggaaatcattgcatgtctgcagttttcatatacagggacatacgactcagaattgttggaacagctttctcccctactttgcatcattttcctccataaaaacaagcagattaggaaacagtcagctcagttctggaacgctacttttgctaaggtgatgatgttggtgtacccagaggagctgaagcctgtgttgactcaggccaaacagaagtttctgctacttttgccgggtctggagactgtcgaaatgatggaagagagtagcggaccgtactcggacggaaccgaaaactcccagttgaatgtcaagatctcaggcatggagcgcaagtccaacggcaaaagggatagttttttggcccagacgaaaaacaaaaaggagaatatgaagcctgctgccaaactgaagctggagagtagttcactgaaagtgaagggtgagatccttctggaagaagagaaaagtacagatttcgtatttattccgcctgaggggaaagatgcaaaagaaaggatcctgacagatcatcagaaggaagtccttaaaacaaagcgttgtgacatccccgcaatgtacaataacctggatgtgtcacaggatactctattcacccaatattcacaggaggaaccaatggagataccgaccttaaccagaaagccgaaagaggactccaaaatgatgattactgaggagcagatggatagcgacattgtcataccacaagacgtgaccgaagactgtggtatggcagaacaccttgaaaagtcatcactctcaaataatgagtgcgggtctcttgacaagacctccccagagatgagtaacagcaacaacgatgagaggaaaaaagccctgatcagtagccgcaagacgagtacagagtgtgccagctcgacggaaaatagctttgtggtatccagctcctccgtcagcaacaccacagtggcaggcacccccccatacccaacaagtcgtaggcagacatttattacacttgaaaagtttgatgggtctgagaatcggccattctccccatccccccttaataatatcagcagtacggttaccgttaagaacaatcaggagacaatgattaagacggatttcctgcctaaggccaaacagcgggaaggtaccttttccaaatctgatagcgagaagatagtgaacggaacaaagaggagtagcagaagggcagggaaggccgagcaaacaggtaacaaaaggtcgaaacccctaatgcgcagcgagcctgagaagaacactgaagagtccgttgagggaattgtcgtgttggaaaacaaccccccagggttgttgaatcaaacagaatgcgtgtcagacaatcaggtccacttatcagagagtacgatggagcatgataacaccaagctcaaggccgctactgtcgagaacgctgtgttactggaaacgaatacagtcgaggaaaagaatgtcgaaattaacttggagagcaaggagaatactccccctgtggtcatctctgccgatcagatggtgaacgaggatagccaggtacagattacccccaatcagaagacactgcgacgctcctccagacggcgatctgaagtggtggagtcaacaacggaatcacaggataaagagaactcacaccagaagaaagagagacggaaggaggaggagaaaccactccagaaaagcccactgcacattaaggatgacgtgctccctaagcagaaactcatcgctgagcaaacattgcaagagaacctaatcgaaaaaggatccaatctgcatgaaaagacgttgggcgagacaagtgccaatgctgagaccgagcagaacaagaagaaagcagatcccgagaatatcaaaagtgaaggcgacggcacccaagacatcgtcgataaaagcagcgagaagcttgtcaggggtcggacacgatatcagacaaggcgcgctagtcagggtctgctttctagcattgaaaatagtgaatccgacagttctgaggcaaaggaggagggttctcgcaagaaaaggtctggcaagtggaaaaataagagcaatgaatccgtggatatccaggatcaggaagagaaagtagttaagcaagagtgtatcaaagctgagaatcagtcccacgattacaaggctacatctgaggaggacgtgtccatcaagagtcccatctgtgagaaacaggacgagtctaacactgttatttgtcaagattctaccgtgactagcgatctcttgcaagtaccggatgacctacccaacgtgtgcgaggagaagaacgagacgtccaagtacgctgaatactccttcaccagcctaccggttcctgagtccaacctccgcacacgcaatgcaatcaagcggctccataagagagactcctttgacaattgttccctgggagagagcagtaaaattggaatctccgatatctcgagcctcagcgagaaaacctttcaaacgctggaatgtcaacataaacgctccaggcgggtgagacgctcgaaaggctgcgactgctgtggcgaaaaaagccagccacaggagaagtcactcataggtctgaaaaacacagaaaacaacgacgtcgagattagcgaaacaaagaaggctgatgtccaagctccagtttccccctctgagaccagtcaggctaacccatattccgagggccagtttctggacgagcatcatagcgtcaacttccatctcggtctgaaggaagataacgacacaatcaatgattctttgattgtgtccgagactaaaagcaaggaaaatacgatgcaagaatccctcccttccggtatcgtcaattttagggaagaaatctgtgacatggactcatctgaggctatgtctctggagtcccaggagagccccaatgagaactttaagacagtcggcccatgtcttggagattcgaagaacgtgagccaagagagccttgagacaaaagaggagaaaccagaggagactccaaagatggagctttccttggaaaatgtaacagttgaggggaacgcatgtaaggttacagagagtaatctagaaaaagcgaagacaatggagcttaatgtcggcaatgaggcatcttttcacggtcaagagcggactaagaccgggataagcgaagaggccgcaatcgaagaaaataaaagaaacgatgattccgaagctgacactgcaaagctgaacgcgaaagaggtggccacagaggaattcaacagcgacatctcactgagtgacaatacaactcccgtcaagctgaacgcccaaactgaaatctcagagcagaccgcggctggggaactggacggaggcaatgacgtgtccgatctgcactcttccgaagagactaatactaagatgaagaacaacgaggaaatgatgatcggagaggctatggccgagacagggcatgatggcgagaccgagaatgagggaattactacgaagacatcaaagcccgacgaagccgaaactaacatgttgactgcagagatggataactttgtgtgcgacaccgtagaaatgtccacagaagaaggcataatagacgccaataaaacagaaaccaatactgagtactccaaatcagaagagaaactggacaacaatcagatggtgatggaatcagatatcctgcaagaagatcaccatacttctcagaaggtcgaggaaccctcccagtgcctagcctcaggcaccgcgataagcgaactgattatcgaggataataatgcctctccacagaaactgcgggagctcgacccatcgctcgtatcagctaacgactcccccagcggcatgcagacacggtgcgtgtggagtccactcgcttccccgagcaccagtatcctaaaacgaggactcaaacggagccaggaggatgaaatctcgtcacccgtaaacaaagtccgaagggtgagctttgctgaccccatataccaggccggactggcagatgatatcgacaggcggtgttcaatcgtcaggagccactctagtaattcttccccaatcggaaagtctgtgaaaacatcacctacaacacagagcaagatctccgagatggccaaagaaagcattccatgccccaccgagtccgtctatccaccactcgtaaattgtgtcgctcccgttgacatcatcctgccacaaattacctcgaatatgtgggctcgaggcctcgggcaattgattagggccaagaacattaagactattggggatctgagcactttgaccgcttctgagataaaaacactcccaatccgttcaccaaaggtgagcaatgtgaaaaaggctctacgcatctatcacgagcaacaagtgaaaacacgtggcttggaggaaatccccgtttttgatatctcagagaagaccgtaaacggcatcgaaaacaaatccctttcccccgacgaagaaagattggtgtcagacatcattgatccggtggctctggagatccctctgtccaagaatcttctagcccagatcagcgctcttgccctccagctcgattctgaagacctgcacaactattcagggtcccagctcttcgaaatgcatgaaaagctgagctgcatggccaactccgtgatcaagaatctacaaagcagatggaggagcccctctcacgagaattccatcta

SEQ ID NO: 30526 - DNA, 555 bp, synthetic construct
  misc_feature 1..555: note = Description of Artificial Sequence: Synthetic coding sequence
  source 1..555: mol_type = other DNA
atgcgcgaatacaaactggtggtactggggtcggggggagttggaaagtcagccctgaccgttcagttcgtccaggggattttcgtcgagaagtatgacccgaccattgaagactcctacagaaagcaggtcgaggtcgattgccaacagtgcatgttagagatcttggatacagccggtactgaacagtttacagccatgcgtgatttgtatatgaaaaatggacagggctttgccctcgtgtactccattaccgcacaatctacattcaatgatctccaagatttgcgggagcagatactacgggtgaaagacacagaggacgtgccaatgatcctcgtcggtaacaaatgcgatctagaggatgaacgggtcgtgggcaaggaacagggtcaaaatttagccaggcagtggtgcaactgcgccttcctggagtctagtgccaagtcaaagatcaacgttaacgagatattttacgatctcgtgaggcaaattaacaggaagacacctgtagagaagaagaaacccaagaagaaatcttgcctgctgctctag

SEQ ID NO: 30527 - DNA, 555 bp, synthetic construct
  misc_feature 1..555: note = Description of Artificial Sequence: Synthetic coding sequence
  source 1..555: mol_type = other DNA
atgcgggagtataagctagtggttctaggttctggcggagtaggcaaatctgcgctgacagtgcagttcgttcaggggatatttgtggagaagtatgaccccaccatcgaagattcgtatcgaaaacaggttgaggttgattgccagcaatgcatgcttgagatcttggacacggcaggcacggaacagttcactgcgatgagagacctctatatgaaaaatgggcaggggtttgctctggtgtactctatcactgcccagtctaccttcaatgacttacaggacctgcgtgaacagattctcagagtgaaagacactgaagatgtccccatgatcctggtgggcaacaagtgtgatcttgaggatgagcgggtcgtgggaaaggaacagggccagaatctggcacgacagtggtgtaactgtgccttcctcgagtcatctgccaagtcaaaaattaatgtgaacgaaattttttatgacctcgtcagacagattaatagaaagacgcctgtcgagaagaaaaaacctaagaagaagtcctgcctgctcctgtag

SEQ ID NO: 30528 - DNA, 390 bp, synthetic construct
  misc_feature 1..390: note = Description of Artificial Sequence: Synthetic coding sequence
  source 1..390: mol_type = other DNA
atgcgggaatacaaactcgtggttctaggttccgggggagtcggtaaatccgcactgaccgtccaattcgtgcagggtatcttcgtggagaagtacgatcccaccattgaagactcttacaggaaacaagtggaggtggactgtcagcaatgcatgctggaaattcttgacacggcaggcaccgaacagtttacagcgatgcgcgacctgtacatgaaaaatggccaaggcttcgcgcttgtgtacagcataaccgcgcagagcactttcaatgacttgcaagacctgcgagaacagatcctccgtgtgaaggataccgaggatgtgcccatgatcttggtcggcaacaaatgcgatttggaggatgagcgagtcgttggtaaagagtag

SEQ ID NO: 30529 - DNA, 555 bp, synthetic construct
  misc_feature 1..555: note = Description of Artificial Sequence: Synthetic coding sequence
  source 1..555: mol_type = other DNA
atgagagagtataaactggtggttctgggaagcgggggtgtgggcaaatctgccttgacagtgcaattcgtgcaggggatttttgtggaaaagtatgatcccaccattgaagatagctacaggaaacaggttgaggttgattgtcagcagtgtatgttagaaattttagacaccgccggaacagagcagttcaccgccatgcgggatctttacatgaagaatggccagggcttcgctcttgtgtactctattacagcccaatccacctttaatgatcttcaggatctccgggaacagattctcagagtaaaagacaccgaggacgtcccaatgattctggttggaaataaatgtgaccttgaagatgagagagtggtgggcaaggaacaggggcaaaacctagcccgtcagtggtgcaattgtgcttttttggagagttccgccaagtccaagatcaatgttaatgagatcttctatgacctggtgcggcaaatcaatcgaaagacacccgtggagaaaaaaaagccgaaaaagaagtcgtgtctacttctctag

SEQ ID NO: 30530 - DNA, 555 bp, synthetic construct
  misc_feature 1..555: note = Description of Artificial Sequence: Synthetic coding sequence
  source 1..555: mol_type = other DNA
atgagagagtataagctcgtagtcctcggctctggcggagtggggaagtccgctctgacggtgcagttcgtccaagggattttcgtcgagaagtatgatccaaccattgaagatagctatagaaaacaggtcgaggttgattgccagcagtgtatgctggagatcctcgacaccgcgggaactgaacagtttaccgccatgagagacttgtacatgaaaaacggccaggggtttgcactcgtgtacagcatcacagctcagtcgacatttaatgatctgcaggatttaagggagcaaatccttagagttaaagacacggaggatgtcccaatgattctggtggggaacaaatgcgacttagaggatgagagagtcgtgggcaaggagcagggccagaacctggcgcgacagtggtgcaattgcgctttcctggagagctccgccaagagcaagataaacgtgaatgagattttttacgacttggtgcggcagataaatcggaagacacccgtggagaagaagaagccaaagaagaagtcttgtttactgctctag

SEQ ID NO: 30531 - DNA, 1380 bp, synthetic construct
  misc_feature 1..1380: note = Description of Artificial Sequence: Synthetic coding sequence
  source 1..1380: mol_type = other DNA
atgcgcgcacagatcgaagtcattccatgcaagatctgtggggataagagctctggcatacattatggagtcataacttgtgaagggtgcaaagggtttttcagacgctctcagcagaacaatgcgagttacagttgtccgagacagaggaactgcttgattgatagaaccaatcggaatcgctgtcaacattgccggctgcaaaagtgcctggcccttggaatgagtagggatgctgtgaaatttggacgaatgagtaagaagcaacgtgactccctctacgcagaggtgcagaagcaccagcagagactgcaggagcaacgccagcaacagagcggggaggccgaagctctggcgagggtgtatagctcttccattagcaacggactgtccaacctgaataatgaaaccagtggtacctatgcaaatgggcacgtgatcgatttgccaaagtccgagggctactacaacgtcgattccggacagcctagcccagaccagtccggattggacatgaccggtattaagcagattaaacaggaacccatttacgacctgacgtcagtgcctaatctgttcacgtatagcagtttcaataatgggcagctggcacccggtatcacgatgaccgaaatcgaccgaattgctcagaatattataaaaagccacttagaaacctgccagtatactatggaagaacttcaccagcttgcctggcagacgcatacttatgaagaaattaaggcataccaaagtaagtctagggaggccctgtggcagcaatgcgcaattcagatcactcacgcaatacaatatgtggtggaatttgccaagcgcatcactggatttatggagctctgccagaacgaccagatcttgctgcttaagtccggatgcctggaagtggttcttgtgcgcatgtgtcgcgcatttaaccctttgaataataccgtcctgttcgaaggtaaatatggcggaatgcaaatgttcaaagctctgggttccgacgacctggtgaatgaggcttttgatttcgcgaaaaacctgtgttctctacagctgactgaagaggagatcgccctatttagttccgcagtgctgatctcacctgatagagcctggttgattgaacctaggaaggtacagaaattgcaggagaagatatacttcgcgctccaacacgtgatacagaagaaccacttagatgacgagacactcgcaaagctgattgccaaaatccccacaattaccgcggtgtgtaatctgcatggagagaagctgcaggtttttaagcagtctcacccagagatcgtgaacactctcttccctcccttatataaggaactttttaaccccgattgcgccaccggctgcaagtag

SEQ ID NO: 30532 - DNA, 1413 bp, synthetic construct
  misc_feature 1..1413: note = Description of Artificial Sequence: Synthetic coding sequence
  source 1..1413: mol_type = other DNA
atgtgcgaaaaccagctgaagactaaggctgatgcaacagctcaaatcgaggtgattccatgcaaaatctgcggcgacaaatcctcaggcattcattacggagtgatcacttgcgaaggttgtaagggtttttttcggagatcccaacagaacaacgcctcctattcttgccctagacagcggaattgcctgattgatcgcactaatagaaatcggtgccagcattgccggctgcagaaatgcctggccctggggatgtctagagatgccgtgaagtttggacgaatgagtaaaaaacagagagactcactgtacgcagaagtgcagaagcatcagcagaggcttcaggagcaacgacaacagcagtcaggagaggctgaggccctcgcgagggtgtacagttctagtatctctaatggtctgtctaatctgaacaatgagacatctggaacatatgctaatgggcatgttatagacctcccgaagagcgagggttactacaatgtcgattccgggcagccttctccagaccagagtggactggatatgacaggaatcaagcaaataaagcaggaacccatttatgacctgacatcagttcctaacctgttcacgtactcctcctttaataacggacagctggctcctggcatcactatgacggagattgaccggattgcgcagaatatcataaaatcccacctcgagacctgccagtacaccatggaagagctgcatcagttggcctggcagacacatacatacgaggagattaaggcctaccagtcaaaaagccgggaggctttatggcagcaatgcgctatccagattacccacgccatccagtacgtggtggagttcgctaagaggataacaggctttatggagttgtgtcagaatgaccagatactgcttctcaaaagcgggtgtctggaagtggtcctggtgcgcatgtgcagggccttcaatcccttaaataataccgtcttgttcgagggtaaatacgggggtatgcagatgtttaaggcccttggatctgacgacctagtaaacgaggcttttgattttgcaaagaatctgtgttcgttacaattaacagaagaagagatcgcactgttctcttccgctgtgctgatctccccagaccgtgcatggctcatcgagccccgtaaggtgcagaaactgcaggagaagatctatttcgcccttcagcacgtgatacaaaagaaccatctggacgatgagactctcgcgaaactgattgcgaagatcccaacaattaccgccgtttgcaatttgcacggagagaagctacaggtcttcaaacagtcccacccagaaatagtgaacacactgtttcccccactgtacaaggaactgttcaaccccgattgcgccaccggctgtaagtag

SEQ ID NO: 30533 - DNA, 813 bp, synthetic construct
  misc_feature 1..813: note = Description of Artificial Sequence: Synthetic coding sequence
  source 1..813: mol_type = other DNA
atgggggaggctgaggctccgagctttgagatgacttggtcttcaaccacttcctccggctactgttctcaggaagattctgacagcgaactggaacaatatttcactgcacgcacatcactcgctcgaaggccacggcgtgaccaggatgaacctgtggagtgggagactccagacctgtctcaggccgagatcgaacagaaaatcaaggaatataacgcacagattaacagtaacctgttcatgtcattgaacaaagatggttcatatacggggtttatcaaagtgcaacttaaactggtgcggccagtgtcagtgccctcttccaagaaaccgcctagcctgcaggacgctcggcgtggcccagggcgtggtacttctgttcgaaggcggaccagcttttacctgccaaaagatgcggtgaagcacttgcatgttctctccagaactagggctagagaagttatagaagcactactgcgtaaatttctggtcgtggatgatccacgtaaattcgctctgtttgagcgggctgagaggcacggccaggtttatcttagaaagctgttggatgacgaacagcctctgaggctgcggctgttggccggaccttccgacaaagccctcagcttcgtactgaaggagaacgactccggggaggtaaattgggacgccttctctatgccagagctccacaactttctgaggattctgcagcgtgaggaggaagaacacttaagacagatcctgcagaagtattcctactgcaggcagaagatccaggaagcgttgcacgcttgtcctctaggctag

SEQ ID NO: 30534 - DNA, 1035 bp, synthetic construct
  misc_feature 1..1035: note = Description of Artificial Sequence: Synthetic coding sequence
  source 1..1035: mol_type = other DNA
atgtccggagagccggaactgattgaactccgcgagctagcaccagctgggagagcgggtaaaggccgaaccaggctcgaacgagcaaatgctctgaggatagccagggggacagcctgcaatccgactcgtcagttggtgcccggtagaggacacagattccaacctgccggaccggcaacacacacttggtgcgatctgtgtggagatttcatttggggggtggtgcggaaaggtcttcagtgcgctaggctgtccgcagactgcaaatttacctgccactacaggtgccgggctctggtctgtctggattgttgtggccctcgtgacctcggctgggagcctgccgtggagagggacacaaacgtcgatgaacctgtggagtgggaaacaccggatctttctcaagctgagatcgaacaaaagattaaggagtataatgctcaaattaactcaaatctgtttatgagcctgaacaaagacggttcttacacgggattcatcaaggttcagctgaaactggtccggcctgtctcagtaccatcctcaaaaaagcccccatcacttcaggacgccagaaggggaccaggacggggtacctccgttcgtcgccgaacatctttttatctgcctaaagatgccgtgaaacaccttcatgtgctttcccggacacgagcgagggaggttatcgaagccctcctcagaaaatttctcgtcgtcgatgacccgaggaaattcgcccttttcgagcgcgctgagcggcatggacaggtgtacctgcgtaaactacttgatgacgagcagccgttgaggctccgattactcgcagggccttccgacaaggccctgtcattcgtcctgaaagagaacgacagcggcgaagtgaactgggacgccttttccatgccagagttgcacaactttctgaggattctgcaacgggaggaggaggagcaccttcgacaaatactacagaaatacagctattgtaggcaaaaaatccaagaggcgctgcacgcctgtccccttggttag

SEQ ID NO: 30535 - DNA, 1023 bp, synthetic construct
  misc_feature 1..1023: note = Description of Artificial Sequence: Synthetic coding sequence
  source 1..1023: mol_type = other DNA
atgagcggggaacctgaactgatagagcttcgtgagctggcacccgcaggacgtgctggaaaggggagaacaaggctcgagcgcgctaatgccttgagaatcgcacgcggtactgcctgtaatcctacccgtcagctggtgcctggacggggacatagatttcagccagccggtcccgctactcatacttggtgcgatttgtgcggggattttatctggggtgtggttagaaaaggtcttcagtgtgcacactgcaagtttacctgtcactacagatgtagggccctggtgtgcctggactgctgtggacctcgcgacctgggctgggaaccagccgttgagcgagacaccaacgtcgatgagcccgtcgagtgggaaactcctgatctcagccaggcagagatcgagcaaaaaatcaaagaatacaacgctcaaattaattccaatctctttatgtctttaaataaagatggctcttacactgggttcatcaaggtgcagttgaagctcgttcggccagtgagcgtaccgtccagtaagaaaccccctagcctccaggatgcacggagaggcccaggccgaggaaccagtgtccgccgacggacatcgttctacttaccgaaagatgccgtcaaacacctgcatgtcctcagccgaactcgcgctagagaagtgatagaggcactcctaagaaaatttctcgtcgtcgacgacccacgaaaatttgcgctgttcgaaagagctgagaggcatggccaggtctatctgcggaaattacttgatgacgaacagccgctgcgcctccgactgctggcaggcccttctgacaaagccctttccttcgtgctcaaggagaatgacagcggggaggttaattgggacgcttttagtatgcccgagcttcacaattttctgaggatccttcagcgggaggaagaagaacacctgcgacagattctccagaagtattcttactgcagacagaagatccaggaagcattacacgcttgtccccttggctag

SEQ ID NO: 30536 - DNA, 570 bp, synthetic construct
  misc_feature 1..570: note = Description of Artificial Sequence: Synthetic coding sequence
  source 1..570: mol_type = other DNA
atgtccctgaacaaggacggcagctacacaggctttataaaagttcaactaaagctggtgcgcccagtgagcgtgccctcgagcaagaaaccacccagcttgcaagatgctaggcggggtcccggtagggggacctccgttcggcgaaggacgtctttttatttgccaaaagatgctgtgaagcacctgcatgtattgagtcgaacgagggcacgggaggttattgaggcactgctcagaaaattcttggtcgtggacgaccccagaaagtttgcccttttcgaacgcgcagagcggcatggccaggtgtacctcagaaagcttctggatgacgagcagccccttaggctacgactgctggctggtcctagcgataaagccttatcgtttgtactgaaagagaatgactcgggtgaagtaaattgggatgccttcagtatgccagagcttcacaacttcctgcggattcttcagcgcgaggaagaggaacatctgcgtcagatcctgcaaaagtactcttattgcagacaaaaaatacaagaagctctgcacgcttgtcctctaggttag

SEQ ID NO: 30537 - DNA, 981 bp, synthetic construct
  misc_feature 1..981: note = Description of Artificial Sequence: Synthetic coding sequence
  source 1..981: mol_type = other DNA
atggactattcacaccaaacaagcctggttccatgcggtcaagacaaatacatcagtaaaaacgagctccttctgcatctgaaaacttacaacctttactacgagggtcagaatttacagttacggcaccgagaggaggaggatgaattcatcgtggagggtctgctcaacatttcgtggggactgagaagaccaattcgcctccagatgcaggacgacaatgagagaatccgtccccctccttcctctagttcctggcacagcggatgcaatcttggcgctcagggaacaaccctcaaaccattgacggtgccaaaagtgcaaatttcagaagttgatgcaccacctgagggggaccaaatgccctccagcacagacagtcggggactgaagccactccaggaagacacaccgcagttgatgcgcacacggagcgacgtcggcgttagaagacgaggcaacgtccggaccccgtccgatcaacggcgtattcggagacacaggttcagcattaatggccatttttataatcacaagacatcagtttttacacccgcttacggttctgtcaccaatgtgcggattaattctacaatgacaacaccccaggttctgaagctactcctcaataaattcaagatcgaaaatagtgccgaggaatttgctctctacgtggtgcacactagcggcgaaaagcagaagctgaaggcaacagactacccactcatcgcgcgtattctgcagggcccatgcgaacagattagcaaggtgttcctgatggagaaagatcaggtggaagaggtgacctatgatgtcgctcaatatatcaaatttgaaatgcccgtcctgaagtcttttatccagaagctccaggaagaagaagatcgcgaggtcaagaaactgatgagaaaatacacagtcctgcgcctgatgattagacagcggcttgaagagatcgccgaaacacctgcaacaatttag

SEQ ID NO: 30538 - DNA, 981 bp, synthetic construct
  misc_feature 1..981: note = Description of Artificial Sequence: Synthetic coding sequence
  source 1..981: mol_type = other DNA
atggattattcccatcagacctctcttgttccatgtggccaagacaagtatatctctaagaatgagctcctgctgcacctgaaaacttacaatctgtactacgagggtcagaatctacaattgcgacatagagaggaggaggatgagttcatcgttgaagggttactgaacatcagctggggtctgaggagacccatcagattacagatgcaggacgataatgaaagaattaggcccccaccctcctcctctagttggcacagcgggtgcaaccttggggctcagggcaccacactcaaacctcttacagtgccaaaggtgcagatttcagaggttgatgcccctcctgagggtgatcagatgcccagctccaccgatagcaggggtttgaagcccctccaggaagacacacctcagctgatgcgaacaagatcagacgtgggcgtacgtaggcgaggtaacgttcggactccgagtgaccagcggaggattaggcggcaccgattctccatcaacggacatttttacaatcataagacaagcgtgttcacaccagcgtatggctccgtaactaacgtgaggattaactcaacaatgactacacctcaagttttaaagctgcttttgaataaatttaagatagagaacagcgccgaggaatttgcactctatgtggtgcacactagcggtgagaaacagaagctgaaggcaacagactatccactgatagcccgaatcctccagggcccatgtgagcaaatctccaaggttttcctgatggagaaggaccaggtcgaggaagtcacatatgatgtggcacagtatattaagttcgagatgcctgtgcttaagagctttatccagaagctgcaggaagaggaggatcgagaggtcaagaagctgatgagaaaatacacggttctccgtctcatgatcagacagcggctcgaagagatcgcggagacaccagcgacaatctag

SEQ ID NO: 30539 - DNA, 993 bp, synthetic construct
  misc_feature 1..993: note = Description of Artificial Sequence: Synthetic coding sequence
  source 1..993: mol_type = other DNA
atgaaggaggactgtctgccctcctcccacgtgcccatcagtgacagcaagtctattcagaagcgcgacgtgcaggggcttagtgaagaaggtacccttattattgagggattgctgaatattgcatggggcctgagacgcccaattagactccagatgcaagatgatagggagcaagtgcatctgccatccactagctggatgcccaggcgaccgtcttgccctctcggctgttggtccctactactggggctatcgagcctctcgctgccagctgccatatccgcactccagctcagcgtgttcagaaaggaaccctccccacagaacggcaacatcaccgctcagggacccagtatccaacccgttcataaggcagaatcctccactgattctagcgggcctcttgaagaggctgaagaagcccctcagctgatgcggactaagagtgacgcgtcttgtatgtcgcaaaggagacccaaatgccgagccccaggcgaggcgcagcgtatcagacggcataggtttagtattaatggccacttctataaccacaaaactagtgtgttcacacctgcctacggcagcgtgactaacgttcgcgtgaattcgaccatgactaccttgcaggtattaactctcctcctgaacaaatttagggtggaagatggccctagcgagttcgctctctatatagttcatgagagtggtgagcggactaagctcaaggattgtgaataccccctgatcagccggatcctgcacggaccctgcgagaaaatcgcgcgaatattcctcatggaagccgatttgggcgtggaggtaccacatgaggtggcacagtacatcaaattcgaaatgccggtcctcgactcatttgttgagaagttaaaagaagaagaagagagagaaatcattaaactgacaatgaagtttcaggcactgcgattaaccatgctgcagagactcgaacagctggtggaagctaagtag

SEQ ID NO: 30540 - DNA, 966 bp, synthetic construct
  misc_feature 1..966: note = Description of Artificial Sequence: Synthetic coding sequence
  source 1..966: mol_type = other DNA
atgaaggaggactgtctacccagttcgcacgtcccgatcagtgacagcaagagtatacaaaagtctgagctcctgggtctcctcaaaacctataactgctaccacgagggaaagtccttccagctcaggcaccgcgaggaggagggtacgctaatcattgagggactgctgaatatcgcctggggcctgcgcagaccgattagacttcagatgcaagacgatcgggagcaggtgcatttaccctccacatcctggatgcctcgtcgacccagctgtcctctaaaagaaccatcaccccaaaacggaaacataaccgcccagggaccctcaatccagcctgtccacaaagccgagtccagtacggactctagcggacccctggaggaggcagaagaagcccctcagcttatgaggacgaaatcagatgcttcttgtatgtcacagagacgcccaaagtgtagggcacccggtgaggcacaacggatccgtagacaccggttttccatcaatggccacttttacaatcataaaacatccgtgttcactcctgcttacgggagtgtgacgaacgtcagggtgaattctactatgacgacgctccaagtgctgacgcttcttctcaacaagttcagagtggaggatggcccatccgaattcgcactgtatatcgtgcacgaatcaggcgagcgcactaagctgaaagactgcgaataccccctcatctccaggattctgcatggtccctgtgagaagatcgccaggatatttctgatggaggctgacctcggcgtggaggtgcctcacgaagtggctcagtacattaagttcgagatgcctgttttagatagctttgtggagaaactcaaggaagaggaggaacgagaaattataaagctcacaatgaaatttcaggcccttcggctcacaatgctccaaagactggagcagcttgtagaagctaagtag

SEQ ID NO: 30541 - DNA, 1239 bp, synthetic construct
  misc_feature 1..1239: note = Description of Artificial Sequence: Synthetic coding sequence
  source 1..1239: mol_type = other DNA
ggttccaatgccggaggcggacaaggtggttgtcaaggccttacttgcgatagtgagtctgttggcacactggacatactggaccagacccaggcttgtcctgtaagcctcgcctccagtagtgctaggcccccatgcccgccacccggaccatgtgccgaaccttctggttgtattgctatggctgtctggtcccctcttgttatgccaggcagacgcgaaggttgctgccatacccccgttacaaacgaggaaacagaagctagagaggccaaaggccagaagttacgtccttgccacaccctcggagtgcatgtgtgtctaagtctattccggtctgaactgctggggctgctaaagacgtataactgctatcatgagggaaaaagttttcagcttaggcatcgagaagaggaaggaaccctgatcattgagggcttactgaacatcgcctggggactgcggaggcccatcaggttacagatgcaggacgacagggagcaggtgcacctgccctccaccagctggatgcctcggaggcccagttgccctctgaaggaaccgtcaccccagaacggtaacatcaccgctcagggcccaagcattcagcctgtgcataaagcagagtcttctaccgatagctccggtccactggaggaagccgaagaagcccctcaattgatgaggacaaagtctgatgcctcttgtatgtcgcagcgacgccctaagtgtagagcgcctggagaggcacagaggattcggaggcacagattttctatcaacggacatttctacaatcacaagacctcagtcttcactcctgcttacggcagcgtgaccaacgtcagggtcaattccactatgaccaccctccaggtgcttaccctcctgctcaataagtttagagttgaggacggcccatctgaattcgctttgtatatagtccatgagagcggggaacgcacgaaactgaaagattgcgagtatccactgatttctagaatccttcacggaccttgtgagaaaatcgccaggattttcctgatggaagccgaccttggagtggaggtgccacatgaagtggcccaatatattaagttcgaaatgccggtgctggatagctttgtggaaaagctgaaagaagaagaagaaagggagatcataaaacttactatgaaattccaggccctcaggctcaccatgctgcagagactcgagcagctggtagaggccaagtag

SEQ ID NO: 30542 - DNA, 393 bp, synthetic construct
  misc_feature 1..393: note = Description of Artificial Sequence: Synthetic coding sequence
  source 1..393: mol_type = other DNA
atgaaagaggactgcctgcctagctcccatgttccgatctctgatagtaagtccatccagaagtctgagttactcggactcctcaagacatacaactgctaccatgaggggaagagtttccaactgcgtcaccgcgaggaggaagggacccttatcattgagggactgctcaatatcgcctggggactgcgcagaccgattcggctccagatgcaggacgacagggaacaggtgcaccttccttcaacttcctggatgcccagaagaccttcctgtcctctacacctggctggaaagaagggccgacttcaaccaggagggctcccaacgcctatgcaggctgagcacgtgagtccctccctggtgttaagtttgaaatttacacgaatctag

SEQ ID NO: 30543 - DNA, 381 bp, synthetic construct
  misc_feature 1..381: note = Description of Artificial Sequence: Synthetic coding sequence
  source 1..381: mol_type = other DNA
atgaaagaggattgtttgccctcaagccacgtccccatcagcgactccaagtccatacagaaatctgagctgcttggcctgttaaagacctataattgctaccatgaaggcaagtctttccagctccgtcatagagaggaggagggcacccttatcatcgaaggactgctgaatattgcttggggtctgcgcagaccaatccgcctgcaaatgcaagatgacagagaacaggtgcacctcccaagcacgtcatggatgcccagacgtccctcctgccctcttgctccagggggagggaggggcggacctccagctgacgcggaccaagagcgcaggcagctgcacgaaccagaggaggcacaagtccccaggccaagatag

SEQ ID NO: 30544 - DNA, 456 bp, synthetic construct
  misc_feature 1..456: note = Description of Artificial Sequence: Synthetic coding sequence
  source 1..456: mol_type = other DNA
atgaaagaggactgtctgcccagcagccatgtccctattagtgattctaagagtatacagaagagcgaactgctgggactgctgaagacatataactgttatcatgaaggtaagtcatttcagctccggcaccgggaagaggagggcaccttgatcatagaaggcttactcaatatcgcatggggattgcggcgacccatcagattgcaaatgcaagatgatcgggaacaagtacatctaccgagcacctcctggatgccgaggcgtccttcctgcccactgggttgctggtcacttctactgggcttatcctcactgtccctccccgctgctatttcagctctgcagctttctgttttcagaaaggaacccagcccgcagaatggaaacatcactgcccaagggcctagtatccagcccgttcacaaagccgagagcagcacggacagtagctag

SEQ ID NO: 30545 - DNA, 372 bp, synthetic construct
  misc_feature 1..372: note = Description of Artificial Sequence: Synthetic coding sequence
  source 1..372: mol_type = other DNA
agcagccacgtcccaatttcggattcgaagtcaattcagaagtcagaattgctgggcctgttaaagacgtataactgctatcacgaaggaaagagctttcagctgcggcatcgagaggaagaaggcaccctcatcatcgaaggcctgctcaacattgcatgggggctccggaggccaattcgtctgcagatgcaggacgaccgagaacaggtccatcttccgtcgacatcatggatgcctagacggccatcttgtccccttcatctcgcaggaaagaaaggtaggctgcagccgggaggcctgcccacacccatgcaggctgaacatgtgtctcccagcctggtgctcagcttaaaattcaccaggatttag

SEQ ID NO: 30546 - DNA, 798 bp, synthetic construct
  misc_feature 1..798: note = Description of Artificial Sequence: Synthetic coding sequence
  source 1..798: mol_type = other DNA
atgaccgttgacagctcgatgtcaagtggatactgttcactggatgaagagttggaggactgtttctttaccgccaagaccaccttctttaggaatgcccaatccaaacatcttagtaagaacgtgtgcaagcccgttgaagagacccagagaccccctacacttcaggagattaaacagaaaatcgacagttacaatacgcgagaaaaaaattgcctgggaatgaaactttcagaggacggcacctatacagggtttattaaggtgcacctcaagctacgaaggcccgtaacggtgcccgcaggcattcggcctcaaagcatatatgatgcaataaaagaggtcaatctagccgcaactaccgacaagcgtacctctttctacctcccacttgacgcaattaaacaactgcatatatcatcaaccacaacagtctccgaggtgatccagggtcttcttaaaaaatttatggtggttgataacccccagaaattcgccctctttaagcgaattcataaggatggccaagtgctgtttcagaagctttccatcgctgatagaccattatatttacgcctgctggccggaccagatactgaagtgctgtcatttgtcctgaaggagaacgaaactggggaggtggagtgggatgctttttcaatcccggagttgcagaatttcttaaccatcctcgagaaggaggaacaggacaaaatacagcaggtgcaaaaaaaatacgacaaattccgccagaagcttgaagaagctcttagggagtctcagggtaaaccaggctag

SEQ ID NO: 30547 - DNA, 1179 bp, synthetic construct
  misc_feature 1..1179: note = Description of Artificial Sequence: Synthetic coding sequence
  source 1..1179: mol_type = other DNA
atggctatggcatccccggcaattggccagcggccataccccctcctgctagacccagaacctcctaggtatcttcagtccttatccggcccagaactgccccctccaccacccgaccgaagctctcggctatgcgtccccgctcccctgagtacggcccctggagcccgagagggcagaagcgcgaggcgtgcagcccgaggcaacctggagcctcctccgagagcaagccgacccgctaggccattgcgccctggactgcagcagcgactgagacgtcgcccaggcgcacctagaccaagggatgtgcgaagcatttttgaacagccacaggacccgagagtgcccgcagagagaggggaggggcactgttttgccgagttggtcctgcctggaggacccggttggtgcgacttgtgcggaagagaagtcttaaggcaggctctgcggtgtactaactgtaagtttacttgccatcctgagtgccggtctctgatccagttggactgttcccagcaggaggggctgagtagagacaggccatcacctgagtctactctaacagttacctttagccagaatgtatgcaagcccgtggaggaaacacagcggcctccaaccctgcaggagatcaagcaaaagattgactcgtataacactagagagaagaattgcctcgggatgaagctcagcgaggatggaacctacactgggttcatcaaggtgcatctgaaactgagaaggcctgtgaccgtaccggctgggattaggcctcaatccatttacgacgcgatcaaggaggtcaacctggccgcaacgacagacaagcgcacatcattctacctgccacttgacgcaatcaagcaactgcatatatcctcaaccaccactgtgagcgaagtcatccaaggtctactcaaaaaattcatggttgtggataatcctcagaaatttgctctttttaaaagaatccacaaggacggacaggtgctattccagaagctgtccatcgcggatcggccactgtacttacgtctcttggcaggcccagacacagaggttctgtcattcgtactaaaggagaatgaaacgggagaggtcgaatgggacgccttttccatacccgagctacagaactttctgtctagttggtgtatacagatctatctgtactactag

SEQ ID NO: 30548 - DNA, 1257 bp, synthetic construct
  misc_feature 1..1257: note = Description of Artificial Sequence: Synthetic coding sequence
  source 1..1257: mol_type = other DNA
atggccatggcttctcctgctatcggtcagcgaccctaccctctactcctggaccccgaaccaccccgttatctacagagcctgtctggccctgagttgccccctcctcctcccgatcgcagttctagactctgcgttcccgcacctttatcaacggccccaggagcccgtgagggacggtccgcccgtcgcgcagcccgtggaaatctggagcctcccccaagggcaagtaggcccgcacggcctcttaggcccggtcttcagcagaggttaaggcgaaggcccggtgcccctaggcctcgcgatgttcgctctatattcgagcaacctcaggaccctcgggtgcctgccgagaggggcgagggacactgcttcgcagagctggtgctgcctggtggcccaggctggtgtgatctgtgcggaagagaggtgctgcgccaggcgctgagatgcactaactgtaaatttacctgtcaccccgaatgtcggtccctgatccagcttgattgcagccagcaggaggggctgagtcgggaccggccttcccctgaaagcaccttgacagttaccttcagtcaaaacgtttgtaagcccgtagaagaaacccagcgtcctcctacactacaggaaattaagcagaagatcgattcttacaacacaagggaaaaaaactgcctgggaatgaagctgtcagaagatggaacgtacaccggttttattaaagtccatctcaagctgcgcagaccagtcaccgtcccagccggtatccggccacaaagtatctatgatgctatcaaagaagtgaacctcgccgctactactgacaaaaggacctctttttatctgcccctcgatgcaatcaaacagttgcacatatcaagcacaaccacagtgagcgaagtcatccagggcctgctcaagaaattcatggtggtggataacccacagaagttcgccctgtttaaacgaatccacaaggacggccaagtgctcttccaaaaactgtctattgctgaccggcctctgtacttgcggcttctcgcagggcctgacaccgaggtgctgagcttcgttctgaaagaaaacgaaactggggaggtcgagtgggatgctttcagtatccccgagctccaaaacttcctgactatactggagaaagaagaacaagacaagattcagcaggtgcagaaaaagtatgacaaatttcgtcagaaattggaggaagcgctcagggagtctcagggaaagccaggctag

SEQ ID NO: 30549 - DNA, 1011 bp, synthetic construct
  misc_feature 1..1011: note = Description of Artificial Sequence: Synthetic coding sequence
  source 1..1011: mol_type = other DNA
atggccatggcatccccagcaatcggtcaacgcccttaccctctgttgttggacccagaacctccacgctacctccagtccctctctggtccagagttgccccctcccccaccagatagatcatcgaggctttgtgtgcccgctcctttatcaacagctcctggcgcaagagaggggagaagcgctcgaagagcggctagaggcaatcttgagcccccacccagagcctccaggcctgccagacccttaaggccaggcctccagcagaggctacgacggcgacccggtgcccctagaccaagagacgtcaggagtatttttgagcagccccaggatccacgcgtcccagccgagcgcggagagggccattgcttcgccgagctggtcctccccggaggacctgggtggtgcgatctctgcggacgggaagtcctgcgacaggccctgaggtgtactaactgcaagttcacctgccaccctgagtgcagaagtcttattcagctggactgctcacagcaggaaggcctgtcacgcgaccgtccctcacccgaatcaacccttactgtgacattctctcagaacgtctgtaagccggtggaggagacgcaacgccctcccacccttcaggagatcaaacagaaaattgatagctacaacacccgggagaaaaattgcctgggtatgaagctctccgaagacggcacttacactggcttcataaaagtccaccttaagcttcgacgccctgttactgtccccgctggtattcggccacagtcaatctatgacgcaataaaggaagtgaatctggccgctaccactgacaagcgaactagcttctatctacccctagatgcgattaagcagctgcacatatcctcaactactactgtctccgaggtgatccagggtttattaaaaaagtttatggtagtggacaatcctcaaaaatttgcactcttcaaacgcatccacaaggacggccaggtgggttgtctcttgcacccgtag

SEQ ID NO: 30550 - DNA, 1182 bp, synthetic construct
  misc_feature 1..1182: note = Description of Artificial Sequence: Synthetic coding sequence
  source 1..1182: mol_type = other DNA
atggcaatggcttctcctgcaatagggcagcgcccttatcctctgcttctcgaccctgaaccgcctcgctacctccagtctctgagtggcccagagttgccccctccaccccctgatcgctctagtaggttgtgtgtgcctgctcctcttagtacagccccaggagcaagagagggaaggtccgcgaggagagctgctaggggcaacctcgaacccccaccaagagcttctcgccctgccagacctttaagacctggactccagcagaggctccggaggcgcccaggcgctccgaggccacgggatgtacggtccattttcgagcagccccaggatcctagagtccctgctgagcgtggggagggacattgctttgccgagctggtgcttcccggagggccagggtggtgcgatctgtgtggacgcgaggtgttaaggcaggcactgcgctgcactaattgtaagttcacctgccatcccgaatgccgcagcctcatacagctggactgtagccagcaagagggactgtcacgggacaggccgtcaccagagagtacgctcacagttaccttttcacagaacgtctgtaagccagtggaagaaacccaaaggccacctaccttgcaagagattaaacagaaaatcgactcttacaatacacgggagaagaactgcctagggatgaaactctctgaggacggcacctacactggttttatcaaggtgcatttgaaacttaggagacctgtgacagtgcctgccggaattcgcccacagagtatttacgacgctataaaagaggtcaacctcgcagcaaccaccgataagaggacctcattttacctaccactggatgctatcaagcaactgcacattagttccaccacaacagtgagcgaagtgatacaggggttacttaagaagttcatggtcgtggacaatcctcagaagttcgctctattcaaacggatccataaagacggacaggtcctgtttcagaagctcagcatcgccgatcgtccgctttaccttcgtcttctagccggacccgataccgaagtgttaagttttgtcctaaaagaaaacgagacaggcgaggtcgagtgggacgctttctccatccctgagctgcagaatttctttctgagctcatggtgtatccagatctacctgtactattag

SEQ ID NO: 30551 - DNA, 555 bp, synthetic construct
  misc_feature 1..555: note = Description of Artificial Sequence: Synthetic coding sequence
  source 1..555: mol_type = other DNA
atgccacagtccaagagccgaaagatcgcaattcttggataccgttctgtgggcaagtcctcactgactatccagttcgttgaaggccagttcgttgacagttacgatccaacaatagaaaatacctttaccaaactgattaccgtgaatggacaggaatatcatctacaactcgtggacaccgctgggcaggacgagtattccatctttcctcaaacctatagcattgatattaatggctacatcttggtatatagcgtgacgtcaattaaatcgttcgaggtcattaaagtgatccacggaaagctgttggatatggtcggcaaggtgcagatccctatcatgttggtcggcaataaaaaagacctgcatatggagcgcgtgataagctacgaagaaggcaaagctctggctgaaagctggaatgcggcttttctcgagtctagcgctaaagagaatcagaccgctgtggatgttttcagacggatcatcctggaggctgaaaagatggacggggctgccagccagggaaaatcttcatgctctgtcatgtag

SEQ ID NO: 30552 - DNA, 582 bp, synthetic construct
  misc_feature 1..582: note = Description of Artificial Sequence: Synthetic coding sequence
  source 1..582: mol_type = other DNA
atggcagcaattaggaagaagttggtgatcgtgggcgatggtgcttgcgggaagacctgccttctcattgttttttctaaggatcaatttccagaggtgtatgtccctacagtgttcgaaaattacgtggccgatatagaagtggatgggaagcaggtggagttagccctgtgggacaccgccggtcaagaggactacgatcgcttgagaccactgagctacccagatactgatgtgatcttgatgtgttttagcattgattcccctgattcacttgaaaacattcctgagaaatggacaccagaggtgaaacacttctgtccgaacgtgcctattatccttgtaggaaataaaaaggacttgcgcaatgatgaacacactcgcagagaactggccaagatgaaacaggagcctgtgaagcccgaagagggacgggacatggcaaataggatcggagcgttcgggtatatggagtgcagtgcaaaaaccaaagatggcgtccgcgaagtctttgagatggcaaccagggcagctctccaggcgcgaagaggcaaaaaaaaatctgggtgcctcgtgctttag

SEQ ID NO: 30553 - DNA, 591 bp, synthetic construct
  misc_feature 1..591: note = Description of Artificial Sequence: Synthetic coding sequence
  source 1..591: mol_type = other DNA
atggctgccatccgtaagaaattggtcgttgtaggtgatggggcatgtggaaagacctgccttctgattgtcttctctaaagatgagtttcccgaggtttacgtgcccactgtgttcgagaactatgttgctgatatcgaggtggatggtaagcaagtagagttagctttgtgggacaccgctggacaggaagattatgatcgtttaaggcctctcagttaccctgatactgatgtgatccttatgtgcttcagcgtagattcacccgattcactggagaacatacccgagaagtgggtgccggaagttaagcacttctgcccaaacgtccctatcattctggtggccaacaaaaaagacctgcgatccgacgaacacgtgcgcactgaactggccagaatgaagcaggagccagtgaggaccgatgatggcagggccatggctgtgcgtatccaagcatacgattatctggaatgtagcgctaaaaccaaggagggcgttcgagaggtgttcgaaacggccaccagggctgcgctgcagaaaagatacgggtcacaaaatggctgcattaattgttgcaaggtgctgtag

SEQ ID NO: 30554 - DNA, 582 bp, synthetic construct
  misc_feature 1..582: note = Description of Artificial Sequence: Synthetic coding sequence
  source 1..582: mol_type = other DNA
atggcagcaatcagaaaaaagttagtaatagttggggatggcgcatgcggtaaaacctgtttgttgatcgtattctctaaggatcagtttcccgaggtatatgtgcccaccgtgttcgagaactatatcgcggatatcgaggtggacggtaagcaagtggagctcgccctgtgggacactgcaggccaagaggactatgaccgtctgaggcccctgtcctatccagacacagatgtgattctcatgtgtttctctatcgattcgccggacagtctggaaaatatcccagaaaaatggacaccagaagtgaagcacttttgtcccaatgttcccattatcctcgtgggaaacaagaaggatctgagacaggatgagcatactaggcgcgagctcgcgaagatgaaacaggaaccagttcgctcagaggagggccgagacatggctaaccggatttcagctttcggatacctcgagtgtagtgccaaaactaaagagggtgtgagggaagtttttgaaatggctactagagccggactgcaggtgcgtaaaaacaagagacgacgcggatgtccgattctgtag

SEQ ID NO: 30555 - DNA, 582 bp, synthetic construct
  misc_feature 1..582: note = Description of Artificial Sequence: Synthetic coding sequence
  source 1..582: mol_type = other DNA
atggccgctatacgcaagaagctcgttattgtgggagatggcgcttgcggaaaaacatgtcttctgattgtctttagcaaagatcagtttcccgaggtgtatgtgccgaccgtgttcgagaactacattgctgatatcgaggtagatggaaagcaggttgaactggccctgtgggacaccgccggacaggaagactacgatagactcaggcctctcagttatcctgacaccgatgtcatcttaatgtgcttcagcatcgatagcccagactccttagagaatatccctgaaaagtggactccagaggtgaaacacttttgtcctaatgtacccatcatattggtgggcaataagaaagacttacgacaggacgaacatacaaggcgcgaactcgcaaaaatgaagcaggagcccgtcaggtccgaggaaggcagagacatggcgaacaggatctcagccttcggctaccttgagtgttcggccaaaacaaaagagggagtgcgcgaggtatttgagatggcgacccgggcagggctgcaagtgagaaaaaacaagagacggagaggctgtccgatcctctag

SEQ ID NO: 30556 - DNA, 582 bp, synthetic construct
  misc_feature 1..582: note = Description of Artificial Sequence: Synthetic coding sequence
  source 1..582: mol_type = other DNA
atggctgcaatccgaaagaaactagtaatcgtgggagacggcgcatgcggcaagacatgcctgttgattgtgttcagtaaagatcaattccccgaggtttatgtgcccaccgtgtttgaaaattatatcgctgatatagaggtggacggtaagcaggtggagcttgcactgtgggatactgccggacaggaggattacgatagactacggcctctgagctaccccgatacagatgtaattctgatgtgtttcagtatcgacagtcctgattccctcgaaaacattccagaaaagtggacccctgaggtcaaacatttttgtccaaatgtgccgatcatactcgtcgggaacaagaaggacctacgacaagatgaacacactcgcagggaacttgccaaaatgaagcaagagccagtccgcagcgaggaggggagagacatggccaaccgcataagcgccttcggttacttggagtgctccgcgaagacaaaggagggcgttcgcgaggtgttcgaaatggctactagagctgggctgcaggttcgcaagaataaaaggaggcgcggatgtccaattctttag

SEQ ID NO: 30557 - DNA, 582 bp, synthetic construct
  misc_feature 1..582: note = Description of Artificial Sequence: Synthetic coding sequence
  source 1..582: mol_type = other DNA
atggccgcaatacggaaaaagctagtgatcgtcggggacggtgcctgcggcaagacctgtttgcttatagtgtttagcaaggaccagttccccgaagtgtatgtccccaccgtcttcgaaaattacattgccgacattgaggttgatgggaagcaagtggagctggccctctgggacaccgcaggacaggaggactatgacaggctgagaccactgagctatcctgataccgacgttattcttatgtgcttctcaatcgatagccccgactcgctggagaacattccggagaagtggacaccagaagtgaagcatttctgccctaacgtgcccatcatcctggtggggaataaaaaggatctgagacaggatgagcatacccgacgggaactcgccaaaatgaaacaggagcctgtgaggtcagaagagggaagagatatggccaatcgaatcagcgccttcggctacctcgaatgctctgctaaaactaaagaaggagtccgcgaagtgttcgagatggccacccgagctggccttcaggtgcggaagaacaagagacggaggggctgccccattctgtag

SEQ ID NO: 30558 - DNA, 600 bp, synthetic construct
  misc_feature 1..600: note = Description of Artificial Sequence: Synthetic coding sequence
  source 1..600: mol_type = other DNA
atggctgcgataagaaagaaactagtgatcgtaggtgatggtgcctgcggcaagacgtgcttgctgatcgtattttctaaggaccaattcccagaggtatatgtgcccaccgtgtttgagaattacatcgccgacatcgaggtcgacggcaagcaggtagaactcgcactctgggacaccgccggacaggaagattatgatagattaaggcccctctcatatccggatacggacgttattctaatgtgcttctcaattgactctcccgacagcttggaaaatatcccagaaaaatggactcctgaggtcaagcatttttgtcccaatgtgcccatcattctggttggtaacaaaaaggatctgcgcaaagccggaacctggaggacaggcagcgtcccactcgcgaccctatccgcacagcctcgccctaggcgggaatgtggcagatgtttgcggtggcccctgggacttgcctcaagaagtgccaggacatccgtcgggggagccgtaccattctcggagattcctaaagcttttccgacatgccctttaccaagtcagggttaccgcaattatcccccaacaacccccgctagttag

SEQ ID NO: 30559 - DNA, 582 bp, synthetic construct
  misc_feature 1..582: note = Description of Artificial Sequence: Synthetic coding sequence
  source 1..582: mol_type = other DNA
atggcagctatccgcaagaagctcgtgatcgtgggggacggggcatgcgggaaaacgtgtctgttgattgtgtttagcaaagatcagtttccagaggtgtacgtgcctaccgtttttgaaaattatattgccgacattgaggtggatggtaagcaagtagagctcgccttgtgggacactgctggacaggaagactacgataggctccggccactgtcttaccccgatacggatgtgattctcatgtgttttagcattgattcccctgacagcttggaaaacattcccgagaagtggacgcccgaagtgaagcacttctgtcctaatgttcccatcattctggtgggaaataagaaagacctgaggcaagacgagcacacacggcgagagctggcgaagatgaagcaggagccagtgcgctccgaagagggacgcgacatggcgaacaggatcagcgctttcggatacttagagtgcagcgccaagacaaaggaaggggtaagggaggtgttcgagatggcaactagggcgggactgcaggtgaggaagaataaaagacgtagaggatgccctatcttgtag

SEQ ID NO: 30560 - DNA, 582 bp, synthetic construct
  misc_feature 1..582: note = Description of Artificial Sequence: Synthetic coding sequence
  source 1..582: mol_type = other DNA
atggctgctattcgtaaaaagctggtgattgtcggggatggtgcatgtggaaaaacgtgcctcctgatcgtgtttagtaaagatcagttcccagaggtttatgtgccaacagtgttcgaaaactacattgccgatattgaagtggatggtaagcaagtcgagcttgcattgtgggataccgccggacaggaagactatgatcgcttacgaccattgtcttatccagatacggatgtgattctgatgtgtttcagtatcgattccccggattccctcgagaatatccctgaaaagtggacacccgaggttaagcatttttgtcctaacgttcccattattctggttggcaacaagaaggacctgcgacaggatgagcacactaggcgggagttagccaaaatgaaacaggagcccgtacgcagcgaagagggacgagatatggccaacagaatttcagccttcggctatctcgagtgcagcgctaagacaaaagaaggggttagagaggttttcgaaatggccactcgtgccggtttgcaggtgaggaagaataaaagacggaggggctgtccaatactctag

SEQ ID NO: 30561 - DNA, 582 bp, synthetic construct
  misc_feature 1..582: note = Description of Artificial Sequence: Synthetic coding sequence
  source 1..582: mol_type = other DNA
atggctgccataagaaagaaactcgtcatcgtcggggacggagcctgtggtaagacctgccttctcatagtcttctctaaagaccagtttccggaggtgtacgttcccactgtcttcgagaattatatcgccgatattgaggtggacgggaaacaggttgaattggccctgtgggacactgctgggcaagaagactacgatcggctcaggcccttaagttacccagataccgacgtaatccttatgtgcttctcaattgactctcccgattccttggaaaacattcctgaaaagtggacccctgaagtgaagcacttctgtcctaatgtgcccatcatcttggttgggaataagaaggacctgcggcaagatgagcacacacgccgtgagcttgccaagatgaaacaggagccagtcagatcagaggaaggacgcgatatggccaatcgaatatccgcttttggatatctggaatgctctgccaagactaaggagggagttcgcgaagtgttcgagatggccactcgcgctggacttcaggtcaggaagaataaacgcaggcggggatgtcccatcctctag

SEQ ID NO: 30562 - DNA, 279 bp, synthetic construct
  misc_feature 1..279: note = Description of Artificial Sequence: Synthetic coding sequence
  source 1..279: mol_type = other DNA
atggcggctatccgaaaaaagctagtcattgtcggcgacggggcatgtggaaaaacctgtctgctgatagtcttctccaaggatcagtttcccgaagtctacgtgcccacagtcttcgagaattacatagctgatatcgaggtcgacgggaagcaagtcgaactcgccctgtgggatacagccggacaggaagactatgatagactcagaccattgtcttaccccgatacggatgtgatcctaatgtgcttttccattgatagccctgatagcctgtag

SEQ ID NO: 30563 - DNA, 570 bp, synthetic construct
  misc_feature 1..570: note = Description of Artificial Sequence: Synthetic coding sequence
  source 1..570: mol_type = other DNA
atggccgctatcagaaaaaaattggtgatagtgggagacggggcatgtggaaaaacttgccttcttattgtgttctcgaaggaccagtttccggaggtatacgtccctacagtttttgagaactacatagcagacatcgaagtcgatggaaagcaggtggaattggccctgtgggacactgccggacaggaagactatgacaggctgaggccactgagttacccagatactgacgtaatcctcatgtgcttctccatagactctcccgatagcctcgagaatatcccagaaaagtggacgcctgaagtaaagcatttctgtcctaacgtgcctatcatcctcgtggggaataagaaggacttgaggcaagacgagcatactcggagggagctcgctaagatgaaacaggaacctgtaagatccgaggagggaagggatatggccaaccgcatatctgcgtttgggtatttggaatgctccgcaaaaactaaggagggcgtcagagaggtgtttgaaatggccacgcgtgccggtcttcaggttcggaaaaacaagaggcggagaggatag

SEQ ID NO: 30564 - DNA, 384 bp, synthetic construct
  misc_feature 1..384: note = Description of Artificial Sequence: Synthetic coding sequence
  source 1..384: mol_type = other DNA
atggcggcaattcgcaagaaactagtgatcgtgggcgacggcgcttgcggcaagacatgcctgctgattgttttcagtaaggaccagtttcctgaggtgtacgtgcctacagtctttgagaactatatcgccgatatcgaggtggacggaaaacaagtggaattggctttatgggatactgctgggcaggaggactacgatcgcttacgtccgctgtcctatccagacaccgacgtcatcctgatgtgctttagcattgactctcctgacagcctggagaatattcctgagaagtggacccccgaggtgaaacatttttgtcctaatgtcccaatcattttggtgggaaataagaaggacttgcggcaagatgagcatacatag

SEQ ID NO: 30565 - DNA, 690 bp, synthetic construct
  misc_feature 1..690: note = Description of Artificial Sequence: Synthetic coding sequence
  source 1..690: mol_type = other DNA
atggtatccatatccggcggagatcttcccacaggactggacttcatatcagccccagagccggctctgtccagctgttctctggggacgagcgctggctggtctccaacaatggctgctattcgcaagaaactggtcatcgtgggggatggggcatgcggcaaaacctgcctccttatcgtctttagcaaggaccaattccccgaagtgtacgtgccgactgtttttgagaattacattgcagacattgaagtcgacggcaaacaagtggagttggctctgtgggataccgccggacaggaggactatgaccggctgcgtcctctgtcataccccgatactgacgttatcttgatgtgcttctccattgacagtcccgatagcttggagaacatacccgaaaaatggacgcctgaggtcaaacacttctgtcctaatgtgcctatcatcctggtgggcaataagaaagacctccggcaagacgaacacaccagacgcgagcttgccaaaatgaagcaggagccagtcagatcagaggaaggcagagacatggcaaatcgcatctcagccttcggctacttagagtgttctgccaaaaccaaagaaggcgtgagagaagttttcgaaatggccacccgggctggacttcaggtgaggaagaataaacggaggagagggtgtcccatctag

SEQ ID NO: 30566 - DNA, 510 bp, synthetic construct
  misc_feature 1..510: note = Description of Artificial Sequence: Synthetic coding sequence
  source 1..510: mol_type = other DNA
atggcagctatccggaagaagttagtgattgtgggtgacggagcctgcggcaaaacctgtctgctgattgtattctccaaggatcagtttcctgaagtgtacgtgccaacggttttcgagaattatattgccgacattgaagtggacggcaagcaggtggaattagctctttgggatacagccggacaggaggattatgatcgcctgcgccctctcagctatccggacaccgacgttatcctgatgtgtttttctatcgacagccccgactccctggagaatattcctgaaaaatggacacccgaggttaagcacttctgcccaaatgtacctattatactagtggggaacaagaaggacttgaggcaggatgaacacaccagacgggagctggccaaaatgaaacaggagcccgtacgttcagaagaaggcagagatatggctaataggataagtgcattcggatacttggagtgcagtgcaaagacaaaagagggggtgagggaatag

SEQ ID NO: 30567 - DNA, 3144 bp, synthetic construct
  misc_feature 1..3144: note = Description of Artificial Sequence: Synthetic coding sequence
  source 1..3144: mol_type = other DNA
atgatggccgcagaggctgggtcagaggaaggaggccctgtcaccgccggagcagggggtgggggagcggctgctggatcctcggcctaccctgccgtatgtcgtgtcaagattccagccgcactgcccgtcgcggctgcgccttatccaggactggtagagaccggggtggccggtactctggggggaggagccgctttgggtagcgagtttctaggcgcagggtcagtggcaggagcccttgggggagctggactgactggaggcggtaccgcagctggggtagcgggagctgcagccggagtggccggagctgcggtagcgggtccgtccggcgatatggccctgaccaagttgccgacatcacttctggctgaaacacttgggccaggtggcggattccctccactcccccctcctccgtatcttcccccactgggggctggactgggcacagtcgacgaaggagattcattggatgggcctgagtatgaggaagaggaggtggcgatcccactgacagccccacctacaaatcagtggtatcacggaaagctcgatagaaccatcgcagaggaaaggctccggcaggccggaaagtccggatcatatctgatacgtgaatctgacagaaggccgggatccttcgtgctgtcctttcttagccagatgaacgtagtgaaccattttagaattattgcgatgtgcggagattattacatcggaggacgaaggtttagttcactgagcgatctgatcggctactattctcacgtcagttgtctgcttaagggtgagaaacttctctacccagtggcaccacccgaaccagttgaggatcggcgacgagtgcgggcaatcttgccctatacaaaggtccccgatacggatgagataagtttccttaagggcgatatgttcatagtccacaacgagctggaggacggctggatgtgggtgaccaaccttagaaccgacgagcagggccttattgtagaggatttggtggaagaggttggacgtgaagaggatccccacgaggggaagatctggtttcacggcaaaattagcaaacaggaggcatataatctactgatgaccgtgggtcaggtatgtagcttcctggttagaccgtccgataacactcccggagactattccctgtacttccgcactaacgaaaacattcaacggtttaagatctgtccaacgccgaataatcagttcatgatgggaggcagatactataattctatcggtgacatcattgatcactacaggaaggagcaaattgtggaggggtactacctcaaagagccagtccctatgcaggaccaggaacaggttttgaacgatacagtcgacgggaaagagatctacaacacaatccggagaaagaccaaggatgccttctataagaacattgtgaagaagggctacctgctgaaaaagggaaagggcaagcggtggaagaatctatactttattctcgaggggagcgatgctcagctgatctattttgagtcagagaaacgtgccaccaagcctaaaggcctaatcgatctatccgtttgctccgtgtacgttgttcatgatagtctgttcgggagaccaaactgttttcagattgtggtgcagcacttttcagaggagcattacatcttctacttcgctggtgagaccccggagcaggcggaggattggatgaaggggctccaagctttttgtaatttgcggaagagctctcctgggacctccaacaaaaggttacggcaagtctccagcctggttctgcatattgaggaggcccacaagctgcctgtcaagcactttaccaatccatattgcaatatttacctcaacagtgttcaagttgcaaagacacacgcacgcgaaggccagaacccagtgtggtcagaggagtttgtgtttgacgacttacccccagatatcaatcggttcgaaattacactgtccaataaaacaaagaagagtaaggatcccgacatcctctttatgcgctgccagctcagcaggctgcagaagggccacgccacggatgaatggtttctgctgtccagtcacattcctcttaaaggcatcgaacccggatctctccgggtcagagcaagatactccatggaaaagatcatgcccgaggaggaatactccgaattcaaggagctgattcttcagaaagagctacacgtggtatatgccctctcacacgtttgtggacaggatcgaactttgcttgcctcgatcttgctgcgcatctttcttcacgagaagctggaaagcctactgctgtgcaccctgaatgatcgcgaaatcagcatggaggacgaggccaccactttattccgcgcaacaactctagcatccactttgatggagcagtacatgaaggccaccgccactcaattcgtgcaccacgccctcaaggactcgattctgaagatcatggagagtaaacagtcctgcgagctctccccctcaaagctcgaaaagaacgaggacgtgaacacgaatctgacccaccttctcaatatcttatccgaactagtggaaaagatctttatggcttccgaaattctgccccctacattgaggtacatttatgggtgcctgcagaagtctgtccaacacaagtggcctactaataccacgatgaggactagagtcgtgagcggattcgtgttcttacggctaatatgtcccgctatcctgaatccgagaatgttcaatatcatatcagatagcccttcccctatcgccgctagaacactgattttggtagccaagtccgtccagaacctggcaaatctggtggagttcggtgcaaaagagccgtacatggaaggggttaaccctttcatcaagtccaacaaacacaggatgataatgttcctggacgaactcggaaacgtgccagaactcccagatacgacagaacattcgcgaactgacctgagcagggatctggctgctctgcatgaaatctgcgtggcgcactccgatgaattgcgaacccttagtaacgagaggggcgcacagcagcacgtgttaaagaaacttctggccataacagaactactgcaacagaagcaaaaccagtacaccaagacaaacgacgtccggtag

SEQ ID NO: 30568 - DNA, 2613 bp, synthetic construct
  misc_feature 1..2613: note = Description of Artificial Sequence: Synthetic coding sequence
  source 1..2613: mol_type = other DNA
atgaaagggtggtatcacgggaagttggacagaacaattgcggaggaaagattgagacaagcgggtaaaagcggttcatatctaataagggagtccgacaggcgtcccggatcatttgtgctgagcttcctcagccagatgaacgttgtcaaccactttaggattatcgccatgtgcggggattactatatagggggtcggcgattcagctccctttccgatctgattggatactactcgcacgtttcttgcttgcttaaaggcgagaagctgctatatccagtggctcccccagagcctgtcgaggaccgacgacgtgtccgggctatactcccatatacgaaagtccctgacactgacgaaatctccttcctgaagggtgacatgtttatagtgcacaacgagttggaagatggctggatgtgggtgaccaacctcagaacggacgagcagggactcatcgtcgaagacctggtggaggaagtgggacgcgaggaggatccacacgagggcaagatttggttccacggaaagatcagcaagcaggaggcttacaatctgcttatgactgtgggccaggtctgttcgttcctggttcgcccttcagataatactccaggggactattccctgtacttccggacaaacgaaaatatccagcgatttaagatatgcccaacacccaacaatcagttcatgatgggtggacgctactacaatagcatcggcgacataatcgaccactataggaaggagcaaattgttgaagggtactatcttaaggagcccgtgcctatgcaggaccaggagcaggtgctaaacgatactgtggacggcaaggaaatctacaatactattcgtaggaagaccaaagacgccttctataaaaatattgtgaagaagggctacctgctcaagaaaggtaagggcaagagatggaaaaacctgtacttcatactcgagggttctgacgcccagctaatctacttcgagagcgagaagcgcgctacaaaaccaaagggcctgattgatctgtctgtgtgtagtgtttatgtggtgcacgacagcctgtttggacgcccaaattgctttcagattgtggtgcaacacttttctgaggagcactacatcttttactttgctggtgagactcctgaacaggccgaggactggatgaaaggcctccaggccttctgtaatctgagaaaatcttcccccggtaccagtaataagcggcttcgccaggtcagctccctggtgctccatatcgaagaagcccacaaattgccagtgaagcacttcaccaacccttattgtaacatatacttgaattcagtgcaggttgccaagacacacgccagggaaggccagaaccccgtctggagcgaggaattcgtctttgacgatctgcccccagacataaatcgtttcgagattacactgagcaataagaccaaaaagtcaaaggaccccgacattttgttcatgaggtgtcagctgtctcggctgcaaaagggccatgcgaccgacgagtggtttctactctcatcccacattcctctgaaagggattgaaccaggttcattgcgggtgagggccaggtactcaatggagaaaattatgcctgaggaagagtattctgaatttaaagagctcatcctacagaaagaactgcacgtcgtttacgctttaagtcacgtgtgtggccaggatcgcacactgctcgctagcattctgttacgtatctttctccacgagaaacttgagtccctgcttctttgcaccttgaacgacagagaaatctcaatggaagatgaggcaaccacgctgtttagggccacaactctggcaagcactctgatggagcagtacatgaaggctactgccacccagttcgtgcatcacgcattgaaggattctatcctcaagatcatggagtctaaacagtcgtgcgagttaagcccgagcaagttagagaaaaacgaggatgtgaataccaatctaacccatctcctcaatattctgagtgagttggtggagaaaatcttcatggccagtgaaattctaccgcctactttaaggtatatttacggctgccttcagaagtccgtgcagcacaaatggccaacaaacacaacaatgcggactagagtggtttcaggattcgtgtttctgcgacttatttgccctgcaatactgaatcccaggatgttcaatatcatcagcgactcaccatcccccattgctgctcggactttgattttggtagccaagtcagtacaaaatctggcaaatcttgttgagttcggcgcaaaggaaccatatatggagggagtcaatcccttcattaagagtaataagcataggatgatcatgtttcttgacgaactgggtaatgtgccagagcttccagacaccaccgaacatagccgcactgacctgtcacgggatcttgctgccctccatgaaatctgcgttgcccattccgacgagcttcggacactgtctaatgagcggggagcacagcagcacgtcctgaagaagctattggcaatcaccgagcttctccaacagaaacaaaaccagtacacgaaaaccaacgacgtaagatag

SEQ ID NO: 30569 - DNA, 2646 bp, synthetic construct
  misc_feature 1..2646: note = Description of Artificial Sequence: Synthetic coding sequence
  source 1..2646: mol_type = other DNA
atgtgtcttgtgaagagctggtttctgtcaatcaggtctcgctggtaccatggcaagctagacagaacgatagccgaagaacgacttcggcaagccggtaagtctggctcctacctgattagggaatcggatagacgcccaggttcctttgtactgtcattcctctcacagatgaatgttgtgaatcacttcagaatcatcgcaatgtgcggggattactacatcggcggaagaagattttcttcgctgtccgacttaatcggatattattctcacgtttcctgcctacttaagggtgagaaactgctttaccccgttgcacccccagagcccgtggaagatcggcgacgggttcgcgctatcttaccatacacaaaagttcccgatacggacgagatctcgttcttgaagggggatatgttcattgtgcataacgagttggaagacgggtggatgtgggttacaaatctgaggaccgacgaacaagggctcattgttgaggatctcgttgaggaagtaggacgcgaagaggatccccatgagggcaagatctggttccacggcaagatttcaaagcaggaggcttacaacctactgatgactgtcgggcaagtgtgctcttttctcgttaggccgtccgacaatacacctggagattattcactgtattttcgcaccaacgagaatatccagcgcttcaagatatgtccgacacctaacaaccagtttatgatgggagggagatattacaactcgatcggtgacatcatcgaccactaccgtaaagagcagatagtggagggctattatctgaaggagcctgtgcccatgcaggaccaggagcaagtactgaacgacacagtcgacggtaaggagatttataacaccatccggcgaaaaacaaaagatgccttctataagaacatcgtgaagaagggctatctcctcaagaaaggcaaaggcaagcgctggaaaaacctgtatttcatccttgagggttctgacgcacagctaatttactttgaaagcgagaaacgcgcaactaagccaaaaggacttattgacttgtctgtgtgctccgtgtatgtggtgcatgacagcctcttcggcaggccaaactgttttcaaatcgttgtgcagcatttctctgaggagcactacattttttatttcgcaggagagactccagagcaagccgaggactggatgaaggggctccaggccttttgcaacctcaggaagagctcgcccggaacatctaataagagactacgccaggtcagctcccttgttctccacatcgaagaggcgcacaagctccctgtaaagcatttcacaaacccttattgtaatatctatctgaatagtgtgcaggtggctaaaacgcatgccagagaaggacaaaaccccgtttggtcagaagagttcgtgttcgacgatctccccccagacatcaaccgctttgagatcactttgtcaaacaaaaccaaaaagtccaaggacccagacatcctcttcatgagatgccagctgtcgaggttacagaaaggccatgctactgacgaatggtttctgctatccagccatatcccactcaagggaatcgagccaggatccctgagggttagggccaggtactcgatggagaaaatcatgcctgaagaggagtacagtgaattcaaggagttaatccttcagaaggagttacacgtagtatacgccctctcacatgtgtgcgggcaggaccgcacccttctcgccagcattctgttacgtattttcctacacgaaaaactggaatcccttcttttatgcaccctgaacgaccgcgaaattagcatggaagatgaggctacgacacttttccgggctaccaccctggcatctacccttatggaacagtacatgaaagcaaccgctacccaatttgtgcaccacgccctgaaggatagtattctcaaaattatggagagtaaacagtcctgcgagctttctccatccaaactggagaaaaatgaggacgtcaacacaaatctgacgcacctgctgaatatactgagtgaactcgtcgaaaaaatatttatggccagtgaaattctaccccctaccttaagatacatttacggctgtctgcagaaatctgttcagcataagtggcccactaatacgaccatgcgcacaagagtggtgagcggattcgtttttctgcgtcttatatgtcccgctatacttaacccacgaatgtttaacatcataagtgactccccaagcccaatcgctgcacgtacgcttatactggttgccaaatccgtgcagaaccttgctaatctagtcgagttcggtgccaaagagccgtacatggagggcgtcaatccctttatcaagtcaaacaagcatagaatgataatgtttctggatgagcttggaaacgttccagagcttcctgatacaaccgagcactctcggaccgatctgtcacgcgatctggctgccctccacgagatctgtgtggcacactcagatgagctcagaaccttaagcaacgagcggggtgcacaacagcatgtcctgaaaaagctgctagctatcactgaactgctccaacagaagcagaatcaatatacgaagacaaacgacgtgcgttag

SEQ ID NO: 30570 - DNA, 2643 bp, synthetic construct
  misc_feature 1..2643: note = Description of Artificial Sequence: Synthetic coding sequence
  source 1..2643: mol_type = other DNA
atgcggaccggatattcaagcgtacccagcaaactgcggtggtaccacgggaagctggacagaaccatcgcagaggagaggctgagacaggccggaaaaagcggatcctacctcattagagaatcagacagacgtcccggttcctttgtactgtcatttttatctcagatgaacgttgttaatcacttccgcataattgctatgtgcggagactattacattggcggacggaggttcagcagcttgtccgatctgattggttattactcccacgttagctgcctgcttaagggggaaaagctcctgtaccctgtggcccctccagagcctgtcgaggataggaggagagttcgcgcaattctcccttatacaaaggtacctgataccgacgagatctcattcctgaagggcgatatgtttatcgtccacaatgaattggaggacgggtggatgtgggtaacaaacttgcgaacagacgagcagggtctaatcgtggaggacctggtagaggaggtaggcagagaggaagaccctcacgaaggtaagatctggtttcacggaaagatttcaaagcaagaagcctacaaccttttgatgacagttggccaggtttgctctttcttagtgcgtccttcagataatacccctggtgactatagtctttacttccgtacgaatgagaatatacagcgtttcaagatctgtcccacccctaataatcaattcatgatgggcggacgctattataactccatcggcgacataattgatcattacagaaaggagcaaattgtcgaaggctactatctgaaagagccagttcctatgcaggaccaggagcaggtcttgaacgacacagtcgacggaaaggagatttacaatacgatcagaagaaaaactaaagatgctttttataaaaatatcgtcaagaaaggatacctcttaaaaaaggggaagggcaagaggtggaagaacctgtatttcattcttgagggaagtgatgcacagctaatctatttcgagtcggaaaagcgggcaacaaagcctaagggactcatcgacctgtccgtgtgctcagtgtacgtggttcacgacagtttgtttggccgtccaaattgcttccagatcgtggttcagcacttcagtgaagagcactacatattttactttgcaggcgaaaccccagaacaggcggaggattggatgaagggtctgcaggctttctgcaatttacggaagagcagccctggcacctccaataaacgcttaagacaggtatcgtccctggtgttacacatcgaagaggcacataaactgccagtaaaacatttcacaaatccttattgcaatatctacctgaactctgtgcaggttgctaagacacatgcacgcgaagggcagaatcctgtttggtccgaggagtttgtttttgacgaccttccacctgacataaaccgctttgagatcacactcagcaataaaactaaaaagtctaaggatcctgacatattattcatgcgctgtcagctgtctagactgcagaagggccacgccaccgacgagtggtttttattgagttcccacatacccctcaagggtatcgagccgggatccctgagggtccgagcacgctattcaatggagaaaattatgcctgaagaagagtacagcgagttcaaagaattgatcctgcagaaagaattgcatgtggtgtacgcattgtcacacgtgtgtgggcaagatcgcaccctgttagcttcaatactgctgagaatattcctgcacgagaaacttgaatccctgcttttatgtacgctgaacgaccgtgaaatctctatggaggatgaggccaccacactgttccgggcaactaccctcgcctccaccctcatggagcagtatatgaaggccaccgctacgcagttcgtgcatcacgccctgaaagactcaattctgaagattatggaatctaaacagagttgtgagctttcaccctccaagctggagaagaacgaggatgtgaacacaaatctgacccacctgctgaacatactctccgagttggtggagaaaatttttatggccagtgagatcttaccacctactctaaggtacatttatgggtgcctgcagaagtccgttcagcacaagtggcccaccaacaccaccatgcgcacccgagtcgtgtctggattcgtgttcctgagactcatctgccctgcaatactcaatcctcgtatgtttaacatcatctcagactccccctcacccatagcggctagaacattgatactcgtcgctaaatctgtccagaatttggcaaacctcgttgagttcggcgcaaaagaaccctacatggagggcgtgaacccttttattaagagtaacaaacatcgtatgatcatgttcctagacgaactgggcaacgttcctgagctccctgataccactgagcactctcgcacagacctgagccgggacctcgccgcattgcatgagatctgcgtagcccattccgacgagctccgaaccctctctaacgagcgaggagcgcagcagcacgtgctgaaaaagctgctggcaatcactgaattactgcaacaaaagcagaaccagtacacgaaaacaaacgacgtcaggtag

SEQ ID NO: 30571 - DNA, 2616 bp, synthetic construct
  misc_feature 1..2616: note = Description of Artificial Sequence: Synthetic coding sequence
  source 1..2616: mol_type = other DNA
agaggagacgccagcggttgggggtgcagcgaacctgggcctggtggcccttgggggtcgcgggctggcagggtagggcaatcaagggctggatttaacatgatggcggcagaggctggctccgaggagggcggacccgtgacagccggagcgggaggagggggtgccgcagcgggaagctccgcttatccagccgtgtgtagagttaagatacctgcggctctacctgtcgccgcagccccttaccctgggctcgtggagactggtgtggctggtactctggggggtggagcggcactggggagtgagttcttaggcgcaggctcagttgccggagctctcggtggtgccggtctgaccggagggggaacggccgcaggtgtcgccggagcggcagcaggagtggctggggctgccgtagctgggccaagcggagatatggctcttactaaactgcccactagcctgttggctgagactctggggccagggggaggatttcccccattaccgcctccgccatatcttccaccactcggggcaggactcggcactgtagatgagggagacagtcttgatggcccagagtatgaggaagaggaagtggccattcccttaactgccccacctaccaatcagtggtaccacggcaagttagatagaaccatcgccgaggagcggcttagacaagctggtaagtccggaagctacctgatccgagagtctgaccggagaccagggtcattcgtgctttcctttctcagccagatgaatgtggtgaatcatttcagaattattgcaatgtgcggggattattatattggagggcgaaggttttcatctctcagcgacctcatcggttactacagccacgtgagctgcctcttgaaaggcgagaagctgctttaccccgtcgcccctcccgagccggtggaggatcgcaggagagtgcgagctatcttgccctatacaaaggtgccggatacagacgaaatttcgttcttgaagggagacatgttcatcgtgcataacgaactggaggatggttggatgtgggtaactaacctgcgtaccgacgagcagggtttgattgtagaagacctggtggaagaggtaggcagggaggaggacccacacgaaggaaagatctggttccacggcaagatatccaaacaagaggcctacaatctgctgatgaccgttgggcaagtctgttccttcctggtgaggccatccgacaatacccctggtgattatagcctgtactttcgcaccaacgagaatatccagcgcttcaaaatatgccccacccctaacaaccagttcatgatgggtggacgctattacaatagtattggagacattatcgaccactaccgaaaggaacagattgtagaaggctattatctcaaggaacccgtccccatgcaggaccaggagcaggttctgaacgacacagtggacggtaaggagatatacaatacaatccgtcggaagactaaggacgcattttacaaaaacatcgtaaaaaagggctatctcctgaagaaagggaaaggcaaaagatggaaaaatctttacttcatcctggaaggttccgatgctcagctcatttacttcgagtccgagaaacgcgctacaaagccaaagggattgatcgatctcagcgtgtgctctgtgtacgtggtgcacgatagcctgtttggtcggcctaactgcttccaaattgtagtgcaacactttagcgaggagcactatattttctactttgccggtgaaacccctgaacaggctgaagactggatgaaaggactccaggctttttgcaacctgcgaaagtcgagccccggtacctccaataagagactccgccaagttagcagtctggtactccacattgaagaagcacacaaactgcctgtaaaacactttacaaacccgtattgcaacatctaccttaactccgtccaagtggccaaaactcacgctagggaaggacagaaccccgtgtggtccgaggaattcgtgttcgatgacctgcccccagatatcaatcgttttgagatcactctgagcaacaaaacaaaaaagagcaaagacccagacatcctgtttatgcggtgccagctgagccgtttgcagaaggggcatgccactgacgagtggtttttgctctcttcacatattccactgaagggcatagagcctggaagtctgcgggtgagagcccgttattccatggagaagattatgccagaagaggaatattcagaattcaaagaattaatcctgcaaaaagaactccacgtggtctacgctctgtcccacgtgtgcggtcaggatagaacactcctcgcgtcaatcctgctcagaatcttcctccacgagaaacttgaaagcctcctcctgtgcaccctgaatgacagagagattagcatggaggatgaggcaaccacactgttccgcgctaccacacttgcaagcacgctcatggagcaatatatgaaagctactgcaacgcagtttgttcatcatgcactgaaggactctatcctgaaaatcatggagtctaagcaatcttgcgagctcagcagcagcaagctgcagaaggcatag

SEQ ID NO: 30572 - DNA, 1161 bp, synthetic construct
  misc_feature 1..1161: note = Description of Artificial Sequence: Synthetic coding sequence
  source 1..1161: mol_type = other DNA
atgaatccacagatccgaaatccaatggagagaatgtacagggacaccttttatgataacttcgaaaatgaacctatcttatacggaagatcatatacatggctctgttacgaggtgaaaataaagcgaggcagaagcaatctgttatgggacactggagtttttcgtggccctgtgctgcctaaacgtcaatctaaccaccggcaggaagtgtactttaggttcgaaaaccacgctgagatgtgttttctgtcctggttttgcgggaaccggctcccggctaacagacggtttcagattacatggttcgtatcttggaatccctgcctgccatgcgttgttaaagttaccaaatttcttgcagagcacccaaatgtgaccctaacaattagcgccgctcgtttatattactaccgcgatagagactggcgctgggttctgttacgcctacacaaggccggagccagggtcaaaatcatggactatgaagattttgcctactgctgggaaaatttcgtgtgcaacgagggtcaaccttttatgccttggtacaagttcgatgataactacgcttcactacaccgaacactgaaagagatcctgagaaatcctatggaggctatgtacccacacatcttctacttccacttcaaaaacctgctgaaagcatgtggaagaaatgagagctggctttgctttaccatggaagttactaaacatcatagcgctgtgtttagaaaacgaggagtatttaggaatcaggtggatccggagacacactgccacgctgaaaggtgttttctcagttggttttgcgacgacattctgagccctaacaccaattacgaagtgacctggtacacttcctggtctccatgtcctgaatgcgcgggtgaagtggctgaatttctcgctcgccactccaatgttaatttgaccatctttaccgccaggctgtgttacttttgggatacggactaccaggaaggtctgtgctccctcagccaggaaggggcttcagtgaagataatgggatacaaggatttcgtgtcatgctggaagaatttcgtctactctgacgacgagccttttaaaccttggaagggtcttcaaacaaactttaggctgttaaaaaggaggctccgggagattctgcagtag

SEQ ID NO: 30573 - DNA, 348 bp, synthetic construct
  misc_feature 1..348: note = Description of Artificial Sequence: Synthetic coding sequence
  source 1..348: mol_type = other DNA
atgggcggttcactgcgagtagccgttcttggggctcccggtgtgggaaagaccgccattataagacaatttctgtttggtgactatccggagagacatcggcctacagatggaccaaggctgtaccgcccagcagtgctgctcgacggagctgtctacgatctatctataagagacggggatgtggctggaccgggatcaagccccggaggtccagaagagtggccggatgcaaaagattggagcctccaggacaccgacgcattcgtcttagtgtatgatatctgcagccccgattcgttcgattatgttaaggcactgaggcagaggatcgcggaaacacggtag

SEQ ID NO: 30574 - DNA, 579 bp, synthetic construct
  misc_feature 1..579: note = Description of Artificial Sequence: Synthetic coding sequence
  source 1..579: mol_type = other DNA
atgcaggctatcaagtgcgtggttgtgggagacggtgccgtaggcaagacgtgcctgcttatcagttacaccacaaacgctttccccggagagtacatcccgaccgtgttcgacaactactccgctaacgttatggtggatggcaagcccgtaaatctgggcctctgggacacggctgggcaggaggactatgacagactgcggccactttcgtatccccagacagatgtgtttctaatttgtttctccctggtgtctcccgcatccttcgaaaatgtacgggctaagtggtacccggaggtccgccaccactgccccaatacacccattattctcgtaggaacgaagttggatttaagagacgataaggataccattgagaaactgaaagagaagaagctaactcccatcacttatccacaggggctggccatggctaaagaaataggcgctgtgaagtacctggaatgttccgccctgacccagcgcggactgaaaaccgtgttcgacgaagccatccgtgccgtcctgtgtcctcctcccgtgaagaaacgaaagcgtaagtgtctgctcctgtag

SEQ ID NO: 30575 - DNA, 636 bp, synthetic construct
  misc_feature 1..636: note = Description of Artificial Sequence: Synthetic coding sequence
  source 1..636: mol_type = other DNA
atgcaggctataaagtgtgtggtggtgggggacggagccgtcggcaaaacctgcctgcttatcagttacaccactaatgcattcccaggcgagtatatacctaccgtgttcgataattattcggcaaatgtcatggtggacggtaagcctgtcaacctaggtctttgggacaccgcgggacaagaggattatgacaggctcaggccgttaagttatccccagactgtcggggaaacctatggcaaagatataacgtccagggggaaggataagcctatcgctgacgttttcctgatctgcttcagccttgttagccccgcttcatttgagaacgtgagggccaagtggtatccagaggtaaggcatcattgtcccaataccccgatcatcctggtgggtaccaaactggatcttagagacgataaagacaccattgagaagctgaaggagaagaaactcaccccaataacctacccacagggtcttgctatggcaaaagagattggcgctgttaagtacctcgaatgcagcgctcttacccagagaggcttgaagactgtgtttgacgaggctatccgcgcagtactgtgccctcccccagtgaaaaagagaaaacgcaaatgcctgctgctctag

SEQ ID NO: 30576 - DNA, 579 bp, synthetic construct
  misc_feature 1..579: note = Description of Artificial Sequence: Synthetic coding sequence
  source 1..579: mol_type = other DNA
atgcaggccatcaagtgtgtggttgttggcgatggcgctgtcggtaagacctgtctgctcatcagctataccaccaatgccttccccggagagtatattcctaccgtgttcgacaactatagcgctaacgtgatggtcgacagtaaaccagttaatcttgggctatgggacaccgctggccaagaggattatgatcgactgaggcccctgtcatatcctcagactgatgtgttcctgatctgtttctccttggtttccccagcatcttacgagaacgtgagggccaaatggtttccagaagtcaggcaccattgccccagcacccccatcatcctggtcgggaccaagctggacctgagagatgacaaagacactattgagaagctcaaggagaagaagttagccccaattacttatccccagggactggccttagcaaaagagattgactctgtgaagtacctcgaatgctccgctctgacccagaggggcctgaagacggtctttgatgaagccatcagggccgtcctgtgtccccagccaacacgtcagcaaaagagggcgtgttctctgctctag

SEQ ID NO: 30577 - DNA, 261 bp, synthetic construct
  misc_feature 1..261: note = Description of Artificial Sequence: Synthetic coding sequence
  source 1..261: mol_type = other DNA
atgcaggccatcaagtgcgtggtcgttggtgacggggcagtgggtaagacatgtctgctgatctcctatactacaaacgcctttcccggagaatacattcctactgtgccgggaaggccatgtgccctgctgcaagatgcagaagccggattgtcatccgatgttgaaggcgcttgctggtgtcaaacacaggaaggacgcatgacaggtgaggcccctgcaccaccatggccagccctacggggaccgcatcactcttag

SEQ ID NO: 30578 - DNA, 558 bp, synthetic construct
  misc_feature 1..558: note = Description of Artificial Sequence: Synthetic coding sequence
  source 1..558: mol_type = other DNA
atgcaagccattaaagccgtcggaaagacctgcctgctgatcagctacacgaccaatgcctttcccggtgagtacataccaacggtgttcgataactacagcgcgaatgtgatggtcgacagtaaacctgttaatcttggactctgggacaccgcagggcaggaggattacgacagattaaggccactgtcttacccccagactgacgtctttcttatttgtttttcgctggtctcaccagcatcatacgagaacgtgcgggcaaagtggttcccagaggtgagacaccactgccctagcacaccgattattctggtggggactaagctcgacctccgcgacgataaagatacaatcgagaaactgaaggaaaaaaagctggctccaatcacttaccctcaggggctcgctttggcaaaagagatagattcagtgaaatacctggaatgcagtgcgctcacacagagagggctgaaaaccgtttttgacgaagcgattcgggcagtgctctgcccccaacccacccgccagcagaagagagcgtgcagcctgctctag

SEQ ID NO: 30579 - DNA, 447 bp, synthetic construct
  misc_feature 1..447: note = Description of Artificial Sequence: Synthetic coding sequence
  source 1..447: mol_type = other DNA
atggtagactccaagccagtcaatcttgggctgtgggataccgcagggcaggaagactatgatagactgagaccgctctcctatccccaaaccgacgtgttcctgatatgtttttcactggtgtccccagcctcttatgaaaacgtcagagccaaatggtttcctgaagtgagacatcactgcccttccacaccaataattcttgtcggtacaaagttagaccttagagatgacaaggacactatcgaaaagctcaaagagaagaaactggctccgataacttacccgcaaggactcgctttggcaaaagaaattgactccgtgaaataccttgagtgttcagctctgacacagcggggactcaagaccgttttcgatgaagctatcagggccgttctgtgtcctcagccgacccggcaacagaagagagcctgtagccttctctag

SEQ ID NO: 30580 - DNA, 501 bp, synthetic construct
  misc_feature 1..501: note = Description of Artificial Sequence: Synthetic coding sequence
  source 1..501: mol_type = other DNA
atgcaagctattaagtgcgtcgtcgttggtgacggagccgtcggaaaaacatgcttactgatcagttacactacaaatgcctttccaggagagtatatacctacagtgtttgacaactatagtgcaaatgtcatggtcgactctaaacctgtcaacctgggactctgggacacagccggacaggaagattatgaccgcctaagaccactgtcgtatccccagaccgatgtgttcttgatttgtttttccctagtgagccctgcatcctacgagaatgtgagggccaaatggttccccgaagtccgccaccactgccctagcacgccgataattctcgtggggacgaagttagatctgcgggatgacaaagatacaatcgaaaagctgaaggaaaagaagcttgctccaattacgtatccccaggggttagcactcgctaaggagatcgattcagtgaaatatctagagtgctcagctcttacccagagaggtctaaagtag

SEQ ID NO: 30581 - DNA, 4785 bp, synthetic construct
  misc_feature 1..4785: note = Description of Artificial Sequence: Synthetic coding sequence
  source 1..4785: mol_type = other DNA
atgaagctctatgtgtttctcgtcaataccgggacaacactgacttttgatacagaactgactgtgcagaccgtggctgatttgaagcacgctattcagtccaagtacaaaattgccatccagcaccaggtcctcgttgtgaatggcggagagtgcatggcggctgacagacgggtgtgcacttatagcgctggaacagacactaatcctatctttttgtttaacaaggaaatgatcctgtgcgaccgtcctcccgcaatccctaagactactttttcaacggagaatgacatggaaatcaaggtggaggagagcctaatgatgcctgctgtgttccatacagtcgcctcgcgtacacagcttgcgttagagatgtacgaggtggccaaaaaactctgtagtttttgcgaagggttggtgcatgacgaacacctgcaacatcagggttgggcagccataatggctaatttagaggattgcagtaattcgtaccaaaaacttctattcaagtttgagtccatctacagtaattacttacagtcaattgaggacattaaattgaaactgacacacctgggcaccgccgtgagtgttatggctaaaataccgttacttgaatgcctcaccagacattcttaccgtgagtgcctgggcagactcgacagcctgccggaacacgaggacagtgagaaagctgagatgaagaggagcacggaactggtgctgtccccagatatgccaagaaccacaaatgaaagccttctcacatccttccccaagagcgtggagcacgtatcgccagacaccgctgatgccgagtccggaaaggagattagagagtcttgccagtccaccgtacaccagcaggacgagactaccattgatactaaagacggggacctgccatttttcaacgtatccctcttggattggatcaacgtgcaggatcgccctaacgacgttgagtcattggtacgcaagtgctttgactcaatgtcccgcctggatcctagaatcattcggccattcatcgcagagtgtaggcagaccattgccaagctggacaatcagaatatgaaggctattaaaggtcttgaggacagactctacgctctggaccaaatgattgcctcatgcgggaggctcgttaatgagcagaaggaactggcccaaggcttccttgccaaccagaaacgggctgaaaacctgaaggatgcctcggtgcttccggacttatgcctttcacacgctaatcagttaatgataatgctacagaaccacagaaaactactcgacattaaacagaaatgcactactgctaagcaggagctggcaaacaatctacacgttagactgaagtggtgttgcttcgtgatgctgcatgcggaccaagatggagagaaattgcaggccttgttgcggcttgttatcgagctgctggaaagggtcaaaattgtggaggccctttcgactgttccgcagatgtattgcctcgcggtcgttgaagtggttaggcggaagatgttcatcaaacactacagagagtgggccggtgcattggtgaaggacggaaagagactttatgaagccgagaaaagcaagagggaatccttcggaaaacttttcagaaagtcatttcttcggaatcgcctgtttagggggctggatagctggcctccgtctttttgcacccagaagcccaggaaatttgactgcgagctacctgatatttcactaaaagacttacagtttctccagtctttctgcccctccgaggtccagccattcctgcgggtaccactcctgtgtgacttcgaacctcttcaccaacacgtgctggctctgcacaatctcgtaaaggccgctcagtcactagacgagatgagccagaccatcactgacttgctgagtgagcagaaagcaagtgtatctcagactagccctcagagcgcgagtagtcccagaatggagtctacagcgggaataacaaccaccacaagtcccagaacccccccacccctgacggtccaagatccactgtgcccggctgtatgccctttggaggagctcagcccggatagcattgacgcacataccttcgattttgaaaccatcccgcatcctaatatcgagcaaacgatacaccaggtgtccctggatcttgacagtctcgctgaatcgcccgaatcagatttcatgagtgcggtgaatgaattcgtgatagaggaaaacttgtcgagccccaatccaatcagtgacccccaatctcccgagatgatggtggagtccttgtattcatccgtcattaatgccattgattcacggagaatgcaggacacgaacgtatgcgggaaagaggacttcggcgaccacacttcactgaatgtgcaacttgaacggtgcagggtggttgcccaggattcacacttctctattcaaacaattaaggaagacttgtgccactttagaacatttgttcagaaagaacagtgtgacttttccaacagtctgaaatgtacggccgtggaaattagaaatatcatcgaaaaggtgaagtgctcccttgaaatcactctgaaggaaaaacaccagaaggagctgcttagtttgaagaacgagtatgagggaaaactggatggtctcatcaaagaaactgaagaaaatgaaaataagattaaaaaattgaaaggcgagctagtgtgcctagaggaagtgttgcagaataaagataacgagttcgccctggtgaaacatgaaaaagaggcagttatctgtcttcagaatgagaaagaccagaagctgttagagatggagaatattatgcacagtcagaactgtgagattaaggagctaaaacagagtagagagatcgttctcgaagacctcaaaaaactgcacgtggagaatgatgagaaattgcagctactccgcgcagagttgcagtctctggagcagtctcaccttaaagagctggaggacaccctccaagtgagacatattcaggagttcgagaaagttatgaccgaccaccgggtaagtttagaagagcttaaaaaggaaaaccaacaaatcataaatcagatccaggaatctcatgctgagattattcaagagaaggaaaagcagctccaagaactgaaattaaaagtgtcggatctctcggatacccgctgcaagttagaagtggagctggctctgaaggaggctgaaacagacgagattaagattctcttagaggaatctagggcacaacaaaaggaaaccctgaaaagtctcctggaacaggagaccgagaacctgcgtacagaaatcagtaaactgaatcagaaaatacaggacaacaacgagaactaccaggtcggcctcgccgaactgaggaccctcatgactatcgaaaaggatcagtgtatctcagagctaattagcaggcacgaggaagaatccaatatactgaaggcagagctgaataaggtgacctctttgcacaaccaggcgtttgaaatcgagaagaacctgaaagagcagattattgaactgcagtcgaagctggactccgagctgtcagctctggaaagacagaaagatgaaaagataacccagcaggaagagaagtacgaagcgatcattcagaatctggaaaaggaccggcagaaacttgtgtcttcacaagagcaggaccgagagcagctgatccagaagttaaactgtgagaaggacgaggccatacagactgccttgaaagaattcaaactggagcgtgaggtggtcgaaaaggaactgctcgagaaggtgaagcatctggagaatcaaattgccaaaagtcctgccatcgattcaacacgcggtgatagcagttctctcgtggctgaactgcaagaaaaactgcaggaggaaaaagcaaaattcttggaacagctagaagaacaggagaaacgcaagaacgaagaaatgcagaacgtgcgcacttcgctgattgccgaacagcaaaccaattttaatactgtcctgacaagagagaagatgagaaaagagaatatcatcaacgatttaagcgacaaactcaaatccacgatgcagcagcaggaaagggataaggacctgattgagtcattgtctgaggacagggcacgactactagaggagaagaaaaagttggaggaggaagtttccaagctcaggagcagttctttcgtccccagtccttatgtggccacagctcccgagttatacggagcttgcgctcccgagcttcccggagaatccgaccggtccgcagtcgagaccgctgacgaaggcagagtggactctgctatggagacctcgatgatgagtgtgcaggaaaatatccacatgctttcagaagaaaagcagcgcattatgctactcgagaggaccctgcagctgaaagaagaggagaataaacggctcaaccaaaggctgatgagtcagtcaatgtcctcagtcagcagtagacactccgagaaaatcgccatccgcgatttccaagtgggcgacttggtactgattatcctggacgagagacatgataactacgtgctctttacggttagtcccactctgtatttcctgcatagcgagtccctgcccgctcttgatttgaaacccggagaaggggcttcaggcgcttccagacgtccctgggtcctgggaaaggtgatggaaaaagagtattgccaggctaagaaagcacagaacaggtttaaagtgccacttgggactaagttttatcgagttaaggccgtttcatggaataaaaaagtttag

SEQ ID NO: 30582 - DNA, 4776 bp, synthetic construct
  misc_feature 1..4776: note = Description of Artificial Sequence: Synthetic coding sequence
  source 1..4776: mol_type = other DNA
atgaaactgtatgtttttctcgtcaatacaggaacgacattgacattcgacaccgaactgacagttcagaccgtggcagacctgaaacacgcgattcagtctaagtataagatcgccatccagcaccaagtcttggtcgtcaacggcggtgagtgcatggctgccgatagaagagtgtgtacatactctgccggaaccgacactaatcccatctttctcttcaataaagaaatgatcctatgtgatcggccacccgcaattcctaagactacattctcaacggagaacgacatggaaattaaggtagaagagagcttgatgatgcccgctgtctttcatacggtagcatcccggacccagctggcgcttgaaatgtatgaagtggccaagaagttatgttctttctgtgagggactggttcacgatgaacacctccaacaccagggatgggctgccatcatggcgaatctcgaagactgttcaaattcctaccagaaactcctgttcaagtttgaatccatctactctaactacctgcagagtatcgaggatattaagttaaagctgacacacctgggtacagcagtctccgtgatggctaagattcctctcctggaatgtctgacacgacactcttatagagagtgcctgggacgcctggattcacttcccgaacacgaggatagcgagaaagcagagatgaagaggagcaccgaactggtcctgtcgccagacatgcccagaacaactaatgagagtctgctgacatccttccccaaaagcgtcgaacatgtatcgcccgatactgccgacgccgaatccggcaaagagattcgggaatcatgtcaatctaccgtacaccagcaggatgagaccacgattgatactaaggacggcgaccttcctttttttaatgtctccctgcttgactggattaatgtgcaggaccgccctaatgatgtggagtccttggtccgtaaatgttttgattccatgtctcgattggacccacgtattatcagaccatttatcgccgagtgcaggcaaacgattgccaaacttgataaccagaatatgaaggccatcaaaggacttgaggacaggttgtatgcattggatcagatgatagccagctgcggcaggctggtcaatgagcagaaagagctggcgcaaggctttctggcgaaccagaagagagcagagaacttgaaagacgcatccgtgttgccggatctgtgtctctcacacgccaaccaactaatgatcatgctccagaaccaccgtaagctgctcgatataaagcagaagtgcacaaccgctaagcaagagctagccaataatctgcatgtgaggttgaagtggtgctgtttcgtcatgcttcacgccgatcaggatggagaaaaactccaggcactgcttcgtctcgtcatcgaattactggagcgagtgaagatcgtggaggccctaagtactgtgccccagatgtactgtctggctgttgtagaggtcgtgcggcgtaagatgttcatcaaacattaccgggaatgggccggagcgctcgtgaaggacggtaagagactgtatgaagcggagaaatccaaaagggagtcattcgggaagttatttcgtaaatccttcctgcgcaacagattatttagggggttagacagctggcccccttccttctgcacacagaaaccacgtaagttcgactgcgagctgcccgacattagtctgaaagaccttcagttcctccagagcttctgcccatctgaggtgcagccattcttgcgggtgcccctactctgcgattttgagccgctccaccagcatgttctggccctgcacaacctggtgaaagccgctcagtccctggatgagatgtcccagacgattactgaccttctttctgagcagaaggcatccgtaagtcagacaagcccccaaagtgcctcaagcccgaggatggaaagtacggcgggaatcaccactacaacatctcccaggacaccccctccgctgaccgtccaggatccgctgtgccccgcagtgtgtcccctggaagaactgtccccagactctatcgacgcgcatacctttgattttgagacaatccctcacccaaatattgaacaaactatccaccaagtcagccttgatctggacagtttagccgagtccccggaaagtgatttcatgagcgcagtcaacgagttcgtaattgaagagaacctgtcatcgcctaatcccatttccgacccccagtcgccagagatgatggtcgagagcctttattccagcgtcatcaacgcgattgactcacggaggatgcaggacactaatgtctgcggaaaggaggactttggggatcacaccagcttgaacgtgcagcttgaacgctgtcgggtggtggctcaggacagccacttcagtattcagactattaaggaggatctgtgccatttcaggacattcgtacagaaggagcagtgcgacttcagcaattctctgaagtgtacagccgttgagatccgaaacattatagaaaaggttaagtgtagtctcgagattacactgaaagagaagcaccagaaagagctattatccctcaaaaacgaatacgagggcaaactcgatggcctgatcaaggagacagaggaaaatgagaataaaatcaaaaagcttaaaggagaactagtctgtctggaagaggtgttacagaacaaagacaacgagtttgctctcgtgaaacacgagaaggaagctgtgatctgtcttcagaacgagaaggaccagaagctgctggaaatggaaaatataatgcactcacaaaactgtgagatcaaggagttgaaacaatctagagagattgtactggaagatctgaagaagctgcatgtcgaaaacgatgagaagcttcagcttctgcgcgctgagctacagtcgttagagcagtctcacctaaaggagttggaggacacgctgcaagtgcgacacattcaggagttcgagaaggttatgactgatcaccgagtgagcctggaggagctcaagaaagagaaccagcagatcataaatcagatccaggaatcccatgccgaaattattcaggagaaggagaaacaactacaagaactgaaactcaaggtgagcgacctctccgacacccgatgtaagctggaggtcgagctggccctcaaggaggccgaaactgatgagatcaagattctgcttgaggagtctagggcacagcagaaggaaactttgaagtctttgttggaacaggagactgagaatcttcgtacggagattagcaagctgaatcagaagatccaagataataatgagaactatcaggtgggactggcggaactgaggaccctgatgactattgagaaggatcagtgcatcagcgagctgatttctagacacgaggaggaatccaacatccttaaagctgagctaaataaggtgaccagcctccacaatcaggcgttcgaaatcgaaaagaatttgaaggaacagataatcgagctgcaatctaagttagattcggaactgtccgctctggagagacagaaagatgagaaaatcacacagcaggaggaaaagtatgaggctatcattcagaatctggagaaggacaggcagaaattggttagcagtcaggagcaagatagggaacagctgatacagaaactgaactgcgaaaaagatgaagccatccagaccgcgcttaaagagttcaaactggagagggaggttgtggagaaggaactgctggagaaggttaaacacttggagaatcagatcgcaaaatctccagcgatcgactcgacccggggagacagtagtagcctggtcgccgagctacaggagaaactgcaggaggaaaaggccaaatttctggaacaactagaagagcaagaaaaaaggaagaacgaggaaatgcaaaacgtccgtacaagtttaatcgcggagcaacaaacaaatttcaatactgtgcttactcgcgagaaaatgcgcaaagaaaacattattaacgatctgtcagataaacttaaaagtacaatgcagcaacaggaaagagacaaagacctgatcgaaagcttgtctgaagatagggccagactccttgaagagaagaagaagcttgaggaagaagtgtccaaactgaggtcatcctccttcgtgccatcaccttatgtggccaccgcacctgagctgtatggtgcttgtgctccagagttgcccggagaaagcgatcgatccgcagtggagacagccgatgaaggacgtgtggattccgcaatggaaacctctatgatgagtgttcaggagaacatacacatgctttctgaggagaagcaacgaatcatgttgctggagagaacgctgcagctgaaagaagaggagaacaagcggctcaaccaacgtctaatgagtcagagcatgtcttccgtcagcagcagacacagtgaaaaaatagccatcagagatttccaggtgggcgacctggtgcttattatattggacgaaaggcatgacaattacgtgctgtttaccgtttctcccactttgtacttcttgcattcagaaagcctgccggctcttgacctcaagcctgcgagtggcgcttctagacggccatgggtcctcgggaaagtaatggagaaggaatattgccaggcgaaaaaagcgcagaatcgattcaaagtccctctaggaaccaagttttaccgcgtgaaagccgtgagttggaacaaaaaagtgtag

SEQ ID NO: 30583 - DNA, 48 bp, synthetic construct
  misc_feature 1..48: note = Description of Artificial Sequence: Synthetic coding sequence
  source 1..48: mol_type = other DNA
atgaaactttacgtgttcttagttaataccggcacaactttgacatag

SEQ ID NO: 30584 - DNA, 4776 bp, synthetic construct
  misc_feature 1..4776: note = Description of Artificial Sequence: Synthetic coding sequence
  source 1..4776: mol_type = other DNA
atgaagctatatgttttcttggtcaacacggggactactctcaccttcgacaccgaactgacagtgcagactgttgccgatttgaagcatgcgattcagagtaaatacaaaatcgctattcaacatcaagtcctggtcgtcaatggcggagaatgcatggccgctgacaggagagtctgtacctactccgctggaactgataccaatcccatatttctttttaataaagagatgatcctatgtgaccggcctcctgctattcccaagacaacctttagcacagagaacgacatggaaatcaaggtcgaagaatctctgatgatgcccgctgtgtttcataccgtggcctcccgcacacagcttgctttggagatgtacgaggtcgccaagaagctgtgcagcttctgcgaaggcctggtacacgatgagcacttgcagcatcaaggctgggcggcaattatggctaacctcgaagattgctccaacagctaccagaagcttttgttcaaattcgagagcatatatagcaactacctccagagcattgaggacatcaaactaaagctaacccacttaggcaccgccgtgtccgtgatggctaagatccctctgctggagtgcctaacaagacattcttacagagaatgcttggggaggctggatagccttcctgagcacgaggattctgagaaagccgagatgaagaggagtacagaactcgtcctgtcgccggatatgccgaggactaccaacgaatctctcctgacttcatttcctaagtcagtggagcacgttagtcccgataccgctgatgccgagtctgggaaggagatcagggaaagttgccaatctaccgtccatcagcaggacgaaacaactatcgatacgaaggacggtgacttaccattttttaatgtctcattgctcgactggatcaacgtgcaggataggccaaatgacgtcgaatctctggtgcgtaaatgctttgattcaatgagcaggctggatccacgcatcatccggcctttcatcgctgagtgtaggcagaccattgccaaactggataaccagaatatgaaggctatcaaaggattggaggaccggctctacgccctggatcagatgattgcaagctgtggcagactagtcaacgagcagaaagaacttgcccagggcttcctagcaaaccaaaagagggccgaaaatcttaaagacgcctcggtcctccctgatctgtgcctgtctcacgccaatcagctgatgattatgctgcagaaccacaggaaactccttgatataaagcaaaagtgcactacggccaagcaggagctggcgaacaatctgcatgtcaggctaaagtggtgttgctttgtaatgctgcatgccgatcaggatggtgagaagctccaggcattacttaggctggttattgagctgctcgaacgggttaagatcgtggaggccctgtccactgtgccgcagatgtactgcttggccgtggtggaagtggtcagaaggaaaatgttcattaagcattacagggaatgggctggggctttggtgaaagacgggaagagattgtacgaagccgaaaagagcaaaagggaaagttttggaaaactgttccgcaagtccttcctgcgcaacagactgtttcggggtctggattcgtggcctccctccttctgtacacaaaaaccaagaaagttcgattgcgaactgcctgatatatcccttaaagacctgcagtttctgcaatcattttgcccatcagaggttcagccattcctgagagtgcctctgctgtgtgatttcgaaccacttcatcagcatgtacttgcactgcacaatcttgtgaaggctgcgcagagtctagacgaaatgagccaaacaataacagacctgttaagtgagcagaaagcatccgtaagccagacgagtccacaatctgcttcgagtcccagaatggaatccactgccggtattaccacgacgacgagtccacggacgccgccacccctgaccgttcaggatcctttgtgccctgcagtgtgccctctggaggagctgtcgcctgactccatcgacgcacacactttcgactttgaaacaatccctcaccctaacattgaacaaaccatacaccaggtatctctcgatctggattctctcgccgaaagccccgaaagcgacttcatgtctgccgtgaatgaattcgtcatagaggagaatttgtcctctcccaaccctatatctgatccacagtctcctgaaatgatggttgagtcgctgtatagctcagtgattaatgctatcgattcaaggaggatgcaggataccaacgtatgcggtaaagaggattttggagaccacacctctttaaacgtgcagctagagcgatgccgtgtggtggctcaagactcacacttcagtatccaaacaatcaaagaggacctttgtcattttcgaacatttgtacagaaggagcagtgtgacttttcaaattctttgaagtgtacagctgttgagatcagaaatattattgaaaaggtcaaatgctctctagagataaccctcaaggagaagcaccagaaagaattactcagcttgaaaaatgaatacgaggggaagttggacggcctaattaaagagacagaggaaaatgagaataagatcaaaaagctgaaaggagaacttgtgtgtctcgaagaagtgctgcagaacaaggacaacgaatttgctcttgtgaaacatgagaaggaggcggtgatttgcttacagaatgagaaagatcagaaactgttggagatggagaatattatgcactcgcagaattgtgaaataaaggaattgaagcagagtagagaaatcgttctggaggatttaaaaaagttacacgtggaaaacgacgaaaaactgcaactgttgagagctgagctccaatcccttgagcagagtcacctgaaggagctggaggacactttgcaagtaagacatatccaagagttcgagaaggtcatgaccgaccacagggtttctctggaagaactgaaaaaagaaaatcagcagattataaaccagatccaggagagtcatgcggagattatacaggagaaggaaaaacagcttcaagaattaaagctgaaagtgagcgatctttcagacactagatgtaagctggaggtcgaactcgcactgaaagaggcagaaacagacgagattaagatcttgcttgaggagagccgcgctcagcagaaggagacgctaaaatcactcttagaacaagaaactgagaatttaagaactgagatatcgaagcttaaccaaaaaatccaagataataatgagaactaccaggttgggttagctgagcttcgcaccctcatgaccatcgagaaagaccagtgcatatctgagctgatcagtcggcatgaagaggagagcaacattctgaaagcagaactcaataaggttacttctctccacaaccaggcatttgaaatcgagaaaaatttgaaagagcagatcattgagctgcagtccaagcttgacagcgaattgagcgccctcgaaagacagaaagatgaaaaaatcacccagcaggaagaaaaatatgaagctatcatacagaacctggaaaaagatcggcagaagctcgttagtagccaggagcaggaccgagaacagttaatccagaagctgaactgcgagaaagacgaggcaatccagacagctctgaaagaattcaaactcgagcgggaggtggtagagaaagagctcctagaaaaggtgaagcacttggagaaccaaatcgccaagtcaccagccattgactcaactcgcggtgatagttcctctctggtggccgaactgcaggaaaaactgcaggaggaaaaggccaagtttcttgagcaattagaggagcaggagaagagaaaaaatgaagagatgcaaaatgtgcgcacatctttgattgccgagcaacaaactaattttaacactgtgctgactcgggagaagatgagaaaggaaaacatcattaacgacctgtccgataaactgaagtcaactatgcaacaacaggaacgtgataaagatttaatcgagtctcttagtgaagacagagctcgattactcgaagaaaagaaaaagcttgaagaagaggtctcgaaactgagaagttcaagttttgtgccttctccttatgttgctactgctccagagctctatggggcatgtgcccctgaactgccgggagaatccgaccgatctgccgtcgagacagcagacgaaggcagagtcgactccgctatggagacctccatgatgtctgtgcaggagaacattcatatgttgtccgaggaaaagcagcgtatcatgttgctggagaggacccttcagctgaaggaagaagagaacaagagactaaaccagcgtcttatgtcccagagtatgtccagtgtctcctcgcgacactcagagaaaatcgcaataagagatttccaggtgggagacctcgtacttattatcctggatgagaggcacgacaattacgttcttttcactgtctctccaacactgtattttctgcatagcgaaagcctaccggctctggacctgaaacctgcgagcggagcatcacgcagaccctgggtgctggggaaggtaatggaaaaggagtactgccaggcaaaaaaggcgcagaaccgatttaaagtacccctgggcactaagttttacagagtgaaggcagtgagctggaataagaaggtatag

SEQ ID NO: 30585 - DNA, 6471 bp, synthetic construct
  misc_feature 1..6471: note = Description of Artificial Sequence: Synthetic coding sequence
  source 1..6471: mol_type = other DNA
atgagcgataccccctccaccggtttctccatcatacaccccacaagctctgaggggcaggtgcccccacccagacatttaagcctgactcacccagtggtcgctaaacgcatcagcttctacaagtcaggtgaccctcaattcggcggtgtgagagtggtggtgaatcccagatcattcaaaagctttgacgccttgctggataacctttcacgcaaggtgcccctgccatttggagtcaggaacatttctaccccaagggggagacattcaatcacacgactcgaagaacttgaggatggtgagagttacctttgctctcacggccgaaaggttcagcccgtggacctggacaaggcccgaagacgacctaggccttggctctcctcacgtgctatcagcgctcactcacccccacatcctgtcgctgtggccgcacctgggatgcctcggccacccaggtccctggttgtgttccggaacggcgatcccaaaacacggcgagctgtgctgctctcaaggcgagtaactcagtcctttgaagctttccttcagcatctgacagaggtgatgcagagaccggttgtgaaactttatgccaccgatggaaggcgcgtcccgtcccttcaggcggtgattctgagctccggcgctgtggtagctgctggcagagagcccttcaagcccggtaactacgacatccagaagtacctgctgcctgccagacttccaggcatttctcagcgggtctacccaaagggtaatgcaaagtctgaatccaggaagatttcgacccacatgtcctcctcatctcgctcacaaatttactccgtgagtagcgaaaagacacacaacaatgactgctacctggattattccttcgtacctgagaagtaccttgcattagagaagaatgacagccagaacctcccgatatacccttccgaggacgacatcgaaaagtctatcatttttaatcaggatggcaccatgaccgtggagatgaaagtgagattccgcataaaagaggaggagaccattaagtggactactaccgtgagcaagaccgggccttcgaataacgacgaaaagtcagagatgtcattcccgggacgcactgagtcgcgctccagcggcctaaagctagccgcatgttctttctcagccgatgttagcccaatggagcgcagcagtaatcaggagggctccctagcagaggagatcaatatccaaatgacagaccaggtagccgaaacatgtagcagtgcgagttgggagaatgccaccgtcgacacagatattatacaaggcacgcaggaccaggctaagcacaggttctaccgcccaccaacccctgggctccgtcgcgtgcgccagaagaagtccgtcatcggcagcgtgactctagtatccgagaccgaggtccaggagaagatgattggtcagttctcttactcagaggaacgagagagcggggaaaacaagtcagagtatcacatgtttacgcactcctgctctaagatgtcctctgttagcaacaaacccgttcttgtacagatcaataataacgatcagatggaggagtcatcacttgagagaaaaaaggaaaattccctccttaagtcatcagccatttctgctggggtgattgagattaccagccaaaaaatgttggagatgtctcataacaacggtcttccaagcaccatcagcaacaactccattgttgaagaggatgtagtggattgtgttgtgctggataataagaccggaatcaagaatttcaagacttatggcaacacaaacgaccgtttttctcccatctccgcggatgctacacatttctcgagcaataacagcggtacagataaaaacatcagcgaggcacccgcatcggaggcctcatccacagtgaccgccagaattgacagacttatcaacgagttcgcgcagtgtggactcaccaaactccctaaaaacgagaagaaaatactctcttccgtggcgagtaagaaaaagaagaaaagtcgccagcaagccattaacagtcgttatcaggatggccagcttgccaccaagggcattctcaacaagaatgagcggattaacacgaagggacggattaccaaggaaatgatcgtccaggatagcgatagtccactcaagggcggaatcctttgcgaggaggacctgcagaagagtgacaccgttatcgaatccaacaccttctgttccaagagcaatctgaattccaccatatctaagaatttccacaggaataaattaaatacgacccagaatagtaaggtacaggggctgttgaccaagcgaaaatcccgcagtctaaataagatcagtctcggcgctcccaagaaacgcgagataggccagagagataaagtatttccacacaacgaaagcaagtattgcaagagcaccttcgaaaataagagccttttccacgtatttaatattctcgaacagaaacccaaagatttttacgcccctcagtcccaggccgaggtagcaagcggctacttacgagggatggcaaagaagtccttggtgtcaaaagttaccgatagccacattacactgaagagccagaagaagcgcaagggcgacaaggttaaggccagcgcaattttaagcaagcagcacgccacaactagggccaatagcttggcaagtcttaaaaaaccagacttccccgaggcaattgcccaccacagcatccagaattacatacagagttggctccagaatattaacccctatcctactctgaagcccattaagagcgctccggtctgccggaacgagacatctgtggtcaactgttccaacaactcattttccggcaacgacccccataccaacagcggcaagatctccaattttgttatggaatcaaacaaacacataaccaagatagcgggactgaccggcgacaacctgtgcaaggaaggcgacaagtcttttattgctaacgatactggtgaggaagatttgcacgaaactcaagtcggctctttaaacgacgcctatctcgtcccactgcacgagcattgcacactcagtcaaagcgccattaatgaccataatactaagtcccacattgcggctgagaagagtggcccagagaaaaaactggtctatcaggaaatcaaccttgcgagaaagaggcagagcgtggaggccgcaatacaagtcgatccaattgaagaggaaactcctaaggacctgctgccagtgctgatgctgcaccagctccaggcctctgttcccggaattcacaaaacgcagaacggagtggttcagatgcccggaagcctagcaggggtgcccttccatagtgcaatttgtaactcgagcaccaacttgttactagcctggctgctggtcctgaacctcaaaggtagcatgaatagtttctgccaggtcgatgcacataaggctactaacaagtcgagcgaaaccttggcactgctggaaattcttaaacacatagctattactgaggaggccgacgatctgaaggccgctgtcgcaaatctggtagagtccaccacgagccactttgggctgagcgaaaaggagcaggacatggtgcccatcgacctcagtgcaaactgttcaactgtgaacatccagagcgtccctaagtgcagtgaaaacgagcgtacacaaggtatttccagcttggacggcggatgcagtgcttctgaagcctgcgctcctgaagtatgtgtgctggaggtaacctgcagtccttgtgaaatgtgcaccgtgaataaagcctactcaccgaaggaaacatgtaaccccagcgataccttttttccctcggacggctacggagttgaccagacatcgatgaataaagcttgcttcttgggcgaagtgtgttctctcactgacactgtattttccgacaaagcctgtgcccaaaaggagaatcacacttacgaaggggcttgccctatcgacgagacctatgttccagtcaatgtttgtaacactatcgatttcctgaacagcaaagagaacacatatactgataacttggacagcacagaagagctggaacgcggtgacgatattcagaaggatctcaatatcctaaccgatccagaatataagaacggctttaacacacttgtgagtcaccagaatgtttcaaacctgagctcatgcggcttgtgtttatccgagaaggaagctgagctcgacaagaaacacagtagtctggatgacttcgagaactgctccctgcgtaaatttcaagacgagaatgcttacacgtcatttgacatggaagaaccaagaactagcgaggaaccaggatccatcacgaactcaatgacttcttcagagagaaacatatctgagcttgaatccttcgaggaacttgaaaatcacgatacagacatcttcaacaccgtggtaaatgggggagagcaggcaacagaggaattgattcaggaagaagtggaggctagtaagactctcgaactgatcgacattagcagcaagaacatcatggaggagaaaaggatgaacggaatcatctatgaaattatttcgaaacgcctagctaccccaccctcgttggacttctgttatgatagtaagcaaaactcagagaaggagacaaatgaaggagaaacaaaaatggtcaaaatgatggtgaagaccatggagacgggatcttatagcgaatcttccccggatctgaaaaagtgtatcaaaagtccagttacaagtgactggtctgattacagacctgacagcgacagcgaacaaccttacaagacaagcagcgacgacccaaatgatagcggagaattaactcaagagaaggagtataacattggattcgtcaagcgtgcaattgaaaagctgtacgggaaggcagacatcatcaagcccagcttcttccccggatctacgagaaagagccaagtttgcccttataattctgtggagttccagtgttctagaaaggcctccctctatgactccgaaggacagtctttcggttcaagcgagcaggtcagttccagtagcagcatgctccaggagtttcaggaagagaggcaggacaagtgtgacgttagtgccgtccgggataactactgtaggggcgacatagttgagcctgggaccaaacagaacgatgactccaggatcctgaccgacattgaagaaggggtcctgatcgataaggggaagtggctgctcaaagagaaccatctgttgcggatgtcctccgagaacccagggatgtgcggcaacgcagataccaccagtgtggacacgctcctcgacaacaactctagtgaagtgccttatagccatttcgggaatctggcacccggtcccacaatggacgagttgtcttcttctgagctggaagaactcactcaaccgttggagctgaaatgcaactactttaatatgccacacggttcggactctgagccgttccacgaagatttgctggacgtgaggaatgagacctgtgctaaggagagaattgccaatcaccacaccgaagagaaagggtctcaccaatcagagcgggtgtgcacttctgtgacgcactcatttatctcagcaggcaacaaggtttaccccgtatccgacgacgcaattaagaaccagcctcttccagggagtaacatgattcacggaacgctccaggaggctgattctctagacaagctctatgcgctgtgcgggcagcattgccctatactgactgtcatcatacaaccaatgaacgaggaggatcgaggcttcgcttataggaaagagtctgacattgagaattttctcggattctatctgtggatgaagatacatccctatctcttgcagaccgataaaaatgttttcagggaggagaacaacaaagcaagtatgcggcagaacctaatagataacgccatcggggatattttcgaccagttctacttctctaatacgttcgatcttatgggtaaaaggaggaagcagaaacggatcaactttctcggcctcgaggaagagggaaacctcaagaagttccagccagatttaaaggaacgattttgcatgaattttcttcacacatcacttttggtagtgggaaatgtggatagtaacacccaggacctgtctgggcagacaaacgagatcttcaaagccgtagacgagaacaacaatctgctgaacaaccgctttcaggggagtaggacgaacttgaaccaggtggtacgggagaatataaactgccattatttcttcgagatgctcggccaggcctgcctcctcgacatctgccaagttgaaactagcctgaacatttcaaaccgaaacatcttggaactgtgtatgttcgaaggggagaacctttttatctgggaagaggaagatatcttgaatttgaccgacctcgagagctcaagggagcaggaggacctgtag

SEQ ID NO: 30586 - DNA, 1212 bp, synthetic construct
  misc_feature 1..1212: note = Description of Artificial Sequence: Synthetic coding sequence
  source 1..1212: mol_type = other DNA
atgactcctcctctgctgcatcatgatctgaaaacgcagaatattctcctcgacaacgaattccacgtcaaaatagcggactttggactctccaaatggaggatgatgagcctctctcaaagcagatcttcaaagtcagctcccgaaggcggtacgattatatatatgccaccagagaactacgaacccggacaaaaaagtagagcaagcatcaagcacgacatttactcttacgcggtgataacctgggaggtgctgtctcggaaacagccttttgaggatgtcactaatcctctccagatcatgtattctgtctcacagggccaccgacccgttattaatgaagaatctcttccctacgatatccctcatcgggcacgcatgatcagcctcatcgagtccggatgggcacagaatccagatgaacggccatcttttctaaaatgcttgattgaattagagccagtcttacgcacttttgaagagatcaccttcctggaggccgtcatacagctaaaaaaaactaaactgcaatccgtgtcgagtgcgattcacctctgcgacaagaaaaagatggagctctctctgaacattccagtaaatcacggcccacaggaagagtcatgtggtagttcccagttacacgagaatagcggaagcccagagacaagtagaagcctgcctgctccccaggataacgattttctctcaagaaaggcgcaggattgttattttatgaagttgcatcattgtcccggaaaccactcgtgggattctaccataagcggtagtcagagagccgcattttgtgatcataagacgacgccctgttcctctgcaatcataaatcctctgtccaccgcgggtaattctgagcggctgcaaccaggtattgcacagcagtggatacagtcaaagcgggaggatatcgtgaatcagatgacagaggcgtgcttgaaccagagtctcgacgcgctcctcagtagagacctgatcatgaaggaagactatgagttggtttctaccaagcctacacgcacgagcaaagtcagacagctgctcgataccaccgatattcagggcgaggaattcgccaaggtgattgtccaaaagctcaaggataataagcagatgggcctgcaaccctaccctgagattctcgttgtgtcaaggtcccccagcctcaatctattacaaaacaagtcaatgtag

SEQ ID NO: 30587 - DNA, 10377 bp, synthetic construct
  misc_feature 1..10377: note = Description of Artificial Sequence: Synthetic coding sequence
  source 1..10377: mol_type = other DNA
atggagcggagcggttgggctcgccagactttccttctcgccctcttgctaggcgctactttaagagccagggcggcagccggatactatcctagattttccccgttcttctttctttgtacccatcatggggaactggagggggacggggaacagggcgaggttctcatctctctgcatattgcgggaaacccaacatattatgtgcctggccaagagtaccacgtgactattagcacgtctactttttttgacggtctgctggtcactgggctgtatacttcgactagtgtacaggcctcacagtcgattggcggttcttcagccttcggctttgggatcatgagcgaccatcagtttggtaaccagttcatgtgcagtgtggtcgcttcgcatgtatcccacttgccaaccactaatctgtctttcatctggatcgctccccctgcaggaactggttgtgtcaacttcatggcaacagccacacacagaggccaagtaattttcaaagacgcgctggcccagcaactgtgtgaacagggggcaccaactgatgtgaccgttcatccccacctagctgaaatccattcggactccatcattttgcgagacgactttgattcataccaccaattgcagttgaatcccaacatttgggttgaatgtaataactgtgagaccggagaacagtgcggggctataatgcacgggaatgcagtgacattttgtgaaccatatggtccccgagaacttatcactactggactgaacacgactaccgcctccgtgctgcagttctctataggttctggcagctgcaggtttagttacagtgatccctctattatcgtgctctacgctaagaataatagtgctgattggattcagctagaaaagattagagctccctcgaacgtgtctaccataatccacattctttacttgccagaggacgcaaaaggggagaatgtgcagtttcagtggaagcaggagaacctcagagttggcgaggtctatgaagcttgttgggcactggataatattctgattattaattcagctcacaggcaggtggtgctggaagatagtctggaccctgtggacactgggaactggctcttcttcccaggggctacagtgaaacacagctgccagtcagatggtaactcaatctacttccatggcaatgaagggtctgagttcaattttgcgaccacaagagacgtggacctatccaccgaagatatccaggaacagtggtccgaagaattcgaaagccaacccaccggatgggatgtgctaggcgctgtcatagggactgagtgcgggactatcgagtccgggctcagcatggtctttttgaaggatggggaacgcaaactttgtacccccagcatggacacaacagggtacgggaacctcagattctattttgtgatgggaggcatttgtgatccgggaaatagtcacgagaatgacatcattctctacgcaaagatcgaaggtaggaaggagcacatcacccttgacacgctgtcctattcatcatataaagttcccagcttggtctccgtggtgatcaacccagagctccagacacctgctactaaattttgccttaggcagaagaaccaccaaggacacaataggaatgtatgggcggttgacttcttccatgtccttcctgtgctaccaagcaccatgtcccacatgatccaattcagcatcaatctgggctgcgggacacaccaaccagggaattctgtgagtctggaattttcaacaaatcatgggaggtcttggagcttgctgcacacagagtgccttccagaaatctgtgccggacctcacctgccccattccactgtgtactctagtgaaaattacagtggttggaataggattacaatccctctccccaatgccgctcttacccgaaatacccgaatccgatggcggcagaccggtccaatcctgggcaacatgtgggcaatagacaacgtgtacatcgggccaagctgcctcaagttctgcagtgggcgagggcagtgtacacgccacgggtgcaagtgcgatcccggattttccggacctgcttgcgagatggcaagtcaaaccttcccaatgtttattagcgaaagtttcggctcaagtcggctttcctcctaccataatttttatagtattcgaggggctgaggtctcttttggctgtggcgtcctggcttctggcaaggccctagtattcaacaaagacggaaggcggcagctgattacatcattcctggacagctctcagagcagattcttacagttcacccttcggcttggaagcaaatctgtgctgtccacgtgtagagcacctgatcagccaggggagggagtgctcctgcactatagctacgataacggaattacctggaaactgctggagcattacagttatttgagctaccatgagccaaggattatctcagtagagctgcctggtgatgcaaaacagtttggcattcagttccgctggtggcagccctaccatagcagtcagcgcgaagatgtctgggccatcgatgagatcatcatgacatctgtcctttttaatagcatttctttggactttaccaacctggtcgaggtgacccagtctttaggcttttacctcggtaacgttcagccttactgtggacacgactggaccctctgtttcaccggtgacagcaaactggcaagcagtatgagatatgtagaaacccagagcatgcaaatcggcgcttcttacatgatacagttctctctcgtcatggggtgcggacagaagtacaccccacatatggacaatcaggtcaagttggaatatagcactaatcacggcttaacgtggcaccttgtgcaagaggaatgtctacctagcatgccctcttgccaagagttcaccagtgcttccatataccatgcttcagagtttacgcagtggcgtcgggtgatcgtgcttttgccgcagaaaacctggtccagtgctacccggttccgatggtcgcagtcctactacacagcccaggacgaatgggccctggattctatatacattgggcaacagtgcccgaacatgtgctctggtcatgggtcttgcgaccacggaatctgccgttgcgaccaaggctaccaggggacggagtgtcacccagaagccgcattgccctctaccatcatgtccgattttgagaaccaaaacggttgggagtctgattggcaggaggtcatcggaggagaaatagtcaaaccagaacagggttgtggcgtaatctccagcggtagctccctttacttctcaaaggcaggcaaacgacagcttgtctcttgggacctggacacctcctgggttgattttgttcagttctatatccagatcggtggcgaaagcgcaagttgtaataaacctgactcaagggaggaaggggtcctcctccaatacagtaataatgggggaatccagtggcacctgttagcggagatgtacttctccgatttttctaagccgaggttcgtgtacctggagctccctgctgctgccaagaccccatgtactcggttccgctggtggcagcctgtgttttcaggggaggactatgaccagtgggctgtagacgacataatcatcttgtccgagaaacagaagcagatcattcccgtcattaatcccacactgccccagaatttttatgaaaagcctgccttcgactatcccatgaatcaaatgagtgtgtggctgatgctggccaatgaggggatggtaaaaaacgagacgttttgcgctgcaactcctagcgccatgattttcgggaagtctgacggagaccgcttcgctgtgacccgggatctgaccctcaaaccaggatacgtcctgcagttcaagctgaatatcggctgtgcaaaccagttttcatccactgccccagtgctcctgcagtactctcatgacgcagggatgtcctggttcctcgtgaaagagggctgttacccagcatcggctggtaagggctgtgaaggtaatagcagagagctgtccgagccaactatgtaccacaccggggatttcgaggaatggaccaggattaccattgtgatccctcgcagtctggcatcgtcaaaaacacgttttagatggatccaggagagttcttcccagaagaatgtacctccttttggattggatggtgtgtacatatccgagccctgcccctcatattgctctggacatggcgactgcatctctggggtatgtttttgcgatcttggatacaccgctgctcagggtacctgcgtcagcaatgtccctaaccacaacgagatgttcgaccgcttcgaggggaagctctctcctctgtggtacaagattaccggggcacaggtggggaccggttgtgggaccctaaatgatggcaaatcactgtactttaatggtcctggcaagagggaagctcgaaccgtcccactagacacacgcaacatccggctggtccagttttatatacagattgggtcaaagacaagcggaataacgtgcattaagcccaggaccagaaacgaagggctaattgtacagtatagtaatgataacggtatcttgtggcatctgcttcgggaactggatttcatgagctttctggaaccgcagattataagcatcgaccttcctcaagacgccaaaacccccgcaaccgcttttagatggtggcagccacaacacgggaaacatagtgcgcagtgggcactagacgatgtgctgatcggaatgaacgatagcagtcagacgggattccaggataaatttgacggcagcatcgacctgcaggcaaactggtaccgtatacaagggggacaggtcgacatcgactgtttgagcatggatacagctcttatcttcactgaaaatatcgggaaacccaggtacgcggagacttgggacttccatgtaagcgcctccacgttcctgcagtttgaaatgtcaatgggctgtagcaagcctttttcaaatagtcacagtgtccagctgcaatacagcctgaacaatggtaaggattggcatctcgtcactgaggaatgcgtaccacctacaatcggttgcctgcattatacagagtcatcaatctatacctccgagcggttccaaaattggaagcgtataactgtatacctccctctgtccacaataagccccaggacccgattccgatggatccaggctaactacaccgttggggctgacagctgggccatcgacaatgttgttctggcctcaggctgtccctggatgtgcagtgggaggggaatttgcgatgcaggacgctgtgtgtgtgacagaggcttcgggggtccttattgtgtccccgtcgtgccattgccctccatccttaaagatgattttaacggcaatttgcacccagatctttggcctgaggtctatggagccgaacggggaaatctgaacggtgaaacaattaagtctgggactagtctgatcttcaagggagagggcctgaggatgctaatctcacgggatcttgactgcactaacacaatgtatgtgcaattcagtttgcgctttatcgcaaaaagcacccctgaaaggagccactccatcctgctgcaattttcaatctccggcggtattacttggcacctgatggacgagttctacttccctcaaaccacgaatatcttgtttataaacgttccattaccttataccgcccagaccaatgccactaggttccgcctctggcagccatataacaacggcaaaaaggaggagatttggatcgtggacgactttatcatcgacgggaataatgtcaacaaccccgttatgttactggacaccttcgatttcggacccagagaagacaattggttcttttatcccggaggtaatatcgggctgtattgcccatactccagcaagggagcacccgaagaagactcagccatggtcttcgtgtccaacgaagtgggagagcattctatcacaacacgggacctgaatgttaacgagaacaccatcattcaatttgaaattaacgtgggatgttcaacagattcgagctcagctgatcctgtccgcttagagttcagcagagactttggcgctacatggcatttactcttgccgctgtgctaccatagctcatctcatgtatctagcctgtgctccacagagcaccacccatcttcaacttattacgcgggaacgatgcaaggttggcggagagaagtggttcatttcggtaagctgcatctctgtggatccgtgagattcaggtggtaccagggattctaccccgcaggcagccaacctgttacatgggcaatcgacaacgtgtacatcggccctcagtgtgaagaaatgtgcaacggacaggggtcgtgtatcaacggaacgaagtgcatatgtgaccccggttatagcggcccaacatgtaagatttcaacaaagaaccctgatttcctgaaggatgattttgaaggacagctcgagtctgatcgcttcctgctgatgagtgggggaaagccttcaagaaaatgtggtattctgagctcaggaaacaatctgtttttcaacgaggacggcctacgcatgctcatgactcgggacttggatttgtcgcacgcccgattcgttcagttctttatgaggctcggatgtgggaagggcgtccccgaccctagatctcagcccgtgctgctccagtactctttgaatggaggattgagctggtcattacttcaagaatttctgttttcgaatagctcaaacgtgggtagatatatcgctcttgaaatccctttgaaggccagatccggctctaccaggttgagatggtggcagccttccgaaaatggacatttttattcaccttgggtgatcgatcaaatactgataggtggcaacatcagtggcaatactgtactcgaggacgactttaccaccttagacagccggaagtggttactgcaccctggaggaactaaaatgcctgtgtgtggcagtactggggatgctctggttttcattgaaaaggcatcaacacgatacgttgtttccacagacgtcgctgtgaacgaagattcttttttacagattgattttgctgcttcctgtagcgtcactgacagctgttatgctatagagcttgaatactccgttgacctgggcttatcatggcatccactggtgagggattgcctccctacaaatgtcgagtgtagcagataccatctgcagaggatcctggtaagtgacacctttaataaatggactcgtattactctccctctacccccttatacacggtcacaggccacaaggtttcggtggcatcaacccgcacccttcgataagcagcagacctgggcaattgataatgtgtatattggcgacggttgcatcgacatgtgttctggtcacggcaggtgtatccaggggaactgtgtgtgtgatgagcagtggggtgggctgtattgtgatgatccagagacgagtctccccactcagctgaaggacaacttcaaccgggctccttcttcccagaattggcttaccgtgaatgggggaaaattaagcacagtgtgcggcgctgtggccagtggcatggcattgcacttctcaggagggtgttcaaggcttctagtcaccgtggacctaaatctgaccaatgccgaatttatccagttttatttcatgtacgggtgtctcatcacccccaataacaggaatcaaggcgtcctactcgagtattctgtcaacggcggtatcacgtggaacctcctgatggagattttctatgatcaatattctaagcccggttttgtcaatattttgttacctcccgacgcaaaagaaattgccacaagatttcgctggtggcaaccaagacatgatggactggatcagaatgattgggcgattgataatgtcttgatttcaggatccgccgatcaacgcacagttatgctggacactttttcatcggcacccgtccctcagcatgagcggtcgcctgcagacgccggtccagtcggaaggatcgcttttgatatgttcatggaagacaaaacctccgtgaatgaacattggttgttccatgacgactgcacagtcgaacgattctgtgattctcctgacggggtcatgctctgcgggagtcacgatggcagggaagtctacgctgtcacccacgatctgacccctacagagggctggattatgcaatttaaaataagcgtcggttgtaaagtttcggagaagatagctcagaaccagatccacgtgcaatattcgaccgactttggggtttcttggaattacctggttccccagtgcctccctgccgaccccaagtgctctgggtctgttagccagccaagcgtgttcttccctacgaaggggtggaagagaattacctaccccctccccgaatcgctcgtcggcaacccagtgagattcagattctatcagaagtatagtgacatgcagtgggctatagacaacttttatctgggacccggatgcttagataattgtcggggacacggcgactgtctgcgggaacagtgcatatgcgacccgggttacagcgggcctaactgttaccttacacacacactgaaaacattcttgaaggagagatttgatagtgaggaaattaaacctgatctgtggatgagtctggaaggaggtagcacttgtaccgagtgcgggatcctagccgaggataccgcgctatatttcggaggctcaaccgtccgacaggcagtcacgcaagacttggatttgcgtggcgctaagttcctgcagtattggggtcgaatcgggtccgaaaacaatatgaccagctgccaccggcctatctgtaggaaggagggcgtccttttggattacagtaccgatggtgggattacttggacactgctccacgagatggattatcagaagtatatcagcgtcaggcatgactatattcttctgcctgaagatgcccttacgaataccacgcggttgagatggtggcagccttttgtaatctcgaacggcatcgtagtgagcggagtggaacgggcacagtgggctcttgacaacattctcattggcggagctgagattaatccatcccagcttgtggatactttcgacgatgagggtacttctcacgaggagaactggagtttttaccccaatgctgttagaacagcagggttctgtggaaatccgtccttccacttgtattggccgaacaaaaaaaaggataagactcacaatgcattaagcagtagggaactgatcatacagcccggttacatgatgcagtttaagatcgttgtcgggtgtgaggccacttcttgtggagatttgcacagcgtcatgctagaatacacgaaggacgcacgctccgacagctggcagctggtgcaaacacagtgtctgccctcctcatctaactctatcggctgtagtcccttccagtttcacgaggcaactatctataattcggttaactcttcttcctggaagcggatcaccattcagctgccggatcacgtgtcctcctcagctacccagttccgctggattcagaaaggcgaggagactgaaaagcaatcttgggcgatcgatcatgtttatatcggcgaagcatgtccaaagctctgcagcgggcatggttactgcactaccggggcaatttgtatatgtgacgagtctttccagggcgacgattgctcagtgttctctcacgaccttccatcatatataaaggataacttcgagtctgctcgggtcacagaagcaaactgggaaactatccaaggaggagtgatcggcagcggctgtggtcagctggcgccttatgcccatggagattcactgtacttcaatgggtgtcagattagacaagccgctaccaagccgctggacctcactcgagcaagtaaaatcatgttcgtcctgcagataggatcaatgagtcaaacagattcttgcaacagtgatttgtccggtccgcatgccgtcgataaggcagtgctcctgcagtattctgtcaataacgggatcacctggcatgttatcgcacagcatcagcctaaggacttcacccaagcacagcgagtgagctacaatgtgccactggaagccagaatgaagggcgttctgctgcgctggtggcagcctagacacaacggcactggccacgaccagtgggcgctggaccacgttgaggtagtgcttactcgcaagcagaactatatgatgaacttctcgcggcagcacggcttacgccacttctataatcgcaggagaaggagtctgcggcgttacccctaa

SEQ ID NO: 30588 - DNA, 10383 bp, synthetic construct
  misc_feature 1..10383: note = Description of Artificial Sequence: Synthetic coding sequence
  source 1..10383: mol_type = other DNA
atggagagaagtggatgggctcgccagacattcctgctggcattactgctgggcgcaaccttacgtgcacgcgcagccgcaggatactatccaagattttcccccttcttcttcctatgtactcaccatggagaactggagggcgatggcgagcagggagaagtgctcatttccctccacatagccggtaatcccacttactatgtgcccggtcaagagtatcatgtcaccatctctacctcaacatttttcgatggcttgttggtcaccggattgtatacttctacgtccgtccaagcaagccaaagtatagggggaagcagcgctttcgggtttggaataatgtcggaccaccagttcggaaatcaattcatgtgcagtgtggtcgcttcgcatgtttcacatctcccaactacaaatttatcatttatatggatcgcaccacccgcaggcacagggtgcgtgaatttcatggctaccgctacccaccgaggacaggtaatattcaaggatgccctcgctcaacagttatgcgagcagggggctcctaccgacgttacggtgcatccccacctggccgagatccacagcgattcgatcattctgagagatgacttcgactcctatcatcagttgcagctgaatcccaacatctgggtagagtgcaataattgcgagacaggtgagcagtgcggcgcaataatgcatggcaacgccgttaccttttgtgagccctacggacctagggagcttatcacaactggccttaacacaactacagcttctgtgttacagttctcaatcggctccgggtcctgtagattcagttatagcgatccgtcaatcatcgtactttatgccaagaacaacagtgccgattggatccagctggagaagataagagctcccagcaatgtgagcaccattattcatatcctgtatctgcctgaggacgcaaaaggagaaaatgtgcagtttcagtggaaacaggagaacctgagagtgggcgaggtgtatgaggcatgttgggctttagataatatcctgataatcaattctgcacacagacaggtggtacttgaggactcactggaccccgtcgacactggaaattggcttttctttcccggtgcaactgtgaagcactcttgtcaatctgacgggaattctatctattttcacgggaacgaaggttcggaatttaactttgctacaacaagagatgtggacctgtctacagaggatattcaggagcaatggagcgaagagtttgagtctcagcccacggggtgggatgttcttggagcagtgataggcacagaatgtggtactattgagtctggacttagcatggtgttcctgaaagacggcgaaaggaagctgtgtacaccgtcgatggacacgaccggatatggaaatttacggttttattttgtaatgggcggtatctgtgacccagggaatagccatgagaatgacataatcctatacgcaaaaatagaaggcaggaaagaacacatcacgcttgacactctgtcttactcctcttataaggttcccagccttgttagtgttgtgatcaaccccgaactgcagactcccgctaccaagttttgtctccgtcagaaaaaccaccaggggcacaaccgtaatgtgtgggccgtcgatttcttccacgtcttgcccgtgctgccatccaccatgtctcacatgatccagtttagtattaatctaggttgtggtacccatcaacctggtaattccgttagtcttgaatttagtacgaaccacggacgaagttggtctcttctccacacagaatgcttacctgaaatctgcgctgggcctcaccttccacactccactgtgtatagcagtgaaaattattccggttggaatcgaattacgatcccactgccgaatgccgctctgaccagaaacacccggataagatggcgacaaaccgggccaattctgggcaatatgtgggcaatcgataacgtttatatcgggccatcttgcttaaagttctgttcagggagaggccagtgcacccgccatggctgtaaatgtgatcctggattttctggaccggcttgcgagatggccagccagactttcccaatgtttataagcgagagcttcggctcttcccggctctcaagttaccataacttctattctatccgcggtgccgaggtatcatttggatgtggggtgttagcctccgggaaagcactggtgttcaacaaggacggaagaaggcagttgatcacctctttcctggattcaagccagtcccgttttctgcaatttacattgagactaggttcaaagtccgtgctttcaacatgtcgggcaccagaccagcctggtgaaggagtcttgctgcattattcatacgataacgggattacctggaagctgcttgaacactacagctatctgtcttatcatgaaccaaggattatctcagttgagctaccaggtgatgccaagcagtttggcatacagttccggtggtggcagccttatcacagttcacagcgggaggatgtctgggccatcgacgagataatcatgaccagtgtcctgtttaactccatctcactggacttcacaaatttagttgaggtaacccagtctctcggattttatctgggtaatgtgcagccatattgcgggcatgattggacactctgctttactggcgattccaagctcgcaagcagcatgcgttacgtcgagacacagagcatgcagatcggggcatcatacatgatccagttttcactcgtgatgggctgcggacagaaatacacaccccacatggataaccaggttaagctcgagtactctaccaatcatggcctgacttggcatctggtgcaagaggagtgcttgcccagcatgccatcctgccaggagttcacatccgcatctatatatcatgccagtgagttcacacagtggcgcagagtgatcgtcttgctgccacaaaaaacctggagttcagctaccagatttcgctggagccagtcttactacacagcacaggatgaatgggcacttgattcaatctacataggccaacagtgtcctaacatgtgctcgggtcacggttcctgcgaccacggcatctgcaggtgcgaccaaggttaccagggaactgagtgccaccctgaagccgcactcccgtcaactatcatgtccgattttgagaaccagaatggctgggagagcgattggcaggaggtgattggcggtgagatcgtcaagcccgagcagggatgcggagttatatcaagtggatcatccttatacttcagcaaagcagggaagcgacagctagtgagctgggacctcgacacatcttgggtagatttcgtacagttctacattcagataggcggagagtcggcttcctgcaataagccggacagccgggaggagggggtgctgctgcagtatagtaataatgggggtattcaatggcatctgctggcggagatgtacttttccgattttagcaagcctagattcgtatacttggagttgccagctgccgctaagacgccctgtactcgctttcggtggtggcagccggtgttcagcggagaagattatgaccaatgggccgtggatgacatcatcattctgtcagagaaacagaagcagataattccggtgatcaatccaacactgccgcagaatttttacgagaagcctgcctttgattaccccatgaatcagatgtcggtatggctgatgttagccaacgaaggcatggtgaagaacgagaccttctgcgcagccaccccttcagctatgattttcggcaaatccgatggagatcgtttcgccgtgacaagagatcttacactcaaaccgggatacgtgcttcagttcaagctcaatattggatgcgcgaaccagttttccagcacagcccctgtgctcctccagtattcccacgacgcaggaatgagttggtttcttgtgaaagaggggtgttatccagccagcgccggaaagggatgtgagggtaactcacgggagctttcggaaccaactatgtaccacactggtgactttgaggaatggacccgcattaccatcgttatccctaggtccctggccagctctaaaacacgcttcaggtggatccaggagtcctcatcacaaaagaacgtccctcccttcggccttgacggagtgtacatctcagaaccatgccccagctattgttcagggcatggggactgtatttccggggtatgcttctgcgacttggggtatacagctgcccaaggtacctgcgtgagcaatgtaccaaaccataatgaaatgtttgatcgattcgaggggaaactgtcgcccctgtggtacaaaatcactggcgctcaggttggaactggctgtggtactttgaatgacggtaagtcgctgtacttcaacggtcctggcaaaagagaggcaagaacggtcccgttggatactcggaacattcgattggtgcaattctacatacagataggatccaaaacgtcaggtattacttgtatcaagccgagaactaggaacgaggggctgatcgttcagtatagcaacgataatggtattctgtggcaccttcttagagagttggactttatgtcatttctggaaccccagatcatttcaatcgatctgcctcaggacgccaagaccccagccaccgcatttagatggtggcagccccagcatggcaagcactctgcccaatgggcactggatgatgtccttattggcatgaatgatagctctcagacaggatttcaggacaaatttgacgggtccatcgatttgcaggcaaattggtatcgcatccaggggggtcaggtggacattgactgtttgtccatggacactgcactcatctttacagagaacataggtaagcccaggtacgctgagacatgggactttcatgtgagcgcttccacgttcttgcaattcgagatgagtatgggatgttctaaacccttcagtaacagtcacagcgtccagctgcagtactccctgaacaacggtaaagactggcatctagtgacagaggagtgcgtcccccctacaatcgggtgcttgcactacaccgagtcttccatctatacatctgaacgatttcaaaactggaaacgcattacagtgtacctcccactgtctactatttctcccaggacccgatttagatggattcaggccaattacactgtcggcgcagatagctgggccatcgataacgtggtactcgcatccggatgcccctggatgtgttccggaagaggtatctgcgacgctggcagatgcgtgtgtgacaggggctttggtggcccttattgtgttcccgtggtaccactcccctctattcttaaggatgatttcaatgggaacctacatccagacctgtggcccgaggtgtacggtgctgagcggggaaacctgaatggcgaaaccatcaagtctgggacttctctcatattcaagggtgaaggtttgagaatgttgatctcgcgagatttagattgtactaatactatgtacgtgcagttcagcctgaggttcatcgcgaaatccacacccgagcgttctcatagtatcctcctgcaattctccatcagcggaggcatcacctggcatctaatggacgaattctattttccgcagactactaacatcctgttcatcaacgtccccctgccttataccgctcagacaaacgccacccgctttcggctctggcagccttataataacgggaagaaagaagagatatggatcgtggacgatttcattatcgatggtaacaacgtgaacaacccagtgatgctgctcgacaccttcgacttcggacctcgtgaagataattggtttttctaccccggagggaatattggactctactgtccatactctagcaaaggggctccagaggaagactccgccatggtattcgtttcaaacgaggtaggagaacatagtatcactactcgcgacctcaatgtgaacgagaacacgatcatccagttcgagattaacgtagggtgttctacggactccagttcagcagatcccgtgcgactcgagttcagccgagacttcggcgctacttggcatctgctgttgccactgtgttatcacagctctagccatgtctcttcactctgttcaactgagcaccatcccagcagtacatattacgccggtaccatgcagggctggcggagagaggttgtccattttggaaagttgcatctgtgtggcagtgttaggtttaggtggtaccagggattttacccagcaggctcccagcccgttacgtgggccattgacaacgtgtacatcggccctcaatgcgaggaaatgtgcaacggacagggatcatgtatcaatggaacaaaatgtatctgtgacccaggatattctggtcccacctgcaagatcagcactaaaaaccccgattttctcaaggacgatttcgaaggacagctggagtcagaccggtttctgttgatgagtggcggtaagccaagtaggaagtgtggaatcttgagcagcggcaataatctgttctttaatgaagatgggttaagaatgctgatgacccgggaccttgacctgtcccatgcacgcttcgtgcaattctttatgcggctgggatgcggaaagggagttcccgacccaagatcccagcccgtcctgctccagtacagcctcaacgggggactgagctggtctctgctccaggagtttctgttttcaaatagctctaacgtgggtagatacatcgctctggaaattcctttgaaagcacgttcaggcagtactcgactgcgctggtggcagccctccgaaaatgggcatttctactccccctgggttattgaccaaatcttaatcggcggtaatatttcaggtaataccgtgttggaggatgactttacaacactggatagtcgcaagtggctccttcaccccggaggtaccaaaatgcctgtttgcggatctaccggagatgctcttgtgttcatcgagaaggcatctaccaggtatgttgtctctacagacgttgctgtaaatgaagattccttcctgcagatcgattttgccgcatcctgttcagtgaccgactcctgctatgctatagaactggaatatagcgttgatctgggcttgtcatggcaccctctggtgagggattgccttcccactaacgttgaatgcagccgttaccacctccagcgtattctcgtgagcgatacattcaataaatggacacgtattaccctgcccctgccaccctatacccggagtcaggcgacccgtttccggtggcatcagccggcaccattcgacaagcaacaaacctgggctatcgataacgtttacatcggcgacggatgtattgatatgtgctctggtcacggccgttgtatccagggcaactgcgtctgtgatgaacagtggggcggactttattgtgacgatcctgaaacaagcttacccacccagctgaaagataactttaaccgggctcctagttcacagaattggctcacagtgaacgggggtaaactatctacagtgtgtggcgctgttgcttccgggatggccctgcatttctctggaggctgctcacggctcctggtaacagtggacctgaatctgactaatgctgaattcatccagttttatttcatgtacggctgcctaattactccaaataacagaaatcagggggtgctgttagagtacagcgtaaacggcggtatcacctggaatcttctgatggaaattttctatgatcagtactccaaacctgggtttgtcaatattctcctgcccccagacgccaaagaaatcgccactagattccgctggtggcagccaaggcacgacggattggaccagaatgattgggcaattgataatgtgttgataagcggcagcgccgaccagcgcactgtcatgctggacaccttctcctctgcaccggttcctcagcatgagcgctcaccagctgatgccggtcctgtcgggaggatcgcctttgacatgtttatggaggacaaaacctctgtgaacgaacactggctcttccatgacgattgtacagttgagcggttctgcgattctcctgacggagtaatgctctgcggatcacatgacggtagggaagtctatgcagttacccatgacctcactcctactgagggctggatcatgcagttcaagatctccgtgggctgcaaagtctccgagaagatcgcccagaaccagattcacgtgcagtatagcactgacttcggggtctcatggaattacctagtgccacaatgtctgccagctgatccaaagtgttccgggagcgtaagccagcctagcgtttttttccctaccaaagggtggaagcggatcacctaccccttaccagaatccctagtggggaaccctgtgcggtttaggttttaccagaaatattccgatatgcagtgggcaatcgacaacttttatctgggtccgggatgcttggacaactgtaggggacacggagattgtctgagggagcaatgcatctgcgaccctggatacagcggcccaaactgttatttgacccacacactgaagactttcctgaaggagagatttgatagcgaagaaattaaacccgatttgtggatgagccttgagggaggctctacatgtacagaatgtggtattctggcagaggacaccgccctgtacttcggcggttctaccgtcagacaggccgtgacacaggatctggacctcagaggcgctaaatttcttcagtactgggggaggattgggagcgagaacaacatgacaagttgtcatcgcccaatctgcagaaaagaaggtgtgttgctcgactatagcacggacgggggaattacctggacactgttgcacgaaatggactaccagaaatacatctccgtgagacatgactatattttactaccagaggatgccctcactaacacgacgaggctgcggtggtggcagccttttgtcattagcaatggaatagtagtgtctggcgtggaaagggcccagtgggccctggataatattctgataggcggagcagagatcaacccctcccagctggtggacacttttgacgacgaaggtacatcccacgaggagaattggtccttttaccccaatgctgttaggacggcaggattctgtggcaatcccagtttccatctctactggccgaacaagaagaaagacaaaacacacaatgcgctgagcagccgagaattaattatacagcctggatatatgatgcagttcaagatcgtggtggggtgtgaggctacatcgtgtggcgatctgcacagtgtgatgctagagtacacaaaagatgctcgttcagattcgtggcaactcgtgcagacccagtgccttccctcttctagcaactccattggatgcagtccgttccagtttcatgaggcgacaatttacaattctgtcaactctagttcctggaagcggatcaccatccaactaccagatcacgtgagcagcagcgctacacaattcaggtggattcagaagggggaggagacggagaagcagtcctgggctattgaccacgtctatatcggcgaagcgtgcccgaagctttgttctggacacggctattgcaccactggagccatttgcatctgtgacgaatccttccagggagacgattgtagcgtttttagccatgatctcccttcctacattaaggataattttgagtctgctcgggtgacagaagccaactgggagactattcaaggtggggtgataggcagtgggtgtgggcaactggctccctacgctcatggcgatagtttgtacttcaatggctgccagatcaggcaagcagccacaaagcctcttgacctgacacgggcttctaagatcatgtttgtactacagattgggtccatgtctcagaccgactcatgcaatagcgatctgagtggacctcatgctgtggacaaagctgtgttgttgcagtattcagtcaataatggaatcacctggcacgtgatcgctcaacaccagcctaaagacttcacacaagcacaaagggtctcatacaacgttcctttggaagcaagaatgaaaggtgtcttactgcgatggtggcagccgcgacacaatgggacgggccacgatcagtgggctctggatcatgtcgaagtggtattgttctcgacaaggaagcaaaactacatgatgaatttctcgcgacagcatggtctgcggcatttctataaccggaggagaagatctctgaggaggtatccttaa

SEQ ID NO: 30589 - DNA, 2934 bp, synthetic construct
  misc_feature 1..2934: note = Description of Artificial Sequence: Synthetic coding sequence
  source 1..2934: mol_type = other DNA
atgtgctctggccatggtcgctgtatccagggaaattgcgtatgtgacgagcagtgggggggtctttattgtgacgacccagagacctctctgccaactcaactgaaagataactttaatagagccccatcgtctcaaaattggctgacggtgaacggaggtaaactatccacagtgtgcggagccgtggcttccggcatggcgttgcatttttccgggggatgttcccggctactagtgacggttgaccttaacttgactaacgcagagttcatacaattttatttcatgtacgggtgtctgattactccgaacaaccgaaatcagggagttctgctggaatactcagtgaacggcggtattacctggaacctcttgatggagatcttctatgaccagtatagcaagcccggattcgtaaacatattactgcctccagacgcaaaggagatagcaacccggtttcggtggtggcagccccgacacgacgggctggatcagaacgattgggccatcgacaacgtcttgattagtggctccgcagaccagaggactgtcatgttagacacattcagctccgcaccagttccccagcatgagagaagtcctgccgacgccggtcccgtgggcagaatcgcattcgacatgttcatggaagacaagacgtcagtcaacgagcactggttatttcacgacgattgtaccgtagagaggttctgcgatagcccggacggggtaatgttgtgcggttcccatgatggcagggaggtttacgcggtcactcatgacctgactcccacagagggatggatcatgcagtttaaaattagcgtcggttgtaaagtgtccgaaaagatagcgcaaaaccagatccacgtgcagtacagtacggatttcggagtgagctggaattacttggtgccccaatgtctgccagctgatcctaagtgttcaggcagcgtgtcacagccctctgtgttttttccaaccaaagggtggaagcggatcacctatccactgccagagtccttagttgggaacccggtgcggtttagattctaccaaaagtattctgatatgcaatgggctatcgacaatttctatctgggcccaggatgccttgacaactgccggggacatggagactgcctgcgcgagcaatgtatatgcgaccccggatacagtgggcctaactgctacctgacacatacactcaaaacattcctcaaagagcgattcgactcagaggagattaaacccgacctgtggatgtccttggagggcggatctacctgtactgagtgtggaattctagccgaagacactgcgttatactttgggggatctacggttagacaggcagtaactcaggacttagacctgcggggagcgaaattcctgcagtactggggacgtatcgggagtgagaacaacatgacttcttgtcacaggcccatctgtaggaaggaaggggtgttgctggattatagcacggacgggggaatcacttggacactcctacatgagatggattatcagaaatatatctcagtacgccatgactacatcttgctgccagaagatgcgctgacaaatacgacccggctgcgctggtggcaaccatttgtcatctccaacggcatcgtggtcagcggcgttgagagggcgcaatgggctctggacaatattctgatcgggggtgcggaaattaacccttctcagctcgtggacacatttgacgatgaggggacgtcccatgaggaaaattggtctttctaccctaatgccgtgagaaccgccggattttgcggcaatccgtcctttcatctttattggcccaacaagaagaaagataagacacacaacgccctttcttcacgggagctgattattcagccgggttacatgatgcaattcaagatcgtcgtaggatgcgaggcaaccagctgtggggatctgcactctgtgatgttagagtacaccaaagatgcacgcagcgacagttggcagctggtgcaaacacagtgtctgccctcctcgagtaacagcattgggtgcagtccctttcaattccatgaagctacgatttacaactctgtaaattcaagctcatggaagcggatcaccattcaactccccgatcacgtgtcaagctccgccactcagttccgctggatccaaaaaggcgaggaaacggaaaagcaaagttgggcgattgatcatgtatatattggagaggcttgccccaagctgtgttcagggcacgggtattgtacaaccggggcaatctgcatctgcgacgagtctttccagggagacgattgctcagtcttctcacatgacctgccaagctatatcaaggataattttgagagtgcgagagttactgaggctaactgggaaacaatccaaggaggcgttatcggcagcggatgtggacagttggctccctacgcccacggagattccctctattttaatggttgccagattagacaggcggctaccaagccactggacctgacaagagcatccaagataatgtttgttcttcagattggctctatgagtcagaccgattcttgtaacagtgatctgtccgggccacatgccgttgataaagcggtgctcctgcagtattccgtaaataacgggatcacctggcatgttatagcccagcaccagcctaaggattttacgcaggctcaaagagtttcttataatgtacccctggaggccagaatgaagggtgtcctgctgaggtggtggcaacctaggcacaatggcaccggacacgaccagtgggctcttgaccacgtggaggtggttttagtgaccacacgcaaacagaactacatgatgaatttctcacgacagcacggactgcggcacttctacaaccggaggaggagatccttgcgccgttacccttag

SEQ ID NO: 30590 - DNA, 10382 bp, synthetic construct
  misc_feature 1..10382: note = Description of Artificial Sequence: Synthetic coding sequence
  source 1..10382: mol_type = other DNA
atggagagaagtggttgggcgaggcagaccttcctgctggccctcctgcttggtgctacgttgcgggctcgggctgccgctggctattaccctcggttttctccttttttctttctttgtacccaccacggtgagcttgaaggcgacggcgagcagggggaggtgctgatctccttacacatcgctggtaatccgacttactacgtgcccggtcaagagtaccatgtgacaatttccactagtaccttctttgatggattactggttactggtttgtacacaagtacctcggtgcaagcgagccagtcaatcggcggaagctccgccttcggattcggaatcatgagtgaccaccagtttgggaatcaattcatgtgtagtgtggtagcatctcacgtgtctcaccttccaaccacaaatctgtcgtttatttggattgcccctccagccggtacaggttgcgtgaatttcatggccactgcaacccatcgaggtcaggtgatcttcaaggatgccttagcccagcaactctgtgagcagggagcacctaccgacgtgaccgtgcacccacacctcgccgagattcattcagatagcatcatactaagagatgactttgattcctaccatcagttgcagctgaaccctaacatctgggtcgagtgtaacaactgtgaaacgggcgagcagtgcggtgccataatgcatggaaatgctgtgaccttttgcgagccgtacggtccaagggagctgatcacaactgggctaaacacaacaactgccagcgtgctgcagttcagcattggaagtggttcttgccgcttttcctactcagatccaagcatcattgttctctatgctaaaaataacagcgctgattggattcagctagaaaaaatccgtgctccaagcaatgtttcgacaatcatccacattctgtacctgcccgaagacgcaaagggcgagaacgtgcaattccaatggaagcaggaaaatctgcgtgtgggggaggtttatgaggcttgctgggcacttgacaacattcttatcattaatagcgcccatcggcaggtagtgttagaagactctctggatcctgtcgacactggcaactggcttttttttcccggtgctactgtgaagcactcgtgtcagagtgacgggaactccatatacttccacgggaatgaggggtctgagtttaacttcgcgactacaagggatgtggatctgtcgaccgaggatatccaggagcagtggtctgaagaattcgagagccaacccaccggatgggacgtgctgggagcggtgatcggaacggagtgtggcaccatagaaagtggactctcgatggttttccttaaagacggagagagaaagctgtgtaccccgtccatggataccacaggatacggtaatctgaggttttacttcgttatgggagggatttgtgatcccggtaactcccacgaaaatgatattatcctgtatgccaagattgagggccgaaaagaacatattaccctcgatacactgtcttactcgtcatacaaggtacccagccttgtgtccgtggtgatcaatcctgagctgcaaactcctgcaacaaaattctgcctgaggcagaaaaatcatcaaggacacaaccggaatgtctgggcggtagatttttttcacgtgctcccagtgctgccatctaccatgtcgcatatgatccagtttagtattaacctgggttgcggcacacaccaacccggaaacagcgtgtccctggaattctctaccaaccacggcaggagctggagtctattacacacagaatgtcttccagagatctgcgcaggtccccatctgccacattcaaccgtctattcatccgagaactacagtggttggaacagaattaccatccctttgcctaacgcagccctgacaagaaacacacgcatccgctggaggcagactggacccatccttggtaacatgtgggccatcgataacgtatacattggcccaagctgcctgaagttttgttctgggagagggcagtgcactcgtcatggatgtaaatgcgatccagggttttctggccctgcctgtgagatggcctctcagacctttcccatgtttattagtgagtcattcggctcctctcggctgtcttcttatcataatttttactcaattcgcggtgccgaagtttcgttcggttgcggcgtcctggctagtggcaaagcgttggtctttaataaagacggcaggaggcagctcataacatcctttctggatagctctcaatccaggtttctacagtttacactgcggctgggaagtaaaagcgtcctgtccacgtgcagagcacccgaccagccgggagagggggtgctgttgcattacagttacgacaatggaatcacttggaaactgctggaacattactcgtatttgagttaccatgaacctaggattatttcggtcgaactgccgggagatgccaagcagttcggaatccagttcagatggtggcagccatatcactcttcacagcgcgaggatgtgtgggcaatcgacgagatcattatgacgtccgtcttgttcaactccatcagccttgactttactaatcttgttgaagttacacagtccttgggcttctaccttgggaacgtgcagccttactgtggacacgattggacactttgttttactggcgattctaaactggcgagctccatgaggtacgtggagacccaatccatgcagatcggtgctagctacatgatccagttttcactggtgatgggctgcgggcagaaatacactccacatatggacaaccaggtgaagcttgagtacagtactaaccatggactcacctggcatctggtgcaagaagagtgtctgccatccatgcctagctgccaggagttcacgtccgcatctatttaccatgccagcgagtttacccagtggcggcgagtcatcgtgctgctgcctcagaagacatggtcaagcgccacaagatttcgctggagccagagctattacaccgcacaggatgagtgggcacttgatagcatctacatcggacagcagtgtcctaacatgtgcagtgggcacgggtcatgcgaccacggcatctgtcgctgcgaccaaggataccagggaacggaatgtcaccctgaagcagcattgccttccaccatcatgtcggacttcgaaaatcagaacggatgggagtccgattggcaagaggtgattgggggagagatcgtgaagcccgagcagggttgcggtgtgatatcctccggctcttctctctatttctccaaagctgggaagcgacagctcgtgtcctgggatttggacacttcctgggtggacttcgttcagttttatattcagattggcggtgagtcggctagctgtaacaagccagattcacgcgaggagggggtcttgctgcaatactccaacaatggcggaattcaatggcacctgctggcagaaatgtatttctccgacttctctaaaccgcgattcgtatacctggagctgccagcagccgcaaaaacgccatgcacgcgatttcgctggtggcagccagtgttctccggagaggactacgaccagtgggctgttgacgacataattattctgtctgaaaagcagaaacagataatccctgtcatcaatccaacgctgccccagaatttctacgagaaacctgcttttgattatccaatgaaccagatgagcgtgtggctgatgctagcaaatgaaggtatggtcaagaacgagaccttttgcgccgcaactccctcagcaatgattttcggcaagtctgacggagaccgatttgccgtaacaagggacctgaccctgaaaccaggctatgtgctacagttcaaactcaacattgggtgtgctaatcagttcagcagtactgctccagttctgctgcagtactcccacgacgctggaatgagttggtttttagtgaaggaagggtgctaccctgcctccgccggaaaaggttgtgagggcaacagcagagagctttcagagcccacaatgtaccacacaggggatttcgaagagtggactcgcataaccatcgtaatccctaggagcctcgcatctagtaagacacgatttcgttggatccaggagagctcttctcagaagaacgtacccccatttggactcgacggggtgtacatcagcgaaccctgccccagctactgctcaggacatggagactgtatttcaggcgtgtgcttttgtgaccttgggtacacagccgctcagggcacatgtgtaagtaacgtacctaaccacaatgagatgtttgataggttcgagggaaaactgtccccactgtggtataagataaccggagcccaagtcggaaccgggtgcggaacgttaaatgacggcaaatcactgtattttaacgggccaggcaagcgggaagctagaaccgtaccactcgacacacggaatattagactggtccaattctacatccagataggttccaagacatcaggtatcacgtgcataaagcctagaactagaaacgagggactgattgtccaatactctaacgacaacggcatcctctggcatttattgagggaactggactttatgagcttcctggaacctcagatcatcagtattgatctcccacaggatgccaaaacaccagctacagcattccggtggtggcagcctcagcacgggaaacattctgcccagtgggcactagacgacgtgctcataggtatgaatgattcctctcagactggcttccaggacaagtttgatgggtctattgacctccaggcaaattggtataggatacaggggggacaggtggacatcgactgtctctcaatggatacagctctgatttttaccgaaaatatcggaaaacctcgctacgcggaaacctgggactttcatgtttctgcatcaactttcctccagttcgagatgtcaatgggatgtagtaagccattttccaattcacacagcgtccagttacagtactcgctgaacaatggaaaggattggcacttagttacagaagaatgtgttcctcctactatcggatgtttgcattataccgagtcaagcatctataccagcgaacggttccaaaactggaagcgtattactgtgtacctacccctctccaccatatccccgaggacgcgcttcaggtggatacaggctaattatactgtaggggctgactcctgggccatcgataatgtggtcctcgccagtgggtgcccatggatgtgcagcggcagaggaatttgcgatgcgggaaggtgcgtgtgtgacagaggctttggcggtccttactgcgtgccagtggtccccttaccctctatcctgaaagatgatttcaacggtaacctccatcctgatctctggcccgaggtttatggggctgaaagaggcaacctcaacggagaaacgatcaagagcggtaccagcctgatctttaagggagaaggcctgagaatgctgatctctagagatctcgattgtaccaacaccatgtacgtacagttcagtctcagattcatcgctaagagcacgcccgaaagatcacacagtatcctgctgcagttttctatttccgggggaatcacatggcacctgatggacgaattctatttcccacagacaacaaacatcttgttcattaatgtgccgctgccctatacagcccaaacaaatgccacgcggttccgactctggcagccctataataacggcaagaaggaagaaatctggatcgtggacgacttcataatcgacggtaacaatgtgaataatcctgtgatgctccttgatacattcgactttggaccgcgagaggacaattggttcttctacccaggaggcaatataggactatactgtccatatagcagcaaaggggctcccgaagaggactcagctatggtgttcgttagcaacgaggtgggcgagcactccataacaacgcgcgaccttaacgtcaacgagaataccatcattcagttcgaaatcaacgtcggttgtagcactgacagctctagcgctgatcccgttcgactggaattttctagagacttcggcgctacttggcatctcctgctgccgttgtgttatcactccagtagtcatgtgtcttccttgtgttccacggagcatcacccttccagcacatactatgcaggcactatgcagggttggcggagggaggttgttcactttggcaagctgcacctttgcggtagcgtcagatttaggtggtatcagggtttttatccggctggcagtcaacctgtgacctgggctatagacaacgtgtacatcggaccccagtgcgaagaaatgtgtaacggtcagggttcctgtatcaacggcacaaaatgcatttgcgacccagggtacagcggcccaacatgcaaaattagcaccaagaatcctgactttctgaaggacgatttcgagggtcagcttgagtcagacagatttctgttgatgtctggaggtaagcccagtcgcaagtgtggtattctttcctcaggtaataatctgttctttaacgaggacggcttgaggatgctgatgacgcgggacctagacttgtcacacgctagattcgtccaattttttatgagactgggatgtgggaagggggtgcccgatcccagatcacagcctgtgctgctgcagtacagcctcaacggcggactgagttggagcttgctgcaggagttccttttctcaaactcctctaacgtcggacgatatatagcattggaaattccactgaaggcacgatcaggcagtacaagattgcggtggtggcaaccaagtgaaaacggccacttctactctccttgggtgattgatcagatcctgatcggaggcaacattagtggcaataccgtcctcgaagacgattttaccacattggattcaagaaaatggttgcttcatcccggagggaccaagatgcctgtgtgcggtagtactggcgatgcactcgtatttattgaaaaggctagtacgagatacgtagttagcacagacgttgcagtgaacgaggactcattcttgcagatagactttgctgcttcctgctcggttaccgatagctgttacgctattgaattggagtattctgtcgacctcgggctgtcatggcatcctctagtacgagattgcttgccgaccaacgttgagtgttcgaggtatcacttacagcgcatcctggtgtctgacaccttcaataaatggacaaggattactctgcctttgcccccatatactagatcgcaggcaacgcgctttcgttggcatcagcctgcaccgttcgacaaacagcagacctgggctattgacaatgtctacatcggagatggctgtatcgatatgtgttctggacatggtcgctgtatccagggcaactgcgtgtgtgacgagcagtggggcggtctgtattgcgatgaccccgagactagcctcccgacccaactgaaagataattttaaccgggcaccttcctcccaaaactggctcacagtcaatgggggaaagcttagcacagtttgtggcgctgtggcctctggcatggcattgcacttttctggcggttgcagccgcttgctcgttacagtggatttgaacctgaccaacgccgagtttatccagttctattttatgtatgggtgcctgattacaccaaataaccgtaaccagggggtgctgcttgaatactcagtgaacggaggcattacatggaatcttctgatggagatcttctatgaccaatacagtaagccaggattcgtgaatattctgctgccgccagatgctaaggaaatcgctacgaggtttagatggtggcagcctcgccacgacggcctggaccagaatgactgggccatcgacaacgtgctgatatccggaagcgctgaccaaaggactgtcatgctcgataccttctcttcagcacctgtcccacagcacgagcgctctcccgcagatgcgggaccagtgggacggatcgccttcgacatgtttatggaagacaaaacgtcggtcaatgaacactggctgttccatgacgactgtactgtggagcgcttctgtgatagtcctgacggagtaatgttatgcgggtctcacgacggcagagaggtctatgcagttactcacgatttaactcccaccgaaggctggattatgcagtttaagatctctgtagggtgcaaggtcagtgagaagatcgcacagaaccagattcatgtgcagtactctaccgacttcggcgtgtcttggaactatctcgtgccccagtgtctacccgcagatcccaaatgcagcggatctgtgtcccagccaagcgtattctttcctaccaaagggtggaaacggatcacttaccctttaccagaaagcttagtaggtaacccagtccgcttcagattttaccagaagtactcggacatgcagtgggcaatcgataatttttacttgggaccaggctgtctggacaactgccggggtcatggggactgcctgcgggagcagtgcatttgcgatccaggttacagcggtcctaactgttacctcacccacacgctgaaaacctttctgaaggagcgctttgattctgaagaaataaaacctgatctatggatgtccctggagggcggttctacttgcaccgagtgtggaatactcgcggaggacaccgctctgtatttcggcggttccacggtgcgtcaagcggtgacacaggacctagacctgcgtggtgctaagttcctgcagtattgggggcgtatcggaagcgagaataatatgaccagctgccacagacctatttgcaggaaggaaggcgtcttgctggactacagcaccgacggcggaatcacttggacgctccttcacgagatggattatcagaagtatatctctgttcggcatgactacatcttactccccgaggacgccctcactaatacaactcgccttcgatggtggcagcccttcgttatctcaaacggcatcgtcgtgtcaggggtggaacgggcacaatgggctctcgataacattctgataggcggtgcagagattaacccttcccaactggttgataccttcgatgacgagggcacaagtcatgaggaaaattggagcttctatcccaacgctgtgagaactgctggcttctgtggcaatccatctttccatctgtactggcccaacaagaaaaaggacaagactcataacgcgctgtccagccgggaactgataattcagccaggatacatgatgcagtttaaaattgtagttgggtgtgaagcgacgtcctgcggggaccttcactctgtgatgcttgaatacacaaaagatgcacggagcgattcgtggcaactcgtgcaaacacagtgtttacctagctcatccaacagcattggctgttcccctttccagtttcatgaggctaccatctataattccgtgaactctagttcatggaagaggattacgatccagctgcccgaccacgtatccagctccgcaactcagtttcggtggatacaaaagggggaggaaactgaaaagcaatcctgggcgatcgatcatgtttacataggcgaagcttgtccgaagctttgcagtggacacggatattgcaccacaggcgcaatctgcatctgtgacgaatcgttccaaggggacgattgcagtgtcttttcacatgatttgccctcgtatatcaaggataactttgaatccgccagggtcactgaagccaactgggagactatacagggtggggtgataggatctgggtgcggccagctggccccttatgctcatggtgactcgctgtatttcaacggctgtcagattaggcaagccgcaacaaagcctctcgatctaacaagagcctcaaagataatgttcgtcttgcagatcgggagcatgagccaaacagactcctgcaacagtgacctttctggcccacacgctgtggataaggccgtgttgctgcaatactcagtgaacaacgggatcacctggcatgttattgctcagcaccagccaaaagattttacccaagcccagagagtctcatacaacgtgcctctggaagcgagaatgaaaggtgtgctgctgcgctggtggcagccgcgtcataatggcaccggccacgaccagtgggctcttgatcacgtcgaagtagtactggtgagtacccggaaacagaactatatgatgaacttctcaaggcagcacgggttaagacacttttataaccgccgaagacgaagcctgcgccgataccccta

SEQ ID NO: 30591 - DNA, 10284 bp, synthetic construct
  misc_feature 1..10284: note = Description of Artificial Sequence: Synthetic coding sequence
  source 1..10284: mol_type = other DNA
atggagcggagtgggtgggcccgtcagactttcttgctggctctcctcctgggggctacccttcgggctagagccgctgcaggctactatcctaggtttagcccctttttttttctatgtactcatcacggcgagttggaaggggacggggaacaaggcgaggtgctaatttccctgcatatagccggtaaccccacatattacgtacccggacaggaataccacgtcacgattagcacatctacattttttgacgggctactagtgacaggactgtacacaagcacctccgtgcaggcaagccaaagtattggcggaagctctgcattcggattcgggatcatgtccgatcaccagttcggcaaccaatttatgtgctcagtagttgcatcccacgtgtcccacctgccaactacaaacctctcgttcatctggatcgctccacccgctggcacaggctgcgtgaacttcatggcaacagctacacaccggggtcaggtcatttttaaagatgccctggctcaacagctgtgcgagcagggggcaccgacagacgtcactgtgcaccctcaccttgctgagatacactccgactccatcattctgcgggacgatttcgactcctaccatcaactgcaattgaatcctaatatatgggtggaatgtaataattgcgagactggagagcagtgtggcgctatcatgcacggaaatgccgttacattttgtgagccatacggacctcgcgaactgatcaccactggcctgaatactaccactgcatccgtgttgcaattcagcataggctctgggagctgtcgcttcagctacagtgacccaagcatcatcgtgctttacgcaaaaaataattctgccgattggattcaactcgagaagatcagggcaccgtccaatgtttctactatcatccatattctgtacctccccgaggacgccaagggcgagaatgtccagttccaatggaaacaggaaaaccttagagtcggcgaggtttacgaggcatgttgggctctggataatatcctcattatcaactctgcgcataggcaggtagtgctggaggactccctagaccctgtggatacagggaactggttgtttttccctggagccactgttaagcactcctgccagagcgacggaaattctatctacttccatggcaatgaggggtcggaatttaattttgctactacaagggatgtagaccttagtaccgaagacatccaggagcagtggtcagaagaatttgagtcccagcccaccgggtgggatgttttgggggcagtgatcggaaccgagtgcggtacaattgagtctgggcttagcatggtgttcctcaaggacggagagagaaagctttgtaccccaagcatggacacaacaggatatggaaacctcagattttacttcgtcatgggaggaatttgtgaccctggcaattctcacgaaaatgacattatcttatatgccaaaatcgaggggcgaaaggagcatatcaccttagacactttgagttattcttcttataaagtgccatccctggtcagtgttgtaattaatccagaactgcaaacccccgcaacaaaattctgcctgcgccagaaaaaccatcaagggcataatcgaaacgtatgggctgtcgacttcttccacgtactgcccgtgctaccaagcaccatgagccacatgattcagttttccattaacctggggtgtggcacgcaccagcccggaaactcagttagtctggagtttagtaccaaccatggcaggtcctggagtcttctgcatacagaatgcctccctgagatctgtgcaggaccccatttgccccatagcacggtgtacagctcggaaaattattcagggtggaatcggataaccatccctctgcccaatgcagcactcaccagaaatacaagaataaggtggcgccaaaccggtccaatactagggaacatgtgggccattgataatgtctacattggtccaagctgtctaaaattctgttctggtcggggtcagtgtacacgtcacgggtgtaagtgtgaccctggcttttcgggccctgcctgcgaaatggcaagccaaacatttcccatgtttatctcagagagcttcggatcttcccgactgtcatcctatcataacttttattccatacgcggagccgaggtgagcttcgggtgtggtgtcctggcctccggcaaagcactcgttttcaacaaagacggaaggcgccagctgatcacatcctttctggactctagtcagtctaggtttttgcaatttactcttaggctgggatctaagtctgtcctgtccacctgccgcgctcctgaccaaccaggcgaaggagtcctgcttcattatagctatgataatggcatcacttggaaactgctggagcattactcatatctctcttaccacgagccgaggataatatctgtggagttaccgggtgacgctaaacagttcggtatccagttccgctggtggcaaccttaccacagttctcagcgtgaggatgtttgggccattgatgaaattataatgacatcagtgctcttcaatagtatcagtttggatttcaccaatttggttgaggtcacccagtctctgggtttctatctgggaaacgttcagccatactgcgggcatgactggaccttatgctttaccggtgactccaaacttgcaagttcgatgagatacgtagagacccagtcaatgcagattggcgcatcttacatgatacagttctctctcgtgatgggatgtggacagaaatatactccacacatggacaatcaggtgaaactggaatactcgactaaccacggcctaacgtggcatttggttcaggaagaatgcctcccttctatgcccagttgtcaggaattcacctctgcctctatctatcacgcctctgaatttacccaatggcgcagagtgatcgtgctcctcccccagaaaacttggtcaagtgctacccggtttagatggtcccaatcctactatacagcgcaggatgagtgggcccttgactctatttacatcggacagcagtgccccaatatgtgttctgggcacggaagttgcgaccatggaatatgtcgatgtgaccagggataccaagggaccgaatgtcacccagaagcggcactgccctccactattatgagtgactttgaaaaccaaaatggatgggagtccgactggcaggaggtgattggtggtgaaatagttaagccagaacaggggtgtggcgtgatatccagcgggtcctctctgtacttctccaaagcaggaaagcgccagctagtttcttgggatctggacacctcatgggtcgatttcgttcagttctatatccagatcgggggtgagtctgccagctgcaacaagccagactcccgtgaggaaggagtgctcttgcagtactcaaataatggaggtattcagtggcatttattggccgagatgtatttttccgacttctccaagccacgcttcgtgtatctcgagcttcctgccgcagcaaaaaccccttgtaccaggttccgctggtggcaacccgtctttagtggcgaagactacgatcaatgggcagtggatgatatcatcatcctgagtgaaaaacagaagcaaatcatccccgtcattaaccctaccctcccccagaacttctatgagaaacccgcttttgactacccaatgaatcaaatgtcagtgtggctcatgctggcaaacgaggggatggtaaagaacgaaacattctgcgctgcaaccccttcggcgatgatctttgggaagagtgatggggacagatttgctgttactcgggacctgactctcaagcccggatacgtgctccaatttaagctgaatattgggtgtgccaaccagttctcttcgacagccccagtcttgctgcaatacagccacgacgcaggaatgtcttggttcctggttaaagaggggtgctacccggctagcgctggtaagggatgcgagggcaattcccgagagcttagtgagccaaccatgtaccataccggcgactttgaggagtggaccagaatcaccatagtgataccaaggtcactggcaagcagtaagacccgcttcaggtggatccaggagagttcatcacaaaagaatgtcccgcctttcggtctcgacggggtttatatctccgagccatgtccgagctactgttctgggcatggcgattgcatcagcggggtgtgtttttgtgatctgggttacaccgccgcacagggcacctgcgtctctaatgttcccaatcacaatgagatgtttgatcggtttgaaggcaaactttctcctctctggtacaagattaccggcgcacaagtgggcaccggatgcggcaccctgaacgatggaaaaagcctgtactttaatggacctgggaagagggaagcacggaccgtgcccctggatacccgcaatattcgcctggtgcagttctacattcagattggctctaagacctccggcattacctgcattaaaccccgtacacgcaacgaagggctcattgtacagtatagcaatgataatgggattctgtggcacctgcttagagaactcgatttcatgtcctttcttgaacctcagatcataagtatagacctgccccaagatgccaagacccccgctacagccttccgttggtggcagccccagcacggcaagcacagcgcacaatgggcactggacgacgtgctcattggtatgaatgatagcagccagacaggtttccaagacaaattcgatggaagcatcgacctgcaggcgaactggtataggatccagggtgggcaggtagacatcgattgcctgtccatggacactgcccttatttttactgagaacatcggaaaaccccgatacgcagaaacttgggacttccacgtgagcgcaagcacgttccttcagtttgagatgtctatgggatgctcaaaaccctttagcaactcgcattcagtccagctccagtactcgctgaacaacgggaaggattggcatctggtaacagaggaatgcgtgcctccaacaatcggttgtctgcactacactgagtcctccatctatacgtccgaaaggttccagaattggaaacgcataactgtgtacctgcctttgtccactatcagtcccagaacccgctttcgctggatccaggcgaattatacagtcggagccgattcgtgggcaatcgacaacgttgtgctggcatctggatgtccatggatgtgcagtgggaggggcatttgcgacgcagggaggtgcgtgtgcgatcgcggattcggcggtccctactgtgtgcctgtggtgcctttgccttctatactgaaagatgatttcaacggtaatctgcaccctgacctttggcccgaggtctatggagccgagcggggaaatctgaatggcgaaacaatcaaaagcggcaccagtcttatatttaagggcgagggactccgcatgctcatttctcgggacttagattgcaccaacactatgtatgtccagttctcgctccggttcattgcaaagagcacaccggaacggtctcatagcatactgttgcagtttagcatctccgggggtattacatggcacctgatggacgagttctactttcctcagaccacgaacatactctttatcaacgtccccctcccctatactgcccagacaaatgccactcgttttcgactatggcagccctacaacaacggtaaaaaagaggaaatttggatcgtcgatgatttcattattgatggcaataatgtgaataatcctgttatgctgttagatacctttgacttcggaccacgcgaggacaactggttcttctatcccggtgggaatattggactatactgtccttactcaagtaaaggagctcctgaggaggactcagcgatggtgtttgtctcaaatgaagtgggcgagcacagtattaccacgcgtgacctgaacgttaacgagaacacaatcattcagtttgaaatcaatgtcggttgtagcaccgacagttcctcagccgatccagtgcgccttgagttttcacgtgacttcggggctacctggcatttactgctgcctctatgctatcactcctcctcccatgtgagctcactatgtagcaccgaacaccaccctagtagcacgtattacgcgggaactatgcaggggtggagaagagaagtggtacacttcggaaaactgcatctgtgtgggtccgtgcggttccggtggtatcaagggttttaccctgctggctcacagcccgttacttgggcgatcgataatgtgtacattggccctcagtgcgaagaaatgtgtaatgggcaggggtcctgcataaatgggactaagtgcatctgtgatcccggttattccggtccaacatgtaaaataagtactaaaaatccggactttctgaaagatgacttcgagggccaactggagtctgacaggtttctgctgatgtctgggggtaagcctagccggaagtgcggcatcctgtcttccggtaataacttattctttaacgaggacgggttgaggatgttgatgactagggaccttgacctgtcccacgcgagattcgttcagtttttcatgagattgggctgtggcaaaggcgtgcccgatccaaggtcacagcctgtgctgcttcagtattctttgaatgggggtttatcatggtctttgctgcaggaattcctgttttctaatagctctaacgtaggcagatacatcgcactggagattcctctgaaggcccgttccggatctacacgcctcagatggtggcaaccatccgaaaatggccacttctactctccatgggtaattgatcagatcctaatcggcggtaacatttctgggaataccgtgctcgaggacgacttcacaacgcttgatagcaggaagtggctgctgcaccccggaggaactaaaatgccagtttgcggctccaccggggatgcactggtgtttattgagaaagcaagtactagatatgtcgtgtctaccgatgtggccgtgaatgaagatagcttcctccagatcgactttgctgcaagctgctcggtcacagactcctgttatgcaatcgagcttgaatactccgtcgacttaggcctgtcgtggcaccctctggtgagagattgcttacccactaatgtcgaatgttcgagataccatctccagcggatcttggtgtctgatactttcaataagtggacaagaattaccctccccctgccaccgtatacacggtcccaggcaaccaggttccgttggcatcagcccgctccattcgacaaacaacagacctgggctattgataatgtgtacattggagatggctgcatcgatatgtgtagtggccacgggagatgtattcagggtaattgtgtgtgtgacgaacagtgggggggactgtactgcgacgatcctgagacgagtctccccacacagctgaaagacaactttaatagagccccttccagtcagaactggcttaccgtcaacggcggaaagctctcaactgtttgtggagctgtggcaagcggtatggcactacacttcagcgggggttgcagcaggctgctagttacggttgatctgaacctgactaatgcagagtttatccagttctactttatgtacggctgtctgattaccccaaataataggaaccagggcgtgctcctcgagtactcggtgaatggcggaattacttggaacctcctaatggagattttttacgaccagtacagcaagcccggtttcgttaacatccttctgccgccagacgccaaagaaatcgccaccaggtttcggtggtggcagcccaggcatgatggattggaccaaaatgactgggccatcgacaatgtgctcatttctgggagtgctgatcagagaacagttatgctggacactttttcgtctgcgcctgtgccccagcacgaacgaagtcctgccgatgctgggccagtgggcaggatcgctttcgacatgttcatggaggataagactagtgtgaacgagcattggctctttcacgatgattgtacagtggaaaggttctgcgactcccccgacggagtgatgctgtgcggatcccacgacgggagggaggtgtatgcagtgactcacgacctgactcccaccgagggttggatcatgcagttcaaaatatccgtcggatgcaaggtgtcggagaagatcgcccagaaccagatccacgtccaatattccacagatttcggtgtcagctggaattatctcgtcccccagtgcctacctgctgaccctaagtgttccggtagcgtgtctcaacccagcgtcttcttccctacgaaaggctggaagagaataacttacccacttcccgaatccctcgtgggtaacccagtaaggtttaggttctaccaaaaatattccgacatgcagtgggcaatcgacaatttctatctgggccctggatgcctcgataattgccggggacacggcgactgtttgcgcgaacagtgcatatgtgacccgggatacagtggacccaattgttatctgacgcatactctcaagacctttttaaaggagagattcgattcagaagagatcaaacccgatctctggatgagtctggagggtggctccacctgcacggagtgtggcatcctagccgaggacaccgccctgtatttcggagggagcaccgttcgtcaagccgtcactcaggatctggacttgcggggagccaaattccttcaatactggggtcgtattggatcagagaataatatgacctcttgccaccgacccatctgtcggaaagagggggtgctgctcgactattctacagacgggggtataacatggacattgctccacgagatggattaccagaaatacattagcgtcaggcacgactacatcctgttacccgaggacgcgttaacaaatacaacacgcctgaggtggtggcagcccttcgtgatttcaaacggcatcgtagtttccggggtggaacgcgctcaatgggccttggataacatactgatcgggggagcagagatcaacccgtcccagctggtggacaccttcgacgatgagggcaccagtcatgaagaaaattggtcattctacccgaacgccgtgaggacagctgggttttgtggcaaccctagttttcatctgtactggccaaataagaaaaaggataagacccacaacgcacttagttccagagagctcatcattcaaccagggtacatgatgcaattcaaaattgtagtggggtgtgaagcaacatcgtgtggtgacctgcactccgttatgctcgagtataccaaagacgcccgaagtgattcatggcagctagtgcagactcagtgcttgccaagtagctcaaactccattggatgcagtccgttccagttccacgaggctacaatctacaactcagtgaactccagctcatggaaacggatcaccatccagctcccagaccatgtgagctcatctgcgacacagtttaggtggattcagaagggagaagaaaccgaaaaacagtcctgggcgatagatcatgtgtacatcggagaggcctgcccaaagctgtgcagcggacatggctattgcacgacaggcgctatttgcatttgcgatgagtctttccagggtgatgattgctcagtcttcagtcatgaccttccttcatatatcaaggacaacttcgagtccgcacgtgtcacagaggcaaactgggaaacaatccagggtggcgtgatcggctctggatgcggacagctcgctccatacgcccatggcgacagcctgtatttcaatggttgtcaaataaggcaggctgccacaaagcccctggatctgacgagagcctccaagatcatgttcgtcctccagatcggctctatgtcacagacagacagctgcaattcggacctgtccgggccacacgctgtggacaaagcagtactcctccagtattccgttaacaatggaattacctggcacgtaatcgcacagcaccaaccaaaagatttcactcaggcccagagggtctcatataatgttcctctagaagcacggatgaagggggtgcttctgcggtggtggcaacccaggcacaacggcactggccacgaccagtgggctctcgaccatgtagaggtcgtgctataa

SEQ ID NO: 30592 - DNA, 1668 bp, synthetic construct
  misc_feature 1..1668: note = Description of Artificial Sequence: Synthetic coding sequence
  source 1..1668: mol_type = other DNA
atgaagaagcacgattttgcagaaaacctcccctctagcctcctgatcatcatcctcgttatctttaccctgtctgggagcaaattcggccgaggaacgggcctgacccagccctctcagcgtacttcggccaggagatcgttcgggagaagtaagagatttagcattactaggagcctcgacgacctcgagtccgcaacggtgagcgatggcgaactcaccggtgccgacctgaaggactgtgtgtctaacaatagcctgtctagcaacgcttctctgccgagcgttcagtcttgtcgcaggcttcgcgagaggagagtggctagctgggcggtgagcttcgagaggttgctgcaagaccctgttggtgtgcgttactttagcgatttccttagaaaggagttttcagaggagaacattctcttctggcaggcatgcgagtactttaaccacgtgcctgctcacgacaagaaggaactaagttacagggcccgagagatattcagcaaatttctgtgctccaaggccacaacccccgtcaacattgattcccaggctcagctggcagatgatgtactgagagctccacatccggatatgtttaaggaacaacagcttcaaatttttaacctgatgaagttcgatagctacactcggttcctaaagtcgccattataccaagaatgcatcctggccgaggtagagggacgagccctgcccgattctcagcaggtcccttccagccctgcatcaaagcactccttgggaagcgatcattctagcgtgagcacacccaagaagctgtctggcaagtccaagtctggtaggtctctgaacgaggagctcggagacgaagattctgaaaagaagcgcaaaggcgcattcttctcctggagtaggacccggagcactggcagatcccagaaaaagcgggagcacggtgaccacgcggatgatgctctacacgctaacgggggactttgtaggagagaaagccagggctcagtttcctctgccggatcactcgacctgtccgaggcctgtagaaccctcgctcccgagaaggataaggcaaccaaacactgctgtattcatttacccgacgggacctcatgtgtggttgcggtgaaggcgggattctctataaaggatatactgagcggcctgtgtgaaagacacgggattaacggcgctgccgctgacctttttctggttggtggagacaaacctctggtcctgcatcaggactccagcattctggagtctcgtgatcttcgacttgaaaagagaacactgtttcgcctggatcttgtgccgatcaacagaagtgtcgggctgaaagccaagcccacaaaacccgttaccgaggtactgcgccctgtcgtggccaggtacggcctggacctgagtgggctcttagtgcgcctgtccggagaaaaagagcctctagacctgggcgctcctattagcagccttgatggacaaagggtagttctcgaggaaaaggatcccagtcggggaaaagctagtgcagataaacagaagggtgtacctgtcaagcaaaacaccgctgtgaactccagtagccgtaaccattctgcaacaagtttcctgtctctgttcccaaagctcagggctaccgaacaaatgaccaatgtgggctgctag

SEQ ID NO: 30593 - DNA, 4131 bp, synthetic construct
  misc_feature 1..4131: note = Description of Artificial Sequence: Synthetic coding sequence
  source 1..4131: mol_type = other DNA
atgttcagggcaggcgaagcctcaaaacggcctctacccggaccctcacctccacgtgtgcggtccgttgaagttgccagaggacgcgcaggatacggcttcacactgtcgggccaagcaccttgcgtgttatcgtgtgttatgaggggcagccccgcagactttgtaggtctgagagctggtgaccaaatcctggcagttaacgaaatcaatgtgaagaaggctagccacgaggatgtggtgaagctaatcggaaaatgctcaggagtgctgcacatggttatagccgagggcgtgggtcgtttcgagtcctgctccagcgatgaggaaggcggattgtatgagggtaagggttggctgaagcccaagctagattcaaaggccctgggtatcaatagagcggagagggtggttgaagagatgcaaagcggtggcatcttcaatatgattttcgagaacccaagtctgtgcgcttcaaactcagaacccctgaagctgaaacagaggtccctgagcgaaagcgccgctacacgatttgatgtgggtcatgagagcattaataatcccaatccaaatatgctgtccaaagaggaaatttccaaggtgatacacgatgattccgtgttctccatcgggctggaaagccatgatgactttgcccttgatgcctctatccttaatgtcgctatgatcgtcgggtaccttggttcaatcgaactgcctagcacctccagcaatcttgaatccgacagcctgcaggccatccgcggttgtatgcggaggctcagagccgagcagaagattcattcgctggtgacgatgaagatcatgcatgattgtgtgcagctcagcacagataaagccggtgtggttgccgaatatcccgctgaaaaactcgcttttagcgcggtctgcccggacgaccgacgtttctttggtctggtcactatgcagacaaacgatgacggtagcctggcacaggaagaggagggcgctctgcggactagctgccacgttttcatggtggaccccgacctctttaatcacaaaatacaccaggggattgctcgcaggtttggctttgaatgcactgcagacccggataccaacggctgcctggaattccccgcaagcagtctgccagttctacagttcatctcagtcctctaccgggacatgggtgaattgattgaaggcatgcgggctagagccttcctcgatggagatgctgacgcacatcagaacaattccacctccagcaattccgactctggaatcgggaacttccaccaggaggagaagtccaaccgcgtgctggtcgtggaccttgggggaagctcttcacggcacggacctggcggttccgcctgggacggagtggggggacgcggagcccagccctggggagcaccctggacagggccattttgtcccgatcctgaaggctctcctcctttcgaggccgctcaccagactgaccgattctgggatctgaacaaacacctcggaccagccagcccggtagaggtaccacctgcctcactgcgcagctccgtgccccctagcaagagggggacagtgggcgctggctgcgggttcaaccagcgctggctgccagtccacgtgctccgcgagtggcaatgcggccacacatctgaccaggactcatacactgattcaactgacggctggagctcaatcaattgtggtacgttaccacccccaatgagtaaaattcccgctgacagatacagggtagagggaagctttgcccagcccccactgaatgctccaaagcgcgaatggtcacgcaaagcttttgggatgcagtctatttttggccctcacagaaacgttcggaagacaaaggaggacaaaaagggctccaagtttggaagaggaactggtttgactcaacctagccaacgcacctccgccagaaggagttttgggaggagtaagcgtttttcaattacccgtagcttagacgacctggaaagcgcgaccgtgtcagatggggaactgactggggcagacctcaaggactgtgttagcaacaatagcttatccagtaacgcctccctgccatcagtgcagtcgtgccggagactgagagagaggcgagtggcctcatgggcagtgtcatttgagaggctgctgcaggatcctgtaggcgtgaggtacttctccgatttcctcagaaaagagtttagcgaagagaacatcctgttctggcaggcatgcgaatattttaatcatgtaccagcgcatgacaaaaaagagctgagctaccgtgccagggagatctttagcaagttcctgtgctccaaggctaccacccccgtgaacatagactcgcaggcccagctcgccgatgacgtgctacgggcaccacacccagatatgtttaaggagcagcagttgcaaatatttaatttgatgaaattcgacagctatacgcgcttcctgaaatcccctctgtaccaggaatgtattcttgctgaagtggaagggagggcactcccagactcgcagcaagtgcccagcagccccgcttccaagcactcactgggttccgaccatagcagtgtgagtactcccaaaaaactatctggcaagagcaagagtggacgatcgcttaatgaggagctgggtgatgaggattcagagaagaagagaaagggggctttcttttcatggtctcgaaccagatctactggcagaagtcagaaaaagagagagcacggggatcacgcagatgatgctctgcacgccaatggtggactatgccgccgagagagtcaggggagcgtaagcagtgccggaagtctggacctgagcgaggcatgtagaacactggccccagaaaaagacaaggctacaaagcactgctgtatccatctgccggacggcacaagctgcgttgtcgctgtgaaagcaggattctccattaaggacattctgtccggactatgcgagcggcacggaatcaatggggcagccgctgacctgttcctggtcggaggcgacaaacccctcgttctccatcaagactcttcaattctggagtcgcgcgacctgcggcttgaaaagagaactttgttcaggcttgatctggtacctattaataggtctgtcggcttgaaggctaagccgaccaagcctgtgacagaagtcctcagaccagtggtggcaagatatggattggatcttagcggcttgcttgtaagactgtcaggcgaaaaggagcccctcgatttaggtgcccctatatcctccctggatggccagagagtcgtgctggaagagaaagatcctagcagggggaaagcatctgcggacaagcagaagggagtgccagtcaagcagaacactgctgtaaatagctccagccgtaatcacagcgctactggggaagaaagaacactggggaaaagcaattccatcaagataaagggcgagaacggaaaaaacgcacgggatcctcggctttccaaacgggaggagagcatagcaaaaatcggaaaaaaaaaatatcagaagataaacctcgacgaagcggaggagttcttcgaactaatcagtaaggcccaatcaaatagagctgacgatcaaagaggcctgcttcggaaagaggacctggtcctgcctgaatttcttagactgccaccaggatcaaccgagttaactctgcccactccggctgcagtcgccaaagggttctcaaagagatccgcgacaggaaatggcagggagtccgcttcacagccaggtgagcagtgggagcccgttcaggaaagctccgattccccttcaactagccctgggtccgccagtagccctcccggtcccccaggaacaaccccaccaggacagaagagtccctctggcccattttgtacccctcagagcccagtgtcgctcgcacaggaggggaccgctcagatctggaagcgccagtcacaggaggtcgaggccggagggattcagaccgtggaggacgaacacgttgccgagttgaccttgatgggggagggtgatatttctagtccaaatagtacactgcttcctcctccatccacacctcaggaagttcccggtccctctcggccaggtacctcacgtttctag

SEQ ID NO: 30594 - DNA, 2400 bp, synthetic construct
  misc_feature 1..2400: note = Description of Artificial Sequence: Synthetic coding sequence
  source 1..2400: mol_type = other DNA
atgaatctgggtaaagaactctcaaatgagacccacgtgagtaatgatcaacagagcgccaccgtctctgacggggagctgactggagctgatttgaaggactgtgtatcaaacaacagcctgtcctccaatgcaagcctgccatcagtccaatcatgtaggaggctccgcgaacgcagagtcgccagctgggcagtgagctttgagcggttgttgcaggatcccgtgggcgtgaggtattttagtgactttctgaggaaggaattttctgaagagaacattctattctggcaagcgtgcgagtatttcaaccacgtccccgctcacgataaaaaggagttgtcataccgggctagagagatcttctcaaagtttctgtgcagcaaagcgactacacccgttaacattgattcccaggctcagctggcagacgacgtcctgcgagcccctcacccggatatgttcaaggaacagcagctacagatcttcaacctcatgaaatttgacagctacacaagattcctaaagtcacccctgtaccaggagtgtatcttggcggaggtcgagggcagggccttacccgacagccagcaggtaccctcttccccagcttccaagcactcactgggatcggatcatagttctgtcagtacacccaagaaacttagtggtaagagtaagtcaggaaggtcactcaatgaagagttgggagacgaagattcagaaaagaaaagaaaaggcgcattcttttcttggagtagaacccggtccacaggtcgctctcagaagaagcgagagcacggagaccacgctgatgacgccctccatgccaacgggggtctttgtagacgggagtcacaaggtagcgttagctccgcaggatcactggacctttctgaggcttgtcgcacacttgcccctgaaaaggacaaagccaccaaacattgctgcatccatctccctgacggcacttcctgtgtcgtggccgtcaaagccggtttctctatcaaggatatactcagcggcctttgtgaaaggcatggcatcaatggtgccgcagcagacctctttctggttggtggtgataaaccattagttctgcaccaggattcttctatcctagaaagtcgggacttacggctagagaaaaggacactcttccggctggatctggttccaatcaatcggagcgtcggccttaaggctaaaccgaccaagcctgtgacagaggttctgcgccctgtggtagccaggtatggcctagacctgagtggcttactcgtcagactctccggagagaaagagccattggatttaggggcacccatatctagcctggacggccagagagtagtactcgaggaaaaagatccatccaggggaaaggcctctgcagacaagcaaaaaggcgtgcccgtgaaacagaacacggcggtgaatagcagctccagaaatcatagtgctactggcgaggagcggactcttggaaaaagcaactccataaaaatcaaaggcgaaaatgggaaaaacgccagagaccccagactgagcaaaagagaggagagcatcgcaaagattgggaagaagaaataccagaagatcaacttagacgaagcggaggagttcttcgagctgattagcaaagcccagagcaaccgagccgacgaccagaggggtttgctcagaaaggaagatctggttctgcccgagttccttcggctcccgcctggatccaccgagcttacactccctacacccgcagctgtggccaaagggtttagcaagagaagcgccactgggaacggtagggaaagcgcctcccagcccggagaacagtgggagccagtacaggaatcttctgacagtccgtccacatcacccggttctgcctctagcccacctgggcctccaggcaccactcctccgggtcagaagagcccctccggccctttctgtaccccgcaatcccctgtaagcttggcacaggaaggcactgcccagatatggaaaaggcagtctcaagaagtcgaggccggtggcatccagactgtagaggacgagcacgtcgcagaacttaccttgatgggagagggcgacatcagctcccctaattctacgctgctgcccccaccctccacccctcaggaggtccctggccctagtaggccagggagcgggacccatggctcccgtgatctgcccgtgaacaggataatcgatgtggacctagtcaccggtagcgccccaggtagagacggaggcattgctggagcacaggcagggccagggagatctcaggcctccgggggtcctccgactagcgatctgcccggtttgggtcccgttcccggagaacctgccaagcctaaaactagcgcacaccatgccacctttgtgtag

SEQ ID NO: 30595 - DNA, 4344 bp, synthetic construct
  misc_feature 1..4344: note = Description of Artificial Sequence: Synthetic coding sequence
  source 1..4344: mol_type = other DNA
atgttcagggccggtgaggcaagcaaaaggccgctgcccggtcccagtcccccacgagtgaggagcgtggaggtggcgcgtggaagggccggatacggtttcactctgagcggccaggccccttgtgtacttagttgtgtaatgagagggtctcccgctgatttcgtgggtttgagggctggggaccagatcctggccgtgaacgagatcaatgtgaagaaggcctctcacgaagatgtcgtgaaattaatcgggaaatgcagtggcgtgctacatatggtgatcgcagagggagtcggtagattcgagagttgctcctctgacgaagagggtggtttgtacgaagggaaagggtggctgaaaccgaaactagattctaaagctttgggcataaatagagctgaacgagttgtagaggaaatgcagtccgggggaatatttaacatgatatttgaaaacccctccctctgcgcatcaaatagcgagcccctcaagctgaagcagcggtccctttcagaaagcgcggctacccgcttcgacgtggggcacgaatcaatcaacaatccgaaccctaatatgctgtccaaggaggaaatctcgaaagtcatccacgacgatagcgtcttttctatcggattggagagtcacgatgatttcgccttggacgcgagcattttaaatgtagcaatgatagtgggctacctgggatccatagaactgccctccaccagctccaatttggagtctgacagccttcaggctatccgaggatgtatgcggcgtttgcgggctgagcagaagatccattctctggttacaatgaaaatcatgcatgattgtgtgcaactctcaaccgataaagcaggagtggtggcggagtatccggctgaaaagctcgcatttagcgctgtgtgccccgatgaccggcgtttcttcggacttgtgaccatgcaaacaaatgatgacgggtccttggctcaggaagaagagggtgcactgagaacttcatgccatgtatttatggtagaccccgatttgtttaaccacaaaatccatcagggtatagcgagacggttcgggttcgagtgcacagccgacccagacacaaatggctgtttggaatttccggcatcctcgctgccggtgctgcaatttatttcagtcctgtaccgagacatgggcgaactgatagaaggcatgcgtgctcgcgctttcttagacggtgatgctgatgcacatcagaacaacagtacttcttcgaactcggattcaggaatcgggaattttcaccaggaggaaaaaagcaatagggtgctggtagtggacctcggtggatccagcagccgccatggccctggtggatcagcctgggacggggtgggtggccgaggcgcacagccgtggggcgcaccgtggacaggccctttttgtccagacccggaagggtcacctcccttcgaggccgctcaccagacagaccgtttctgggatctcaacaaacatcttgggccagcatccccagtcgaggtcccacccgcttcactacggtctagtgtgccccctagtaaaagagggaccgtgggagccggatgcggcttcaatcagcggtggctgccggtacatgtattgcgggagtggcagtgtggtcacacctctgaccaggatagctacaccgatagcaccgacggctggtcaagcattaactgcggtactctgccgcctcccatgtccaagatccccgctgatcgctatagagttgaaggctccttcgcccagccaccactgaacgctcctaaaagggagtggtctcggaaagcctttggcatgcagtcgatctttggacctcacaggaatgtgcgcaagactaaagaggacaaaaaaggcagtaaattcggacgcggtactggtctgacccagcccagccagaggacgagcgctaggcgctccttcggcagatccaaaaggttcagcattacgaggtccctcgatgatttggaaagcgccaccgtttcagacggggagctgaccggggctgatctcaaagattgcgtgagtaacaattcactctccagtaacgcctctttaccttcagtgcagtcttgcaggcgattgagagagcgacgcgtcgctagttgggctgtcagttttgaacggcttttgcaagatccggtgggcgttcggtacttttccgactttcttaggaaggagttctccgaagaaaacattttattctggcaagcctgcgaatatttcaatcatgtcccagcccatgataagaaagaactctcgtatagagctcgagagattttctccaagtttctgtgctccaaggccaccacacctgtgaacattgactcccaagctcaactcgccgacgacgtgttaagagcaccacacccagatatgtttaaggagcagcagctgcaaatttttaatttgatgaaatttgatagttacaccagatttctcaagagcccactctatcaggaatgtattctggcggaggtcgaaggtcgggcactccccgactcgcagcaggtccctagttcccccgcttctaaacactctctgggctctgatcactccagtgtgtctactcccaagaagctgtccggcaaatccaagtcagggaggagcttaaatgaggagttgggggacgaggattcggagaaaaagaggaaaggagcattcttctcgtggtctcggactcggtctacaggcagatctcagaagaagcgggagcatggggaccacgccgatgatgcgcttcacgctaacggaggactgtgcagaagggagagccagggctcagtgagctctgccggatcgttagatttgtcagaagcgtgtcgcacgctggcgcctgagaaagacaaggcaactaaacactgttgtatccacctgccggacggcactagctgtgtggtcgctgtcaaggcgggtttcagtattaaagatattctcagcggcctttgcgaacgacacggaattaacggcgctgccgctgacttgttcctagtcggtggcgataaacctctggtccttcaccaggactccagtatcctagaaagcagagatctgcgactggaaaagagaaccttatttcggctcgaccttgtgccgattaataggagcgttggactgaaggctaagcccactaagccagtaacggaggtgctgcgccctgttgttgcaagatatggtctcgatctaagtggtctccttgttagactaagcggagagaaggagccccttgacctcggagcacctatcagctctctggacggccaaagagtggtgcttgaggaaaaggatccaagccgagggaaggcctccgctgacaaacaaaagggcgtaccggttaaacagaatactgctgtgaacagttccagccggaaccacagtgctacaggggaggagcggacgcttggcaagtctaattcaatcaaaatcaaaggtgaaaatggcaaaaacgcacgggatcccaggttgtctaagagggaggagtccattgcaaagataggaaaaaagaagtaccagaaaattaacttggacgaggcggaagagttttttgagcttatcagcaaagcccaatccaatcgtgctgacgatcagcgaggcctgctgcgaaaggaagacttggtgctccccgagttcttgagactgccacccggttccaccgaattgacactgcctacccccgcagctgtggctaaaggcttcagcaaacggagcgccacgggaaatggtcgcgagtccgcctcacagcccggtgagcagtgggaaccagtgcaggaaagcagcgattcccccagcacatcccctgggtcggcatcttcaccaccaggacccccagggacaacaccccctggtcaaaagtccccaagcggacctttttgcactccccagtccccggtatcccttgctcaggaaggcactgcccagatttggaagcgtcaatcacaggaggtggaggccggagggatccagacagtggaggacgagcatgtggcggaactcacgttgatgggagagggagacatatcctcccctaatagcacgctcctgcctcccccttcaacaccgcaggaagtgcccggtcctagtcgaccaggctctggaactcacggatctcgggatttgcccgttaatcggattatcgatgtggacctcgttacaggatctgcaccaggtagggacggcggaatcgccggagcacaggcgggacccggaagaagtcaggctagcggtggcccaccaactagtgatctgccaggcctcgggccagtccccggagagcccgcaaagccaaagacttcagcccaccacgccacattcgtgtag

SEQ ID NO: 30596 - DNA, 4131 bp, synthetic construct
  misc_feature 1..4131: note = Description of Artificial Sequence: Synthetic coding sequence
  source 1..4131: mol_type = other DNA
atgttccgagcaggggaagcatccaagcggcctcttccagggcctagtccaccacgcgtgaggtcggtggaggtggcacgcggacgagcaggttacgggttcacgctgtctgggcaggctccctgtgtgctatcatgtgtgatgcgaggctcacccgctgatttcgtgggtctcagagccggtgaccagattctggccgtgaacgagattaacgtcaagaaagcgagccatgaagatgtggtcaaattgataggcaagtgctccggcgtgcttcatatggtgatcgcggaaggagtcggaagattcgaaagctgtagctccgatgaggaaggtgggttgtacgagggtaagggctggctcaagcctaagcttgacagtaaggcactgggtataaaccgagctgaacgagtggttgaggagatgcagtccgggggaatttttaacatgattttcgagaacccatccctatgcgcttctaactccgaacccttgaaactgaaacagcggagtctgtctgagtctgcagctaccaggttcgatgtgggccatgagagtattaacaacccaaatcccaatatgctgagcaaggaggagatcagcaaggtgattcatgacgattctgtattctccatcgggctggagtcgcacgatgacttcgccctcgatgcctctatacttaatgtagccatgattgtggggtacctgggcagcatagagctgcccagcacttcatcgaacctcgagagcgattcactccaggccatacgcggttgcatgagaagactccgagctgaacagaagattcactcactcgtgacaatgaaaattatgcatgattgtgtccagctgtctaccgataaagcaggagtagttgccgagtacccagccgagaaacttgctttttcagctgtgtgcccagacgacaggcgcttctttggcttggtgactatgcagacgaacgatgatggctcgctcgcccaggaggaagaaggggctctcaggactagctgccacgtgtttatggtggaccctgaccttttcaatcataaaattcaccaaggtatcgctagaaggtttgggttcgagtgtaccgccgacccggataccaatggatgtctggaatttcccgcaagctcactcccagttctgcagttcatatccgtattgtatcgggatatgggagaattgatcgagggaatgcgcgctcgcgcattccttgacggcgatgcagacgcacaccaaaacaatagtacaagttctaacagtgacagtggaatcggaaatttccaccaggaggagaagtcaaaccgggtgttggtggtggacctggggggttcttcgtcccgtcacggccctgggggttctgcttgggacggcgtgggaggacgcggagcccagccttggggggctccatggaccggcccattttgccctgaccctgagggatcaccaccattcgaggcggcacaccaaactgatcgtttttgggacctcaataaacatctagggcctgcctccccagttgaggtgccaccggctagcctaagatcatcggtgccccctagtaaacgcggtaccgtgggggcagggtgtggcttcaatcaaagatggttacctgtccacgtcctgcgcgagtggcagtgtggtcatacctccgaccaagactcttatacggactccaccgacggctggtcatcaattaattgcggcacgctgccgccacccatgagcaagatacctgctgacaggtacagagtcgagggtagctttgctcaacctcccctcaatgcccctaagcgcgagtggtcaagaaaggccttcggaatgcagagcatctttggtccacacaggaatgtacggaaaacaaaggaggacaagaagggtagcaagttcgggagaggaaccggccttactcaaccctctcaaaggacaagtgctcgtcggagcttcggacggagcaaacgcttttccattacccggtcacttgatgatcttgagagcgcaaccgtaagcgatggggaattgactggcgctgacctgaaagattgtgtaagtaacaactccctctccagcaatgccagtctgcccagcgtccagtcttgcagacggttaagagaaaggcgcgttgcatcatgggccgtgtctttcgaacgactgcttcaggatcccgtgggagtgaggtatttctccgactttctaagaaaagaatttagtgaggaaaatatcctgttctggcaggcctgtgaatacttcaaccatgtgcccgcacacgataagaaagaattgtcgtatagggctagagaaatattctccaagtttctgtgttcgaaggcaacgacccccgtgaatatagattcacaagcccaattggccgatgatgtcctccgggctccacacccggacatgttcaaagagcagcagcttcagatctttaatttaatgaagttcgactcgtataccagattcttgaaatctccactataccaggagtgcatccttgccgaggtggagggcagagcccttccagactcccagcaagttccgtcatcgcctgcctctaaacattctctgggctctgatcactcaagcgtgtccactccaaagaagctatccggcaagtcaaaatctggacgctctcttaacgaagaactcggagatgaagactcggaaaagaaaaggaagggtgccttcttttcctggtctcggactcgtagcaccggtaggagccagaaaaagagagagcatggcgaccacgcagatgacgcgctgcatgccaacgggggactctgtcggagagaaagtcagggctcagtttccagcgctggttccctcgacctgtccgaagcctgtcgtaccctggctcccgagaaagataaggccaccaaacactgttgtatccatttacccgacggtactagttgtgttgtggctgtcaaggcagggttttctatcaaggatattttaagcggtctgtgtgagcgacacggcataaacggcgcagccgctgacctgtttttagtgggcggagacaaaccattggtgctgcaccaggactccagtatactggagtcaagagatttacggctagagaagagaacgctattcaggctggatttagtgcctattaaccgctcggttggcctgaaggctaagccgacgaaacccgtaactgaggtcctacgtcccgtagtagcacgatacggccttgacttgtccggactccttgtgaggctgtcaggcgaaaaggagccactggacctgggggcacctataagtagcctagacggtcagagggtcgtgctggaggaaaaggatccctctaggggtaaggctagtgccgataaacaaaagggggtacccgtgaagcagaacaccgctgtcaacagctcatcaaggaatcactcggctacaggtgaggagagaacacttgggaagagtaattccatcaagatcaaaggggaaaacggcaaaaacgccagggatcctagactgtccaagcgcgaagagtctattgctaagatagggaagaagaagtatcaaaaaatcaacctggatgaggcagaagaattttttgagctcatcagcaaagcacagagcaaccgagcggatgatcagcggggactgctcagaaaagaggacttggtgctccctgaatttttgcgccttccacctggctctactgagctgaccctgccaactcccgcagccgttgctaaaggatttagcaagaggtccgcaaccgggaacgggcgtgaatctgcttcgcagcctggtgaacagtgggagcccgtgcaggagtcttctgatagcccatccacttcaccaggaagcgccagctcccccccagggccaccagggacaaccccccctggccagaagtccccttcaggcccattttgtacccctcagagccccgtttcactcgctcaagaagggaccgcacaaatatggaaaaggcaatcacaggaggtggaggcgggtggcatccagaccgtggaagatgaacatgtcgctgagctcactctgatgggggagggagacatctcatctcctaactcaactcttctgcctcccccatcaactcctcaggaggtccccggaccctccagacctggcacttccagattctag

SEQ ID NO: 30597 - DNA, 1500 bp, synthetic construct
  misc_feature 1..1500: note = Description of Artificial Sequence: Synthetic coding sequence
  source 1..1500: mol_type = other DNA
atgtcactctctctatttttccaatctgcaaccgtatccgatggcgaacttactggagccgatctcaaggactgcgtgtctaataatagcctgtcctcaaacgcaagcctcccttccgtgcagtcgtgccgcagacttcgggaacgtcgggtggcttcttgggccgtgagctttgagcggctgctgcaggatcctgtgggcgtgcggtatttctctgatttccttcgcaaggagttctcagaagaaaacatcctgttctggcaagcctgtgaatattttaatcacgtgccggctcatgataagaaagagttgagctatcgagccagggaaatattcagtaaatttctgtgtagcaaagccaccacgcccgtgaatatcgacagccaggctcagctggcagatgacgtgttgcgcgcaccccatcccgacatgttcaaagagcagcagctccagatcttcaatctcatgaaattcgactcgtacacccggttcttgaagagtccactttaccaagagtgcatcctggccgaagtcgaaggcagagccctgcccgattctcaacaagtcccaagttcgcccgctagtaaacactcattggggtccgatcattctagcgtcagcacccccaagaaactgagcggaaagagtaaaagcggtagaagccttaacgaggagctaggcgacgaagattcagagaagaagagaaagggagcttttttctcctggtccagaacgcgatcaacagggaggtctcagaagaagcgggaacacggggaccacgcagacgatgctctgcacgctaatggcggactatgcaggagggaaagtcagggttcagtgtcttcagccggtagtcttgatttatcagaagcttgtcgcaccctggctccagaaaaagacaaggctacaaagcattgttgtatccatcttcccgacggtacatcatgtgtggtggctgtcaaggcaggattctctataaaggacatcctcagtggtttatgtgaaagacacggtatcaacggagctgcagccgacctgttcctagtgggcggtgataagcctttagtgctccaccaggactccagcattctggaaagcagagacctgagactcgagaaacgtacactgttcagattagatcttgtccccattaatcggagcgtaggcctgaaggccaaacccacgaaacctgttacggaagttctgcggcctgtcgtggctcgatacgggcttgatctatctggtctgttggtgagactctcaggtgagaaagagcccctagatctgggcgctccaatctcttcattagatgggcagcgcgtggtcttggaggagaaggatccttctcgaggcaaggcgtctgccgacaagcagaaaggcgttcccgtgaagcagaacaccgcagttaactcatcatcccggaaccattctgccactagcttcctcagcctattccccaaactaagggccactgaacagatgacaaatgtgggttgttag

SEQ ID NO: 30598 - DNA, 2004 bp, synthetic construct
  misc_feature 1..2004: note = Description of Artificial Sequence: Synthetic coding sequence
  source 1..2004: mol_type = other DNA
atgttcagggccggtgaagccagcaaacgaccgctcccaggtccatcacccccaagagtgcggtctgtggaggtcgcaaggggcagggccggatacggcttcacattatcaggccaggccccttgtgtgttgtcttgtgttatgaggggaagtccagccgattttgtcgggctgagggcaggggaccagattctggcggtgaatgagatcaatgttaagaaggcctcacacgaggatgtagtgaaactcatcggaaaatgttcgggcgttctacatatggtgatcgccgagggggtgggcagatttgagtcttgctcctcggatgaagaggggggtctttatgagggaaagggctggttgaaacctaaattggacagtaaggccctcggcattaaccgtgctgagagagtggtggaggaaatgcagtcgggaggtatattcaatatgatatttgaaaaccccagcctctgtgcttcgaactcagagcccctgaaattgaaacagaggtctctcagcgagagcgccgctactaggtttgatgtcgggcatgagtcaatcaacaatcccaatcctaacatgctgtccaaagaggagataagcaaagtgatccatgacgacagcgtgttttctatcgggcttgaaagccatgatgactttgctcttgacgcctctatactcaacgttgctatgatcgtagggtatctgggctccattgagctgccctccacttcttcgaatctggaaagcgacagtctgcaagctatccggggttgtatgagaagactccgtgcagaacagaaaatccattccctggtgacaatgaagatcatgcatgactgtgtacagctttccaccgacaaagctggggtggttgcggaatatcctgccgagaaacttgcattctccgcagtgtgtcctgatgaccggcgattcttcggtctcgttacaatgcagacaaacgatgacggtagcctagcccaggaagaggaaggcgctctgcgaacaagctgccacgtgttcatggttgatccagatctcttcaaccataaaatccaccaaggaattgctcggaggttcgggtttgagtgcaccgctgacccagacacaaatggctgtctcgaattccccgcatcgtccctccctgtactccagttcatcagcgtgctttaccgggacatgggcgagctcatagagggaatgcgcgctcgggcatttctcgacggagacgccgatgcccaccagaacaactccacgtcgtctaactcagactcgggaatcggtaatttccaccaggaggaaaagtcgaacagagttctggttgtggacttagggggttctagcagtcgacatgggccagggggttccgcttgggacggagtaggaggtcggggagctcagccatggggcgcaccttggaccggcccattctgcccagaccccgagggatcgcctccattcgaggctgcacaccagacggatagattttgggatctgaataagcacctgggccctgcgagccccgtggaggtaccacctgcatcccttagatcatctgtgcctccctccaaaagaggcacggtcggggctggatgtggattcaatcagcgatggctacctgttcatgtgctcagggaatggcagtgcggacacacttccgaccaggactcctatacagatagcactgatggctggagctccatcaactgcggaacactgccaccgcctatgtccaagatccccgcagacaggtaccgggttgaagggagctttgcacaacccccactcaatgcgcctaaaagggagtggtcgaggaaagcctttggaatgcagagcatcttcgggcctcatcggaacgtgcggaagacaaaggaggataaaaaaggatctaagttcgggaggggaaccggcctaacgcaacctagccagaggactagcgctagaaggtctttcggcagatctaaaaggtttagcatcactcgctccttggatgatctcgaatcgtag

SEQ ID NO: 30599 - DNA, 636 bp, synthetic construct
  misc_feature 1..636: note = Description of Artificial Sequence: Synthetic coding sequence
  source 1..636: mol_type = other DNA
atgcagagcgccatgtttctggccgtgcagcatgactgccggccaatggacaagtctgcagggagcggacacaaaagtgaagagaaacgcgaaaagatgaagcgaactctgttgaaggattggaaaacacggctcagctatttcctacaaaactccagtacccctggtaagcccaaaaccggcaaaaagtccaaacaacaggcattcatcaagccctcaccggaggaggctcagctctggtccgaagcgtttgacgaactcctggcttctaaatacggcttggccgctttccgggcatttttgaaatcagagttttgtgaagagaacatcgagttctggcttgcctgtgaggattttaagaaaacaaagtccccccagaagcttagttccaaggcacggaaaatttacactgactttattgagaaggaggctccaaaagagattaatattgattttcagaccaagactttgatagcccagaacatccaggaggccacgtccgggtgcttcacaactgcccaaaagcgagtgtactctctgatggagaacaattcataccctcgtttcctggaatccgaattctatcaggacttatgtaagaagcctcagataaccacagagccacatgccacatag

SEQ ID NO: 30600 - DNA, 4203 bp, synthetic construct
  misc_feature 1..4203: note = Description of Artificial Sequence: Synthetic coding sequence
  source 1..4203: mol_type = other DNA
atgcccaagatagtcctgaatggggtgacagttgattttccatttcaaccttataaatgccaacaggaatacatgaccaaagtcctagagtgtctccagcagaaagtcaatggcattttagaaagccccaccggtactggcaaaacgctttgcctgttgtgtacaacactggcctggcgcgagcatttaagagatggtattagcgctcgcaagatcgctgagcgagcccagggcgaactatttcctgatagagccctgtcttcctggggcaacgccgctgcagctgccggagatccaatagcctgctacactgacatcccaaagatcatatatgcttctcgcacacattctcaactgacgcaggttattaatgagctccggaatacttcctatcgcccaaaagtttgtgtcctggggagtagggagcagctgtgcatccacccagaagtgaagaagcaagagtccaaccacctccagatccatctgtgtcgcaagaaggtggcttcccggagttgtcacttttacaacaatgtggaggagaagagcttggaacaagagcttgcctcccccatccttgatattgaggatctcgtgaagtcaggaagtaaacaccgggtgtgcccatactatctgtcccgtaatctgaaacagcaagcagatattatattcatgccttacaattatctgctggatgcaaagtcgagaagagcccataacattgacctcaaagggaccgtcgtgatctttgacgaagctcataacgtggagaaaatgtgtgaggagagcgccagcttcgacctcacgcctcatgaccttgcctctggcctggatgtgatagaccaggtgctcgaagagcagaccaaggctgcgcagcagggagagccacaccctgagttctccgccgattcaccgtccccgggtctgaatatggagctagaggacatcgccaaactaaagatgatcctcctcagactggagggcgcaatcgacgcagtggaactgcccggagatgattcaggggttactaagcctggttcttacatttttgagttgttcgccgaggcacagataactttccagactaaaggatgtatcctcgacagcctggaccagattattcagcacctcgccggaagggcaggcgtgtttaccaacactgctggcctgcagaaactcgctgatatcatccagattgtgttcagtgtggacccttctgaaggcagtcccggatcaccagccggactgggagccctacagagttacaaggtacatatccatccagatgcaggccataggcgcactgctcagagatctgacgcctggtccaccacagccgcaaggaagaggggtaaagtcctgagctactggtgtttttcaccaggacactcaatgcacgaactggtgagacaaggtgtgaggagtcttatcctaacatcggggacacttgccccagtgagtagcttcgcattggagatgcaaattccttttcccgtctgtctggagaacccccacattatcgacaaacatcagatctgggtcggggtggtgccaaggggccctgatggggctcagctttcctccgcctttgaccgcaggttttcagaagagtgtctaagcagcctgggaaaggcactcggtaacatagcacgggtggtcccttatggtttgttgatctttttcccttcataccctgtgatggagaaaagcctggagttctggcgcgctcgcgatctggcacggaagatggaagcattgaagccgctgtttgttgagcccaggtctaaggggtcattcagtgagacaatatcggcttactacgcgagagttgcagcgccaggatccacgggggctacatttttggcagtgtgcagagggaaggcatccgagggattagatttctctgatactaatggcaggggtgttatcgttactggattgccttacccaccacgtatggatcctagagtcgtcctgaagatgcagttcttggatgaaatgaagggacagggtggcgcaggcggtcagtttctgtccgggcaggaatggtatcgccagcaggcctcgcgagctgttaaccaagccatcggccgagtgatccgccataggcaggactacggagccgtttttctgtgtgatcatcggttcgctttcgccgatgctagagcacagcttcccagctgggttcggccacatgtgagagtgtatgacaattttggacacgtgatcagggacgtggcgcaattcttcagagtggccgaaaggactatgcctgccccagcgccaagggccacagctccttcagtcagaggtgaggatgcggtgtcggaggcgaagtcaccagggccatttttctcaactaggaaggcaaagtctttagacctccacgttccttcactgaagcagcggtcttctggcagccccgcagctggcgacccagagtcctcactctgtgtcgagtatgagcaggaacctgtacccgcacgccagaggcccagggggctcttggctgcattagagcactctgaacagagggctgggagcccgggagaggagcaggcccactcctgctctacgctgtccctgctgtcggaaaaacgccctgccgaagagccacgaggcggtaggaagaagatccgccttgtgtcccaccctgaagaacccgttgccggagcacaaactgatcgagcaaaactgttcatggtcgctgtcaaacaggaactgagccaggcaaactttgctacattcacgcaagctttgcaagattacaagggtagtgacgattttgctgctttggccgcttgtcttggaccactcttcgcagaagaccccaaaaaacacaacctgcttcagggattttaccaattcgtgcggcctcaccataaacagcagttcgaggaggtgtgtatacagctcacaggacgcggatgtggctaccgacccgagcattcaattccacggagacagagggcccagcctgtgctggatccaaccggccgaaccgccccagatccaaagctcacggtctccacagccgctgcccagcagctggatcctcaggaacatctgaaccaaggacgaccacacttaagtcccaggccccctccaacaggcgatcctggcagccagccccaatggggaagtggtgtccctcgagcaggaaagcaggggcagcatgcagtttcagcataccttgccgatgctcggagggcacttggctctgctggctgttcccagttgctcgccgctttgaccgcttacaagcaggatgatgatctggacaaggtgttggccgtgctggctgctctcacaaccgctaaaccagaagatttcccgctgctacatcggttttcaatgtttgtgcgaccccatcataaacagagatttagccagacatgcactgacctgacagggaggccttaccctggcatggagcccccagggcctcaagaggagaggctagcagtgccgcctgtcctaacacatcgggctcctcagccagggccaagtcgatccgagaagaccggcaagacccagtctaaaatctccagttttctccgccagagaccagccggtacagtcggtgcgggtggggaagacgctggccctagccagtcgagcggccctccgcatgggcctgctgcctccgaatggggggaaccacacgggcgtgatatagccggtcagcaggcgactggcgctccaggcggtccactttcggccggatgcgtttgccagggatgcggcgctgaggatgtagtgcctttccagtgtccggcttgcgattttcagaggtgccaggcttgctggcagagacacctgcaggcctcacgcatgtgccctgcatgtcacacggctagtcggaaacaaagcgtcatgcaggtgttctggcccgaaccacataaggaccacgaaggagcagggggagcgagaccagttgccgctgtccccggagtaggcgctgcctgcccagcagctggggcaggatgtacccgctcagggaggaatacacatcttcctctggccggtaggagggacagaggagccgcaggagtacgtcccgtgccaccacgacatctgtgcgctgccgctgtgccgccacgacagcctcacgatgtgtggcctgtaagcacagcccctctgcatgcagtgcttgaactgccaagagcgctaccactgcttcaaagaccccttaggggagcatag

SEQ ID NO: 30601 - DNA, 1638 bp, synthetic construct
  misc_feature 1..1638: note = Description of Artificial Sequence: Synthetic coding sequence
  source 1..1638: mol_type = other DNA
atgccagcacctgccccacgcgctacagctcccagcgtccgcggagaagacgccgtgagtgaagcgaaatcaccaggccctttcttctccacccgcaaagcaaaaagcttggacctccatgtcccttctttgaaacagcggagctcaggcagcccagcagccggagatccagagtcttcactctgtgtcgaatacgaacaggaaccagtgcctgccagacagagacccaggggattactggctgccctcgagcactctgaacagcgcgctggaagtcctggcgaggaacaagcccattcctgttcaactctgtcactcctaagtgaaaagcggccagcagaggagcccagagggggaagaaaaaaaattcgcttggtatcccatccagaagagccagtagcgggagcacaaacggacagggctaaactgttcatggtggccgtaaaacaggaattgtcccaagccaattttgccactttcacccaggccctccaggactacaagggaagcgacgatttcgccgctttggcggcatgcctcggcccactctttgcagaggacccaaaaaagcacaatttgctccagggcttttaccagtttgtcaggccccaccacaaacaacagtttgaggaggtatgcatccaactcacaggcagagggtgtggctaccggcctgaacacagcataccccgacgacaaagggcacaacctgttcttgacccaaccggacggacggcacccgacccgaaattaactgtgtccactgctgctgcacagcagttggacccccaagagcatctgaatcaggggaggccccatttgagtcccagacccccacctactggcgatcctggttcccagccccagtggggatccggggttccgcgtgccggtaagcagggccagcatgccgtgagtgcttatctcgctgacgcaaggagagcccttggatcagctggttgttcccaactattagccgctctcaccgcatataagcaagacgatgatcttgacaaggtgctcgccgttttggccgctctgactaccgctaagcccgaggatttccctttgttgcaccggtttagcatgtttgtccgcccacaccataagcaacgcttttcccaaacttgtaccgacctgacgggaagaccttatcctgggatggaacctcccggacctcaggaggaacggctggccgtcccaccggtcctcacgcatcgcgctccccagcccggaccaagccggagcgagaagacaggtaagacccagagcaaaatcagttcgttcctgaggcaacgaccagcaggtaccgtgggtgccggaggggaagacgcaggcccaagccagagcagcgggcctccccatggccctgctgcatccgagtggggcgaaccacatggccgagatattgccggacaacaggctacaggcgctcctggaggacctctaagtgccggttgtgtgtgtcagggatgtggtgcagaggacgtggtgcctttccagtgccccgcatgtgattttcaacggtgccaagcctgctggcagaggcacctccaagctagtaggatgtgtcctgcctgccacactgcaagccgaaagcagtccgttatgcaggtcttctggcccgagccccagtag

SEQ ID NO: 30602 - DNA, 3660 bp, synthetic construct
  misc_feature 1..3660: note = Description of Artificial Sequence: Synthetic coding sequence
  source 1..3660: mol_type = other DNA
atgccgaaaatcgttctcaacggcgtcaccgtggactttccttttcagccatataaatgccaacaagagtatatgaccaaagtcctagaatgcctgcagcaaaaagtgaacggcattctggaatctccaactggaacgggtaagaccctttgtctcctatgcacaacgctggcttggagggaacatcttcgtgacgggatctcagctcgcaagattgctgagagagcacagggggagctcttcccagaccgggctctgagtagttgggggaatgctgccgctgctgccggtgaccccatcgcgtgttataccgacatacctaagataatctatgccagtcgcacacatagccagctgacccaagtgattaacgagctgcgtaataccagctacaggccgaaggtgtgtgtactcgggtcacgcgaacaactctgtattcatccagaagtcaaaaaacaggaatccaatcacttgcagatccatctttgtcgcaaaaaggtggcatctaggagctgccacttctacaataatgttgaggaaaaatctctcgagcaggagctggcatctccaatcctggatatcgaggacctcgttaagagcggttccaagcatcgtgtgtgtccatactacctaagtcgcaacctgaagcagcaggccgacattattttcatgccttacaactatttactcgacgctaaaagccgaagggcccacaatatagacctgaaggggacagtggtcatcttcgatgaggcccataatgtcgaaaagatgtgcgaagagtcagccagctttgatttaaccccgcacgatcttgcttccggactggatgtgatcgaccaagtccttgaggaacagaccaaggccgctcagcagggcgagccacacccagaattctctgcggacagccccagccctggtttaaacatggaacttgaggatattgcgaagcttaaaatgatccttttgagactggaaggcgcaatcgacgctgtggagctccccggagatgacagtggagtgactaagccaggcagttatatttttgagctcttcgccgaagctcaaatcacattccaaacgaagggatgtatcttggattctctcgaccaaatcattcaacatctcgcaggtcgagctggtgttttcaccaacacagccggattacaaaagctggccgatattatccagatcgtgtttagtgtggacccatccgagggctctcctggatcgcctgccggactcggtgccttgcaatcctataaggtgcatatccatccagacgccggacacagacgcactgcccagcgctccgacgcatggagcaccacggccgctaggaagcggggaaaggttctaagttattggtgcttttcccccggacacagtatgcatgagcttgtgaggcagggcgtgcggtctttgatcctcacaagcgggactcttgcaccagtgtcatcatttgcactggagatgcagattccctttccagtctgcttagaaaatcctcacatcattgacaagcaccaaatctgggtgggtgtggtccctagggggccagatggagcccagttgtcatcagcatttgaccgtcggttcagcgaggagtgtctgagttcattggggaaggctctgggaaatattgcaagagttgtgccttacggtctattaatattcttcccgagttaccctgtgatggagaagtccctggagttctggcgggcacgggacttggctagaaaaatggaagccctaaagccactgttcgtggaaccacgatcaaagggcagcttcagtgagaccatctccgcttactatgctagagtggccgcacctggcagcaccggcgcaacattcctggcagtttgtaggggcaaggcaagcgagggccttgacttctcggacacaaacggacggggagtaattgtgacggggctgccatatcctccacggatggatccacgggtcgtactgaagatgcagttcttagacgagatgaaaggacagggaggcgctggtggacagttcctgtcaggtcaggagtggtaccgacagcaggcttcaagggctgtgaaccaggcaatcggaagagtcatccgacaccgccaggattacggtgctgtgttcctctgtgatcacagattcgcattcgccgatgcccgtgcacagctgccgtcatgggtgagacctcacgttagagtctacgataatttcggccacgttattcgcgatgttgcccagttttttagggtagccgaacgtaccatgccagcccctgccccacgagccaccgcaccgagtgtccggggtgaagatgccgtcagcgaggcaaagagcccaggaccttttttctcaacccggaaagccaaatcattggacttacacgttccatcactgaaacaacgatcaagcggcagcccggctgccggagaccctgagtcttctctctgtgtggagtatgagcaggagccagttcctgcacgccaacggcctcgcggactcttagccgctctagagcactccgagcaacgggctggctcccctggcgaggagcaagctcacagctgttcaacattgtcactgctaagcgagaagcgacccgctgaggagcccagagggggacggaagaagattcgtctggtgtcacaccctgaagagccagttgctggcgctcagacagaccgtgccaaattgttcatggtggccgtgaaacaagaattgtcgcaggctaattttgccacgtttacccaggccctgcaggattataaggggtccgatgacttcgcagcactcgcggcttgtctcggtcccctgttcgccgaggaccctaagaagcacaatctgttgcaagggttttaccagtttgtaagacctcaccataaacagcaatttgaggaggtgtgcatacaactgacaggtcgcggttgcgggtaccggccagaacactccattccgagacggcagcgcgcacaaccagttctggaccccacaggcagaacagctcctgatcctaaacttactgtcagcaccgcggcagctcagcagctcgaccctcaggaacaccttaaccagggtcggccacacctgtcccctaggcctcccccaaccggggatccaggttctcagccccagtggggctcaggagtgccacgcgcaggcaagcagggccagcacgcagtgtccgcttacctggctgacgccaggcgcgcactcggttccgctggatgcagtcaattgctggcagctttgaccgcatacaaacaggacgatgacctggacaaagtgctggctgtgctcgccgctctcactacagccaagcctgaagattttcccctgctgcatagatttagcatgtttgttcgaccacaccataaacagagattcagccagacttgtactgatctgactggccgaccataccccggaatggaaccccctgggccacaagaggagcggttggccgtgccgcctgtgctcactcatcgggcaccacagccaggtccttcacgaagtgagaagaccgggaagactcagtccaagatcagctcttttctgagacaacgtcccgctggaacagtgggggctggtggggaggacgcagggccttcacagagctccggccctccacatgggccagccgctagtgagtggggcctgtag

SEQ ID NO: 30603 - DNA, 3732 bp, synthetic construct
  misc_feature 1..3732: note = Description of Artificial Sequence: Synthetic coding sequence
  source 1..3732: mol_type = other DNA
atgccaaagatcgtactgaatggtgtgactgtggactttccatttcagccatataagtgtcagcaggaatacatgaccaaagtgctggaatgcttgcagcaaaaggtcaatggaatactcgagagtcccaccggtacaggcaagaccctgtgcctgctgtgtactaccctggcatggagggaacacctccgggatgggatctcggccaggaaaatcgccgaaagagctcagggtgaactcttccccgacagggcactgtcttcctggggtaacgccgcagcggcagccggtgatccgatagcttgttacactgacatcccaaagattatctacgcaagcagaacacactctcaactgacacaggtcataaacgagctgagaaatactagttaccgtagccgctgccgggcaacgctgtgggttctggagacggctcctcccagacccaccgtgctaagccctacgcgacccaaggtatgtgtgcttgggtctcgcgaacagctgtgcattcatcccgaggtaaagaagcaagagtctaaccaccttcaaattcacctttgtcggaagaaggtggcttccagatcatgtcatttctacaataatgtagaagaaaagtcactggagcaggagctggccagcccaattctcgacattgaggacctcgtgaaaagtgggtctaagcatcgggtttgtccttactacctttcccgaaacttaaaacagcaggcagatattatctttatgccgtacaactatttgcttgacgctaagtcgcgcagagctcacaatatcgaccttaaaggtactgtggttatttttgatgaagcccataacgtcgaaaagatgtgtgaagagtcggcttcctttgacttaacaccgcacgacctggcctctggactggacgtaatcgaccaggtgcttgaggagcagacaaaagcggcacaacagggcgaacctcatccggagttcagcgctgacagccctagtccaggcctcaacatggagctagaggatattgctaaactcaagatgatccttttgagactcgaaggtgcaatcgacgccgtcgagctgccaggcgacgatagtggagtgactaaaccaggatcctacatctttgaattgtttgcagaggcccagatcacatttcagaccaaagggtgtatactggattccctggaccagattatacagcacctggctgggagagcaggagtttttacaaatacggctggtttgcagaagctagccgatatcatccagatagtgttcagcgtggacccatctgagggatcacctggtagtcctgccggactgggggcactccagagttataaagtccatatacaccctgatgcaggtcacaggcgcaccgcgcaacgcagcgacgcctggtccacaactgctgcacgcaagcgaggtaaggtgctcagctactggtgttttagccctggtcattcaatgcacgagctggtgagacagggtgtgagatcgctgattctgacgtctgggacactagctcctgtgtccagctttgctctggaaatgcagattccatttcctgtatgtttggaaaatccccatataatcgacaaacaccagatatgggtcggcgttgtgcccagggggcctgatggcgctcagctgagtagtgcttttgaccggagatttagcgaggagtgtctctcctcacttggaaaggccctcggtaacatcgccagagtggtaccttacgggcttctgatattcttcccaagctacccagtaatggagaaaagcttggaattctggcgtgccagggacctggctagaaaaatggaggctctcaagcccctgttcgtggagccaagatccaagggctctttctctgagacgatcagtgcttactacgctagagtggctgctcccggttctacgggagccactttcctcgcagtgtgcaggggcaaagccagcgaaggtctggacttttccgacactaacggcaggggcgtgatagtaactggactcccataccctccgaggatggaccccagggtagtgctgaaaatgcagttcctagatgaaatgaaggggcagggcggagcaggcggacagtttctgagtggccaggaatggtatcgccagcaggctagtcgggctgtgaatcaggcaattggcagggttattcgacaccgccaggattacggggcagtgtttctttgtgatcacagattcgcttttgccgatgccagggcccagctgcccagctgggttagaccccatgttcgggtctatgacaatttcggtcatgtaatcagagacgtggcacagttttttcgagtcgctgagcgtaccatgccggctccggctcctcgggcaaccgccccaagcgtccgaggcgaggatgccgtgtctgaggccaagtctcccggtccattctttagtacacggaaggctaagagtctggatctccacgtgcccagcctgaaacagcgatcctctggtagccctgctgcaggcgatccagagtcttctttgtgcgtggagtacgaacaggagcctgtgcctgcacgacagcgtcccagagggctgctggctgcactcgagcattcagagcagagggccggtagccctggggaggaacaagcccacagctgttcaactttgagtttactgagcgagaagcgtccagccgaggagccaagaggaggacggaaaaagataaggcttgtcagccaccccgaggaacctgttgccggtgcacagactgatagagctaaattgttcatggtggccgttaaacaagagctgtcccaggccaattttgccacctttactcaggcgctccaagattacaagggatcagatgattttgccgctcttgcagcctgtctaggtcctttatttgccgaagatccaaaaaagcacaaccttctgcagggcttttaccaattcgtgcggcctcatcataaacaacagttcgaagaagtgtgtatacagctgacaggccgtggctgcggatacagacccgagcacagtatcccacggcgacagagagcccagcctgtcttagaccctacagggaggaccgcacccgacccaaaacttacagtgtctacagctgctgcccaacagctggaccctcaggagcatttgaatcagggaagacctcatctttccccaaggcctcctcccaccggagacccgggatcccaaccacagtggggatcgggagtgccacgggcaggtaagcagggacagcatgcagtctccgcgtacctcgccgatgcaagaagggccctgggatctgctggatgcagccagctgctcgccgctcttacagcctataagcaggatgacgatctggacaaggtgctggcagttctggctgcgctgaccacagcgaaacccgaagattttccattattgcatagcaatagtatgttcgtccgacctcaccataagcaaagattcagccagacctgtactgatctgactggacgcccttaccctggaatggaacctcccggaccacaggaggaacggcttgccgtgccgcctgtgctgactcaccgcgctccgcaacctggcccttcgaggagtgagaaaacaggaaaaacccaatccaagatttcctcgtttcttaggcagagaccagcaggtactgtcggagcaggcggtgaggatgccggacctagccagtcatctgggccaccacacgggcctgccgcaagcgagtggggtctgtag

SEQ ID NO: 30604 - DNA, 3444 bp, synthetic construct
  misc_feature 1..3444: note = Description of Artificial Sequence: Synthetic coding sequence
  source 1..3444: mol_type = other DNA
atggatatccgcaaattcttcggagtcatcccttctggcaaaaagctagtatccgagacagtaaagaagaacgaaaagaccaagagcgacgaagaaacgctgaaagccaagaaaggaatcaaggagattaaagttaacagcagcagaaaagaagacgattttaaacagaagcagccatccaaaaaaaaaagaatcatctatgatagcgactccgagtccgaagaaactctgcaagtaaagaatgccaaaaagccgcctgagaaattgcctgtgagctcgaagcctgggaaaatcagccggcaggatccagtaacatacattagcgagacagatgaggaggacgatttcatgtgcaaaaaagccgctagcaaaagtaaagaaaatgggagatcaacaaattcccacctcggtacctctaacatgaagaagaatgaagagaacactaaaacaaagaataagcccctgtcccccatcaaacttaccccaacatccgtactcgactatttcggaaccggatcggtgcagcggtcaaacaaaaagatggtcgcctccaagagaaaagagcttagccagaataccgatgagagtggcctgaacgacgaggccatagctaaacagctgcagcttgatgaagatgccgagctagagaggcagttgcacgaggatgaagagttcgccagaacactcgctatgctggacgaagagcccaaaacaaaaaaagctcggaaagatacagaggcaggagagacattcagctccgtgcaggcaaacctgtccaaggcagagaagcacaaatatccacataaagtgaaaaccgcccaagtttcagatgagcggaagtcctacagcccaaggaagcagtccaaatatgaatccagcaaagaaagccagcagcattccaagtcctcggcagataagataggagaggtgtcttcccccaaagcctcaagcaaacttgccatcatgaagcgaaaggaggagtcaagctataaagaaatcgagcccgtggcaagtaaaagaaaagagaatgctatcaagctgaaaggagagacaaagacgccaaagaaaaccaagtcatctcctgctaagaaggagtcagtgtcacctgaagatagtgaaaaaaagagaacgaactaccaggcttaccgttcgtaccttaacagggaaggccctaaggcactgggaagcaaagaaatacccaagggagctgaaaattgcctggagggcctgatcttcgtgattaccggagtgctggagtctattgaaagagacgaagccaaatctctgatcgagcgatacggtggaaaagtcacagggaatgtttcaaagaaaacaaactacctggtcatgggcagagatagcggccagagcaaaagtgataaggctgcggctttgggtaccaaaattattgacgaagatgggctcttaaatcttatcaggacaatgccaggtaagaagtcaaagtatgagatcgccgttgagaccgagatgaagaaggagagcaagctggagaggaccccccaaaagaacgtgcagggcaagcggaagatctctccatccaaaaaagagagcgaatcaaagaagtcccgaccaacttccaagagggactctcttgccaagactattaagaaggaaaccgacgtcttttggaagtctttagatttcaaggagcaggtagctgaggaaacttcgggcgatagcaaggcgaggaatctcgctgacgattcatctgaaaacaaagtagagaacctcctgtgggtagataaatataagcctacttcattgaagacaataattgggcaacagggtgaccaatcatgtgccaataagctgttacgctggttacggaattggcagaagtcgtctagtgaagataaaaagcacgcgaagttcgggaagttctctgggaaagatgacggctcctccttcaaggccgcactgctgagcggtcctcctggagtcggtaagaccaccaccgcttccctcgtgtgtcaagaattgggctacagttacgtggagctcaacgcaagtgacacacgatcaaagagttccctaaaggcaattgtggctgaatccctgaacaatacttctattaagggattttactcaaatggtgctgcatccagtgtgagcacaaagcacgctctcatcatggacgaagtggatgggatggctgggaatgaggaccgaggcggaattcaggagctgattggtctgatcaaacacacaaaaattcctataatctgcatgtgtaatgatcgaaatcacccaaaaattcggtctctggtgcattactgctttgacctcagattccagcggcctagagtggaacagatcaaaggcgcaatgatgagcattgcttttaaagaagggcttaagatccctcctcccgcaatgaacgaaattatcctcggcgcaaaccaggatatccgccaggttttacataacttgtctatgtggtgtgcccgaagcaaagctctaacttacgaccaggccaaagctgatagccacagagcaaaaaaagacattaagatgggaccgtttgatgtggctcgtaaagttttcgctgctggtgaggaaaccgctcacatgagcctggtcgacaagagcgacttgttttttcacgactattccatcgcacccctgtttgtgcaggagaactacattcatgtcaaaccggtagccgcaggcggtgacatgaaaaagcacctgatgctgctgtcgcgcgctgcggatagcatctgcgatggcgatctggtggattctcagatcaggagtaaacagaattggtctctccttcccgctcaggccatttatgccagtgtactacctggggaactcatgcgcggatacatgactcaattcccaacatttccctcctggctggggaagcatagttcaactgggaagcacgaccgcatcgttcaggatctcgctttacacatgagtctgaggacgtacagttctaagagaacagttaacatggattacctctcactcttaagagatgccctggtccagcctttaacatcacagggcgtcgatggcgttcaggatgtggtcgctttaatggatacctactatctgatgaaggaagatttcgagaacataatggaaatttctagctggggaggaaagccgagccctttctccaaactggatccgaaggtgaaggctgcgttcactagagcctacaacaaggaggcacatctcacgccgtacagcttgcaggcaataaaggccagtagacattctacttccccaagccttgattccgaatacaacgaggaactcaacgaagacgactctcagtctgatgaaaaagatcaagatgccattgaaacggatgccatgattaaaaagaagacaaagtcaagcaagcccagtaagcctgagaaggataaagaacccaggaaaggcaaaggaaaaagctcaaaaaaatag

SEQ ID NO: 30605 - DNA, 3447 bp, synthetic construct
  misc_feature 1..3447: note = Description of Artificial Sequence: Synthetic coding sequence
  source 1..3447: mol_type = other DNA
atggatatccgcaagttttttggcgtcattccctccgggaaaaaacttgtgtctgaaactgttaagaaaaatgaaaaaaccaaatctgatgaggaaaccctgaaagcaaaaaaagggatcaaagagataaaagtcaactcatccaggaaggaagacgacttcaagcagaagcagcccagcaaaaaaaagaggatcatatatgactcagattctgaaagtgaggagacactccaggtgaagaatgctaagaagcctcccgagaagttaccagtatcctctaaacctgggaagatttctcgccaagacccggtgacctacataagtgagacggatgaggaagacgatttcatgtgtaaaaaggccgcatccaaatccaaagagaatggaaggtccaccaattcccatttggggacctcaaacatgaagaaaaacgaggagaatacaaagaccaagaataagcctctgagtccaattaagcttacaccaacatctgtactggactattttggtacaggatccgtgcagagaagcaataagaagatggtggcctccaagcggaaggagctcagccaaaatactgacgagagcggtctcaatgatgaggccatcgcaaaacaattacagctcgatgaggacgcagaattggaacggcagctgcacgaagacgaggaatttgccagaacgctagccatgctggacgaggagccgaaaacgaagaaggccagaaaggacacggaggcgggagaaacattctcttctgtccaagccaacttgtcaaaagctgaaaaacacaaataccctcacaaagtgaaaaccgctcaggttagcgatgagaggaagtcgtactctccacgcaagcagtcaaagtacgaatcctccaaggagagccagcagcacagcaaatcaagtgcagataaaatcggagaggtgtcgtcaccaaaggctagttccaaattggcgatcatgaagcgcaaagaagagtcttcctacaaggagatagaacctgtggcaagtaaacgaaaagagaacgccatcaagcttaagggcgagactaaaacacctaagaagaccaaaagcagccccgcaaaaaaggagtcagtctcacccgaagatagcgaaaaaaagaggacaaattaccaggcataccgctcctatttgaacagagagggcccaaaagcgttaggctccaaagaaatcccaaagggcgcagaaaattgcctagaaggccttattttcgtgatcaccggggtcctggaatctatagagcgtgacgaagcaaagtcccttatagagcgatatgggggaaaagttaccggcaacgtgtccaagaagacaaattacctcgttatgggccgagatagtggccaatccaaaagcgacaaagctgcagcactaggaacaaagatcattgacgaagacgggttgctgaatctgatccgcaccatgcctggcaaaaagtctaagtacgagattgccgttgagacagaaatgaagaaagagtccaagctggaaagaacccctcagaaaaacgtgcagggtaaaaggaagatttccccgagtaaaaaagagtccgagagcaagaaaagtaggccaacctcgaaacgggactcccttgctaagactataaagaaggaaactgatgttttttggaagtccctggatttcaaagaacaggtggccgaggagacgagcggcgactccaaagcccgaaacctggctgatgattcaagcgagaataaagtggagaaccttctgtgggtggacaaatacaaacccacttcactaaagaccataataggacagcagggcgatcagtcctgtgcaaacaaactcctccggtggttgagaaattggcagaaatcaagcagtgaggacaaaaaacatgcggctaaattcggcaaattctctgggaaggacgacggctcaagctttaaggctgctcttttgagcggcccaccaggggttggcaagaccacgactgctagcctggtttgtcaggaactgggatattcttatgtcgagttgaatgcttcagataccagatctaaatcgagtcttaaagccatcgttgcagagtccttaaataatactagcatcaagggtttctattctaacggggctgccagcagcgtgtccactaagcatgctctgatcatggatgaggtggacggcatggccggaaacgaagatcggggaggaatacaggagctgattgggcttatcaagcacacaaagattcctatcatatgcatgtgcaacgaccggaatcaccctaaaatcaggagccttgtgcattactgcttcgatctcaggtttcaacgacctagggtagaacaaatcaaaggcgcaatgatgtctatcgcttttaaagaggggctgaagatacctcccccagcaatgaacgaaatcatcctcggcgcaaaccaggatattagacaggtgctgcataatctatcaatgtggtgtgctcgatccaaagctttgacatacgaccaggcaaaggcagactctcatcgcgcaaagaaagatattaagatgggaccttttgacgtagctcggaaagtatttgccgcaggcgaggagactgcacacatgtcactcgtggataagagcgacctctttttccatgactactccatcgcacctctgtttgtccaggagaactacatccacgtgaagccggtcgctgcaggcggagatatgaagaaacacttgatgttactgtctcgcgctgctgactctatatgtgacggcgacctcgtagactcacagattcggtctaagcaaaattggtcgttgctgccagcccaggccatctatgcttccgtactgcccggagagctgatgcgaggctacatgacacagtttcctacctttccttcttggttaggcaagcatagctccacaggaaagcacgatagaatcgtgcaggacttggcactacacatgagccttcggacctactcttcaaagaggaccgtcaatatggactacctttcattgctgagagacgcactggtccagcccctcacatctcaaggagtggatggcgttcaggacgttgtagccctcatggacacctactaccttatgaaagaggacttcgagaacatcatggaaattagctcttgggggggaaaacctagccctttttcaaagctggatccaaaggtaaaagccgcatttacccgagcatacaacaaagaggcacaccttactccttactccctgcaggcgatcaaagcgtcacgacattccaccagccccagcctggattctgagtacaacgaagagcttaatgaggacgactcacagtcagacgagaaagatcaagatgctatcgagaccgatgccatgattaaaaagaaaactaagtcttcaaagccatccaaaccagagaaggataaggagccgaggaagggcaaaggtaagtcctctaaaaagtag

SEQ ID NO: 30606 - DNA, 564 bp, synthetic construct
  misc_feature 1..564: note = Description of Artificial Sequence: Synthetic coding sequence
  source 1..564: mol_type = other DNA
cctgaggacagcgaaaagaagagaactaactaccaggcataccggtcctatttgaatagggagggcccaaaagcccttggtagcaaggaaatacccaagggagccgagaattgtctggaaggcttgatcttcgtaattactggtgtcctggagtccatagagagggatgaggccaagtccctgatagaacgctacggaggaaaggtcacggggaacgtctccaagaaaactaactacctcgtgatgggtagagattcgggccaatccaaatctgacaaggcagccgcactagggacaaaaataatcgacgaggatggactgctcaatctgatccggacaatgcccggtaagaagtctaaatatgaaatagccgttgagacggaagaactgggctattcttatgtggagctgaatgcatcagacacacgaagtaagagttccctcaaagccatcgtcgcagaaagtctcaacaatacctctattaaaggcttttactccaacggagccgcttcatccgtcagtaccaaacatgcgctcataatggacgaagttgatgggatgtag

SEQ ID NO: 30607 - DNA, 1851 bp, synthetic construct
  misc_feature 1..1851: note = Description of Artificial Sequence: Synthetic coding sequence
  source 1..1851: mol_type = other DNA
atggtgggtcagttgtcagagggcgcaattgctgccattatgcagaaaggggacacaaacattaagcccattcttcaggtcatcaatatcagaccaatcactactggcaacagccctccgcgttacagactgctgatgagcgatggactgaatacactgagctccttcatgcttgctacacagctgaacccactggtagaagaagaacaactcagcagtaactgcgtatgccaaattcaccggtttatcgtcaacacactgaaggatggacgccgagtagtgattctgatggaattggaggttctcaaaagcgcagaggctgttggcgtgaaaataggaaatccagtgccatataatgagggtctaggacagccccaggttgcaccacccgctcccgctgcaagcccagccgcttcatcccgtccgcagccccaaaatggtagctcaggaatggggtccaccgtctcaaaagcctacggagccagtaagaccttcggcaaagccgctggaccctcactgtcccacacgtctgggggtacacagtccaaggtagtgccgatcgcaagcctgacaccttaccaaagcaagtggaccatctgcgctcgagtgacaaacaagtcacaaattcggacatggagcaactcaaggggggagggcaagctgtttagcctggaacttgtggatgaaagcggggagattagagctactgccttcaatgagcaagtcgataaattctttccacttattgaagtcaataaagtttactacttctccaagggcacactgaagatcgccaataagcagtttaccgcagtgaaaaacgactacgagatgacttttaacaacgagacaagtgttatgccatgcgaggatgatcatcacttgccaactgttcagttcgatttcactggtattgatgatttggagaacaagagcaaagattcactggtggatatcatcgggatttgtaaatcatacgaagacgcgactaaaatcacagtcaggtcaaacaatcgggaggtggccaagcggaatatttatttaatggacaccagcggcaaagtggtgacagcaacgctctggggcgaggatgccgataaattcgacggatccaggcaaccggtcctggcaatcaagggagcaagagtctctgattttgggggtcggtcgttgtcagtcctgtccagctcgactataatcgccaatcctgatatccctgaggcttataaactgagagggtggttcgatgccgagggccaagcactggacggcgtttctatcagtgatttaaaaagcgggggtgtagggggttcaaataccaattggaagaccctgtacgaagtcaaaagcgagaacctcggccagggtgacaagcctgactatttcagcagcgttgctaccgtggtgtatttgagaaaggaaaactgtatgtaccaagcatgtcccacacaggattgtaacaagaaagtaatcgaccaacaaaacggattgtaccggtgtgaaaaatgtgatacagagttccccaactttaaatacaggatgatcttgtcagttaacatcgcggatttccaagagaaccagtgggtcacatgttttcaggaatccgccgaagccattctagggcagaacgcggcttacctgggggaactgaaagacaaaaacgaacaggccttcgaggaggtcttccagaacgcgaactttaggtcgtttatttttagagtgagggtgaaagtcgaaacttacaacgatgaatctcggatcaaggcaactgttatggacgtaaagcccgtggattaccgggaatacggaaggcgattggtgatgagcatcagacggtccgcactgatgtag

SEQ ID NO: 30608 - DNA, 2217 bp, synthetic construct
  misc_feature 1..2217: note = Description of Artificial Sequence: Synthetic coding sequence
  source 1..2217: mol_type = other DNA
atgacgtcaagtggacctggacctcggtttctgttgttattgcccctccttctcccgccagccgcttcggcttcagacagaccacgaggacgcgatcccgtgaatccagagaagctgttggtaataacggtagcaaccgctgaaacagagggttacctaagattcctccgtagtgctgagttcttcaattacacagtgcggaccttgggattgggcgaagagtggaggggcggagatgtggcaaggaccgtgggcggagggcagaaggtgagatggctgaagaaagagatggaaaagtatgccgaccgggaggatatgattattatgtttgtcgattcatacgatgtgatacttgcagggtcacctactgagttactgaagaagtttgtgcagtcaggttcaaggctgctgtttagcgccgaatctttctgctggcccgaatggggcctagctgaacaataccctgaggtggggactggcaagagattcttgaactcaggaggctttatcggattcgctactaccatccaccagatcgttaggcagtggaagtataaagatgacgacgacgaccagctgttttatactcggctgtatctggatcctggtctgagggaaaagttgtcgttaaaccttgatcataaatcccggatttttcagaacctgaacggagccctggacgaggtggttctgaagtttgatcggaatcgagttaggatccgcaacgttgcctatgatacacttcccatcgtggtgcacggcaacggtccaacaaagcttcagctcaactacctggggaactacgtgccgaacgggtggactcccgaggggggttgtggcttctgtaatcaggaccgccgaacccttcccggaggccagcctcctcctagggtgttcctggccgtctttgtcgagcagccaaccccttttctgcccaggtttctccagagactactgttgctggactaccccccagaccgtgttactttattcctgcataataacgaggtgtttcatgagcctcatatcgctgacagttggccacaactgcaggaccatttctctgccgtgaagcttgtgggtcccgaggaggcgctttcacccggtgaagccagagacatggctatggacttatgcagacaggatcctgagtgcgaattttacttctcactcgacgccgacgccgtcctaactaacttgcaaaccttacgcattttgatcgaggaaaatagaaaggtcattgctccaatgttgagtcgacatggcaagctgtggtctaatttctggggtgctctctctccagatgagtactacgcgaggtccgaggattatgtggagctcgttcagcgcaagcgcgtgggagtgtggaacgtgccttatatctctcaggcgtatgtgattagaggtgacactctgaggatggagcttcctcagcgggacgtctttagcggttctgacaccgatcctgacatggccttttgcaagagttttagggacaaaggcatcttcctccacctttccaaccaacatgagttcggcaggcttctggctacctctagatatgacaccgagcaccttcacccggatctttggcaaatcttcgacaacccagttgactggaaggagcagtacatccatgagaactactcaagggccctcgaaggagaggggatcgtggagcagccctgtccggacgtctattggttcccactgctgagcgaacaaatgtgcgacgaacttgtcgccgaaatggaacattatggtcagtggtcgggaggaagacacgaggattctcgactcgctgggggatacgagaatgtgcctacagtcgatattcacatgaagcaagtgggatacgaggatcagtggctacaactccttaggacctatgttggtcctatgaccgaatccctcttccctggttatcatactaaggctcgtgctgtgatgaacttcgtcgtgaggtataggccagatgagcagccttcattgaggccccaccatgactcgtctacgttcacgcttaacgtagctctcaaccacaaggggctggattatgaaggcggagggtgccgctttctgcgatacgattgtgtgatctcttcacctcggaagggatgggccctgttgcaccctggaaggctcacccattaccatgagggcttgcccacaacatggggcacccggtatatcatggtgtcctttgttgacccatag

SEQ ID NO: 30609 - DNA, 366 bp, synthetic construct
  misc_feature 1..366: note = Description of Artificial Sequence: Synthetic coding sequence
  source 1..366: mol_type = other DNA
atggtcgacatgatggatctgcctcggtcccgaatcaatgccggaatgctcgcccagttcatagataaacctgtttgttttgttggcaggcttgaaaagattcaccccaccggtaaaatgttcatcctttcggacggggaggggaagaatgggacaattgagttgatggaacccctagatgaagagatcagtggcatcgtcgaggttgtaggacgcgtgaccgccaaggccacaatcctttgcacctcttatgtgcagtttaaggaagatagccatcccttcgacctggggctctataacgaagccgtgaagattattcacgacttcccgcagttttacccattaggcattgtgcagcatgattag

SEQ ID NO: 30610 - DNA, 2787 bp, synthetic construct
  misc_feature 1..2787: note = Description of Artificial Sequence: Synthetic coding sequence
  source 1..2787: mol_type = other DNA
atgcctccaaaaacccccagaaaaactgccgctacggccgcagcagctgccgcagaacctcccgcacctccccctccaccacctcccgaggaagaccccgaacaggatagcggcccagaagacctgccactcgtccggctcgaatttgaagaaaccgaagagcccgacttcacggccctgtgccaaaaactaaaaatccctgaccatgtgagagagagggcctggcttacatgggagaaggtctcctccgtcgacggcgtcctcggcggatacatccaaaaaaagaaggaactatggggaatctgcatattcatcgccgcagtggacctcgacgagatgtcctttaccttcacagagctgcagaaaaatatcgagataagcgtgcataagtttttcaatcttctgaaagagattgatacatcaaccaaggtcgacaatgcaatgtctcgtcttctcaaaaagtacgatgtcctcttcgctctgtttagcaagctggagcgcacatgtgaactgatatacctgacccagccctcgtcgtcaattagcacggaaatcaacagtgccctagtcctgaaggtgagctggatcacattcttgctggccaaaggcgaagtgttacagatggaggatgacctggttatcagctttcagctgatgctctgtgtgctggattacttcatcaaactgtctccaccaatgctcttgaaggagccatataagactgctgttattcccattaatgggagtccacgcactcccagacgcggtcagaaccggtcagcccgaatcgccaaacagttagaaaacgacacgagaatcattgaggtgctctgtaaggagcatgaatgcaatattgatgaggttaagaatgtatatttcaaaaactttatcccatttatgaactcactcgggctggttacgagcaatggtttgccagaagttgaaaacctgtccaagaggtacgaagagatctatctgaagaataaggacctggatgctagactgttcctggaccatgacaagactttgcaaaccgatagtatcgatagcttcgagacgcagcgcacacctaggaaatctaatttagacgaggaggtcaatgttatcccacctcacaccccagtcagaaccgtgatgaatacaattcaacagctcatgatgatccttaattccgccagcgaccagcctagcgaaaatctgattagttattttaataattgtacggtaaatccgaaggagagcatactgaagcgcgttaaggatattggatacatcttcaaggagaaatttgcgaaagcagtcggccaaggatgcgtggagatcggttcccagaggtataaactcggggtgaggctctactacagagttatggagtcaatgctgaagtcagaggaagagcgcctcagcattcagaatttcagtaaactcctgaacgacaatatttttcacatgtccctcctggcctgcgctctggaggtcgttatggctacgtacagtcgttccacatcacaaaatctcgattccggcacggatttatccttcccttggattctcaacgtgctgaacctgaaggctttcgatttttacaaagttatagagtcctttattaaggcggaaggcaacctgacgcgagagatgatcaaacacttggagcgttgtgagcaccgcatcatggaatctctcgcatggctgagcgactctccactgtttgatctgattaaacaatccaaggaccgggagggccctactgatcacctggagtcggcttgtccgctcaacctccctcttcagaataaccataccgccgcagacatgtatctcagccccgtccgttcgccaaaaaagaaaggctccacaacaagagtgaactcaacggctaacgcagagactcaagctacatccgccttccagacccaaaagccactgaaatcgacctccctcagtctgttttataaaaaagtttatagactcgcttatctgaggctgaacaccctgtgtgaacggctgctgtcggaacatccggaactggaacatataatatggaccttgtttcagcatactctgcagaatgagtacgagctcatgcgggaccggcacctggatcagattatgatgtgttcgatgtatggcatctgtaaggtgaagaacatagacctgaagtttaagattattgtcaccgcgtacaaagatctgccccacgcggtccaggaaaccttcaagcgagtgttgatcaaggaggaggagtatgacagcataatcgtgttctacaatagcgtctttatgcaaagactgaaaaccaatatccttcagtacgctagcactcgtcctccaacgctgtcaccaattccgcatatcccccgtagcccctacaagttcccttcatcacctctgcgtatccctgggggaaacatttacatctctccactgaaatccccctataagatcagcgaaggcctgcctacccctaccaaaatgactccacgctcaaggatcctcgtgtctattggcgaatcttttgggaccagcgagaagtttcagaagatcaatcagatggtttgcaacagtgaccgggtgctgaagcgatctgcagagggaagcaaccctccgaagccactcaagaagctgcgcttcgacattgaagggagtgacgaggcagatgggtccaagcacctaccgggagagtctaaatttcagcaaaagctagcagaaatgacatccacccggactcgcatgcagaagcagaaaatgaacgattctatggacacctccaacaaagaggaaaagtag

SEQ ID NO: 30611 - DNA, 162 bp, synthetic construct
  misc_feature 1..162: note = Description of Artificial Sequence: Synthetic coding sequence
  source 1..162: mol_type = other DNA
atgcccccaaaaaccccaaggaagactgcggcaacagcagcggctgccgctgctgaaccacctgcacctcctccccctcctcctccagaagaggatccggagcaggattccggccctgaggacttgccactcgtccggggatccattaccaacggacgatag

SEQ ID NO: 30612 - DNA, 2724 bp, synthetic construct
  misc_feature 1..2724: note = Description of Artificial Sequence: Synthetic coding sequence
  source 1..2724: mol_type = other DNA
atgccccctaaaacaccaccccctgaggaagatcccgagcaagactctggtcctgaggatctcccactggtcagactggagttcgaagaaaccgaagaaccagacttcaccgctctgtgtcagaaacttaagattcccgatcacgttcgggagcgagcgtggttgacgtgggaaaaagtttcatctgtggatggcgtgttggggggatacatacagaaaaaaaaggagctttggggcatttgtattttcatcgccgcagtcgacctcgatgagatgagctttacgttcactgaattgcagaagaatatcgaaatttctgtacacaagttctttaacttactgaaggagatcgacacctctacaaaggtggataatgcaatgagcaggcttctgaaaaaatacgacgttctgtttgcgctcttcagcaaattagagcgcacatgcgagctcatttacctcacacagccttcctcctctataagcacagagatcaactccgcacttgtgttgaaggtctcatggattacctttctgctggcaaaaggtgaagtgctacagatggaggacgacctggtcatctcctttcagctcatgctttgtgtgctcgactactttatcaagctttcacctcctatgcttctgaaggagccctataagaccgctgtcatccccattaatggatctcctcgaaccccacggagagggcagaatcgcagtgcacggatagctaaacaactggaaaatgacaccagaataattgaggtgctgtgcaaagagcacgagtgcaacatcgacgaagtaaaaaacgtttactttaagaactttattccattcatgaatagcttgggtttggtcacaagtaatggtctgccagaggtggaaaatcttagcaagaggtacgaagagatctacttaaagaataaagatcttgacgcacggctctttttagatcatgataagacactgcaaaccgattcaatcgacagcttcgagacacaacgtactcccaggaagtctaacttggatgaggaggtcaacgtgatccccccacatacgcctgtgcgcacagtgatgaacacgattcaacaactgatgatgatcctaaactctgccagtgatcagcctagcgagaacctgatctcctattttaacaattgcactgtcaaccccaaggagtctatacttaagagagtcaaagacattggttacatcttcaaagagaagttcgctaaagctgtcggccagggctgtgtggagattggctcacagcgctacaaactgggggtgcggctgtattacagggtgatggaaagtatgctgaagagtgaggaggaacggctgtccatccagaatttctccaaactgttgaatgataacatttttcatatgtcattgttggcatgcgcgctggaagtggtaatggctacatacagtcggtcaaccagccagaatttagactccgggaccgatctcagttttccgtggattcttaacgtcctgaatcttaaggcgtttgatttttacaaggtcatcgaaagttttatcaaggcggaggggaacttgacgcgcgagatgatcaaacacctggaaaggtgtgagcatagaataatggagagtttggcttggttgagcgactctccattgttcgacctgatcaagcagagtaaagacagggagggaccgactgatcatcttgagagcgcatgccccctcaaccttccgctgcagaacaatcatacagccgcagatatgtatctctcccccgttcgttcgcctaagaagaaaggctccacaacccgcgtgaatagcaccgccaatgccgaaacccaggcaacgagtgcgtttcagacccaaaagcctctgaagtctactagtctaagtctgttttacaagaaggtctacaggctggcctaccttcgtttaaatacactgtgcgagcgcttgctatcagaacaccctgagctcgaacatatcatttggacattgtttcaacacacactgcagaatgagtatgagctcatgagggacaggcacctggaccagatcatgatgtgttctatgtacgggatctgtaaagttaaaaacatcgatctcaagtttaagattatcgttacagcctacaaggacctgccacacgccgtgcaagaaaccttcaaaagagttcttatcaaggaggaagaatatgactctatcattgtcttttacaactccgtatttatgcagcgactcaaaactaacatcctccagtacgcctctactcggccaccgaccctgagcccgattccacatatccctaggtccccctataaatttccaagttccccgctgcgaataccagggggaaacatctacattagtcccctgaagagcccgtacaaaataagtgaaggcctgcctaccccgacgaagatgacaccgagatcaaggattctggtgagtattggtgaatccttcggaactagtgaaaagtttcagaaaattaaccaaatggtgtgcaactccgatcgtgtcttaaaacggtctgccgaaggttccaaccccccaaaacccctgaaaaagctgcgtttcgatatagaggggtccgatgaagcggacgggtccaagcacctgcccggagaatccaagttccaacagaaactggccgagatgacgagtacacgcacaagaatgcagaaacagaagatgaacgattctatggatacatccaacaaggaggagaaatag

SEQ ID NO: 30613 - DNA, 2694 bp, synthetic construct
  misc_feature 1..2694: note = Description of Artificial Sequence: Synthetic coding sequence
  source 1..2694: mol_type = other DNA
atgaatatcagtggtagcagctgtggatcccctaatagcgccgatacttcctcggattttaaggacttatggaccaagctgaaggagtgtcatgatagggaggttcagggcctccaggttaaagtgactaaactgaaacaggagaggatcctagatgcacagcgcctggaggagttcttcacaaagaaccagcagcttcgagagcaacagaaagtattacatgaaactattaaggtgctggaggaccgactgcgcgcagggctctgcgacagatgcgcagtgacagaagagcacatgcggaaaaaacagcaggaatttgagaacatccgccagcagaacttgaagctgattaccgagctgatgaacgaacggaacaccttacaggaggagaacaaaaagctgtctgagcagttgcagcagaagattgagaacgaccagcaacaccaggccgctgaactggagtgtgaagaggatgtgataccagacagccctataacggcattctcctttagcggagttaatcggctcagacgcaaggagaatcctcacgtccgttatatcgaacagacccacactaaactggagcattcagtgtgcgcaaacgaaatgcgtaaggtcagtaaatcaagcactcatcctcagcacaaccctaatgagaatgaaattcttgttgcagatacctatgaccaatcccagagccccatggctaaggcccacggtactagtagttacaccccggataaaagctctttcaacttagccacggtggtcgcggagacgcttgggctcggcgtgcaggaagagtctgaaactcaggggccaatgtctcccctgggtgatgagttatatcactgtctcgaaggaaaccataaaaagcagccttttgaagaaagtacgcggaataccgaggactccctgcggttcagtgacagcacctcgaaaacacccccacaagaggagctcccgacccgcgtgtcctctcccgtgttcggcgcaacgagcagcattaagtcgggacttgacctgaacaccagcctgtccccgtcacttctccagcctggaaaaaagaagcaccttaagacactccccttctcaaacacctgcataagccgcctggaaaaaactcgctccaaaagtgaggacagcgcactgttcacacatcatagtctgggctcagaggtgaataaaatcatcatacagagtagcaataagcagattctaattaacaagaacattagcgaaagtctcggggagcagaatcggaccgagtacgggaaagacagtaacactgataaacaccttgaaccactgaaatccctgggtggacggacttcaaagcgtaagaaaactgaggaagaatcagaacacgaagtgtcctgcccgcaagcctcctttgataaagagaatgcctttccttttcctatggataatcagttcagcatgaatggggattgtgtgatggataagcctctggatctttccgaccgatttagtgcaatccagagacaagaaaaatcccagggttcagagaccagtaaaaacaaatttagacaggtaacactatacgaagccctgaagacaatccccaagggattttcctctagccgaaaagcctcagatggcaattgcactcttcctaaggatagtcctggggagccctgtagtcaggaatgtattatactgcagcctctgaataagtgttctccagacaacaagcctagtctgcaaattaaagaggaaaatgcagtctttaaaatccctctgcgtcctcgggagtccctggaaacggagaacgtcctcgacgacatcaagtccgctgggtcccacgagcccataaaaattcaaacaaggtctgaccacggcggatgcgagttggcgagtgtgctgcagctcaatccctgtcggacaggaaaaatcaagagtctccaaaacaaccaggacgtgagctttgagaacatccagtggtctatcgatccgggagctgacttaagccagtataaaatggacgtcacggtgatcgacaccaaggacggatcccagagcaagctggggggtgaaaccgtggacatggattgcacccttgtgtcggagacagttctgctcaagatgaagaagcaggagcagaaaggcgagaagtcctctaatgaagagagaaaaatgaatgattctctggaagacatgttcgaccggaccacacatgaagaatacgaaagctgcctagctgacagtttttctcaggcagctgacgaagaagaagaactgtccactgccactaagaaattacacactcacggagacaagcaggacaaggtcaagcagaaggcatttgtggaaccctactttaagggcgatgagagggagacttcactccaaaattttccgcatattgaggtggtgaggaaaaaggaggaaagacgaaagctgctaggtcacacctgtaaagagtgtgaaatttactacgcagatatgccggctgaagaaagagagaagaagcttgcctcctgcagtaggcaccggttccggtacattccacccaatacacctgagaatttctgggaggtggggttccctagcacccagacttgcatggagcggggatatataaaggaagatttggacccttgtccccgtccgaaaagaaggcagccgtacaacgctattttctctcccaaaggcaaagagcagaaaacctag

SEQ ID NO: 30614 - DNA, 2709 bp, synthetic construct
  misc_feature 1..2709: note = Description of Artificial Sequence: Synthetic coding sequence
  source 1..2709: mol_type = other DNA
atgaacatcagcggatcatcatgtggaagccctaatagtgccgacacatcttctgattttaaagacttgtggactaaactgaaagagtgccacgatcgcgaagtgcaagggctccaagtgaaagtgaccaagttgaaacaggaaagaatcctggacgcccagcggctggaagaattttttacgaaaaaccaacaactgagagagcagcaaaaggttctgcacgagacaatcaaggttctcgaggaccggcttagagcgggactgtgtgaccgctgcgccgtgacagaagagcacatgcgcaaaaagcagcaggaattcgagaatatcagacagcagaatctgaagctcatcactgaactaatgaacgaaagaaatacacttcaggaagagaacaagaaactcagtgaacagttgcagcagaagatcgagaatgaccagcaacatcaggcagccgagctggagtgcgaagaggatgtgatccctgatagcccaattacagcgttttcatttagcggtgtgaaccgtcttcgtcggaaggagaatcctcacgtaaggtacattgagcagacccataccaaattggagcattcagtctgcgcaaatgaaatgaggaaagtgtccaagtcatccacacaccctcaacataatcccaatgaaaacgaaatcttggtggcggacacctatgatcagagtcagtctcccatggccaaggcacatggaacatcatcttataccccagacaaatcatcttttaatctcgccactgtcgtggctgaaaccctgggtctgggtgttcaagaagaatcagagacccaggggccaatgtcacctcttggggatgagctgtatcactgtttggaggggaatcataagaaacagccatttgaggaatctactcggaacacagaagattccttaagattttcggactcgacctcaaagacacctcctcaggaggagctgccgacaagagtgagttctccagtttttggcgctacatcatctattaaaagtggccttgacctgaacaccagcctcagtccaagcctgctgcagcctggaaagaagaaacacctcaagacactcccatttagcaatacctgcatctccagactggaaaaaacccgaagcaaatcagaagactcagccctgtttacacaccactctctgggcagcgaggtgaacaagataataatccagtcaagcaacaaacagattcttataaataaaaatatcagtgagagcctaggcgaacagaaccgcaccgagtacggaaaagattccaacactgataaacacctagagcccctcaagtccctcgggggacgcacgtcaaagaggaagaaaacagaggaggagtcggagcatgaagtcagctgtccgcaggcctcattcgataaagagaacgcttttccttttcctatggacaatcagttttctatgaatggagactgcgtaatggataaaccactggatctgagtgatcgattcagtgccattcagaggcaagagaaatcccaggggtctgaaacatccaagaataaatttaggcaggtgacgttatacgaggcactcaagacaattccaaaggggttctcctcttccagaaaggcctccgacggcaactgtaccttgcccaaagactctcccggagagccctgtagtcaggagtgtattatccttcagccacttaacaaatgctcccccgacaataagcccagtttgcaaatcaaagaagagaacgcagtgttcaaaattccattacgcccacgggaaagccttgagaccgagaacgtgcttgacgacattaagagcgcagggtcccacgagccaattaagattcagactcgctctgaccacggtgggtgtgagcttgcatcagtccttcagctgaacccatgccgaacaggaaaaatcaaatctttgcagaataatcaagacgtttcttttgaaaacatccaatggagtattgaccctggagcagatctatctcagtacaaaatggatgttaccgtcattgatacgaaagacggctcccaaagtaagctagggggtgagactgtcgacatggactgcacgcttgtgtccgagaccgtgctgctaaagatgaagaaacaggagcaaaaaggggagaagtcctctatgcttttctacatagacgaggagcggaagatgaacgattctctagaggacatgttcgaccgcactacccatgaggaatacgagtcctgcctggcggactcttttagtcaagcagcagacgaggaggaggaactttctactgcaactaaaaaactccacacgcatggggacaagcaagataaagtgaaacagaaagcctttgtggagccttatttcaagggcgatgaacgggagactagtttgcagaactttccccacatcgaggttgtccgtaaaaaggaggaaagacggaaactgcttggacatacgtgcaaagaatgtgaaatttactatgcagatatgccagccgaggagcgggagaaaaagcttgctagctgttcccggcacagatttaggtatatcccacccaacacacccgagaacttttgggaggtcggcttccccagcacacagacgtgtatggaaagaggatatatcaaggaagatctggacccttgtcctaggcccaagaggcggcagccgtacaatgccatcttctcacccaagggaaaggaacaaaagacgtag

SEQ ID NO: 30615 - DNA, 2598 bp, synthetic construct
  misc_feature 1..2598: note = Description of Artificial Sequence: Synthetic coding sequence
  source 1..2598: mol_type = other DNA
atgaacatctcaggtagctcttgcggttcacctaactctgcagatacctcgagcgattttaaggatttatggactaaactgaaagagtgccacgacagagaagtccagggactgcaggtgaaagtgaccaaactaaagcaggaacggattcttgacgcccagagactggaggaatttttcactaagaaccaacagctacgcgagcaacaaaaggtcctccatgaaaccattaaggtactcgaagatcggttgcgggctggcctgtgtgacagatgtgcagtaacagaggagcacatgaggaagaaacagcaggagtttgaaaacatcaggcagcagaacctgaaactcattaccgagctgatgaacgagagaaatactcttcaggaggagaacaagaagctctcagaacagctccagcagaaaatagaaaatgatcagcagcatcaagcagctgaacttgagtgtgaggaagatgtgattcccgattctcctattaccgcattttcattttcgggcgtgaacaggctccggagaaaggagaaccctcatgtgcgttatatcgaacaaacccacaccaagctcgaacactcggtgtgcgccaatgaaatgcggaaagtctccaagagtagcactcaccctcagcataatcctaacgagaatgagattctggtggcagacacatatgaccagagccaaagccctatggctaaggcacacggaactagttcttatacacctgataaatcatcatttaacttggccaccgttgtcgcagagacactgggactcggggtgcaggaagaatccgagacgcaggggcctatgtctcccctaggagatgagttataccactgcttggagggtaatcacaagaaacaacctttcgaagagtccaccaggaacaccgaagatagcctgcggttcagcgattccactagcaagacacccccacaggaggaactaccaactcgggtttcatcaccggttttcggagcaacttcctctatcaagagcggactggatctcaatacctcactctccccgtcactgttgcaaccaggcaagaaaaaacacctcaagacccttccctttagcaatacctgtatcagtcggttggagaagactcgctccaaatctgaagattccgctttatttactcatcactcccttgggtcggaggtgaacaagattatcatccagtcctcaaataagcaaatcctgattaataaaaacattagcgaatcactgggcgagcagaatcgaactgaatacggcaaagacagcaatacagataagcatctggagcccctgaaatccctcggaggaagaacatcgaagcggaagaagacagaggaggaatccgagcatgaggtgagctgcccgcaggcttcctttgacaaagagaatgctttccccttccccatggacaatcagtttagcatgaacggagactgcgtgatggacaagcctttagatcttagcgataggttcagtgccattcaaaggcaggaaaaatcccagggtagtgagacctcaaaaaataaattcagacaggttacattgtacgaagctctgaaaactattccaaagggctttagctctagcaggaaggccagcgatgggaactgtacgctgccgaaagactccccaggggaaccttgtagccaggaatgcattatactgcagcctctcaataaatgctcccctgataacaagccttcattgcaaatcaaagaggaaaacgccgtgttcaagataccactgaggccacgggaaagtctcgagacagaaaacgtcctggatgacattaaatctgccggttcacacgaaccgattaagatacaaacacgatctgaccacgggggatgtgaactggccagtgtcttgcaacttaatccgtgcagaaccggcaaaatcaaatccttgcagaacaatcaggacgtgagcttcgagaacattcagtggagcattgaccctggagctgatctgtcccagtacaagatggatgtgactgtgattgacacgaaggacggttcacagagcaaactgggtggcgagacagttgacatggactgtacattagtgagcgaaactgttttactaaagatgaaaaagcaggagcagaaaggagagaagtcatccaacgaggagaggaaaatgaacgacagtctcgaagacatgtttgatcggaccacacatgaagagtatgagtcctgcctggccgatagcttttctcaagctgccgacgaagaagaggagttgtctacggcaaccaagaagctgcatacgcacggtgacaaacaagataaagtaaagcagaaagcctttgtggagccctacttcaaaggggacgagtccatcatgcagatttgccagcagaaaaaagaaaaacgaaactggcttcccgctcaggatacagattccgccacattccatccgacccaccagaggatcttcggaaagctggtgttccttcccttacgtttggtgtggaaggaggtgatccttcggaagattctgatcttggtgctcgtccagaaagacgttagtctcacgacacagtactttctgcagaaagcaaggtcaaggagacactag

SEQ ID NO: 30616 - DNA, 2694 bp, synthetic construct
  misc_feature 1..2694: note = Description of Artificial Sequence: Synthetic coding sequence
  source 1..2694: mol_type = other DNA
atgaatatctcgggctcgtcctgcggaagccctaactcagccgacacctcaagtgactttaaggatttgtggaccaaattgaaggagtgccacgaccgggaggtgcagggactccaggtgaaggtaaccaaactgaaacaggagcgcattctggacgcccaaaggctagaggagttcttcaccaaaaatcagcagctcagggagcaacagaaggtgctgcacgaaaccatcaaagttttagaagatcgattacgagctgggctgtgcgacaggtgcgccgttacagaagagcacatgcgtaaaaaacaacaggagttcgagaacattagacagcaaaatctcaagctgattactgagctgatgaatgagaggaacaccctgcaagaagagaataaaaaactgagcgagcagctgcagcagaagattgagaacgatcagcagcaccaggcggctgagctggaatgtgaggaagatgtgattcccgatagccctataactgccttcagcttcagcggcgtgaacaggctccgcagaaaagaaaacccccacgtgcgatacatcgagcagactcacactaaactggaacacagcgtttgcgccaacgaaatgcgcaaggtgagcaagtccagcacacaccctcagcacaatcctaacgagaacgagatcctggtcgcagacacgtacgaccagtcccagtccccaatggcaaaggctcacggcaccagctcatacacccccgacaaatcttcctttaacctcgcgacagttgtcgccgagactcttgggcttggcgtgcaggaggagagcgaaacccagggccctatgtctccactgggcgatgagttgtaccattgcttagaggggaaccataaaaagcaaccattcgaggaatccacacgaaacaccgaggacagcttacggttctccgattcaacctcaaagaccccacctcaagaggagctcccaactagagtgtcatctcccgtattcggcgcaacatcatccataaagtctggtcttgatcttaacacaagcctgagtcctagcctcctgcagcccggaaagaaaaagcacctcaaaaccctccctttcagtaatacttgcatcagccgtctcgagaagacgagatccaagtctgaggattccgccctcttcacgcatcattccttgggtagcgaagtgaataagatcataatacagtcttccaacaagcagattcttatcaataagaatatcagcgaatccctgggagaacagaataggaccgagtacggaaaagattccaacacagataagcacctcgaaccactgaaatctctggggggtaggacctccaagcggaagaaaacagaggaggaatccgagcacgaagtctcatgtccacaggcgagctttgacaaggagaatgcctttcctttcccaatggacaaccagttttctatgaacggggattgtgtcatggataaacccctggatttgagtgaccgcttcagtgcgattcaacgtcaggagaagtcgcagggttcagagacttcgaagaacaagttcagacaggtcacgttgtacgaggctctgaaaacaattcccaaggggttttccagttccaggaaagccagtgatggaaattgtaccctccctaaagacagtccgggtgaaccttgctcgcaggaatgtattatcctgcagcctctgaataaatgctcccctgataacaaaccgagtctacagatcaaagaggagaacgccgtattcaaaataccactgcgccctagggagtccctggagacggaaaatgtcctggatgatatcaagtctgccggtagccacgaaccaattaaaatccagacacggtcggatcatggaggctgcgagctggcgtctgtgttgcagctgaatccatgtcgcactgggaaaattaagtcattgcaaaataaccaggatgtaagtttcgagaacattcagtggtctatagaccccggagcagacttatcgcagtataaaatggatgtcacagtgatcgatactaaagacggcagccagagcaaattggggggtgagacagtggatatggactgcaccctcgtaagcgagactgtattactaaaaatgaagaagcaagagcagaagggagaaaaatcaagtaacgaggaaaggaagatgaatgattcactggaagatatgttcgacagaactacccatgaagagtacgagtcctgcctcgcagacagcttctctcaggctgcagatgaagaggaagagttgagcaccgcaaccaaaaagctacacactcatggcgataaacaggataaggtgaaacaaaaggcgtttgtggagccctatttcaagggcgatgaacgcgaaacgtccctgcaaaactttcctcacatagaagtggttagaaagaaagaggagagacggaaattgctcggccatacgtgcaaggaatgcgagatctattatgccgacatgccagccgaagagagagagaagaagctggcatcttgttctcgacacaggtttcgttatattccgccaaatacacctgagaatttctgggaggtgggcttcccctcaacacagacatgtatggagaggggctacattaaagaagatctggacccctgtcctcggccaaagcggcgtcagccctataacgctatctttagcccaaagggaaaggaacagaagacctag

SEQ ID NO: 30617 - DNA, 2604 bp, synthetic construct
  misc_feature 1..2604: note = Description of Artificial Sequence: Synthetic coding sequence
  source 1..2604: mol_type = other DNA
atgaacatctccggctctagctgtggttccccaaactccgccgacacgtcctcagatttcaaagacctgtggactaaactgaaagagtgccacgacagagaagttcaaggcttacaggtgaaagtgaccaagttgaaacaagagcgaatcctggatgctcagcggctcgaggaattttttaccaagaatcaacagctaagggagcaacagaaggtcctgcacgaaacaatcaaggtgctcgaagaccgattgcgggcaggcctgtgcgacaggtgtgccgtaaccgaggaacacatgaggaaaaaacagcaggaattcgaaaacattcgacagcagaatcttaaactgataactgagctaatgaatgagcgaaataccttgcaggaagaaaataaaaaactgagcgagcagcttcagcagaaaattgagaatgatcagcagcatcaggctgctgagctggaatgtgaggaggacgtaatcccggattcgcctattaccgcattctcttttagcggcgttaatcgcctacgccgaaaagagaatcctcacgtgaggtatattgagcaaacacacactaaactggaacacagcgtgtgcgccaacgagatgcgcaaagtgtccaagagtagcacccacccccaacataatcccaacgagaacgagatcttggtagcagacacctatgatcagtcccagtctcctatggccaaagcacatggtacctctagctatacccccgataagagctccttcaacctcgcaacagtagtagctgaaaccctgggtcttggagtgcaagaggagtccgagacgcaggggcctatgagcccactgggtgacgaactgtaccactgtttggagggcaatcataagaaacagccttttgaggagtccacccgtaatacggaggattccctcaggttttccgactcaacttcgaaaacaccgcctcaggaggaattgccaactcgtgtgagctccccggttttcggagccaccagctccatcaaatctggacttgacctgaatacctctctgtccccctctctgctgcagccagggaagaaaaagcacctcaaaaccctccccttttctaacacttgcatctccagattagaaaaaactagatctaagagtgaggactccgcattgttcacacaccactcacttggtagtgaagtgaacaagattattatacagtcgtctaacaagcaaatccttataaacaaaaatatcagcgagtcactaggggaacaaaaccggacagaatatggtaaagattccaataccgacaaacaccttgaaccattaaagtccttggggggacgcacctccaagcgcaagaagacagaagaggaaagcgaacacgaggtgagctgcccacaggccagcttcgataaagaaaatgcattcccattcccaatggataatcagttttctatgaacggggattgcgtgatggataagccgctcgacctatctgatagattttccgcaatccagcgccaggagaagtctcaaggtagtgagacatcgaagaataaattccgacaggtgacactttacgaggctctcaagacaattccaaaagggttctccagcagtcgtaaggcaagcgatggtaactgtaccctgcccaaggatagccctggagagccatgttcccaggagtgcatcatattacagccccttaacaagtgctctcccgataacaaaccctcactccagattaaggaggaaaacgctgtttttaaaattcctttaagaccacgagagtctctcgagacagagaacgtcctagatgacataaagtccgctggatcacacgaaccaattaaaattcagacacgcagcgaccatgggggatgcgaacttgccagtgtcctgcaattgaacccctgtaggactgggaagatcaagtcgctgcaaaataaccaggatgtgagtttcgaaaacatccagtggtcgatcgatccaggagctgatctttcccaatacaagatggacgttaccgtaatcgatactaaagacggtagccagagcaagctgggcggtgagaccgtcgatatggactgcacactagtttctgagaccgtgctgttaaaaatgaagaaacaggagcagaaaggcgaaaaatcctctaacgaggagaggaaaatgaatgattcactggaggatatgtttgataggaccacacacgaagaatatgaatcatgtctggctgactccttttctcaagccgcagatgaagaggaggaattgtccacagccacaaaaaagctgcacacgcacggggataaacaggataaagtgaaacagaaagcatttgtcgagccctactttaaaggtgacgagtcaatcatgcagatctgccaacagaaaaaagagaaaaggaattggctgcccgctcaggatacagatagcgcaacatttcaccccacgcatcagaggatatttggaaagctggtgttcctgcccctgaggctagtctggaaggaggtgattcttcgtaaaatcttgatcttagtgctagtgcagaaggatgtctccctgacaactcagtactttcttcagaaagccagaagcaggaggcaccggcgatag

SEQ ID NO: 30618 - DNA, 3045 bp, synthetic construct
  misc_feature 1..3045: note = Description of Artificial Sequence: Synthetic coding sequence
  source 1..3045: mol_type = other DNA
atgtttgaagataaaccccacgccgagggggcagctgtagtggcggctgctggcgaggccctccaggctttatgccaagaacttaatctagacgagggatcagcagcagaagctctggatgactttacagccattcggggaaattatagcctggaaggcgaagtgactcactggctggcttgttccctgtatgtagcctgccgtaaatccatcataccaaccgtcggtaaaggaattatggaggggaactgcgtatctctgacccgcattctgagatcagcgaaactgtctctcatccagttcttctctaagatgaagaagtggatggatatgagcaatttgccccaggaatttagggaaagaatcgaaagactcgaaaggaacttcgaggtgtcaactgtgatattcaagaagtatgaaccaatctttttggatatcttccagaatccctatgaggaacccccaaaattgccaagatctcgcaagcagcgcaggatcccttgcagcgtgaaagacctttttaacttttgttggacactgttcgtgtataccaagggaaattttagaatgattggggacgacctggtgaacagctaccacctcctcctctgctgtttggacctaatattcgccaacgctattatgtgccccaaccgccaggacctgctgaatccctcgttcaagggacttccgagcgatttccacacagcagactttaccgctagtgaagagcctccgtgtatcattgctgtgctatgcgaactgcatgatggtctgttagtggaggctaagggtattaaggaacattatttcaagccatatatcagcaagctatttgaccgcaaaatcctaaaaggggagtgccttctagacctatctagctttaccgacaactctaaggcggtcaataaagagtacgaagaatatgtgctgacggtgggagacttcgatgagaggatcttcctcggcgctgacgccgaggaagaaatcggcacccccagaaagttcacccgagataccccgctcgggaagctaactgcccaggcaaacgtcgaatacaatctccagcagcactttgaaaaaaaacggagtttcgcaccctctacccctttgactggacggcgatacttgcgagaaaaggaagctgtcattacgccagttgcgtccgcaacacagagcgtctcccgccttcagtccattgtcgcgggattgaagaacgccccatccgaccaactgatcaatatttttgagtcttgtgtgagaaatcccgttgagaacataatgaagatactgaaaggcatcggagagacattctgtcagcactacacacagtctactgatgagcagccgggaagccacattgatttcgctgtcaatcgcctgaagttagctgagatcctgtactacaaaatactcgaaaccgttatggtgcaggaaactagaagattacacggaatggatatgagcgtcctactcgagcaggatattttccacagaagcttaatggcgtgttgtcttgaaatcgtattattcgcctattcctctcctagaacttttccatggatcattgaggtccttaatttgcagcccttttatttctacaaggtgatagaggtggtaattcgcagcgaagaaggcctgtcacgggatatggtgaagcacctaaatagcatcgaggagcagatcctcgaaagccttgcttggtcgcacgatagtgccctatgggaggctctccaagtaagcgcaaacaaggttccaacgtgtgaggaggtcatattccccaacaacttcgaaactggcaacgggggtaacgtgcagggccacctgcctttaatgcccatgtcccctctgatgcacccacgcgtgaaggaggtcaggaccgacagcggttccctgcgccgtgacatgcagcccttgagcccaattagtgtgcacgaacggtattcgtcaccgactgccggaagtgcaaagaggcgactgtttggagaggaccctcccaaggagatgctgatggacaaaataatcactgaagggaccaagctcaaaattgcaccctcaagctccatcactgcggagaatgtgtccattctccctggacagacactgctcactatggccacagccccagttacaggcactaccgggcataaagtgaccatcccactacacggagttgcgaatgacgccggagaaatcacccttatcccgctgagcatgaacactaaccaggaaagtaaggtcaaatctcccgttagcctcactgctcacagcctgataggggcatctccaaagcagaccaatctgactaaagcacaggaagtacactccactgggatcaaccgtccaaagcgtactgggagtcttgccctgttttaccggaaagtttaccatctggcaagcgtgcgtctgcgagacctgtgtctaaaactggacgtcagcaacgagctacggaggaagatctggacctgctttgagtttaccctcgtacactgtcccgatttaatgaaagatcgacacctggaccagctcctgctgtgcgccttctatatcatggccaaagtcactaaggaggagaggacatttcaggagattatgaaaagctatagaaatcagccacaggctaattcccacgtgtaccgatctgtgctgctgaagtcaatccctcgcgaagtggttgcatacaacaaaaatatcaatgacgatttcgagatgatcgattgcgatctagaggatgccaccaaaacccctgactgctcctcagggcctgtaaaagaagagagaggggacttaatcaagttttacaacacaatctatgttggacgcgtgaaatcatttgctttaaagtacgacctggcgaatcaagatcatatgatggacgcacctcctctgtcaccatttccacatataaagcagcagcctggttcccctcgtaggatctcccaacagcattcgatctacatcagtcctcataaaaatggcagtggcctcacaccccgttctgccctcctatacaagttcaatggatctccttcaaaagttcgctag

SEQ ID NO: 30619 - DNA, 3207 bp, synthetic construct
  misc_feature 1..3207: note = Description of Artificial Sequence: Synthetic coding sequence
  source 1..3207: mol_type = other DNA
atgttcgaagacaagccacacgcagagggggcagccgtcgttgcggcagctggggaagctctgcaggctctgtgtcaggagctgaatctagacgagggatctgcagccgaggcactggacgattttactgcaatcaggggaaactattctctcgagggtgaagtcactcattggctcgcttgctcactgtatgtagcatgcagaaagtcgattattcctactgttggaaagggaatcatggaaggaaattgcgtgagtttgactcgaatcttaagaagcgccaaattatctctaatccagtttttcagcaagatgaagaaatggatggatatgtcgaatttgcctcaggaattccgggaacgaattgagcggctggagcggaacttcgaagtgtctaccgtgatctttaagaaatatgaacctattttcctcgacatcttccagaatccctacgaagagccaccaaagctgccgaggtctcggaaacaaagaagaataccttgcagtgtgaaagacctctttaatttctgttggaccctgtttgtctatactaaaggtaactttaggatgatcggcgatgatttagtaaactcatatcatcttttgctgtgctgtctcgatcttatctttgccaacgccataatgtgccctaacaggcaggatttgttaaacccatcctttaaaggactccccagtgacttccacacagccgattttacagctagtgaggaacccccttgtattattgccgtgctatgcgagctccacgatggcctactcgtggaggctaaaggaattaaagagcactactttaagccatatatttccaagcttttcgacagaaagatcctcaagggggagtgcctgctcgacctgtccagtttcaccgataattctaaagcagtgaacaaggagtacgaagaatatgtgctgactgttggagattttgacgaaagaattttcctcggggctgacgccgaggaagaaattggtacacccagaaaattcactagagacaccccactgggtaaactcacggcccaggcaaatgttgaatataatcttcagcagcacttcgaaaaaaagcgcagttttgccccttccaccccattaaccgggcgtcgctatctgagagagaaagaggcggtgattacacctgtcgccagtgccacacagtcagtcagccggttgcagtccattgtggcgggtctgaaaaatgcaccctctgaccagttgattaatatttttgaatcatgcgtaagaaacccagtggagaatatcatgaagatcctcaaggggatcggggagactttctgccagcattatacccagagcacagacgaacagcccggatcccacatcgacttcgcagtgaatcggctgaagctggccgagatattgtactacaaaatcctcgaaaccgtcatggttcaagagaccaggcgactccacggcatggatatgtctgtacttcttgagcaggacattttccaccgaagcctgatggcatgttgccttgaaattgtattattcgcttactcctctccacggactttcccatggatcattgaagtgctgaacttgcagcctttctatttctacaaagtgattgaggtcgtaattcgctctgaggaggggctctcaagggatatggttaagcatctgaactccattgaggagcagatcctcgaatcactggcatggagtcacgactctgccctgtgggaggcccttcaagtcagcgccaacaaggtacctacatgtgaggaagtaatcttccctaataattttgaaactggcaatggcggtaatgtgcaaggccacctaccgctgatgccaatgtctcccttgatgcacccgagagtgaaggaggtccgaactgactcaggttccctgagacgggacatgcaaccactgtctccaatcagcgtgcacgagcggtatagtagccctactgccggaagcgcgaaaaggagactttttggcgaggaccccccaaaggaaatgctcatggacaagatcattactgagggcacaaaactgaaaatagctccctcgtctagtattactgcggaaaatgtgagtattttgccagggcagaccctgctgaccatggccactgcccctgtgactggcactacaggtcacaaggtaacaattccactgcacggcgtggctaatgacgccggtgaaattaccctgatccccttatcgatgaacacaaaccaggagtctaaggtgaaatcccccgtctccctgacagcccattctctcattggcgcaagccccaagcagactaatctgactaaagcccaagaggtgcactccacaggtatcaaccggcctaagagaacgggcagcctcgctctgttctatagaaaagtgtatcatctcgcctctgttcgcctgagggacctgtgtctcaagctcgatgtatctaatgaactacgcagaaaaatctggacctgctttgagttcacgctggtacactgcccggatttgatgaaggacagacatcttgaccagctcctcctgtgcgccttttacatcatggcaaaggttaccaaggaagagcgtacatttcaggaaatcatgaagagctaccgcaaccagccccaggccaatagtcatgtgtacagaagcgtactcctgaaatccatcccaagagaggtggttgcatataacaagaatattaacgacgacttcgaaatgatcgattgtgacctcgaggacgccacgaagactcctgactgcagtagcggcccagtcaaagaggagaggggtgatctgatcaagttttataataccatctacgtcggtagggttaaatccttcgccctgaagtacgacctggctaaccaggaccatatgatggatgctccaccactgtctccgtttccgcacattaagcaacagcctggttccccgagaaggattagtcagcagcacagcatttacatttctccccacaaaaacggcagtgggctcacccctcggagtgcgcttctgtataagtttaacggtagtccgtcgaagtcccttaaggacataaacaatatgatacggcaaggcgagcagcgtaccaagaaaagagttatcgctattgactctgacgctgagtcccccgcaaagcgggtttgtcaggaaaacgacgatgttctgttgaagaggcttcaggatgtggttagcgaacgggctaatcactag

SEQ ID NO: 30620 - DNA, 3420 bp, synthetic construct
  misc_feature 1..3420: note = Description of Artificial Sequence: Synthetic coding sequence
  source 1..3420: mol_type = other DNA
atgccgtcaggaggtgaccagagcccccctccaccaccccctcctcctgcagcggctgcttcagacgaagaagaagaggacgacggggaagctgaagatgccgctccccctgcagaatctcctactccacagatccagcagcggtttgacgagttgtgtagccgcttgaacatggatgaggcagcacgggctgaggcttgggattcctataggtctatgtctgagagctacacactagagggaaatgaccttcactggctggcgtgtgccctgtatgtggcatgccgcaagtcagtgccgaccgtaagtaagggtaccgtcgaagggaactacgtttccctgactaggattttaaagtgctccgaacagtcgctcatcgagttcttcaacaaaatgaagaagtgggaggacatggccaacttgccccctcacttccgcgaacgcacagagagattagagaggaacttcactgtgagcgccgtgatcttcaagaagtacgagcccatcttccaggacatatttaaatatccacaggaggaacaacctcggcagcagagaggcaggaagcagagaagacaaccatgcacggtgagcgagatttttcacttttgttgggtcctgtttatatacgccaagggcaactttcctatgatctccgatgacctggtaaattcttaccatctgcttctgtgtgctctcgatctggtgtacggtaacgcactccaatgcagcaacaggaaggaactggtaaaccccaattttaagggcttaagtgaggattttcacgcgaaggacagtaaacccagctcagaccctccgtgcatcattgagaaactctgctccctccatgatggactggtgctggaggccaagggcattaaagagcacttttggaaaccctacataagaaagctttacgaaaagaaactgctaaaaggaaaagaagagaatctgaccggcttcctggagcctgggaattttggagaatccttcaaagctatcaataaagcttatgaggaatatgtgctttctgtgggaaacttagatgagcgtatcttcctgggagaggatgcagaggaggaaatcggtacgctatctcgttgcctgaacgcaggtagtggcactgagacagcggagcgggttcagatgaagaatatcctgcagcagcacttcgataagagcaaggctcttaggatctccacccccctgacaggggtgcggtacatcaaggaaaacagcccatgtgtgacgcctgtgtccaccgccactcattccttatcccggctacacacaatgctgaccgggctcaggaatgccccaagtgagaagctcgagcagatcctaagaacttgcagccgggaccctactcaggccatcgcaaaccggctcaaggagatgttcgaaatttacagtcagcattttcaacccgacgaagacttttcgaactgtgcaaaggagattgcatccaagcactttagatttgcagagatgctctattacaaagtcctcgaaagtgttatcgagcaggaacagaaacggcttggggatatggacttgtccggaattctcgagcaagatgcttttcatcgttccttactagcgtgctgcttggaagtcgtcaccttttcatacaaaccacccggaaacttcccctttataacagaaatctttgacgtacctctttatcacttttataaagtgattgaagtgtttattcgtgctgaagacggcctttgccgtgaagttgtgaagcacctcaaccagatagaggagcagatacttgatcatttggcatggaaacccgaaagccctctgtgggagaagatacgcgacaatgagaacagagtgccaacatgtgaggaggtgatgcccccacaaaatctggagcgagcagacgaaatttgcatagcgggttcccccctgacccctaggcgggtgactgaggttagagccgataccggagggctgggccgaagtattacatcacctactacactgtatgacaggtatagctcaccaccagcatcgactacgcgcaggcggctgttcgtagagaatgacagccccagtgatggaggaacgcctggtcgcatgccaccccaaccattggttaacgccgtcccagtccaaaacgtcagcggagaaaccgtctccgtgaccccagtgccaggacagacattggtgactatggcgactgcgacagttactgccaacaatgggcagactgttacaatcccggtccagggcatagccaacgagaatgggggaatcacattttttcccgtccaggtgaacgtggggggacaggctcaggccgtgaccggatcgatccaaccactgtcagctcaggcgctggctggctctctgtcctcccagcaggtgacaggaactacactgcaggtccccggacaggttgccatccagcaaatcagccccggaggccagcagcagaagcagggccagagcgttacctccagcagcaaccggccacggaaaacaagcagcctgagtctgttcttccgcaaggtgtatcacctagcagcagtgcggttaagggacctgtgcgccaagctggatattagcgatgagctgaggaaaaaaatctggacgtgctttgaattttctattattcagtgtcccgaactaatgatggacagacatctggaccagctcctgatgtgtgcaatttacgtgatggcaaaggttaccaaagaagacaagtcatttcagaatataatgagatgttataggacgcagccccaggctaggtcccaggtctatcggtcagtcttgattaagggaaagcgtaaaaggcggaacagtggaagtagcgactcaaggagtcatcaaaactcccccacagagctgaacaaggataggacctcccgtgactcttcgccagtgatgaggtccagttccacactccccgtgccacagcctagctccgcccctccaactcccacccgcctgacaggggcaaattccgatatggaagaggaggagcggggtgaccttatccaattttacaataacatatacatcaagcaaatcaaaacctttgcaatgaagtattcgcaagcaaacatggacgcacctcccctttccccatacccctttgtccggactggctctcctcgtagaatccagcttagccagaaccatccagtgtatatttccccccataaaaatgaaacgatgcttagcccacgagagaagattttctactatttcagcaatagcccaagcaaacggctcagagagataaacagcatgataagaacaggggagacacccacaaagaagcgagggatactgttggaggatggcagcgaatcacccgctaagagaatttgtcctgagaatcactcagctcttctgagacggctccaggacgtcgccaatgacagaggttcccactag

SEQ ID NO: 30621 - DNA, 2550 bp, synthetic construct
  misc_feature 1..2550: note = Description of Artificial Sequence: Synthetic coding sequence
  source 1..2550: mol_type = other DNA
atggaatccagatgtgttgcccaggccggtatgcagtggcatgacctcggaagcttgcagcctctgcctccccgttttaagcgctttttctgcctctccctcctctcgtcatgtgagtacagcaaggcaatcaacaaagcatatgaagagtacgtcctgagcgtgggtaacttggacgagcggattttcctgggggaggacgctgaagaagagattggcacgttgtcaaggtgcctgaatgccggatcaggcacagagacagctgaaagggttcaaatgaagaacatcctgcagcagcattttgacaagtctaaggcgctccggatctctacaccgctgacaggagtcagatacattaaggagaactctccgtgtgtaactccagtgagcaccgctactcacagcctgtcacgtctgcatactatgctgacaggactcagaaacgcaccctcagagaaactcgaacaaatccttagaacatgtagcagggaccccactcaggccatcgcaaacaggctgaaggagatgttcgaaatctactctcagcactttcagcccgacgaagatttctccaattgtgccaaggagatcgcttccaaacacttccggtttgcggaaatgctgtactacaaggtgctggagagcgtgatcgaacaggagcaaaaaagactcggggacatggatttgtctgggatacttgagcaggatgctttccaccgcagcctcctagcttgttgtctggaggtggtgacctttagctataaaccccctggcaacttcccgtttattaccgagattttcgatgtgccactctatcacttttataaagttatcgaggtgttcatacgagcagaggacggcctctgcagagaagtggtcaaacacttgaatcagattgaggagcagatcctagaccaccttgcatggaagcctgagtctcccctctgggaaaaaatcagggataacgaaaatcgggttcccacgtgtgaagaggtcatgccccctcagaaccttgaacgagctgacgagatctgcatagccggatcccctcttaccccacggagggttaccgaagtacgggctgatacagggggactcggcaggtctataacttctcccaccaccctgtatgaccggtactcaagcccacctgcctccactactcggagaaggcttttcgttgaaaacgacagcccatccgatgggggaactcccggtcggatgcccccacagccgctcgtcaatgcagtacccgtccagaatgtatccggggaaacggtctctgtgactccagtaccaggccagaccctggttactatggcgacggcaacagtgacggcgaacaatgggcagaccgtgacgataccagtccaggggattgctaatgagaatggaggcatcactttcttccctgtgcaagttaacgtgggaggccaggcacaggcggtcaccggtagcatccaacctctgtccgcacaggccttagccggatctctcagttcccaacaagtgactggaaccacactccaggtacctggtcaagtagctatccaacagataagccccggaggccagcagcagaaacagggccaaagcgtcacgagtagcagcaatagacccaggaaaaccagttccctgtccctttttttccgtaaagtgtaccacctggccgcagtgcgccttagagacctgtgcgccaagttggacatctctgatgagcttaggaagaagatctggacttgtttcgagttctccatcattcaatgcccggagctgatgatggacaggcatctggatcagttgctcatgtgcgcaatatatgtgatggccaaggtcaccaaggaggataagtctttccagaatataatgcgctgctaccggacacagccccaggcccgatcccaagtatacagatccgttctgattaaaggcaaaaggaagagacgcaattccggcagctctgattcgagatctcatcagaatagtcccaccgaactgaacaaagaccgcacaagtcgggacagttctcccgtgatgcggagcagttccacactacccgtcccccaaccctcatccgcaccgccaacccctacccggttaacaggcgcaaactcagatatggaggaagaggagcgcggagacctcatacagttttacaataatatttacatcaagcagattaaaacatttgctatgaagtactcccaggctaatatggacgcccctccgctgagtccgtaccccttcgtgcgtaccgggtcacctcgaaggattcagctatcacagaaccatcccgtgtacatcagtcctcacaaaaacgaaacaatgctgtccccccgtgagaaaatattctactatttctccaatagcccttccaaacgcttgagggagatcaacagcatgatccggaccggagagacacccacaaagaagcggggaattctgctggaggatgggtccgagagcccagctaaacggatatgccccgagaaccacagcgctctgctccgtaggctccaggatgtggctaatgatagaggctcacactag

SEQ ID NO: 30622 - DNA, 1668 bp, synthetic construct
  misc_feature 1..1668: note = Description of Artificial Sequence: Synthetic coding sequence
  source 1..1668: mol_type = other DNA
atgcaatcactgaccaaaggcaatgacctgcactggctggcgtgtgccctttatgtggcctgtcgcaagtctgtacccaccgtgtcaaaaggtaccgtggagggaaactacgtaagcctaacgagaattctgaagtgttccgagcaatcactcattgagttttttaataagatgaagaagtgggaagatatggcgaatttacctcctcactttcgggaacgaacggagagactggaaagaaactttactgtcagtgccgttattttcaagaaatacgaacccatctttcaggatatattcaaataccctcaggaggaacaaccccgtcagcaacggggaaggaagcagagacgacagccatgtacagtgtctgagatttttcacttttgctgggtgctgtttatttatgccaaggggaatttcccaatgatctccgacgatctcgtgaacagctaccacctgctattgtgtgcgttagatttggtctatggaaatgcactgcagtgctccaatcgaaaggaacttgtcaacccaaatttcaagggtctgtctgaggacttccacgctaaggattccaagccatcatctgatccgccttgcataattgaaaagttatgctctctacatgatgggctagttctggaggccaaggggattaaagaacacttctggaagccttacatccggaaactgtatgaaaaaaagttgctcaagggtaaggaggagaatctgaccgggttcttggagcctgggaactttggtgaatcctttaaggccatcaataaggcctacgaggaatatgtattgagcgtgggcaatctcgatgagagaatcttcctgggggaagatgccgaggaggagataggaactctctccagatgcctcaacgcaggaagtggaacggagacagccgaaagggtgcaaatgaagaatattcttcagcagcatttcgacaagtcgaaggctctgagaatctccactcccctgacgggcgttagatacataaaggaaaatagtccctgtgtcactccggtttcgacagctactcatagtctgtcaaggctgcacaccatgcttactggactgaggaatgcacccagcgagaagcttgagcagattctgcggacctgttcgagggaccccacgcaggccatcgccaacaggctcaaggagatgttcgaaatctattctcagcacttccaaccagacgaagatttttctaattgcgccaaggagatcgcctcaaagcacttccggtttgctgagatgttatactataaagtactggagtccgtgatcgagcaggagcaaaaaaggctgggggacatggatctatctggaattttggaacaggacgcctttcatagatctctactggcatgttgcctagaggtggtgaccttctcgtacaagccgccaggaaacttcccatttattacagaaatattcgatgtaccgctctatcacttttataaagtgatcgaagtctttattcgcgctgaagacggactctgtcgagaagtcgtgaagcatctgaaccagattgaggaacagattctcgatcacttggcatggaaacccgaaagcccgctgtgggagaaaattcgcgacaacgaaaacagagttccaacctgcgaggaagtcatgccgccacagaacctggaatag

SEQ ID NO: 30623 - DNA, 1557 bp, synthetic construct
  misc_feature 1..1557: note = Description of Artificial Sequence: Synthetic coding sequence
  source 1..1557: mol_type = other DNA
atgatttctgacgacctggtcaactcataccacctcctgctgtgtgccctggacctagtttatggcaacgccttgcagtgctctaaccgcaaggagctggtgaatcctaattttaaagggctgtccgaggattttcatgccaaagatagtaaaccaagctcagaccccccttgcataatcgagaaactgtgtagtcttcatgatgggctggtcctagaggctaagggcataaaggagcatttttggaagccctacattaggaagctatacgagaagaagctcctcaaaggaaaggaggaaaacttgactggatttctggagcccggaaattttggggagagtttcaaagctattaataaagcttacgaggagtatgtcctttccgtaggcaatctcgacgaaagaatatttctgggcgaggatgccgaagaggaaatcggcactctgtccagatgcctgaacgcaggctccgggactgagactgcggagcgcgttcaaatgaagaacatcctgcagcagcatttcgataaatcaaaggcacttcgcatctccaccccgctgaccggtgtgcggtatataaaagaaaattccccctgcgtcaccccagttagtacggccactcattctctctctcgcctccataccatgctcaccgggctccggaacgctccatccgagaaactcgagcagatactcaggacttgcagccgcgatcctacccaggcgattgcgaaccgactgaaggaaatgtttgaaatctactcgcagcattttcagcctgacgaggacttctctaattgtgcaaaagagattgcaagcaaacacttcagatttgctgaaatgctgtactacaaagtgctggagtctgtgatcgaacaagagcaaaagcgcttaggcgacatggatctttcaggtatcctagaacaagatgcatttcaccgcagcctcttagcatgttgcctggaggtggtcactttctcctacaagcctcccggaaattttccattcatcacagagatttttgacgttccactctaccacttctacaaggtcattgaagtgttcatacgcgcagaggatggcctgtgcagagaagtggttaagcacttgaatcaaatcgaagaacagattcttgatcacttggcgtggaaacccgaatcaccgctgtgggaaaaaatccgggataacgagaacagggtgccgacatgcgaggaagtgatgccgccacagaacctcgaacgcgctgacgagatctgcatcgcaggcagccccaggcggatccagctgagccagaatcaccccgtgtatatcagtccccacaaaaacgaaaccatgctttcaccaagagagaagatattctattacttttcgaacagcccctctaagcgactccgggagatcaatagtatgatccgaaccggcgagaccccaaccaagaagcggggaattttgctggaggatggaagtgaaagcccagcaaaaagaatttgtcccgaaaatcattctgctctcctcagaaggcttcaggacgtggccaatgataggggtagccactag

SEQ ID NO: 30624 - DNA, 1347 bp, synthetic construct
  misc_feature 1..1347: note = Description of Artificial Sequence: Synthetic coding sequence
  source 1..1347: mol_type = other DNA
atgttcgactgtatggacgtgctgtcagtgtctccaggccagattttggatttctacaccgcatctccttcatcttgtatgctccaagagaaggctctgaaggcatgctttagtggcctgacccagactgagtggcagcatagacacaccgctcaatcaatagagacgcaatctacttcatcggaagagctggtgccgagtcctccatcacccctcccacccccacgggtctataaaccctgtttcgtgtgtcaggataaatcctcaggataccattatggagtatccgcttgtgagggatgcaagggattttttcgtagaagcattcaaaaaaatatgatttatacttgtcatagggacaagaactgtgtcattaacaaggtgaccagaaaccgctgccagtattgtcgtctgcagaaatgtttcgaggtcgggatgtccaaagagagcgtgcggaatgaccgaaacaagaaaaaaaaggagactagtaagcaagagtgtaccgaatcttacgagatgacagccgaactagacgatcttacggaaaaaattaggaaggcccaccaagaaacctttcccagcctgtgtcaacttggtaaatacaccaccaactcaagtgctgaccatagagtgagactggacctgggactctgggacaaattcagcgaactcgccactaaatgtatcattaaaatcgttgagttcgccaagcggctgccaggcttcacaggcctgaccatcgccgatcaaataaccctgctcaaggcggcatgcctcgacatacttatcctccgtatctgcacgcgctacacacctgagcaggacaccatgaccttcagcgatggcttaaccctcaaccgaacacagatgcacaatgcaggcttcgggcctcttaccgatcttgttttcacattcgccaaccaacttcttccccttgaaatggacgatactgagactggtcttttgtctgcaatctgcttgatctgtggagatagacaagaccttgaagaacctaccaaggtggacaaacttcaggagccactactggaagcattgaagatatacatccgaaagcggagacccagtaagccacatatgttccccaagatcttgatgaaaatcacagacctgcgctccatctcagctaaaggcgctgagagagtcataaccctaaaaatggagatccctggttccatgcctcctctgatccaggagatgctggagaattcggagggccatgagcctctaactccttcgagcagtggaaataccgctgaacattcaccttcaatcagtccttcgtccgttgaaaacagcggagtgtctcagagcccacttgtacaatag

SEQ ID NO: 30625 - DNA, 1368 bp, synthetic construct
  misc_feature 1..1368: note = Description of Artificial Sequence: Synthetic coding sequence
  source 1..1368: mol_type = other DNA
atgacgaccagcggacacgcctgtcctgtccccgcagttaacggacacatgacacactaccctgccacaccataccctctcttgtttccccctgtcattggcggactgtctctccctccgttgcatggcctgcatgggcacccacctcccagcgggtgcagcactcccagcccagctacgatcgaaactcagagcacaagtagtgaagaactggttccctcccccccttcccccttgccaccacccagggtatacaagccatgcttcgtgtgccaagataagagtagtgggtatcactacggtgtgagtgcgtgtgaaggctgtaagggctttttcagacgttccatccagaaaaacatgatttacacttgtcaccgggacaagaactgcgttatcaacaaggtgactagaaaccggtgtcagtattgccggctccagaaatgcttcgaagtcgggatgtctaaggagtccgtccgcaatgaccgcaataagaagaagaaagaaacttcgaagcaggagtgcaccgagagctacgagatgacggccgaactggatgatcttactgagaaaattcgaaaggctcaccaggagacatttccctctctctgtcaattaggaaaatacaccacaaacagtagcgcagatcacagagtgagactcgatttaggactgtgggataaattttctgagctggcaacaaagtgtattatcaaaattgtggagtttgcgaaaaggctgcccggattcaccgggttgactatcgccgatcagattaccctactgaaagctgcctgtctggacattttgatcctcaggatctgcacacgttacacaccagagcaggataccatgacatttagtgacgggttaacactcaatagaacacagatgcataacgctgggttcgggcctttgacagatctggtttttacatttgccaaccagctccttcctcttgaaatggacgacactgaaaccggcttgttgagcgcaatttgccttatttgtggcgatcggcaggacctggaagagcctaccaaggtggacaagctgcaggaaccccttctggaggctctgaagatttacatacgtaagagacgcccttccaagccgcatatgttccccaagatacttatgaaaataacagacctcaggtccatcagtgctaagggtgctgagagagtgatcaccctgaagatggaaatccctggtagcatgcctccactgatacaggagatgctggagaattcggaaggccatgaacctctcactccctcttcgagtggcaatactgcagagcacagtcccagtatcagcccatcttcggtcgagaattcaggggtaagccagagtcctctggtgcagtag

SEQ ID NO: 30626 - DNA, 1011 bp, synthetic construct
  misc_feature 1..1011: note = Description of Artificial Sequence: Synthetic coding sequence
  source 1..1011: mol_type = other DNA
atgatctatacttgccatagagataagaattgtgtgattaataaggttacacgcaatcggtgccaatattgcagactgcaaaagtgcttcgaagtgggaatgtcaaaggagagtgtccggaacgaccggaacaagaagaagaaggaaactagcaagcaggagtgtactgagtcatacgagatgaccgcggagctggatgacttgaccgagaagatccggaaggcccaccaggaaacattcccaagcctgtgtcagctcggtaaatatactaccaactcctccgctgatcaccgggtgcgcctggatctaggtctgtgggataaattctccgagctagctactaaatgtattattaaaattgtggagttcgccaaacgccttccaggctttacagggttaaccatcgccgatcaaatcacgctgctgaaagctgcttgcttggacatcctaatcctgaggatttgtactaggtacacccccgaacaggatactatgacctttagcgacggcctcaccctgaaccgtacccagatgcataatgccggattcggtcccctcacggatctagtttttacgtttgcaaaccaactgctgccactcgagatggatgacacagagactggcctcctgtcggcgatctgcctgatctgtggcgacagacaggatctggaagaaccgaccaaagtcgacaaactccaggagcctctgctcgaagctctcaagatctacatcagaaagagacgcccttcaaagccacacatgtttccaaagatcttaatgaaaattaccgacttgcggagcatcagtgctaaaggtgctgaacgtgttatcactctgaaaatggagataccaggctcgatgcccccactaattcaggaaatgcttgaaaacagcgaaggtcacgaacctttgactcctagctcttcagggaacacagccgagcacagcccgtccatatccccaagctctgtcgaaaactctggtgtgtcccagtccccgctggtgcaatag

SEQ ID NO: 30627 - DNA, 1011 bp, synthetic construct
  misc_feature 1..1011: note = Description of Artificial Sequence: Synthetic coding sequence
  source 1..1011: mol_type = other DNA
atgatctatacttgtcatagagataagaactgtgttatcaacaaggtgacccggaatcgatgccagtactgcaggttgcagaaatgtttcgaagtaggaatgagcaaagagtcagtaaggaacgacagaaacaaaaaaaagaaggagacgtcgaagcaggaatgcacagagagttacgagatgacagcagagcttgacgatctcactgagaagatcagaaaggctcatcaggagaccttcccatccctttgccagctggggaagtacaccactaactccagcgctgatcaccgggtacggctggaccttggcctgtgggataaatttagcgagctggctactaagtgcattatcaagattgtcgagttcgccaaacgtctgcctgggttcactgggctcaccatcgccgaccagataacactgttaaaggccgcttgtctcgacatactgattttaagaatctgtacccgctacacgcccgagcaggacacaatgacttttagtgacggattgacactcaacagaactcagatgcataatgccggatttggacctttaactgatcttgtctttacgtttgcgaaccagctgcttccgctggagatggacgataccgaaactggcctactcagcgccatatgcctgatatgcggagatcgtcaggacctggaggaaccgacaaaggtagacaagctgcaggagccattacttgaggccctgaagatctacatcaggaagcggaggccgagtaaacctcatatgttccccaagattctcatgaagatcacagatttgcgctccatctctgcaaagggagcagagcgggtaattacactgaaaatggagattccagggagcatgccaccactaatccaggaaatgctcgaaaattctgaagggcacgaaccactcacccctagttctagcggcaacacagctgaacactcccctagcattagccccagcagtgtcgagaactcaggagtgtcccagtctcccctggtccagtag

SEQ ID NO: 30628 - DNA, 1326 bp, synthetic construct
  misc_feature 1..1326: note = Description of Artificial Sequence: Synthetic coding sequence
  source 1..1326: mol_type = other DNA
atgacaaccagtggccatgcatgtcccgtgccggctgtgaatggacatatgacacattaccccgcaacgccttaccccctgcttttcccacccgtcatcgggggtctgtctctcccacctttacatggtcttcatggacaccctcccccatccggatgtagtacacctagcccagccaccattgagacacaatccactagttcagaagaactggtcccaagccctccatcaccactgccccctcctagagtgtataagccgtgctttgtgtgtcaggacaagtccagtgggtaccactatggagtgtcagcgtgcgagggatgtaaagggtttttcaggagatctatccagaagaacatgatctacacttgccaccgggataagaactgcgttattaataaggtgacacggaatagatgccaatattgccgcttacagaaatgcttcgaagttggtatgtccaaggaaagcgtccgaaacgacagaaacaagaagaaaaaggagaccagtaagcaggaatgtaccgaaagttacgaaatgacagcagaactcgacgacttaactgaaaaaatcagaaaagcacatcaggagaccttcccatcactctgccagctcggtaaatacacaaccaactctagtgccgaccatagagtgagactcgatctcgggctctgggataaattttccgaacttgcaaccaagtgcatcatcaagattgtagagtttgcaaaacgcctgcccggtttcaccggtcttaccattgcagaccaaatcacactgctcaaagccgcatgccttgatatccttatcctcagaatctgcacgaggtatacccccgagcaggacaccatgacattctcagatgggctgaccctgaatcgaacgcagatgcacaacgccggtttcggaccactgaccgatttagtgtttactttcgccaaccagttgctgccactggagatggatgacacagaaaccggtctgctgtccgctatctgtttgatctgtggcgatcgacaggacctggaggagcctactaaagttgacaagcttcaagagccactactggaagctctgaagatctatatcaggaagagaagaccttcaaaaccccacatgttcccaaagattctaatgaaaatcaccgacctgagatcaattagcgctaagggagctgagcgtgtgatcactctcaagatggagattcctgaaggccacgaacccctgacccccagctcttccggaaataccgcagagcatagcccttcaatctcaccatctagcgttgaaaattccggggtttctcagagccccttagtccagtag

SEQ ID NO: 30629 - DNA, 462 bp, synthetic construct
  misc_feature 1..462: note = Description of Artificial Sequence: Synthetic coding sequence
  source 1..462: mol_type = other DNA
atggatccccctgccggtttcgttcgtgcaggaaacccggctgtggctgcaccgcagagccccctctcccccgagggcgctcatttccgggcagcccaccatccaagatctaccgggagtcggtgcccagggtcactacaaccgtccaggcctctggtggctaactggctccaatcgctcccagagatgcccgttgacttcactggatactggaaaatgctggtcaacgaaaacttcgaagagtacttgagggctctggatgtcaacgtggcattacgcaagattgcaaacctactgaagccagataaagagatcgtgcaggacggcgaccatatgataatccggaccctttccacattccggaattacattatggacttccaagtgggcaaagagtttgaggaggacttgacagggatagacgaccggaagtgcatgtccgagaccggtttcagctcatag

SEQ ID NO: 30630 - DNA, 405 bp, synthetic construct
  misc_feature 1..405: note = Description of Artificial Sequence: Synthetic coding sequence
  source 1..405: mol_type = other DNA
atgacacgcgaccaaaacggcacctgggaaatggaatcaaacgagaacttcgagggctacatgaaggcccttgacatagattttgctactcgtaaaatagccgtgcgattgacccagaccaaagtgatcgatcaggacggtgataatttcaagactaagaccacctccaccttccgaaactacgatgtggattttacagtgggcgtggagtttgacgagtacacaaaaagccttgataatcgccatgtaaaggccctcgtgacttgggagggtgacgtcttggtgtgtgtccagaaaggcgaaaaggagaacagaggttggaaacagtggatcgagggtgacaaattatatctggagctgacatgtggtgatcaagtctgcagacaggtttttaaaaaaaagtag

SEQ ID NO: 30631 - DNA, 474 bp, synthetic construct
  misc_feature 1..474: note = Description of Artificial Sequence: Synthetic coding sequence
  source 1..474: mol_type = other DNA
atggaccctcctgctggcttcgttagggcaggcaaccctgcagttgctgctccccaatccccattgagcccagaaggtgctcacttccgggcagcccaccacccccgttccaccggctcccggtgtccagggtcgcttcagccctctagaccactcgttgccaactggctccagagcttacccgagatgccagtggatttcactggatattggaagatgctggtgaacgagaattttgaggaatatcttcgagctctggatgtaaatgttgctctgcggaaaatagcaaacctgctaaagcccgacaaagagattgtgcaggacggagatcatatgattattcgaacactgagtacattcaggaactacatcatggacttccaggtggggaaggaattcgaggaggatcttacaggcatagacgacaggaagtgtatggcaggggtgcagagccgggatctcagttcgttgtag

SEQ ID NO: 30632 - DNA, 3756 bp, synthetic construct
  misc_feature 1..3756: note = Description of Artificial Sequence: Synthetic coding sequence
  source 1..3756: mol_type = other DNA
atgagacggggtggatggcgcaaacgcgcagagaacgatggctgggagacatggggaggatatatggccgctaaggtgcagaagcttgaggaacagtttcgttctgacgctgctatgcagaaggacggcactagtagcactatcttttcaggtgttgctatatacgtgaatggatacaccgacccctccgctgaagagctccggaagctcatgatgctgcacggaggtcagtaccatgtatactactcccggtcgaaaaccacccacatcatagcaacaaacttgcctaacgccaagatcaaggaactgaaaggcgagaaggttatccgtcccgaatggattgtggagtccattaaggcaggcaggctcctatcatatatcccctatcaactgtacacaaaacagagtagcgtccagaaggggcttagtttcaatcccgtgtgccgtccagaagacccgctgccagggccttctaatattgctaaacaattgaataaccgggtcaatcatattgttaaaaagatagagaccgaaaacgaggtaaaagtgaacggtatgaattcctggaatgaggaagatgaaaataacgatttctcatttgtggatttagaacagactagtcccggacggaagcagaacggtatcccccaccccagaggcagtacagcgatttttaatggacacaccccatctagcaacggagcactgaaaacgcaggactgcctggtgccgatggtgaactccgtagcatctcgcctgagccccgcatttagccaagaagaagataaggcggagaagtcttccaccgatttccgcgactgtacacttcaacaactccaacaatccacgcgcaataccgacgcgctccgaaatcctcatcgcaccaacagttttagcctgtcccccttgcactcaaatacgaagatcaatggagcccaccacagcaccgtgcaggggccaagtagcaccaagtcgacaagctccgtatctaccttttctaaggctgcaccgagtgtaccaagtaaaccaagcgactgcaactttatctctaacttttacagtcactctcggctgcaccacatctccatgtggaaatgcgagctgaccgaatttgtgaatactcttcagaggcagtcaaacggtatcttcccaggcagggaaaagctgaaaaagatgaagaccggcaggtctgccctggttgtgacggatactggagatatgtccgttctcaattccccccgacaccagagctgcataatgcatgtggatatggattgctttttcgtttctgtgggcatccggaacagacccgatctgaagggtaaacctgttgccgtgacttcaaacagaggcacagggagagctcccctcagaccaggggctaatccccagcttgagtggcagtactatcagaacaaaatactcaaaggaaaagcagctgacatccctgactcgtctctatgggagaatcctgactctgcccaagcaaacggaattgactcagttctgtctagggctgaaatcgcatcctgcagctacgaggccaggcagctggggatcaagaatggaatgttctttggccacgcgaagcagctgtgtccgaatctgcaggcggtgccgtatgatttccatgcctataaagaagtcgcccaaaccctgtacgagaccttagcttcatatacccataacatcgaagccgtgagttgcgatgaagcactggttgacatcaccgaaattctggccgaaacaaaactgacccccgacgaattcgccaatgctgtgaggatggaaattaaagatcaaactaaatgcgccgctagtgtgggtattgggtctaatatactcctcgctaggatggcgactaggaaggccaaaccagacggccagtatcacctaaagccagaagaagtggacgattttatccggggacagcttgtgactaacctcccaggtgtaggacactcaatggagagcaagctggcttcactcggaatcaagacttgtggtgaccttcagtacatgaccatggctaaactgcagaaagaatttggacccaagaccggacagatgctgtacaggttctgccgaggactggacgatagaccagtgcggactgagaaggaaaggaagtcagtgtccgctgagattaactacggtatacggtttacacagccaaaggaggcagaagcctttcttctgagcctctctgaggagattcagcgcaggttagaagctactggcatgaagggaaagagactgacacttaagattatggtgcgtaagcccggagctccagtggaaacagctaagttcggaggtcacggtatatgtgacaacattgccaggactgtgactctggaccaagctacagataatgctaagataatcggcaaagccatgctcaacatgttccatacaatgaagctgaacatctcagacatgcggggagtgggcatccatgtcaatcagctggttccaaccaatttgaacccctcgacatgccctagcaggccttctgttcagtcgtcacacttcccctctgggtcctattccgtgagagacgtgtttcaggtgcagaaggccaaaaaatccactgaggaggagcataaggaagtgttccgggcagctgtggatcttgaaataagctccgcttcaaggacttgcacttttttgccgccttttcccgctcatctgcccacctcgcctgacactaacaaggccgagtcgtcaggcaaatggaatggcctgcacacccccgtttcagttcagtcccggctgaacctgagtattgaggtcccctcgccctcacaactggaccagtccgtgttggaagccctgcctcccgacctgagagagcaggtagaacaggtgtgcgcggtgcaacaggcggaaagtcacggagacaagaaaaaagaaccagtcaacggctgcaacacaggcatcttgcctcaacctgttggcactgtgctactgcaaattcctgagccacaggaatcaaactccgacgccggaatcaacttgattgccctgcccgctttttcccaggtcgacccggaggttttcgcggctctgccggctgaacttcaacgcgaactcaaggcagcttacgaccaacggcagcgtcaaggtgagaattccacccatcagcagagcgcgtccgcatcagtcccaaaaaaccccctgcttcatctgaaagcagccgtgaaggagaagaaacgaaacaaaaaaaagaagacaatagggtcaccgaagaggattcagtctcccctgaataacaagctgcttaattccccggcaaagaccctgccaggggcttgcggcagccctcaaaaattaatcgacggctttctcaagcatgaagggccacctgccgagaaaccccttgaggaactgagcgcgtccacctcgggagtgcctgggctctcctccctacagtccgatccagccggatgcgtaaggcctcctgccccaaacctggccggtgccgtggagtttaatgacgttaaaactttgctacgcgagtggataacaaccatctcagaccccatggaagaggacatcctgcaggtagtaaagtattgtaccgatttgatagaggaaaaagatttagagaagctggatctggtgatcaaatatatgaaaagattgatgcagcaaagcgttgagagtgtttggaatatggcattcgattttattcttgacaatgtgcaggttgtactacaacagacatacggttctacgttgaaggtcacttag

SEQ ID NO: 30633 - DNA, 3753 bp, synthetic construct
  misc_feature 1..3753: note = Description of Artificial Sequence: Synthetic coding sequence
  source 1..3753: mol_type = other DNA
atgagaagggggggttggcggaagcgggcagagaatgatgggtgggagacctggggcggatacatggccgctaaagtgcagaagctcgaagagcaattccggtccgatgctgccatgcagaaagacggcacctcctcaactattttttctggggtggcaatttacgtgaacggctacaccgacccgagcgctgaggaactgcgaaagctgatgatgcttcatggtggccagtatcatgtctattacagtaggagcaaaacaacccacatcatagccactaatttgcccaatgctaagatcaaagaactcaagggcgagaaggtgatacggccagaatggatagtggaatcgattaaggccggtcgacttctctcttatatcccataccagttgtacacaaagcagagtagcgttcagaagggactgtcatttaatccagtctgccggcctgaagatcccttgccgggaccctccaacatagctaagcagctcaataaccgggtcaatcatatcgtcaaaaagatcgagacagagaatgaggtcaaggtgaatgggatgaacagctggaacgaagaggacgagaataacgatttctcatttgtcgacttggaacagacaagtcccggacggaagcaaaacggtataccccacccgaggggcagtaccgccatctttaacggccacactcctagttctaatggcgctctgaagacgcaggattgtcttgtcccgatggtgaactctgtagccagtcgcctgagccctgcattttctcaagaggaagacaaggcagagaagagcagcactgacttccgtgactgtacactgcagcaactacagcagtctacacgtaacactgacgcccttaggaatccccatcggaccaatagtttttctctttctccccttcacagcaatacaaaaataaatggtgcccaccacagcacagtacagggaccatcttctactaagagtacctcttctgtttcaaccttcagcaaggcagcaccatcagtgccaagtaagccatccgactgcaatttcatatccaatttttattcacattcccgactccatcacatctcaatgtggaagtgcgagcttaccgagttcgttaacaccctgcagaggcaaagtaacggaatttttcctggcagggaaaagctcaagaaaatgaagactggccgtagtgcgctggtggtgacggatactggagacatgagcgtcttgaattcccccagacaccaaagctgcatcatgcacgtagatatggactgcttttttgtatccgttgggatcaggaaccgccctgacctcaagggaaagcctgttgctgttaccagtaatcgtggcaccgggagggcccctctgaggcctggggctaatccccagctcgagtggcaatactaccaaaacaagatactgaaggggaaggcggatatacccgactctagtttgtgggaaaacccagatagcgcccaggccaacggcatcgattccgtgttgtcaagagccgaaattgcttcatgttcttacgaagccagacagctgggtattaagaatggcatgttcttcgggcacgccaaacagctgtgcccaaacctgcaggctgtcccatatgatttccacgcctacaaagaagtcgcccagaccctttatgaaaccttggcctcgtacacccacaacatcgaggccgtgagttgcgatgaggccctggtcgatattaccgagattctggcggaaacgaaacttactcccgacgagtttgctaacgccgtgcgcatggaaatcaaagaccagaccaagtgtgcagctagtgtggggataggctccaacattctgctggcaagaatggcaactcgtaaagccaagcccgacggacaataccacctgaagccagaggaggtagacgattttatccgagggcagcttgtaaccaatctccccggagtcggacacagcatggaatccaagctggcatcgctcggtatcaaaacatgtggtgatttgcaatatatgactatggcgaagctgcagaaggagttcgggcctaagacaggccagatgctgtatcggttctgccgtggcctggacgatcgacctgtgaggactgaaaaggagcggaagagcgtctcggccgaaattaactacggaatccggttcacccaacccaaagaggctgaggcgtttctgttatctctgagcgaggagattcagcgacgcctcgaggcaaccggtatgaagggcaaaagactgaccctgaaaattatggtgcgcaaaccaggtgctccagtcgagactgctaagttcggcggacacggcatttgcgacaatatcgctcgcacggtgactctcgaccaggccactgacaacgccaaaatcattggcaaagccatgctgaacatgtttcataccatgaagctaaacataagcgatatgaggggagtgggaatccatgttaatcagctggtacctacaaatttgaatcctagcacatgcccttctcgtccatctgttcaatctagccattttccatccggatcctattccgtgcgcgacgtcttccaggtgcaaaaggccaaaaagtcaactgaggaggagcacaaggaggtgttccgcgcagcggtcgatctggagatctccagtgctagcaggacctgtaccttcctccctccattcccagcccacctcccgacatcaccagacacaaataaggcagaatcgagcggaaagtggaatggtcttcacacccccgtctctgtgcaatccaggctgaatctttcgatcgaggttccgagccctagccagctcgatcagtctgtgctggaagctctaccacctgacctccgcgaacaggtcgagcaggtttgcgctgttcagcaggccgagtcacatggcgacaagaagaaagaacctgtgaacggctgtaatactggaatcctcccccagccagtcgggaccgtcctgctccagataccggagcctcaggagtccaactccgacgcgggaattaacctcattgccctgccagctttctctcaagtagaccctgaagtttttgctgccctgcctgcagagctgcagagggaattgaaagccgcatacgatcagaggcagcgccagggggagaactctacccaccagcagtcagcatccgcatcagttcccaagaatccacttctgcatctgaaggctgctgttaaagaaaaaaagagaaataaaaaaaaaaaaacaattgggtccccgaagcgcattcagtctcccctcaacaacaagttactgaactcaccagctaaaaccctgcctggcgcttgcggttctcctcagaaactgattgacgggttcctaaagcacgagggccctcccgctgagaaaccccttgaggagctttccgcttccacttcaggagtaccgggactgagcagcctgcagtctgaccccgcagggtgcgtgagacccccagccccaaaccttgcaggagccgtggagttcaacgatgtcaagaccttgctccgggaatggattactaccattagcgaccctatggaggaggatatcctccaggttgtgaaatactgcaccgacctgatcgaggaaaaggaccttgaaaagttagatctggtaattaagtatatgaagaggctgatgcagcagtctgtggaaagcgtgtggaacatggcttttgatttcattcttgataacgttcaggtggtactgcaacagacttacggatccaccctgaaagtgacctag

SEQ ID NO: 30634 - DNA, 2916 bp, synthetic construct
  misc_feature 1..2916: note = Description of Artificial Sequence: Synthetic coding sequence
  source 1..2916: mol_type = other DNA
atggcaacagttagggcaagcctgcgcggagcactcctactgctcctcgccgtggctggggttgccgaggtggcaggcggtttagcacctggcagcgccggtgcgttgtgttgtaaccactctaaagacaaccagatgtgtcgggatgtgtgtgagcaaatattcagctcgaaaagtgagtcccgcctgaaacatttgttgcagagagccccagactactgccccgaaacgatggtggagatatggaactgtatgaacagttcgctcccgggtgtctttaaaaaatcagacggttgggtgggacttgggtgctgtgagctggctatagcactggagtgccgtcaagcctgtaaacaggcatcaagtaaaaatgacatctccaaggtttgtagaaaggagtacgagaatgccctcttctcctgcatcagccgcaacgagatgggttccgtgtgttgcagctacgccggacaccacactaactgccgcgaatactgccaggctatctttagaaccgacagctcccccggaccttcccagatcaaagccgtggaaaattattgtgcaagtatctccccgcagctaattcactgtgtgaacaactacactcagtcttacccaatgcgcaaccccacggactcactctactgttgtgaccgagcagaggaccatgcctgtcagaacgcatgtaagcggatcctaatgagcaaaaagacagaaatggaaattgttgatggactaatcgaagggtgcaaaacccagccgctaccgcaagatcccctctggcagtgctttctggagagttcccagtccgtccaccctggcgtaactgtgcaccctccaccttcaaccggattagacggcgcaaaactgcactgctgctcaaaggccaacacgagcacttgccgggagttatgcactaaactttatagtatgtcctggggcaacacgcagagttggcaggaattcgatagattctgtgagtataaccctgtggaggtgtctatgctgacatgcctagctgatgtaagagaaccctgccagctggggtgccgtaatctgacatattgcaccaatttcaataatcgacccacagagctgtttcgatcctgcaacgctcaatctgaccagggagccatgaatgacatgaaactgtgggagaagggtagcataaagatgccgttcataaacattccagtgctggatatcaaaaagtgccagcccgagatgtggaaggccatcgcctgctcattacagattaagccttgtcactcaaagagccgcggtagcattatttgcaagagtgactgcgtggaaatactgaaaaagtgcggggatcagaataaatttcccgaggatcataccgcggaatctatttgcgagctgctgagccctacggacgatctgaagaactgtattccccttgatacatatctgaggccgtctacactgggtaacattgtcgaggaggtgacccacccttgcaacccaaacccatgccccgcaaatgagttgtgcgaagtcaaccgaaagggctgtccctcgggtgatccttgtctcccttatttttgcgtccaagggtgtaaactgggagaagccagcgactttatcgtaagacagggcaccctgatccaggtgccttcttccgctggtgaagtggggtgctacaaaatctgttcatgcggccagagcgggctgctcgagaactgtatggagatgcattgcattgatctgcagaagagctgcatcgtgggaggaaagcggaaatcacacgggacgagcttttccatagattgcaatgtctgtagttgttttgccggaaatctcgtgtgttctacaagactttgtctaagtgagcattccagcgaagacgatcgaaggacattcaccgggctgccctgtaattgcgccgatcagttcgtcccagtttgcggccagaacggacgcacctatccttccgcctgtatcgcacgttgcgtaggcctccaggaccaccaatttgaattcggaagctgtatgtccaaggacccctgcaaccctaatccatgccagaagaatcaacggtgcatccctaagccccaggtgtgcctcaccaccttcgacaagttcggatgcagccagtacgaatgcgtcccacgccagctagcttgcgatcaggtgcaggaccctgtgtgtgatactgatcacatggaacacaataacctgtgcaccctgtaccagcgaggcaagtcactgagctataaggggccttgtcaaccgttctgtcgcgctacggaacctgtctgtggccataacggagagacttatagctcagtctgcgccgcttattcagaccgagtggctgtcgattattacggggattgccaggctgtgggagtgctatcagaacatagtagtgtcgccgagtgcgctagcgtgaagtgcccaagtctcttggccgctgggtgcaagcccataataccacctggagcgtgctgtcccctatgcgccggaatgctgcgggtgctcttcgataaggagaagcttgacaccatcgcgaaggtgacaaataaaaaacccattaccgtgctcgagatccttcagaagatacgaatgcatgtgtccgtcccgcaatgcgatgtattcgggtatttttccatcgaatctgagatcgtgattttgattatacccgtggatcactaccctaaagcactccaaattgaagcgtgtaataaggaagccgaaaagatcgaaagcctaattaatagcgactccccgacgttggcatctcacgtccctctcagcgctttgatcatctctcaggtccaagtctcctctagcgtgcccagtgccggagtccgggctagaccgtcctgtcactctctgctgttacctttaagcctcgggctggcattgcatttgttgtggacgtacaactag

SEQ ID NO: 30635 - DNA, 735 bp, synthetic construct
  misc_feature 1..735: note = Description of Artificial Sequence: Synthetic coding sequence
  source 1..735: mol_type = other DNA
atgaaggaaagacgggcttcccagaaactgtcttctaagtccatcatggaccccaaccagaatgtgaaatgcaaaatcgtcgtggtcggagattctcagtgtggtaaaacagcgctcctgcatgtgtttgccaaggactgtttccccgagaactacgtaccgaccgtgttcgagaactacactgcttcttttgagatcgatactcagagaatcgaactcagcctttgggacaccagcggctccccctattacgacaacgtgagaccgctatcctaccctgatagcgacgccgtcctcatctgctttgatatctctcggccagaaacactggattctgtgctgaaaaagtggaagggcgaaatccaagaattctgtcctaataccaagatgttactggtaggctgcaaaagcgatcttcggacagacgtgagcacccttgtggagctgtcaaaccaccgacagactccggtgagttacgaccagggcgcaaatatggcaaagcagatcggcgctgccacctatatagaatgttcagcacttcagtcagagaactcagttagagacatttttcatgtagcaactttggcctgcgttaataagacaaacaaaaacgttaagcggaataagtcccagcgcgctaccaagaggatctcccacatgccctcccggccagagctgtcagccgtggccaccgacctgaggaaagacaaggcaaagtcctgcaccgtgatgtag

SEQ ID NO: 30636 - DNA, 735 bp, synthetic construct
  misc_feature 1..735: note = Description of Artificial Sequence: Synthetic coding sequence
  source 1..735: mol_type = other DNA
atgaaggaacggagagctagtcagaagttatctagcaaatccataatggatcctaaccagaacgttaagtgtaagatagtggtggtaggcgactctcagtgcggcaagacggctctactccatgtatttgccaaggactgctttcctgagaattacgtgcccactgtttttgaaaattacacagcgagctttgagattgacacacagcggattgaactgtcactgtgggacacgtctggctctccgtactacgacaacgtccgacctttaagttatccggattcagatgctgttctaatatgctttgatatctctcggccagaaaccctggattcagtcctaaaaaagtggaaaggcgagatacaggagttctgtcctaacactaaaatgttgctcgtgggctgcaagtccgatctgcggacggatgtgagtaccctagtggaattgagcaaccaccggcagacacccgttagttatgaccaaggtgcaaatatggctaaacaaattggcgcagctacctacatcgaatgcagcgccctccagagtgagaattcggtgcgggacatattccacgttgccaccctcgcctgtgtgaataagactaacaagaatgtgaagcgtaataaatcacagcgcgcaacgaaaaggattagccacatgccatcacgcccagaactgtcggccgtcgccaccgatctccgcaaagacaaagctaagtcatgtacagtaatgtag

SEQ ID NO: 30637 - DNA, 348 bp, synthetic construct
  misc_feature 1..348: note = Description of Artificial Sequence: Synthetic coding sequence
  source 1..348: mol_type = other DNA
atgctgttggtgggctgtaaaagcgacctccgcactgatgtgtctacactcgtggagctgagcaatcaccggcagaccccagtgtcttacgatcagggggctaacatggcaaagcagatcggcgcagctacctatattgagtgttcggccctgcagtccgaaaattcagttagggacatcttccacgtcgcaaccctggcgtgtgtcaacaagacgaataagaacgtgaagaggaacaaatctcaacgagctacaaagcgcatatctcacatgccatcccggcctgagctgagtgccgtggcgactgaccttaggaaggataaagccaagagctgcacagtcatgtag

SEQ ID NO: 30638 - DNA, 351 bp, synthetic construct
  misc_feature 1..351: note = Description of Artificial Sequence: Synthetic coding sequence
  source 1..351: mol_type = other DNA
atgaaagaacgcagagcatcgcagaaattatcctctaaaagcattatggaccctaatcagaacgtgaaatgtaaaatcgtcgtcgtgggagactcccaatgtggcaaaactgcgttgctgcatgttttcgccaaggactgtttccctgaaaattacgtccccactgtgtttgagaattatacagcctcctttgagatagacactcagagaatcgaactatccctgtgggacacaagcggcagcccctactacgataatgtgcgcccactgagttatccagattctgatgctgtcttaatttgtttcgacatcagtcgcccagaaacgctcgacagcgttctcaaaaaatag

SEQ ID NO: 30639 - DNA, 351 bp, synthetic construct
  misc_feature 1..351: note = Description of Artificial Sequence: Synthetic coding sequence
  source 1..351: mol_type = other DNA
atgaaggagagacgggcttcccagaaactctcttctaagtcgatcatggaccccaaccaaaacgtgaagtgtaagatagtggtggtcggcgactctcagtgtggtaagaccgcactcctgcacgtctttgccaaagactgttttcccgagaattatgttcccactgtgttcgaaaactacacagcgagcttcgagattgacacgcaacggatcgagctttccctttgggatacatcaggcagtccttactacgacaacgtgcgccctctgtcctatcccgatagcgatgcagttctcatttgcttcgatatcagccgtccagaaactctagacagcgtcctgaagaagtag

SEQ ID NO: 30640 - DNA, 615 bp, synthetic construct
  misc_feature 1..615: note = Description of Artificial Sequence: Synthetic coding sequence
  source 1..615: mol_type = other DNA
atggccgagcaggaacctacagcagaacagttggctcagatcgcggctgagaacgaagaggatgagcatagtgtcaattataagcccccagctcagaaatcaatccaggaaatacaggagctggataaggatgacgaaagcctccgaaaatacaaagaggctctgctgggcagagtggcagtgagcgcagatcccaatgtgcccaacgtcgtagtcacagggcttacacttgtgtgctccagcgctcccggtcccctcgaactggatctcacaggcgacttagaatcctttaaaaagcaatcatttgtgttaaaggaaggcgtggaatatagaatcaagatatccttcagagtgaacagagagatagtctccggtatgaagtacatccagcacacttaccggaaaggcgttaagattgacaaaaccgactacatggtgggctcttatgggcctagagcggaggagtatgagtttctcaccccggtcgaagaagcgccaaagggtatgctggccagaggctcttattctatcaagtcgcgatttacggatgatgacaagacggaccatctgtcctgggagtggaatcttacaatcaaaaaagattggaaggattag

SEQ ID NO: 30641 - DNA, 537 bp, synthetic construct
  misc_feature 1..537: note = Description of Artificial Sequence: Synthetic coding sequence
  source 1..537: mol_type = other DNA
atggccgagcaggagccaacggccgaacagctggcccaaattgctgctgagaatgaggaggacgaacactctgtcaattataagcccccagcacaaaaaagcatccaggagatacaagagttagataaggacgacgaatccctgcgaaagtacaaggaagctctcttaggcagagtcgcagtatcagctgacccaaacgtccccaatgttgttgtcacgggactgactttggtctgttcttctgcaccaggtccgctggagctggacttgactggcgatcttgagagttttaagaaacagtcattcgtgttgaaagagggggtggaatacaggatcaaaatatctttcagggtgaaccgagaaatcgtatccggaatgaagtacattcagcacacttatagaaagggagtcaagatcgacaagaccgactacatggtgggctcttacagtataaaatccaggttcacagacgacgacaagactgaccacctgagctgggaatggaaccttactataaaaaaggattggaaagattag

SEQ ID NO: 30642 - DNA, 615 bp, synthetic construct
  misc_feature 1..615: note = Description of Artificial Sequence: Synthetic coding sequence
  source 1..615: mol_type = other DNA
atggctgagcaagaacccaccgccgagcaactagcacagatcgccgcagagaacgaagaagacgagcattccgtgaactacaaaccacccgctcaaaagtctatacaggaaattcaggagctggataaggatgacgagagcttgagaaaatataaggaggcgctcctgggccgagtggcagttagcgctgatcctaatgtaccaaacgtcgtagtaactggtctcactttggtttgcagctccgccccaggcccactagagttggatcttacaggcgacctcgagtctttcaagaagcagagcttcgtcttgaaggagggtgtagaatacaggattaagatcagtttccgtgtgaacagagaaattgtcagtggaatgaaatatatacaacatacttaccgtaaaggcgtaaagattgataagaccgactacatggtgggaagctacggaccgagagccgaagagtatgaatttctcaccccagtcgaggaggcgccaaagggaatgctcgctcgtggctcatactccatcaagtctaggttcaccgacgacgataaaactgaccatttgtcctgggagtggaatctgaccatcaagaaagattggaaagactag

SEQ ID NO: 30643 - DNA, 3576 bp, synthetic construct
  misc_feature 1..3576: note = Description of Artificial Sequence: Synthetic coding sequence
  source 1..3576: mol_type = other DNA
atggaggccatgtctccacagcaggagactctgggtggccagccaggcaggagttcgtccctgacaggggtgagtcggttagcgggagggtcctgcactaaaaagaaaatgaagacgttggcagaacgaaggcggagcgcaccgtccctgattttagataaggccttgcagaagcggcctaccactcgcgatagcccatctgcctctgtggatacatgcacatttctgagtagtctggtgtgctcaaatcgaacactgctgatagacggcagagcagaactgaaaagaggccttcagagacaggagagacatctgttcctgttcaatgacctgtttgtggttgccaaaatcaaatacaacaacaacttcaagatcaagaacaaaataaaactgactgacatgtggacggcatcgtgcgtggatgaggtaggtgaaggcaacaccaatgctatgaagtccttcgtgctgggatggcccaccgtgaatttcgtggccactttcagttctcccgaacagaaggacaaatggctgagcttgcttcagcggtatatcaatctagaaaaggagaaggattacccaaaatccatccccctgaagatcttcgcaaaagatatcggcaattgtgcttactctaaaacgatcaccgtgatgaactccgatacagccaatgaggtgataaacatgtcgcttccaatgctgggcattactgggtcagaacgtgactatcagctctgggtcaattccgggaaggaagaagccccttaccccttgattggccacgagtatccttacggaattaaaatgtctcacttgagagacagtgccctcctgaccccgggatccaaagactcgacaacaccctttaacctgcaggagccattcctgatggagcagcttccacgggagatgcaatgccagtttattcttaaacccagtcggctggctgcggctcaacaactgtctgacagtgggcataagacattcaagaggaggcggagcataattaattgggccttttggagggggtcatcaacacatctagataacttgccctccagccccacatccccaatgccgggtcagctgttcgggatatcccttcctaacatttgtgaaaacgacaatcttcctaaaccggtcttagatatgttgttttttctgaaccagaaaggacctctgaccaaagggatattcagacagtccgcgaacgtgaaatcttgcagggaactgaaggagaaacttaactctggagtggaggtgcaccttgactgtgagagcatttttgtcattgccagcgtgctgaaggattttctgagaaacattcccggaagtattttttcgtctgacttatatgatcattgggtcagtgtgatggatcaggggaacgacgaagaaaagattaatacggtccagagactgttagatcagcttcctcgtgccaatgttgtgctgctaagatatctctttggtgtgttgcacaacatcgagcagcactcaagcagcaatcaaatgaccgccttcaacctggccgtctgcgttgctccttccatactctggcccccagcctctagctctcccgaactggagaacgagtttacaaaaaaggttagtctgctcatccagtttcttatcgagaactgcctgcggatttttggggaggaaataacgtctctgtttcgagaagtgagcgtgcgctgcgatacccgcgaaaacgcttctgacatatcctgtttccaactcaatgacagtagttacgattccttggagaacgagcttaatgaggatgtcgatgccccatgcagtgatcttgtgaaaaagcttggccagggttctcgctctatggatagcgtcctgacactgtccgactacgatcttgatcaacctgaggttgaaggtctcttgacactctccgattttgatctcgcccactctaaggatgaagatgtgcaaatgaagaggccactggaaagcaagccagtcaatattctagtgtataccaaaatccccttgcgagatcacgcacgcgctccgagcgctatgtgtaccccgtcttatctcagcaccgccgcagctaatgctgccaaatccctgaggcggcaccgcaggtgcagtgagccatctatcgactacctggactcgaaactgtcctacctgagggaattctaccagaaaaagctgaggaagtcatcttgtgacgcaattctaagtcaaaaagacgaagactacctaaagcagaaccaacccctgcaagaagaggggaagacatgcttcaagcagtctctggtgaccgggaccgacgtatcaaagaagaacgctacaacacagaataccaagaagaagtcattgtctggttccgagggtaatcacgtgaaactattccccaaatcaaagccagttgccatttccgttgcttcttacagccccatgtcgtctcaggatcactccaaaaatcagccatttgacgtgaatacctccggctattcgccgcctcacacagcagacgcactgaagggaccgagaacacatcgcaggtgcagtgaacctaacatagaagatcagaatcgcaaacttacttacctgagggggatttactccaaaaaacagcacaagactagctgcgaggccggtctcctgcatggcgaggaagattacctgaagagacacaaaagcctgcagatggaggggcagaagttaataaaccagagcttagtgatgggaatagaggtgggtaagagctctgccacaaatcagaacacagagaaggtgctgccacctagactcaatttatgtcccaggacttcttactccagcctgtcttcgccaggtacctcaccaagtggttcttccgtgtcgagccaggattcggcgttttctcagatatcagagcactcagtgttcacacctacggagacaagctcaccaattgactgcaccttccaggctcagagaaagagggaagatctcagtccagacttctccaatgcatctcatgtgtcaggtatgccaggtccttcttctggacaggcatgtagtagacccgcttataccaaaaaggacactatggagtggcatagccagatgcactcagtcacactgcaccctagtacatggctgaggaatggagttgcgtccctgaaaaactggtctctgaagaaaaaggccaaagcggcaagaccagaggaagagaaaatagcaagcccaaagggaccattagaacctccaccacatgcctccggcgtgcctgaagctaactctctccaagaggagcaaaaagatctgcctctgagggccgctgagggcctctctccggtgcagtccgcacagagatgcagctcctcccctttccaagattccgaaagacactgttcctctccctttagtctggtggagtcgaggttgaagctgtgcatgaagtcccatgaagagatcgagcctggaagccagtctagtagtggcagcttgccctgggagagggcctcagcctccagttggaccctggaggacgccacctccccagactccggtcccaccgtggtgtgtgatatagaggaccgctatctgaccaaggatatttag

SEQ ID NO: 30644 - DNA, 3498 bp, synthetic construct
  misc_feature 1..3498: note = Description of Artificial Sequence: Synthetic coding sequence
  source 1..3498: mol_type = other DNA
atgactttttggattattattaataaaaaaatgaaaactctggctgaacgcaggcgttctgctccaagtctcatcctggacaaagccttgcagaaacggcctaccacccgcgacagcccatcagcaagcgtggacacgtgtacatttctctcttcgcttgtgtgcagtaatcgcactctcctgatcgacgggcgagctgaactgaagcgcggtcttcagaggcaggagcggcatctgtttctatttaacgacttatttgttgtggccaaaatcaagtacaacaacaactttaagattaaaaataagattaagttgactgatatgtggacagctagctgcgtggacgaggtgggtgagggcaatactaacgcaatgaagtccttcgtgctgggttggcccaccgtgaattttgttgccacgtttagctcgccagagcagaaggacaagtggctgagcctacttcagcggtacattaatcttgaaaaagaaaaagattatccgaagtcaatccctctgaagatttttgcaaaagacatagggaactgtgcctactcaaagactatcaccgtgatgaatagcgatacagcaaatgaggtgattaatatgtcactcccaatgctagggataacagggtctgagagagattaccagctgtgggtgaactcaggcaaagaagaggctccttacccgctgattggtcatgagtacccttacggtataaagatgtcccacctccgcgattcggctctgctaacacccggtagtaaggacagtaccactccttttaatctgcaggagccctttctgatggaacaattgcctagagagatgcagtgccagttcattctcaagcctagcagactcgctgctgcacagcagctttcggatagcggtcacaaaaccttcaaacgcagaaggtcaattattaactgggccttctggcgagggtcttcaacacatttagataatctgcctagctcacccacatctcccatgccaggacagctgtttggaatatccttgcccaacatctgtgaaaacgacaacctgccaaaacccgtgttggacatgttatttttcctcaatcaaaaggggccactaacgaaggggatcttccggcagagtgcaaatgtgaaatcgtgtcgtgagcttaaagagaagctaaattctggggttgaggtccatctcgattgtgagtccatattcgttatcgcctccgtgctgaaagatttcctcagaaatatcccaggctcaattttttctagcgatctatacgaccactgggtttccgtgatggaccaggggaatgacgaagagaagatcaacaccgtgcagcgcctcctcgaccagcttcctagggccaacgtggtgctactgagatacctctttggagtattgcataacatcgagcaacacagtagttcaaaccaaatgacagcatttaatctggccgtctgcgtggcaccatccatattgtggcccccagccagttcctcaccagaactggaaaacgagttcacaaagaaggtgtctctgctaatccaatttctgattgagaattgcttgcgcatttttggtgaggagatcacaagcctgttccgcgaagtcagcgtccggtgtgatactagagaaaacgccagtgatataagctgctttcagctcaacgactcgtcttatgatagcctggagaacgaattgaacgaggatgtcgatgcgccatgcagcgacctcgtgaagaaactcggccagggatctcgtagcatggacagcgtgttgacactttcagattacgacctggatcaacccgaagtggaagggcttcttactctctccgatttcgatctggctcacagcaaagatgaagacgtccaaatgaagagacccctggaaagcaagccagtgaacattctggtctacaccaaaatccctctaagagaccacgcacgcgctccctccgcaatgtgcactccttcctacttgagcaccgcagcagcaaacgctgccaaatcactcagacgacaccggcgatgcagcgaaccttctattgactatttggatagtaagctgagttaccttagagagttctatcagaaaaagctgcgaaaatcttcatgtgatgctattctgtcccagaaagacgaagattatctcaagcaaaaccagccgctacaagaagagggcaagacttgtttcaaacagagtctggttacgggcaccgacgtgagcaaaaagaatgcgacaactcaaaatacaaagaagaagagtctgtctggttcagaagggaaccatgtaaagctttttccgaagtcgaagcccgtagccatttcagttgcctcatactctccaatgtcgtcgcaggaccactcgaagaatcagcccttcgacgtaaacacatcaggatactcaccaccacacacggcagatgcactgaaaggccctagaactcaccgccgttgcagcgaacctaatatcgaagaccagaatagaaaactgacctacctcagaggcatttattcaaagaaacagcataaaacatcttgcgaggccggacttctgcatggagaggaggactatctgaagcgccacaagtctctgcagatggaggggcagaagttgatcaatcagtctcttgtgatgggtattgaggttgggaagtcctccgcaactaaccagaacaccgaaaaagtgctgccaccccgactgaatttatgtcctcgaactagctattctagtctgagctcccccggaacttctccctcaggctcctccgtgagcagccaggattcagccttttcccagatttccgaacattccgtgttcacacccactgaaacgagttctccaatagattgtacctttcaagctcaacgcaaaagagaagatctttctcctgacttcagtaacgcctctcacgtcagcggcatgcccggtccatcctccggtcaagcatgttccagaccagcctatacaaagaaagataccatggagtggcatagccaaatgcacagcgtaaccctgcacccatccacatggctcagaaacggcgtggcttcattaaagaactggtcactgaagaagaaggcgaaggctgcccgtcccgaagaggaaaagattgccagtccaaagggaccgttagagccacctccacatgcctctggtgtaccagaggccaactccttgcaagaggaacagaaagaccttcctctccgggcagcggaggggctgagtccagtccagagtgcacagaggtgttcctccagcccctttcaagactctgagcggcattgctctagccctttctcccttgtggagtcacgcctgaaactctgcatgaaatcccacgaggagattgagccaggcagtcaaagctcatcaggatcactgccttgggaaagggcgtctgccagcagctggacgctggaggacgctacctcaccagacagtggacccactgtcgtctgcgacatcgaagatagatatcttaccaaagatatttag

SEQ ID NO: 30645 - DNA, 3507 bp, synthetic construct
  misc_feature 1..3507: note = Description of Artificial Sequence: Synthetic coding sequence
  source 1..3507: mol_type = other DNA
atgagcgctcgggaacggcagcccgcattgaagaagaagatgaaaacgcttgcagagcgcaggaggtctgccccttctctgattttagacaaagcactgcagaaaagaccgactactcgcgactccccttccgccagtgtcgacacttgtaccttcctgtcatctcttgtctgttctaatagaaccctgctcattgacgggagggccgaactgaaaagaggactgcagcgacaagagcggcacctgttcctttttaacgacctttttgtggttgctaaaatcaagtacaataacaactttaaaatcaagaacaagattaagttgaccgatatgtggacggccagttgtgtggatgaagttggcgagggcaatacaaacgctatgaaaagctttgtgcttgggtggcctactgtcaattttgttgcgaccttttccagcccagagcaaaaagataagtggctttccttactgcagagatacataaatctagaaaaggagaaggattaccctaagtcaattcctctgaagatcttcgcaaaggatattggcaactgcgcctatagcaaaaccatcactgtcatgaactctgacacagccaacgaggtcattaatatgtctttacccatgctggggataacaggctccgagagggactaccagttgtgggtgaattccgggaaagaagaagccccataccccctgattggtcacgagtacccctacggcattaagatgtcgcatttaagagatagcgcactcctgacacccggaagtaaggattccacaacaccgtttaacttgcaagagcctttcttgatggagcagttgccaagggagatgcagtgccaatttatactgaagccttcccgtctggccgctgctcaacagttgagcgactccggccacaagacattcaaaaggcggaggtcaataattaactgggctttctggaggggctcttcaacgcatctggacaacctgccttcaagtcccacgtcccctatgccaggtcagctgtttggcatctccctgcccaacatttgtgagaacgacaacctgccaaaacccgtgctggacatgctcttttttcttaatcaaaaggggcctttgactaaagggatcttcaggcaatcagctaacgttaagtcttgcagagagctgaaggaaaaacttaactcaggtgtcgaagtacatctcgactgtgaatctatcttcgtcattgcatccgtgctgaaggacttccttcgcaacattcccggtagtattttttcgagtgacctttacgaccattgggtctccgtgatggaccagggcaatgatgaggagaagattaatactgtacagcgcctcctcgaccaactgcctcgagctaatgttgttttacttcggtatctttttggtgttctgcacaacattgaacaacactcatcctctaatcagatgacagctttcaaccttgctgtctgcgttgcccctagtatactatggcctccggcttcgtccagtcctgaactggaaaatgagttcaccaagaaagtctccctccttatccaattcctcattgagaactgcttaaggatcttcggggaggagatcacatccctatttcgggaggtgagcgttaggtgcgatacaagggagaatgcaagcgatattagttgtttccaactcaacgatagctcatatgactctctcgagaacgaattgaacgaggatgtggacgctccctgctcagatctcgtgaaaaaactggggcaggggagccgatctatggatagcgtgctgaccctgagcgattatgatctcgaccaaccagaggtcgaaggactcctgaccttgagcgactttgatctggcgcactccaaggacgaggatgtccagatgaagagaccactcgagagcaaacctgtcaatattctggtttacaccaagattcctctccgtgaccacgcccgagccccatctgctatgtgcacccctagctacctcagcactgccgcagctaacgctgctaaatccctaagaagacacagaaggtgcagtgagcccagcatcgactacttggattcaaagcttagctacctaagagagttctaccagaaaaagctgcgcaaaagcagctgtgacgcgatcttatcccaaaaggatgaagactatctcaagcagaatcagccactgcaggaagaaggcaagacttgctttaaacagtctctcgttaccggcactgacgtgtctaagaaaaatgccactacgcagaacaccaaaaagaaatccctgagcggaagtgaaggcaaccacgttaagctgttcccaaagtcaaaaccagtagccatcagtgtagcttcatattcccccatgagctcccaggatcatagcaagaatcagccttttgatgtgaacacaagcggatactctccccctcataccgcagatgctttgaagggaccgagaactcacagaaggtgtagcgaacccaatatcgaagaccagaacaggaagctcacttacctgcggggaatctactctaagaaacagcacaagactagctgcgaggcgggattacttcatggagaagaagactatttgaaacggcacaagagcctccagatggaaggccagaagttgatcaaccagtcgctggtgatgggaattgaagtcgggaagagctccgccacaaaccaaaatactgagaaagtcctgcctcccagactaaatctctgtcctagaacaagttactcatctcttagttcccccggaactagtccaagcggcagcagcgtaagttcccaagatagtgcattctcgcagatttcggagcactctgtgttcactcccaccgagacttcctcacccattgactgcacttttcaagcccaacggaaacgggaagacctctccccggatttctccaatgctagccacgtgtcaggaatgccgggacctagttcgggacaggcctgctctcgcccagcctacaccaaaaaagatactatggaatggcactcccagatgcactctgtgaccctccatccttctacatggttgcgtaatggcgtggcctccctcaagaactggagcctgaagaaaaaggccaaggccgctagacccgaagaggaaaaaatagctagtccaaagggacccctggaaccaccacctcatgcctccggagtgcctgaagctaactccttgcaggaggaacagaaagacctgccactgcgggcagcagaagggctgtcccctgtgcagtctgcccagaggtgctccagcagtccatttcaggattccgagcgtcactgtagctcaccttttagcctggtggaaagtcgtctgaaactttgtatgaaaagccatgaggagatagagccgggttcacagtctagcagcgggagcctgccctgggaacgggcaagtgcgtcgagttggacattagaagacgcaacctcacctgattccggaccgactgtggtctgtgatattgaagacaggtacctgaccaaagatatttag

SEQ ID NO: 30646 - DNA, 3468 bp, synthetic construct
  misc_feature 1..3468: note = Description of Artificial Sequence: Synthetic coding sequence
  source 1..3468: mol_type = other DNA
atgaagacactggcggagcggaggcgttccgccccttcactgattctggacaaagcacttcagaaaaggcccaccactagagactcgccgagtgcttccgtcgacacgtgcacttttttgtcatccttggtgtgcagtaaccgcacattgctgatagatgggagagccgaactgaaacggggtcttcagcgacaagagagacaccttttcctgttcaacgatttatttgtcgtggcaaagatcaaatataataataatttcaagattaaaaataaaataaaactaacagatatgtggaccgcgtcttgcgtggatgaggtaggggagggaaacactaacgctatgaaatcttttgtgttgggctggccaactgtaaattttgtagccacgttttcctcaccagaacagaaagataagtggttatcgctcctacagcggtacatcaacctcgagaaggaaaaggactatcccaagagtatccccctgaagatttttgccaaagacatcggaaactgcgcctactccaagaccattacagttatgaatagtgacacagccaatgaggtcatcaacatgtcccttccgatgttaggtataactggctccgaaagggactatcagctgtgggtcaactctgggaaggaagaagcaccgtatcccttaatcgggcatgagtatccttatggaattaaaatgagtcatctcagggactctgctctcctgacgccaggctctaaagacagcactactccattcaatctgcaagagccctttctcatggagcaactccccagagaaatgcagtgtcaatttattctcaagcccagccgacttgccgctgctcaacaactttccgactcgggacataaaactttcaaacggagacgatcaatcatcaactgggccttctggcgtgggtccagtacccacctggacaatctgccctcatcacctaccagcccaatgcctggacaactgttcggaatctctctgcctaatatctgcgagaatgacaatctgcccaagcctgtcctggacatgttgttttttcttaaccagaagggaccccttacgaaggggatcttcaggcaaagcgcgaacgtgaaaagttgtagagagctcaaggagaagttaaactctggggtagaagtgcatctggattgtgagagtatctttgtaatagcctcagtgctgaaggatttccttagaaacatccccggaagcatattttccagtgatctgtatgaccattgggtatccgtgatggatcaggggaatgacgaggagaagatcaacacggtccagcggctgttggatcaactgccacgagccaatgtggttttgctgcgctatctgttcggcgtgctccacaatattgaacagcattccagctccaaccaaatgacggccttcaatctggcggtatgcgtggctccgtctatcctttggcctccagccagctcctcaccagagctcgaaaacgagttcacaaaaaaggtgtccctgttgattcagttcctgattgagaattgcctccgcatcttcggtgaggagattacctctctcttcagggaagtctccgtcagatgcgacacccgcgaaaatgcaagtgacatctcctgtttccaactgaatgactcaagctatgatagtttggagaatgaactaaacgaggacgtggacgccccttgctcggacctagttaagaagctcgggcaagggtctcgatcgatggattcggtgctcactttgtctgactatgacttggatcagcccgaggtcgaggggcttttaacactaagcgattttgaccttgcccattccaaagacgaggacgtacaaatgaaacgtcccctggagtcaaaacctgtcaacatcttggtttacaccaaaatccctctgcgggatcatgccagggcgccaagcgcaatgtgcaccccctcttacctgtccacagccgctgccaacgcagctaagagtctccgacggcacaggcggtgctccgaaccgtcaatcgactacctcgattcaaagctcagttacctaagggaattttaccagaagaagctccggaaatctagctgcgatgctattctctcacagaaggacgaggactacctgaagcaaaatcagccgttgcaggaggagggcaagacttgcttcaaacagtctctggtgactggtactgacgtgtcaaaaaaaaatgctactacccagaataccaagaaaaaaagcctgtctggctcggaggggaatcacgtaaaactgttccctaaatcaaaacccgtggcaatatctgttgcctcatacagcccgatgagttcccaggatcattccaagaatcaacccttcgatgtgaatactagcggttactctcctccgcacacagccgacgctctcaaaggaccaaggacacatagaaggtgcagtgagcccaatatcgaagatcaaaaccgcaaactgacttatctaagaggcatatacagcaagaagcaacacaaaacatcatgcgaagccggactgcttcacggtgaggaggattacctgaagaggcacaagagtctccagatggagggtcagaagctcatcaaccagtcgctcgtaatgggcatagaagtcgggaaatctagtgctacaaatcagaatacagagaaggtgctgcccccacggctgaacctatgccctcgaacctcctacagcagcctgtcaagtcccggaacctcaccctctggatcatccgtgtccagtcaagattctgcattcagccagatttccgagcactccgtcttcactcctacagaaaccagctctcccatagattgtacctttcaggcccagaggaaacgggaggaccttagcccagacttcagtaacgcatctcatgtgagcggcatgccgggaccgtcctctggtcaggcctgctcaaggccggcatataccaagaaggatacaatggaatggcactcccagatgcactctgttactctccatcctagtacatggctgagaaatggcgtggcttcccttaagaactggtctcttaaaaagaaggccaaagcagctagacccgaagaagaaaagattgccagccctaaaggaccccttgaaccaccccctcacgcctctggagtacccgaggcaaacagcctccaggaggagcagaaggacttgcccttgagagctgccgaggggctgtctccggtgcagtcagcccagcggtgcagctcatcaccttttcaggacagcgagcggcactgctcaagtccttttagtctggttgagtcacgtctgaagctttgtatgaagtcacacgaggagatcgaacctgggtcacagagtagctcaggtagccttccatgggagcgggcatcagctagctcctggacactggaggacgcaactagccctgactccggtccgacagtggtttgcgacatcgaagatagatatctcaccaaagatatttag

SEQ ID NO: 30647 - DNA, 3468 bp, synthetic construct
  misc_feature 1..3468: note = Description of Artificial Sequence: Synthetic coding sequence
  source 1..3468: mol_type = other DNA
atgaaaacactggcggagcgaagaagatctgccccatccttgattctagacaaggcattacagaagagaccaaccacacgcgattctcccagcgcttctgttgacacgtgtaccttcctttcatcgctcgtctgctcaaaccggacactgttaatagacgggagggcggagttaaagcgcggacttcagagacaagagaggcatctgttcctttttaatgacttgtttgtggtggccaaaattaagtacaataataactttaagattaaaaataaaatcaagctgaccgatatgtggaccgccagctgcgtggatgaggtgggagaaggaaacaccaatgccatgaaaagcttcgtgcttgggtggcccacagtgaattttgtagcgacattttcctctccagagcaaaaggacaaatggctgtcgctgctgcagcggtatataaatctggagaaggagaaagattatcccaagagtattcccttaaagatcttcgccaaagatattgggaactgtgcatattccaagacaattacagtaatgaacagtgacaccgccaatgaggtcataaatatgtctttacccatgttggggatcaccgggtccgagagagactatcaactgtgggtcaatagtggcaaggaagaggccccttatcccctaatcggacatgagtatccctatggcataaaaatgtcgcatctgcgcgacagtgcactgctgactccgggatctaaagatagtacaaccccatttaatctacaggaaccgttcctgatggaacagctccccagagagatgcagtgtcagtttattctgaagccttctagattggccgctgctcagcagctcagtgactcaggccataagacttttaagcgccgtcggtccattatcaactgggctttctggagggggagttccacccaccttgacaacttgccgagctctcccacatcccccatgcccggacagctatttggcatctctctgcccaatatctgtgagaatgataacctgcccaaaccagttttggacatgttattctttctaaaccaaaaaggcccattgaccaaagggatttttcgccagtcagccaatgtgaaatcctgcagagaattgaaggaaaaactgaacagtggagtggaggtgcaccttgactgtgaatcaatctttgtaatcgcctcagtccttaaagatttccttcggaatattccgggttctatctttagttcggacctgtacgaccattgggtatcagtcatggaccagggcaatgatgaagagaagattaacacagttcaacgactgcttgatcaactaccccgagccaacgtagtgctgctgaggtacctcttcggagttctgcataacattgaacagcactcttcaagtaatcagatgactgcgtttaatctagcagtttgcgttgctccatccatcttgtggccaccagcatccagtagtcctgagttagaaaatgagtttacgaagaaggtctcactcctgattcaattcttgatagagaattgtctgcgtatttttggtgaagaaatcacatccctgtttcgcgaggtgtccgtgaggtgtgacacccgagagaacgcttctgacatctcatgtttccaactaaacgatagctcctacgactctctggagaatgagcttaacgaggatgtggatgcaccatgttcagatctggtgaagaaattgggtcagggttccaggagcatggacagcgtcctcaccctaagcgactacgatctggaccagcctgaggtcgaagggcttcttaccctatcagacttcgatctagcacacagtaaggatgaggacgtccagatgaaaagaccactggagtctaagccagtgaatatcctggtttacactaagatccctctgcgagatcacgcccgagccccatccgccatgtgcactccaagttacctgagcaccgccgcagccaatgctgccaaatctttgagacgacacagacggtgttcagaaccttctattgattaccttgactcaaagctgtcctatctaagggagttttaccagaagaaacttcggaaatcctcatgtgacgccatcctgtcccagaaggatgaggattatctgaagcaaaaccaacctctgcaggaagaaggcaagacgtgcttcaaacagtcactcgtcaccggaactgacgttagcaagaaaaatgcaactacgcaaaacacaaaaaagaagagtctttcagggtccgaggggaaccacgtcaaattgttcccaaagtctaagccagtggcgatctcggtcgcctcttatagcccgatgtctagccaggaccactctaagaaccagccctttgacgtgaatacttccggatattcgcctccgcacaccgccgacgccctgaagggaccacggacgcatcgaaggtgttctgagccaaatatcgaagatcaaaaccgcaagctcacttatctccgtggaatatactccaagaagcagcacaagacctcttgtgaggcagggttgttgcatggagaagaagactatctcaagagacacaagtccctgcagatggaaggccagaaactaattaatcagtctcttgtcatggggatcgaggtgggaaagtccagtgcgactaatcagaataccgaaaaagtcctccctcccagattaaatctgtgtcctcggacatcgtacagcagtcttagctccccgggaacctccccatctggctctagtgtgagcagtcaagactctgcattttcccaaatctccgaacacagtgtgttcactccaacggagacatcgtcaccaatcgattgtaccttccaggcccagcgcaagagagaggatctgagtccggattttagcaacgcaagccacgtgtccgggatgcccggaccaagtagcggccaggcttgtagcagacccgcttatacaaagaaagatactatggagtggcattctcagatgcactcggtcactttacacccttcaacatggttgcggaacggtgtggccagcctgaagaactggagcctcaagaagaaagcaaaagcagccaggccagaggaggaaaagatcgcctcgccgaagggcccacttgagcctcctccgcacgccagtggcgtccccgaggctaactccctccaggaagagcagaaggaccttcctctgcgggctgctgaagggcttagtccagtgcaatcagctcaacgctgttctagttctcctttccaggatagcgaaaggcattgttctagcccctttagcctcgtggagagccggctgaaactgtgcatgaagagccatgaggaaatcgaacctggcagccagtccagctccggatcgctgccttgggagagagcatctgcgagttcatggactctggaagacgccacaagcccagacagcgggcctaccgtggtgtgcgacatcgaagataggtatctgacaaaggacatctag

SEQ ID NO: 30648 - DNA, 2196 bp, synthetic construct
  misc_feature 1..2196: note = Description of Artificial Sequence: Synthetic coding sequence
  source 1..2196: mol_type = other DNA
atggaccaagggaatgatgaggaaaagatcaacacagtgcagcgactccttgaccagctcccacgggcaaacgtggtgctgttaaggtatttatttggggtcctacacaatattgagcagcattcgagctcaaatcagatgactgcattcaacctggcagtctgtgtagctccatctatcctgtggccaccagcaagctctagtcctgagcttgagaatgaattcactaagaaggtaagtctgctgatacaatttcttattgagaattgcctgagaatcttcggtgaggagataacaagcctgttcagggaagtgagcgtgcgctgcgatacacgggagaacgcctccgatatctcctgttttcaactgaacgactctagttacgacagcctggaaaacgagctgaacgaggacgtcgacgctccatgcagcgacctggtaaagaagctcggccagggaagccgcagcatggactcagtgctaaccctttctgattacgacctagaccaacccgaggtcgagggactgttgacgctgtccgacttcgatttggcccactctaaggatgaggatgtgcagatgaaaaggcccctggaatctaaaccagtgaacattcttgtgtatactaagatccccctgcgggaccatgcaagggccccttccgcgatgtgcacacctagttatctctctacagctgctgctaatgccgcaaaatcactgcggaggcaccgtcgttgtagcgagccttcgattgactacttagacagcaaactcagttacctccgcgaattttatcagaaaaaacttcgtaaatcgagctgcgatgctattctgtcccagaaagacgaggattatctgaaacaaaatcagcctcttcaggaagaaggcaagacttgctttaagcagtccttggtcacaggcaccgacgtgtcaaaaaagaatgctactacccagaatacaaagaagaaaagcctaagcggctccgagggcaaccacgtaaaactgtttccaaagagcaagccggtggcgatatccgtcgcgtcatacagtccgatgagttctcaggatcattcaaaaaatcagccttttgacgtcaataccagtggctattcaccaccgcacacagccgacgcacttaaaggcccaaggacacatagaaggtgttcggaacctaacattgaggaccagaacagaaaactcacgtatctcaggggtatctacagtaagaagcagcacaagaccagttgtgaagctggactcctccacggcgaagaagactatttgaaaaggcataagtctctccagatggaaggccagaagctgataaatcagtcactggtcatggggatcgaggtgggcaaatctagtgccactaatcaaaatacagagaaggtgctgccccctagactgaatttgtgtcctcgtacctcgtattcctccctaagtagccctggcacatcgccatcagggagttcagtctcttcccaggattccgctttcagccagataagtgagcacagcgttttcaccccaaccgaaacctcttctcctatcgattgcacgtttcaggcacagcgcaaacgggaggatctgtcaccagattttagcaatgcgtctcacgtaagcggaatgcccggaccaagctctggccaggcgtgtagcagacctgcctatacgaaaaaagatactatggagtggcacagtcaaatgcactcagtcactctccaccctagcacttggctccgtaatggagtggcatcactgaaaaattggtcgctaaagaaaaaggcaaaagcggcacgacccgaggaagaaaagatcgccagtcctaagggccctttagagccaccccctcacgcctcaggcgtccccgaagcaaactctttgcaggaggaacagaaagacctgcctctgcgcgcagccgagggactgtctccggttcagtccgctcagcggtgcagcagcagcccatttcaggattctgagcgccactgctcctcgcctttcagtttggtcgagtcccgccttaaactgtgtatgaaatctcacgaggagattgagcctggctcccagagtagctcaggaagcctcccgtgggaacgcgcaagtgcaagttcatggacattggaggatgctacatcgcccgactccgggccaaccgtggtctgcgatatcgaggatcgcaactgctgttag

SEQ ID NO: 30649 - DNA, 3498 bp, synthetic construct
  misc_feature 1..3498: note = Description of Artificial Sequence: Synthetic coding sequence
  source 1..3498: mol_type = other DNA
atgaccttctggatcatcataaataagaagatgaagaccctcgccgaacgtaggagatccgccccttcccttattctggataaagccctccaaaagagacctacgacccgcgacagcccaagcgcctcagtggatacttgcacatttttgagtagcctggtctgtagtaaccgaactctcctgattgacggcagagccgaattaaaaagggggctacagcgacaagagcgacatctgttcctctttaatgacctgttcgtggtggccaaaataaaatataacaacaactttaaaattaaaaacaagatcaaacttaccgacatgtggaccgcctcttgcgtcgatgaggtgggcgaaggaaatacaaacgccatgaaatccttcgtccttggatggccaacagtgaacttcgtggccacattcagttctccggagcagaaggataagtggttgagtctgctgcagaggtatattaacctcgagaaggagaaggactatccgaaaagcattccgctcaaaatatttgctaaggacatagggaattgcgcatactctaagacaataaccgtgatgaacagtgacacggccaatgaagtcattaatatgagccttcccatgctaggtatcacgggatcggagcgggactatcaattgtgggtgaactctggcaaggaggaggccccatacccattaattgggcacgaatatccatacggaataaagatgtctcatttgcgagattctgccctgttgactcctggaagtaaggactccactacccctttcaacttgcaagagcccttcctgatggagcagctgcctagggaaatgcagtgtcagtttatactgaaaccctctcggctagctgctgcacaacagttgtccgacagcggccataaaacattcaaacgacggagaagtatcatcaattgggctttttggcggggtagtagtacccacttagataacttgcccagctcacccacctccccgatgccgggtcaactattcgggatatctctgcctaatatttgtgaaaatgacaatctccctaagccagtcctcgacatgctattctttctcaaccagaaggggccactgaccaaaggcatcttcagacagagtgcaaatgtcaagagttgccgtgagctcaaggagaagctgaactcaggggtcgaggtccatctagactgcgagagcatcttcgtgattgccagcgttttaaaggattttctacgcaacatcccaggctctatcttctcttctgacctctacgaccactgggtgagcgtaatggaccagggcaatgacgaggagaagataaataccgttcaaagattgttggatcagctgccgcgagctaatgtggtgctcctacgttaccttttcggcgtgcttcacaatattgagcagcatagctcttccaatcaaatgactgcctttaacctcgccgtgtgcgtggcaccgagtattctgtggccaccagccagtagctctccagagctggaaaacgaattcaccaagaaggtcagtctgttaatccaatttctgattgagaattgtcttcggatcttcggcgaggaaattaccagcctgttcagagaagtgtccgtgcggtgtgatactcgtgagaacgccagtgacatttcgtgtttccagctgaacgatagttcatatgactctctggaaaacgagttaaatgaagacgttgatgccccttgttccgacctcgtcaaaaagttaggtcaaggctccaggtccatggacagcgttctcaccctcagtgactacgatctggaccagcccgaggtcgaaggcctgctgaccctttcagatttcgacctggctcatagtaaggacgaggacgtccagatgaagcgtccactcgagagcaaacctgtgaatattttggtgtacacgaaaataccgctgcgcgatcacgcgcgagctcccagcgccatgtgcacaccatcgtacttgagcacagccgctgccaacgccgctaagagtctcagaaggcaccggcgatgttctgaaccgtcaatagactacctagactctaaactgagttatcttcgcgagttttatcaaaaaaagctgcgaaagtcaagctgcgacgccatcctgtcccagaaagatgaagactacctcaagcagaatcagccactccaggaagaaggcaagacttgcttcaaacagagcctagtgacaggcaccgatgtgagtaaaaagaacgctacaactcaaaacactaagaaaaagagtctgagtggctcagaagggaaccacgttaaattatttcccaagagcaagcctgtggcaattagtgttgcgtcatacagtccgatgagttcccaagaccatagcaagaatcaaccttttgatgtgaacactagtggctacagccccccacataccgccgatgcgctgaagggacctcggacccacagacgatgtagcgagcccaacattgaggatcagaaccggaaactgacttatctgcgtggtatctactcaaagaaacagcacaagacttcctgcgaagccggtttgctccacggtgaggaggactacctgaaacgccacaagtcattacagatggaggggcagaaactgattaaccagtcactcgtgatgggaattgaggttggcaaaagctcagctactaatcagaacactgagaaagtcctgccacccaggctcaacctgtgtccaagaaccagctatagctctttatcatctccgggaacgtccccatctggttctagtgtctccagccaggactccgctttttcacagatctctgaacatagcgttttcacaccaaccgagaccagtagccccattgattgcacttttcaggcgcagaggaaaagggaggatcttagccccgactttagtaacgcctcacacgtcagcggcatgccaggcccatcttccggccaagcctgttctcgtcccgcttatactaaaaaggacacaatggaatggcactcccagatgcactctgttactttacaccccagcacgtggctccggaatggcgtggcatcgcttaaaaactggagtctgaagaaaaaagccaaagctgcaaggcccgaggaggaaaagattgctagccccaaaggaccgctggagcctcccccacatgcctccggcgtacccgaagcaaatagtctgcaggaagaacagaaggaccttcctctgcgggcagcagagggcctctcacccgttcagtctgcccagagatgctctagtagcccctttcaagactccgagcgccactgttcatcacctttcagcctggtggagtcaaggcttaagctctgcatgaagtctcatgaggagattgagccgggaagccagtcctcaagtggctctctgccttgggagcgcgctagcgcttcatcttggactctggaggacgccacatctcctgatagtgggccaaccgtggtttgcgatatcgaagacaggtatcttacgaaagacatttag

SEQ ID NO: 30650 - DNA, 4542 bp, synthetic construct
  misc_feature 1..4542: note = Description of Artificial Sequence: Synthetic coding sequence
  source 1..4542: mol_type = other DNA
atgatgatggcacgcaagcaggacgtccgcatcccgacttataacatctctgtggtgggcttatccggtaccgagaaggaaaagggccaatgcggcatcggcaaatcctgtctctgcaaccgattcgtacgccctagcgccgatgagtttcatctcgaccatacctcagttctcagtaccagcgacttcggcggaagagtggtgaataacgatcactttctctattggggagaggtatctagaagcctggaggattgtgtggagtgcaaaatgcatatcgtcgagcagaccgagtttattgacgaccagacatttcagccccataggagcactgccctgcagccttacattaagcgggcagcagcaactaaactagcctcagcagagaagctgatgtatttttgtacagaccaacttggattagagcaggacttcgaacagaagcagatgccagacggaaaactgctagtagacggctttctcttgggcatcgacgtgtcaagaggaatgaatagaaattttgacgaccagctgaagtttgtttccaacctttacaatcagcttgctaagaccaagaaacctatcgttgtggtgctgactaaatgcgatgagggggtggaaagatatatccgggacgctcatacttttgccctctccaagaaaaaccttcaggttgtagaaaccagtgcccgaagcaatgttaacgtggacctcgcattctcaactcttgtgcagctgattgacaagagtcgcggaaagactaaaataattccatactttgaggctcttaagcagcagagtcagcaaattgcaaccgccaaagataagtatgaatggctggttagtaggattgtcaagaaccataacgaaaactggctgtccgtgtctcggaagatgcaggcaagccccgaataccaggactatgtgtatctggaggggacacagaaggcaaaaaaactcttcttacagcacatccaccgtttgaaacatgagcatatagagcgcaggcgcaagctgtacctggccgcacttcccttggccttcgaggccctgatccctaatctcgacgagattgatcatttgagctgcattaaagccaaaaagttgctggagaccaaacctgagttcctgaagtggtttgtggtactcgaagagactccttgggatgccacgagccatattgacaacatggagaatgaaaggatcccatttgacctgatggacaccgtacctgccgagcagctttatgaagctcacctcgagaagcttcgcaacgaaaggaaaagggttgaaatgcgacgggcttttaaggaaaaccttgagacctcgccgttcatcacaccagggaaaccttgggaggaggcgagatccttcattatgaacgaagacttctatcagtggttggaggagagtgtgtacatggacatctacgggaagcatcagaaacagatcatcgataaagcaaaggaagaatttcaggagctgctgctggaatactcggagttgttctatgagctggaactggatgccaaaccatccaaagagaaaatgggagttatccaagatgtgttgggggaggagcagagatttaaagcccttcagaagctccaggccgagagagatgccctgattctaaagcacattcatttcgtttaccatcctacaaaggagacgtgcccgagttgtcccgcttgcgttgatgctaagatcgaacatcttatctcgtcgaggtttattcggccaagcgacaggaaccagaaaaacagcctgtccgaccccaacatcgatcggatcaatctggtgatcttaggcaaggacggcctcgccagagagctggctaatgaaatccgtgcactttgtaccaacgacgacaagtacgtaatagatgggaagatgtatgagctctcacttagaccaatagaagggaatgtacgcctaccagtcaacagcttccagactcctaccttccagccccatggttgcctgtgtctctataattcaaaagaatccttgagttacgtagtcgaatccattgagaagtctcgcgaatcaacattggggcgtcgtgacaatcacctggtgcatctgcccctgaccctgatactagtgaacaagcggggagatacctctggcgagaccctccattcactgatccagcaaggacaacagatcgcctcgaaactgcagtgtgtgttcttggatcctgcaagcgcaggaattggatatgggcgaaacatcaacgagaaacagatctctcaagtcttgaaagggctactggatagtaagcgtaacctgaatctggtctcctccaccgcaagcataaaggacttagccgatgttgatctgagaatcgtcatgtgcctgatgtgcggtgatccttttagtgccgacgatattcttttccctgttctgcaatctcagacctgcaagtcaagtcactgcggatcaaacaacagcgtcctgctggagctgcccattggactccataagaaacgcatcgagctgtccgttctgtcatatcactctagttttagcattcgcaaatcccgcctggttcacggttacattgtcttttattcagccaagcggaaggcctcactcgccatgctccgcgcatttctgtgcgaggtgcaagacattatccctattcagttggtggccctaaccgatggcgcagttgacgtgcttgacaacgacctttccagggaacagctcacggaaggggaggaaattgctcaagaaatcgacggtcgctttacaagcataccatgttcccagccacaacacaagctcgagatcttccaccccttcttcaaagacgtggtggagaagaagaacattatcgaggccacccatatgtatgacaacgcggcagaggcctgcagcaccactgaggaggtcttcaactcccccagggctggatccccgctttgtaactccaacctgcaagacagcgaggaggacattgagccctcctactccttgttcagagaagacacatctctgcctagcctgagtaaggaccactctaaactaagcatggaactcgaaggcaatgatggactgtccttcatcatgtctaacttcgaaagtaaacttaacaataaggttccgcctcctgtaaagcctaagccgcctgtgcattttgaaatcaccaaaggggatcttagctacctcgaccaaggacaccgtgatgggcaacggaagtctgtgtcgtcctctccctggctccctcaggacggtttcgaccctagcgactatgctgaacccatggacgccgtggtaaagccccgaaatgaagaagaaaatatctattctgtgcctcatgattccacccaagggaagataattaccattcgtaacatcaacaaagcacagtcaaacgggtccggcaacggctctgatagcgagatggatacaagtagcctcgaacggggaaggaaggtgtccatcgtttctaagcctgttttatatcgaacccgctgtaccaggttggggaggttcgccagctaccgcacatcattttccgtggggtctgacgacgagttgggcccaattcggaagaaggaagaagatcaagctagccagggctacaaaggcgataatgcagtgatcccgtatgaaacagacgaagatcctaggagacggaacattttacgctcactaagaaggaacaccaagaagcctaagcctaaacctcggcctagcattaccaaggccacatgggaaagcaactacttcggcgtgcctctgacgacagttgtaactccagagaaaccgattcctattttcatagagaggtgcatagaatacattgaggctacgggtctcagcacggaaggtatctaccgagtgagtgggaacaaatcagaaatggaaagcttgcagaggcagttcgaccaggatcataacttagacctggcggaaaaggattttacggtgaacactgtggcgggagctatgaagtcattcttctccgaattgcctgaccctctcgtcccctataacatgcagattgacctggttgaggcacataagatcaacgatagggagcagaaattgcatgcactgaaagaagtcctcaagaagttcccaaaggagaatcacgaggtttttaagtacgtcatcagtcacttgaacaaggtgagccataacaacaaagtgaatctaatgacctctgagaatttgtccatttgtttctggccgacactcatgcggccagacttttccacaatggacgcactgaccgctaccagaacttaccagactataatagagctcttcatccagcagtgcccctttttcttttataaccggccaattacagaaccaccaggcgctcgaccctcttctccttccgccgtggcctcgactgtgccctttctgacctccacccctgtgacatctcagccttctcctccccagtctccacctccaacacctcagtcccctatgcagcctctgctaccatcacctcttcaccctcatcgtcccactccccagccttctaggaacatcccttggcagaccaaagaacactag

SEQ ID NO: 30651 - DNA, 4499 bp, synthetic construct
  misc_feature 1..4499: note = Description of Artificial Sequence: Synthetic coding sequence
  source 1..4499: mol_type = other DNA
atgatgatggcgcgtaaacaagatgtgcgcatccccacgtacaatattagtgttgtcggactgagcggaaccgagaaggagaagggtcaatgcgggatcgggaaatcctgcctctgtaaccgctttgtgcggccaagcgccgacgagtttcacttagatcatacttccgtcctttctacttccgattttggagggcgagtggtcaataacgaccatttcctctactggggagaggtatctaggagcttagaggattgtgtagaatgcaaaatgcacattgtcgagcagaccgagtttatagatgatcaaacctttcagccgcaccgtagtacagcactgcaaccctatatcaaaagagccgctgcgactaaactagcctctgcagaaaaattgatgtacttctgcacagatcaactaggtctggaacaggactttgagcaaaagcaaatgccggacggcaaactgcttgtcgatggcttcttacttggcatagatgtctctcggggaatgaacagaaattttgacgaccagctgaaatttgtatcgaacctgtacaaccagttagcaaaaaccaagaagcccatcgtcgtcgtacttacgaagtgtgacgaaggcgtcgaacggtatattagagatgcccacacttttgctcttagcaaaaaaaatctgcaagttgtcgaaacctcagcgcgtagcaatgtcaacgtggaccttgcattcagcactctagttcagcttatagacaagagtcgcggaaaaacaaagataatcccgtattttgaggcactgaagcagcagtctcaacagatcgctactgcaaaggataaatacgaatggctcgtgtctagaatcgtgaagaatcataacgagaattggctcagcgtctctagaaagatgcaagcaagccctgagtatcaggactacgtgtacctggaggggactcagaaggcgaaaaagttgtttctccagcatatccaccgacttaaacacgagcacatcgagagacggaggaagctttatctggctgcactgcctctggcttttgaggcactgatcccgaatcttgatgaaatcgatcacctaagctgtattaaagccaagaagctcctggaaaccaagccagagtttctgaagtggttcgtcgtcctggaggagacaccctgggacgcaacatcacacatagataacatggagaacgaacggatccctttcgacttaatggacactgtgcccgctgaacaactctacgaggcgcacctggagaaactgcggaacgagcggaagcgtgtggaaatgcgtcgggcatttaaagaaaacctggagacaagccccttcattacacccggtaagccatgggaggaggctcgctcctttatcatgaatgaggacttctaccaatggctggaggagagtgtttatatggatatttacggcaagcaccagaagcagatcatcgacaaagctaaagaagagttccaagaattactgctggaatattcagaattattttacgagctggagctcgatgctaaaccctcaaaggaaaaaatgggagtgatccaggacgtgctgggggaggaacagcgcttcaaggccctgcagaaactgcaggccgagcgggatgcactgattttgaaacacatccacttcgtgtaccaccctacaaaggaaacgtgcccctcttgcccggcttgcgtcgatgctaaaatagaacaccttattagctcgcggttcatccgcccaagcgatagaaatcagaaaaatagcctaagtgatcctaacatcgatcggatcaacctggtgatcctggggaaagatggtctggctagagagctggcgaatgaaatcagagcactttgcacaaacgacgacaagtacgtcattgacggcaagatgtacgagctgtcactgaggcctattgagggtaacgtgcggctgccagtcaattcttttcagacacccacattccagccccacggatgtctgtgcctgtataacagtaaagagtccctcagttacgtggtggaatcgattgagaaaagtcgggaatctacactgggcaggagggataaccacctagtgcacttgcctttgacactcatcctggtgaacaagaggggcgacaccagtggagagacactgcatagcctcatacagcaaggccaacagatcgcctcaaaactgcaatgcgtatttctggacccagccagcgccggaattgggtatggcaggaacatcaatgagaagcaaatctcgcaggtacttaaaggacttttggactctaaacgaaacctcaatctggtgagctctacagcgtccatcaaagatctcgcagatgtggacttacgcatcgtcatgtgcctgatgtgcggagacccctttagcgcagatgacattctctttcccgtcttacaatcacaaacatgcaagtcttctcattgtggatcgaacaacagtgttctcttggagctgcctatcgggctgcacaaaaaaaggatcgaattatccgtgttgagctaccatagcagtttcagtattcgaaagtcgcggctagtccacggatatatcgttttctactccgccaagcgcaaagcaagtttggctatgttgcgagctttcctgtgcgaggttcaagatattatccctattcagcttgtagccctgacagatggggctgtggacgtgctggacaatgacctgtctcgagagcagctgacagaaggagaagagatcgctcaggagattgatgggcgtttcacttccataccatgttcacagccccagcacaaattagagatctttcaccctttcttcaaggatgtggtcgagaagaaaaacattatagaggcaacccacatgtacgataatgcagcagaagcctgttctaccaccgaggaggtctttaatagccctcgcgcaggatccccactgtgcaatagcaatctgcaggactctgaggaagatattgagccatcctactcccttttcagagaggacacatcgctaccaagtctgtccaaagatcactcaaaactgagcatggagctggaaggtaacgatggactctcctttatcatgtccaatttcgagtcaaagctcaacaataaggtgccgcctcccgtgaagcctaagcctcctgtacacttcgagatcactaagggcgatctgtcctacctagaccagggtcacagagatggccagcggaaatcagtgagctcatcaccgtggctcccacaagacggcttcgatccgtccgattacgccgagccaatggatgccgttgtcaagcctcgcaatgaagaagagaacatttactcggtgccccacgactctacgcagggcaagatcataaccattcgtaatatcaataaggcccaatccaacggatcaggaaatggctctgactctgaaatggatactagcagcctcgagagaggcagaaaggtcagtatcgtctctaaacctgttttgtacagaactcgctgcacaaggttaggaagattcgcctcttatagaaccagctttagtgtggggtctgatgacgagctgggccctatacgtaagaaagaggaagaccaggcctctcagggatacaagggagataatgccgtcataccatatgagacggatgaagatccccgtagacgtaatatcctcagatcactgagaaggaataccaaaaaaccaaagcccaaaccccgtccaagtataacaaaggcaacttgggaaagcaactactttggagtgcccctgactacagtcgttactcccgagaagcccattcctatcttcatcgaacgttgcatagagtatattgaggctacaggactttctacagagggtatatacagggtgtccggtaataaaagtgagatggaatcattgcagagacagtttgatcaagatcacaacttggatctggcggaaaaggacttcactgtgaatacagtggcgggagccatgaagtccttctttagcgaactgccagaccctctagttccatataatatgcagattgacttagtggaggcacacaaaatcaatgatcgtgaacagaaactgcatgcactgaaagaagttttgaaaaaatttccaaaagaaaaccacgaagtgttcaaatacgtcattagccatctaaacaaagtgtcacacaacaacaaggtaaacctgatgacttctgagaacctcagcatatgcttctggccaaccctgatgaggcctgacttcagcacgatggatgccctgactgctacaagaacctatcagaccatcatagagttatttatccagcaatgcccctttttcttttacaatcgtccgatcacggaacctcctggagccagaccttctagtccatccgcggtagcaagcaccgtgccattcctcacctctaccccagtgacatcccagccctcccctccacaaagcccaccaccaacgcctcagtcccctatgcagcctctgctgcctagtcagctgcaggcagaacacactctgta

SEQ ID NO: 30652 - DNA, 2250 bp, synthetic construct
  misc_feature 1..2250: note = Description of Artificial Sequence: Synthetic coding sequence
  source 1..2250: mol_type = other DNA
atgatgatggcccgtaagcaagacgtgcggattccaacttacaacatttccgtggtcggcctctccggcaccgagaaagaaaaagggcaatgcggcattggcaaaagttgcctgtgcaacagatttgttcggccatcagccgatgagttccacctagaccatacctctgtgctctcgacttcagattttggagggcgtgttgtgaataacgaccatttcctttactggggagaggtgagccgaagcctggaggattgtgttgagtgtaaaatgcacattgtcgagcagacagagtttattgacgatcagacgttccagccacatagatctacagcccttcagccgtacataaaaagagcagcggctaccaagctggcctccgctgaaaagctaatgtacttttgcaccgaccagttaggactcgagcaggactttgaacagaaacagatgcccgatgggaagctgctggttgacgggtttcttcttggaatcgatgtgtcaaggggaatgaacagaaattttgatgatcagctcaaatttgtatccaatctttataaccagctggccaagactaagaaaccaatcgtggtcgtgttgaccaagtgcgacgagggagtggaaagatatattagagatgcccacaccttcgccttgagcaagaagaacttacaggtagtggaaacatccgccaggagcaacgtaaacgtggacctggcctttagcactttggttcagctgattgacaagtccagaggaaagacgaaaattatcccctacttcgaagccctgaaacagcagtctcaacagatagcgacggccaaagataagtacgagtggctggtctcccggatagtgaaaaatcataacgaaaactggctgagtgtgagtagaaaaatgcaggcgtcacccgagtaccaagactatgtgtatctggaaggaactcagaaggcaaaaaaactcttcctgcagcacattcataggctcaagcacgagcacatagagcgcaggcggaaactctacctggctgcactcccacttgcttttgaggccctgatccccaacttggatgagattgaccacctgagttgtatcaaagctaaaaagcttctggagacgaaacccgagtttctcaaatggtttgtggttctggaagagaccccctgggatgccacctcccatatcgacaacatggagaacgaacgcatcccctttgacctcatggatacagttccggctgagcagctttacgaagctcacctcgagaaacttagaaacgagcgcaagcgggtagagatgcggagagctttcaaagagaacctagaaacgtcccccttcatcacaccgggtaagccatgggaggaggcacgaagctttataatgaacgaggatttctatcagtggttagaggagagcgtgtatatggatatttatgggaaacatcagaagcagatcatcgataaagcaaaagaggaatttcaggaattgctgctggaatactccgaactattttacgaattagaactggacgccaagccttcaaaggagaaaatgggagtgatccaggacgtgttgggcgaagagcagagattcaaggccctgcaaaaactgcaggcagagagggacgcactcattttgaagcacattcactttgtgtaccatccaacgaaggaaacatgcccatcctgtcccgcatgcgtagatgctaaaatcgagcaccttatttcaagccgcttcataaggccctccgatcggaatcagaagaacagtctaagcgacccaaacattgacaggatcaacctcgttatcctgggaaaggatggactggctcgggaactcgccaatgagatcagagccttatgtacaaacgacgataagtacgtgattgacggaaagatgtacgagctctctctccggccaatagaaggcaatgttcgccttcctgtaaattcatttcagaccccgacttttcagccacacggttgtctatgtctctataattctaaggagagtttgtcatatgtagtggaatcaatcgagaagagccgcgagtctaccctgggcaggcgcgacaaccatctggtgcatttacctctgaccctgatcctcgttaataagcggggtgacactagcggcgagacccttcattctctgatccagcagggacagcagattgcttcaaaactccagtgcgtctttcttgaccccgcaagcgctggagctgcagacctctcttggttgggtccaatttag

SEQ ID NO: 30653 - DNA, 978 bp, synthetic construct
  misc_feature 1..978: note = Description of Artificial Sequence: Synthetic coding sequence
  source 1..978: mol_type = other DNA
atggatatgtggactgcactgttgatactgcaagcacttcttctcccgagcctggccgacggagctactcctgctctccgcttcgttgccgttggcgattggggcggtgtacccaacgctccctttcacaccgccagagagatggcaaacgcaaaggaaattgcacggaccgttcaaattctgggcgcagactttattttatctttaggcgacaatttctattttaccggtgtgcaagacataaatgataaacgatttcaggagactttcgaggatgttttctctgaccgcagcctgcgaaaagtaccatggtacgtcctcgctggcaaccatgatcacttgggcaacgtatctgcacagatagcctatagcaagatctccaagcggtggaactttcccagtcctttctatcgcctgcattttaaaattccgcagactaatgtttccgtggctatttttatgttagacaccgtgacactctgtggcaatagcgacgacttcctgagccagcaaccagagaggcccagggacgtgaaactggctaggactcagctttcatggctaaaaaaacagctggctgcagctcgggaggattatgtgttagtcgcaggtcattaccccgtgtggtccattgccgagcatgggccaacccattgtctggtcaaacagctccggcctttgttggctacctatggggtcactgcttacctctgcgggcatgaccataatctgcagtatctccaggacgagaacggagttggctatgtcctgtccggcgcaggaaacttcatggatccttctaaaagacaccagagaaaagtgcccaatggatatctgaggttccattatgggacagaagatagcctgggtgggtttgcttacgtagaaatcagttcgaaggaaatgaccgttacctacatcgaggctagtggcaaatccctgtttaagacccggctccctcggcgagcaaggccttag

SEQ ID NO: 30654 - DNA, 2349 bp, synthetic construct
  misc_feature 1..2349: note = Description of Artificial Sequence: Synthetic coding sequence
  source 1..2349: mol_type = other DNA
atgaactcagccgagcaaaccgtcacttggttgatcacgttgggagttttagagagccccaaaaaaaccatcagcgaccctgaaggttttctgcaggctagtctgaaagatggagtggtgctctgtcggcttctcgagagactcttaccaggcacaatagagaaggtctatccagaaccaagaagcgaatcggagtgcctgagcaacataagggaatttctgcggggatgtggcgcaagcctgcggctcgaaacatttgacgctaacgacctctaccagggacagaacttcaacaaggtgctgtcttccctcgtgactctgaacaaagtgaccgcggatattggcctaggatctgactcagtctgcgcacgcccttcatctcaccgcatcaaatcatttgatagcctgggatcgcagagtctgcacactaggacatccaagctgtttcaaggacagtacagatctcttgatatgaccgataattctaacaaccagttggtggtgcgcgctaagttcaattttcagcagaccaacgaagacgagctctccttctctaagggggacgtgatacatgttacgcgagtggaggaaggcggatggtgggagggcaccttgaacggcagaactggctggttcccaagtaattatgtgcgagaggtcaaagcatcagagaagcctgtctcgccaaaatccggcactttgaagtcaccacctaaggggttcgacactacagcgatcaataagagttactacaacgtcgtgctccaaaatattctggagacagaaaacgaatactctaaggaactgcagacagtgctttccacctatcttcgcccattgcaaactagcgaaaagctaagcagcgctaatatctcatatcttatggggaatcttgaggaaatatgctcctttcagcaaatgcttgtgcagagcctggaggaatgtacaaaacttccggaggcacagcagcgcgtgggcggatgctttctcaaccttatgccccagatgaagaccctgtatctcacatattgcgctaatcacccttcagccgtaaacgtgctgaccgaacattctgaggagctcggagagtttatggaaactaagggagcctcctccccaggcattttagtgttaactacgggtctgtccaaaccctttatgcgcctggacaagtaccctacgctgctaaaggagcttgagcgacatatggaagattaccacaccgacagacaagacattcagaagtcgatggcagccttcaaaaacttatccgctcagtgccaggaggtgcgcaaacgaaaggagctggagctgcaaatccttactgaggccatcaggaattgggagggcgatgacatcaaaactctgggaaacgtaacctatatgtcacaagttctaatacaatgcgccggaagcgaagaaaagaacgaaagatacctgcttttgttcccaaatgtcctgctcatgctgtcagcctctccacgaatgagtggcttcatttatcagggtaaactgccaaccacagggatgacaattacaaagctggaagattccgagaatcaccgaaatgcctttgagatctcaggaagtatgattgagcgaattctggttagctgcaataaccaacaggacctgcaggaatgggtggagcacctgcaaaagcagactaaagtaacttcggtggggaaccctactattaaaccccattcagttcctagtcatacccttccttcacacccagttactccgagtagtaagcacgccgattctaaaccagccccactgacacccgcataccatacactgccccaccccagccaccacggaaccccccatacgacaattaattgggggccactggagccgccaaaaactcctaagccgtggtctctcagttgtctgagaccggcaccccctctgaggccctccgctgctctctgttacaaggaagacctgtcaaaaagcccaaaaaccatgaaaaagctgttgcctaagcggaagcccgaacggaagcccagcgacgaagaatttgcaagccggaagtccacagctgcactggaggaagatgctcaaattctgaaagtgattgaagcctactgcacgtctgcgaagactcggcagactctcaattccacatggcagggtaccgatctcatgcacaaccacgtgctcgcagatgacgaccaaccatctctggactctctgggcaggaggagctccttgagcaggctcgaaccaagcgatctaagcgaggattctgactatgactcaatatggaccgctcactcatatcggatgggtagtacatcccggaagtcgtgttgttcatacataagccatcagaattag

SEQ ID NO: 30655 - DNA, 2196 bp, synthetic construct
  misc_feature 1..2196: note = Description of Artificial Sequence: Synthetic coding sequence
  source 1..2196: mol_type = other DNA
atgaattccgctgagcagaccgtgacatggcttattacactgggcgtgcttgagagccccaagaagaccatctcggaccccgagggattcctccaagcctcacttaaagacggtgttgtgctgtgccgtctgctagagagactactgcctgggaccattgaaaaggtgtacccagagcctcgctccgaaagtgagtgcttgagcaatattcgtgagttcctgaggggatgtggcgctagcctgcgtctagaagatatgaccgacaactctaacaaccagcttgtcgtccgtgccaaattcaacttccagcagaccaatgaagatgaactctcattctcaaagggcgacgtgattcacgttacaagggtggaagaagggggatggtgggaggggacactcaatggccgtacgggttggtttccaagtaactacgtgcgggaggtgaaagcatcagaaaaacccgtctcccccaagtccgggactctaaagagtcctcccaaaggattcgacacaaccgctatcaataaatcctattataatgttgtcttacaaaacatactcgaaacagagaacgaatacagtaaagagttgcagactgtactctctacctaccttagacccctgcagacaagtgagaagctgagttcagccaacatctcctatctgatggggaatctggaagagatctgttctttccagcagatgctggtccagagcctggaggagtgtaccaaattgcctgaagcccaacaacgtgttggcggttgtttcctgaatttgatgccacagatgaaaacgctgtatctgacgtattgcgctaatcacccaagcgcagttaacgttcttacagagcactcggaagagctgggagagtttatggaaaccaaaggcgcatcctccccgggaatactggtattgacaactggtctgagtaaaccatttatgcgtctggataagtatcctaccctactgaaggaactggagcgacacatggaggactatcatactgaccgtcaggatatccaaaagtccatggctgcgttcaagaacctgtctgctcagtgtcaggaagtgaggaaaagaaaggaactagaactgcaaattttaactgaggctattagaaactgggaaggtgatgacatcaagaccctggggaatgtgacgtacatgtcccaggtgctaatccaatgtgctggaagcgaagaaaagaacgagagatacctcctcctgttccccaatgtactcctgatgctttctgcctctcctagaatgtccgggttcatttaccagggcaagctgccaactacgggcatgactattaccaaactggaggatagtgagaatcacaggaatgccttcgagataagcggaagtatgatagaacgaatattggtctcctgtaataaccagcaggaccttcaggagtgggtcgaacacctgcagaaacagacgaaggtgacgtcagttggaaatcctacaataaagcctcacagcgtgccctcccatacccttccctctcaccctgtgacccccagctcaaagcatgcagactctaagcctgctcccttaacaccagcataccatactctcccccatcccagccaccatggcaccccgcacactacaataaactgggggccattggaaccaccaaaaacacccaagccatggagtctaagttgtctgcggcctgcacctccccttcggccatctgcagccctttgttataaagaagatttatccaagtctcctaagacaatgaagaagctcttgccaaagcgcaagccagagcggaaacccagcgacgaggaattcgccagtagaaagtctactgcggcactggaagaggacgcgcaaattctcaaggttatcgaggcgtactgcacatctgctaagacgaggcaaactctcaacagctcttcccggaaggagtccgcccctcaggtgctgctgcctgaagaagaaaagatcattgtagaggaaaccaaaagcaatgggcagaccgtgattgaagaaaagtcattagtggatactgtgtacgcacttaaagacgaggttcaagaattgaggcaggataacaagaagatgaaaaaaagtctggaggaggaacagagggctaggaaggatctagaaaaattggtaaggaaggtgctcaagaacatgaatgacccggcatgggacgagactaacctgtag

SEQ ID NO: 30656 - DNA, 1878 bp, synthetic construct
  misc_feature 1..1878: note = Description of Artificial Sequence: Synthetic coding sequence
  source 1..1878: mol_type = other DNA
atgactgacaatagcaataatcaattggttgttcgcgcaaaattcaatttccagcagaccaacgaggacgagctttctttctcaaaaggagacgtaatacacgtcacacgtgtggaggaaggaggatggtgggaaggcacattaaatggtcgcaccggatggttccccagtaactacgtccgagaagtgaaagcctcagagaaacccgttagccccaagagcgggaccctgaagagcccgccaaagggattcgacaccaccgccattaataagagttactataatgtggtgctgcagaatatactggagaccgagaacgaatactccaaagagttacagactgtgctgtccacatacctgcggccacttcagacaagtgagaaactcagctctgccaacatctcttacttgatggggaacctcgaagagatttgttccttccaacagatgctagtgcagtctctggaagaatgtaccaagttgcccgaggcgcaacagcgcgtcggcggttgttttctgaacctgatgcctcaaatgaagaccctgtacctcacctactgcgcgaaccacccctccgccgtaaatgtgctcacagaacactcggaagaacttggcgagttcatggaaacaaagggcgcttcaagtcccggtatcctggtactgactacgggactctccaagccatttatgagactcgataaataccctaccctcctcaaggagctggagcggcacatggaagactaccacaccgaccggcaggacatccagaagtcaatggccgcttttaaaaacctatctgctcagtgtcaggaagtgaggaaaagaaaagagctggaactgcagatattaaccgaggccattagaaattgggagggcgatgatatcaaaactttggggaacgttacctacatgagccaggtgctgatccagtgtgccggaagtgaagagaaaaacgagcggtacctgctattgttccccaatgtgctcctcatgctttcagcttcccctcgcatgagcggcttcatctaccaagggaaactgccaactactggtatgacaatcactaagttagaggatagtgaaaatcaccgaaacgcctttgagatcagcggttcgatgattgaaaggatcctggtttcttgtaataaccagcaagacctccaggagtgggtagagcacctacaaaagcagaccaaggtcaccagcgttgggaatccaaccataaagccccattcggtcccgagtcatacgctcccatcccatccagtgactccctcttctaagcacgccgatagcaagcccgcacccctgacgccagcctatcacactctgccccatccctcgcatcacggcacacctcacactactatcaactggggacccctcgaaccaccaaagacccccaaaccctggtccctgtcatgtctacgtccggcaccacctttgcggcctagtgctgccctgtgttacaaagaagatcttagcaagtcaccaaagaccatgaagaagctgttacctaagcgaaaacctgagcgcaagcctagcgatgaggagtttgctagtagaaagtccacagccgcactggaggaggacgcacagattcttaaggtgatagaggcctattgcacttcggctaagacccgacaaactctcaattctacttggcaggggacggatctgatgcacaatcacgttctggctgatgatgatcaacctagcctagatagcctcggaagacgaagtagcctgtcgcggctcgaacccagcgatctctccgaggacagcgactatgactctatctggactgctcactcatatcggatgggtagtacatcaagaaaaagctgttgttcttatatttctcaccagaattag

SEQ ID NO: 30657 - DNA, 1941 bp, synthetic construct
  misc_feature 1..1941: note = Description of Artificial Sequence: Synthetic coding sequence
  source 1..1941: mol_type = other DNA
atgacagataattcaaacaatcagctggtggtacgggcaaagttcaacttccaacagaccaatgaggatgagctctccttttccaagggtgacgtcatccacgtgacacgggttgaggagggtggctggtgggaggggacactgaatggaagaactggatggttcccgagtaactatgtgcgcgaagtgaaggcatccgaaaagccagtgagtcccaagtcaggcacacttaagtcccccccaaagggcttcgataccactgcaatcaacaagagttactataacgtggtgctgcagaacattctggagacggaaaacgaatattcaaaagagctgcagactgtgctatctacttacctgcgccctctccaaaccagcgaaaagcttagcagtgccaacatctcctacctgatgggtaacctggaagagatatgctctttccagcagatgctcgtccagagtcttgaggagtgtacgaaactgcctgaggcccaacaacgagttggcggttgtttcttaaatcttatgccacagatgaagacactttatctcacgtactgtgcgaaccacccctccgctgtgaatgtgttgacggagcatagcgaagaactaggagagtttatggagaccaagggcgcatcctccccaggtatactagttctcactacagggcttagcaagccgttcatgagactggacaagtacccaaccctgttgaaagaacttgaaagacatatggaagactaccataccgacagacaggacatacaaaagtccatggctgcattcaagaacctctcagcgcaatgccaggaagtccgtaaacgcaaagagctcgagctccagatcttgactgaggctatcagaaattgggagggggacgatatcaagaccctgggaaacgtgacatacatgtctcaagtccttatacagtgcgcagggtctgaggaaaaaaacgagcgctacttgctcttatttcctaacgtgcttttgatgctgagcgcaagcccacggatgtcaggctttatttaccagggcaagctaccgaccactggaatgaccatcaccaaactcgaggatagcgagaatcacaggaatgccttcgagatcagcggttctatgatcgagcggatcctggtctcctgcaataaccaacaggatctgcaggaatgggtggagcacctgcaaaagcagactaaggtgacatctgttggaaatcccactattaagccacattcagttccttcccacacactgccttctcatcctgtgacaccatctagcaagcatgcggactctaagcctgctcccctcactcccgcttaccacaccctgccccatccctctcatcacgggaccccgcataccactattaattggggcccactggaacctccaaagacccctaagccctggtccctttcttgccttcggcctgccccacctttgcggccatccgctgccctctgctataaagaggacctcagcaagagccctaaaacgatgaagaagctgctgcccaagaggaagccagagcgaaagccctctgacgaggagtttgcgtcacgaaagagcacagccgcactggaggaggatgcacagattctcaaggtcatagaagcatactgcacctccgccaagacgcgccagacgttaaactcttccagtcgcaaggagtctgctcctcaggttctccttccggaagaagagaagattatcgtggaggagactaagagcaacggccaaaccgtaatcgaggaaaagagcctggtggacacggtttatgctttgaaagacgaagtacaagaactaagacaagataacaaaaagatgaagaagtcactcgaagaggagcagagggctaggaaggacctggagaagttggtgcgaaaggtgttgaagaatatgaacgaccctgcctgggacgagaccaatctttag

SEQ ID NO: 30658 - DNA, 2166 bp, synthetic construct
  misc_feature 1..2166: note = Description of Artificial Sequence: Synthetic coding sequence
  source 1..2166: mol_type = other DNA
atgaaaactttcgatgctaatgatctttaccagggccagaatttcaataaagtgctgtcaagtttagtcacactcaacaaagttacagcagatatcggcctgggtagcgactcggtgtgtgctcgcccaagtagtcacagaattaagtcattcgattctctgggttctcagtcactccacacccgcacaagtaagctcttccagggtcagtatcgcagcctggacatgactgataattccaacaaccaactggttgtgcgggcaaagtttaactttcaacaaacgaatgaggacgagctatccttttccaaaggggacgtaattcacgtgactcgtgtcgaggagggcggatggtgggagggcactctaaatgggaggactgggtggttccctagcaactacgttagggaagtcaaagctagtgaaaaacctgtctccccgaagtccggtacactgaagtctcccccaaagggctttgatactaccgccatcaacaaatcttattacaacgtcgtgttgcaaaacatcctggagaccgaaaacgaatacagtaaggaactgcagacagtgctcagcacctatctccgcccattacagaccagcgaaaagctgtcctccgcaaacatcagctaccttatgggcaatctggaggagatctgcagctttcagcagatgctggttcaatccttggaggagtgcacgaaactgcctgaggcccagcagcgagtgggaggctgctttctgaatttgatgcctcagatgaaaacactgtacctgacctattgtgcaaaccacccgtctgcggttaacgtcttaactgagcactccgaggagttgggcgagtttatggagacaaagggagcgagctctcctgggatcctggtcctgacaacaggcctatcgaaacctttcatgcgcctcgacaaatatcccactctgttgaaggagctcgagaggcacatggaagactaccacactgatagacaggacattcaaaaatcaatggcagcattcaagaatctgtctgcccagtgtcaagaagtaaggaagagaaaagaactagaattacagatactgaccgaggcaattcgcaactgggagggcgatgacatcaaaactctaggtaatgtgacatacatgtcacaggtgttgatacaatgcgctggcagtgaggagaagaacgagaggtatctgctgctgttccctaacgtgctgctgatgctgagcgccagcccaaggatgtccgggtttatataccagggtaaattgcccacaacagggatgaccatcacaaagttggaggattccgagaaccaccggaatgcgttcgaaatttcgggatccatgattgagaggatactcgtgtcatgtaacaaccagcaggacctgcaggagtgggtggagcatctccagaagcagaccaaggtgacgagcgtgggcaatcccaccattaagcctcattcggtaccatcccacaccttgccatcacacccagtgactccatcatcaaagcacgccgacagcaagcccgcacccctcaccccagcataccacactctgccgcatccctcccaccacggaacgccacatactactattaactggggccctcttgaaccccctaagacccccaagccttggtccctttcttgcttgcgaccagctccgcctctgagaccttccgccgcactgtgctataaggaagatttaagtaaatctccaaaaaccatgaaaaagcttctgcctaagcggaagccagagcgtaaaccttccgatgaggagttcgccagtagaaagtcaacagcagcactggaagaagatgcccaaatactgaaggtgattgaagcatattgtaccagtgccaaaacacgtcagactctgaactccagctcccggaaagaaagcgcccctcaggtgctgctccctgaagaagaaaagataatagtagaggagacaaaaagtaacggtcaaacagtgatcgaggagaagtctctggtcgatactgtctatgccctgaaggatgaggtccaggagttgcgccaagataacaagaagatgaagaagagcctggaagaggaacaaagggccaggaaggatctcgaaaagctagtgcgtaaggttctcaaaaatatgaatgatcccgcttgggacgagacaaatctctag

SEQ ID NO: 30659 - DNA, 2262 bp, synthetic construct
  misc_feature 1..2262: note = Description of Artificial Sequence: Synthetic coding sequence
  source 1..2262: mol_type = other DNA
atgaacagcgccgagcagaccgtcacatggctgattaccctgggcgtgttagagtcacctaagaaaactatttcagaccctgagggatttctgcaagctagtctgaaggatggtgtggtgctttgccgactgctggagcgactcctgcctggtaccattgagaaaactttcgatgcgaacgacctttaccaggggcagaattttaacaaagtgttatcttcattagtgacactgaacaaggtaaccgctgacataggattgggctcagatagtgtgtgcgccaggccatcatcgcaccggataaagagttttgatagcttgggctctcagtccttgcatacccgcacctccaaactatttcagggacagtatcgctctctggatatgaccgacaattcgaacaatcaactcgtggtcagagccaagttcaattttcaacaaaccaatgaggacgaactctctttcagtaagggagacgttattcacgtcacgcgcgtagaggaaggcggatggtgggagggaaccctgaatggaagaacgggatggttcccaagcaattatgtgcgcgaggtgaaggctagtgagaaaccagtttcaccaaagtcaggcaccctcaagagccccccaaaagggttcgataccacggccattaacaaaagctattacaacgtggtgctccaaaacatcctggagacagagaatgagtacagcaaagagcttcagactgtgttatctacttacctgagaccactgcagacatctgagaaactgagtagcgcaaacatatcttacctgatggggaacctagaagaaatttgcagtttccaacagatgcttgtacaatctctcgaggaatgtaccaaactgccggaggcccaacaaagggtaggtgggtgttttcttaaccttatgccacagatgaagactctctacctcacttactgcgctaaccacccatcagctgtcaatgtcctgactgaacactctgaggaactgggtgagttcatggaaacaaagggagcctcaagtccaggaatcctggtgctcacaactggcctctccaagccttttatgaggctggacaagtaccctacactactgaaagagttggaacgccacatggaggactatcacacagataggcaggatatccagaaatctatggctgccttcaaaaatcttagtgcacagtgccaagaggttcggaagaggaaagagctggagctgcagatcctgaccgaagccataagaaactgggagggggacgacatcaaaaccctgggcaatgtgacttacatgtcccaggtgctgattcagtgcgccggtagtgaggagaagaatgagagatacctgttgttgtttcccaatgtcctgctgatgctttccgcgtccccacggatgagcggtttcatataccaggggaagcttccaacgacagggatgactatcaccaagttggaggacagcgaaaaccaccgcaatgccttcgagatctctggaagtatgatcgagaggattctggtttcctgtaataaccaacaggatctccaggaatgggtggaacacctccagaaacagacgaaggtgacaagcgtgggcaaccccactattaaaccacacagcgtaccttcccatactttaccatcgcacccagtgaccccatcttctaaacacgccgattccaagcccgctcctctgacacccgcttatcatactttgccccacccttctcaccacggcacgccgcacaccaccatcaactggggacccctcgagccccctaagactccaaagccttggtccctgagctgtctgaggcccgctccccctctacgcccatcggcagccctctgttacaaagaggacctgagcaagtcacctaaaactatgaagaagttgctccctaagcgcaaacctgagagaaagccgagcgacgaagaattcgctagccggaaaagcactgccgctctcgaggaagacgcgcagatcctgaaagtcatagaggcttattgtactagcgctaaaacaagacagacactgaatagcacatggcagggcacagatctgatgcataatcatgtgctggctgacgacgaccaacccagtctggatagcctggggaggagaagttctttaagtcggctcgagccatcggacttgtctgaagattcagactatgattccatttggactgcccacagctaccgaatggggtcgacttcccgcaagtcatgctgctcttacatctctcatcagaattag

SEQ ID NO: 30660 - DNA, 2412 bp, synthetic construct
  misc_feature 1..2412: note = Description of Artificial Sequence: Synthetic coding sequence
  source 1..2412: mol_type = other DNA
atgaattccgccgagcagaccgtgacctggctaattacgctcggagtcctagaatccccaaagaaaactatcagcgaccccgaaggtttcctgcaggccagcctcaaagatggggtcgtattatgcagattgcttgagagactgctccccggtaccattgagaaggtctatccggaaccaaggagcgagagtgaatgtctgtctaacatccgcgaatttctcaggggctgtggagcatcactgaggctggagctgctattccctccttctcagcccccacagcacttggttaccaccatactgctgagtgcgagtacattcgacgccaacgacctctatcaaggacagaactttaacaaagttcttagttccctcgtgacacttaacaaggtgactgctgacataggcctgggttccgattctgtgtgcgccagacccagcagtcatagaatcaagtcgttcgacagcctaggatcgcagtccctccacacacggacaagtaagctcttccagggacaatacaggagcctcgacatgacagacaactcaaataatcagctcgtggtgagggcgaagtttaattttcaacagacgaatgaggacgaactttccttctctaagggggatgtcattcacgtcacacgagtcgaagagggaggttggtgggaaggaacgctcaatggaagaaccggctggttcccatccaattatgtccgagaggttaaggcaagtgagaaaccagtaagccccaaaagtgggacactcaagtctccacctaagggattcgacaccactgctataaataaaagctactataatgtcgtgctccagaacattcttgagactgagaacgagtacagcaaggaactacagactgtgctatcgacctatttacgcccattgcagacgtcagagaaattgagcagtgcgaacataagctacctcatgggaaacctggaggaaatctgttcttttcagcagatgctcgttcagtctctggaggagtgcacaaaattgcccgaagctcagcagagagtgggagggtgtttcctgaacctgatgccgcagatgaagaccctgtacttaacgtattgcgccaaccatccctctgccgtgaatgtgctgacagaacacagtgaggagttgggcgagtttatggagactaaaggcgcaagtagccccggaatactggtactcaccaccgggctttctaagccattcatgagactcgataagtatcctaccctcctgaaggagctggaacgccatatggaagactaccatactgatcgacaggacatccagaagtcaatggcggcttttaagaacctaagcgctcaatgtcaggaggtccggaaacgaaaggaactggagctccaaatcctgacagaggccatcaggaactgggaaggcgacgacattaagacactgggaaacgtgacttatatgtcgcaggtgttgatccaatgcgccggatctgaggagaaaaatgaacggtacttactgcttttcccaaatgtgctgctgatgctctctgcatctccacggatgtcaggtttcatatatcagggcaaacttcctacaaccggaatgaccattaccaagttggaagatagcgaaaaccatcggaacgcgttcgaaatatccggttccatgattgagcgaattttagtgagctgtaataaccagcaggatctccaggaatgggtggaacatctacaaaaacagaccaaagtgaccagtgtcgggaatccaacaatcaaaccacattctgtgccgtctcataccctgccatcccacccggtgacaccaagtagtaagcacgctgatagtaagccagcacctctcactcctgcttaccatacattaccgcaccctagccaccacgggacacctcacaccacaataaattggggacccctggagcctcctaaaactccaaaaccatggtcactgtcttgcttaaggcccgctccccctttacgaccaagtgccgcactatgttataaggaagacttatctaagagccccaagacgatgaaaaaacttctgccaaagcgcaaaccggaacgtaagcctagcgacgaagagttcgcctcccggaagagtaccgcagcattggaggaagatgctcagattttaaaggtcatagaggcatactgcacctccgcaaagacccgccaaacgttgaattctacttggcagggtacggacctgatgcataatcatgttctggccgacgacgaccagcctagtctggacagtctcggcagaagatcctctctatctagacttgagccttccgacctgtcagaagattctgactacgattctatttggactgcacacagttacaggatggggagcacaagtaggaaaagctgctgcagttatattagccaccaaaattag

SEQ ID NO: 30661 - DNA, 1941 bp, synthetic construct
  misc_feature 1..1941: note = Description of Artificial Sequence: Synthetic coding sequence
  source 1..1941: mol_type = other DNA
atgactgacaattcgaataaccaactggtggtcagagccaagttcaactttcagcagacaaatgaggatgaactgtctttcagtaagggcgacgtgatccacgttacaagagtcgaggagggcggttggtgggaggggaccttgaacggcaggaccgggtggtttccttctaattatgtccgagaagtcaaggcctccgagaaaccagtaagccctaagtccggtactctcaaatctcctcccaaggggtttgacaccacagcgatcaataagagttattacaacgtggtgcttcagaacatactcgagacggagaacgagtatagtaaggaattacaaacggtcctgtctacgtacctccgccctctgcagacaagcgaaaaactcagctctgctaacatcagctaccttatgggtaatttggaggagatctgttcattccaacagatgttggttcaatctctggaagagtgtactaagctgcctgaggcgcagcaacgagttggcggatgcttcctgaacctgatgcctcaaatgaaaacactgtatctgacctactgcgccaatcacccttcagccgtgaacgtgctcactgaacattccgaagaactcggggagtttatggagactaaaggcgcttcttctcctggtatcctagttctgacaacgggcctctctaagcccttcatgaggttggacaaataccccactcttttgaaggaactggagcgccacatggaggattatcacacagacaggcaagatatacagaaaagcatggccgcattcaagaatctgagtgcacaatgtcaggaggtcagaaagcgcaaagagcttgagctgcagatcttgaccgaagctattaggaactgggaaggtgatgatataaagacactcgggaacgtgacttatatgtcgcaggttcttattcaatgcgcgggatccgaggaaaagaatgagcggtaccttcttctttttcccaacgtgctcctaatgctgtctgcatcccctcgcatgtccgggtttatataccagggtaaacttcccactaccggcatgacaatcacgaaactggaagattctgagaatcatagaaacgcttttgagatcagcgggtccatgatcgagaggatactagtctcttgcaataaccaacaggatcttcaagaatgggtggagcatctgcaaaaacagacaaaggtgacatcggtcggcaacccaaccatcaagccccacagcgtgccttctcataccctaccctctcacccggtgaccccgtcaagcaaacacgccgattctaagcccgcaccactgacccctgcttaccacactttgccacacccttcccaccatggcacaccacatactacgattaattggggccctcttgaaccgccaaaaaccccaaaaccatggtctttgtcgtgcctcaggcctgcgcctcccctcaggccttctgcagccctctgctacaaggaggatctgagcaagtctccgaagaccatgaagaagctgctcccaaaaaggaagcctgagcgaaagccgagtgacgaggaatttgcttctagaaaatctaccgcagctctcgaggaggacgcccaaatcctcaaggtgatcgaggcttattgtacctccgcaaagacgcgacagacactgaattcatccagccggaaagagtcagctccacaggtcctgctgccagaagaggagaaaattatcgtggaagagacaaaatcaaatgggcagactgtcatagaagagaagtcacttgtggatactgtctacgccctgaaggacgaggtgcaggaactgcgccaagacaataagaagatgaagaaatcacttgaggaggagcagcgagcgagaaaagatcttgaaaaactggtgcgcaaagtgctgaagaacatgaatgaccccgcttgggacgagaccaatttatag

SEQ ID NO: 30662 - DNA, 201 bp, synthetic construct
  misc_feature 1..201: note = Description of Artificial Sequence: Synthetic coding sequence
  source 1..201: mol_type = other DNA
atgactgacaatagcaacaatcagctggtcgtgagggcgaagttcaacttccaacagactaacgaagacgagctctcattttccaaaggcgatgttattcatgtcacaagagtcgaggaagggggttggtgggaaggaacgctgaacgggaggaccgggtggtttccaagcaattatgtacgggaggtgaaggcatcatag

SEQ ID NO: 30663 - DNA, 1344 bp, synthetic construct
  misc_feature 1..1344: note = Description of Artificial Sequence: Synthetic coding sequence
  source 1..1344: mol_type = other DNA
atgacagataacagcaacaaccagctggtcgtgcgcgcaaaattcaattttcaacaaactaacgaggatgagctgagcttcagcaaaggggacgttattcatgtcaccagagtcgaagaaggaggctggtgggaaggaaccctgaatggccgaaccggctggttcccaagcaactatgtgagagaggttaaagccagcgagaagcccgtgtcacccaaaagcggtacccttaagtccccgcctaaagggtttgacacgaccgccattaacaagtcatactacaacgtggtgctgcagaacattctggagactgagaatgagtactcaaaggagctgcagacagtactaagcacatacttaagaccgctccagacgagcgagaagcttagtagcgccaacatttcttacctgatggggaacctcgaggagatttgcagcttccagcagatgctggtgcagtccttagaggaatgtaccaagctgccagaggcccagcaaagggtgggaggatgctttctgaatctcatgccacagatgaaaactctctatctgacatactgcgccaatcatccgtcagccgtgaatgtgctcaccgaacatagtgaggagctgggcgaattcatggagactaaaggcgcatccagcccaggcattctggtcctcacaacaggtttgagcaagccatttatgaggcttgacaagtatccgactttgctcaaggaactggaacgccacatggaggattatcataccgataggcaagatatccagaaatcaatggccgctttcaagaaccttagcgcacagtgccaggaagtccgcaagaggaaagagttagaactccagattctgaccgaggcaattcggaattgggaaggcgatgacataaaaaccctcggcaatgtaacttacatgagccaagtgcttattcagtgcgccggtagtgaggagaaaaatgagcggtacctcctactatttcctaatgtcttgttaatgctgtccgcttctcccaggatgagtggctttatctaccagggtaagttgccaaccaccggaatgactattacgaagctggaagatagcgaaaaccatcgcaatgcatttgagataagcgggtctatgatagagaggattctagtctcatgcaataatcaacaagatctgcaagagtgggtggagcaccttcagaaacaaacaaaggtgacctcagtcggcaaccctacgattaaaccacactcagttccttcacacactctgcccagccatcctgtgaccccctcatcaaaacatgccgacagtaaacctgcaccattgactcctgcgtaccatacgctgccccactag

SEQ ID NO: 30664 - DNA, 186 bp, synthetic construct
  misc_feature 1..186: note = Description of Artificial Sequence: Synthetic coding sequence
  source 1..186: mol_type = other DNA
atgacggacaactctaacaatcagcttgttgtgagggctaagtttaacttccagcagactaacgaggatgagctttccttctctaagggagacgtaatccacgtgacaagagtggaggaaggcggatggtgggagggtacacttaacggtaggactggttggtttccaagtaattatgtgagatag

SEQ ID NO: 30665 - DNA, 120 bp, synthetic construct
  misc_feature 1..120: note = Description of Artificial Sequence: Synthetic coding sequence
  source 1..120: mol_type = other DNA
atgactgacaattccaacaatcagctagtggttagagctaaattcaacttccaacagactaacgaagatgaactgtccttctctaagggagatgtaattcatgtgaccagggttgaatag

SEQ ID NO: 30666 - DNA, 546 bp, synthetic construct
  misc_feature 1..546: note = Description of Artificial Sequence: Synthetic coding sequence
  source 1..546: mol_type = other DNA
atgtgcttccctagatcgtcagttaccactgacgatcatcagctggatggtataaaaagcacaagggcaccagcccctggatgttgctgctgtccttccgagaccttgagaagcggagaagtggctcgatcttctgctgagtcccggagattactattcaaaccagatgccacggacgagaacccagtgcctcatgtactatgtcagtctcccttctgcagcgaatgcccccatggcacccaggactatcacacggataggcaagatatacagaagagcatggcagcctttaagaacctctcagcccagtgccaggaagtgagaaaaagaaaggaacttgagttgcaaatcctaaccgaggccattcgaaactgggagggcgacgatataaagactctaggaaacgtgacctatatgtcgcaagtactcatccagtgtgcgggatcagaggagaaaaatgaacggtacttgctgctctttccaaacgttctgctgatgctcagtgcatctccacgcatgagcgggttcatctatcaaggggcttag

SEQ ID NO: 30667 - DNA, 2070 bp, synthetic construct
  misc_feature 1..2070: note = Description of Artificial Sequence: Synthetic coding sequence
  source 1..2070: mol_type = other DNA
atacccccatcaaaaccactcaggggatcctcgctgtggggttgctggagcagaccaaaaacaatatcagatcccgaaggcttcttgcaggccagtctgaaagatggtgtcgtcctttgtagattgctggaaaggctcctgcccggaaccatcgagaaggtctaccctgagcctcggtcggagagcgaatgcctcagtaacatacgcgagtttctccggggatgcggtgcctccctgaggttggagaccttcgacgctaacgacctgtaccaaggccaaaattttaataaagtgctctctagcttggttaccctcaacaaggttactgccgatattggtttggggagtgattccgtgtgcgcacgcccttcttcacacaggatcaaaagcttcgattctctaggatcccaatccttgcacacccggacatcaaagttgttccaggggcagtataggtcacttgatatgacggacaatagcaataaccagctcgtcgtgcgggcaaaatttaactttcagcagacgaacgaagatgagctgtccttcagtaaaggagatgtgatccacgtaactcgcgtcgaggagggcggatggtgggagggaaccctgaatggaaggacaggctggttcccatctaattatgtgcgggaagtaaaggcttcagagaagccagtctctccaaagtcgggaaccttgaagagccctcctaaaggttttgacaccactgcgattaataaatcatactataacgtggtgctgcagaacattttggagaccgagaatgagtatagcaaggagctccagactgtcctctcaacttacttgaggccattacagacaagcgagaagctcagtagcgcaaacattagctatcttatggggaatctcgaggaaatttgctcctttcaacagatgcttgtccagagcctggaggagtgtaccaagctgccagaggcacagcagcgcgtcggaggttgcttcctcaatctgatgccccagatgaagactctataccttacatattgcgcgaatcatccttctgccgtaaatgtactgacagagcactccgaggaattaggcgaatttatggagaccaaaggggctagctcccccggtatcctggtactgaccactggcctctctaagccctttatgagactagataagtaccccactctgctcaaagagctggaacgacatatggaggattaccataccgaccgacaggatatccagaaatcaatggccgcattcaaaaacctatctgcccagtgtcaggaggtacgcaagcgaaaagaactcgaactgcagatcttgaccgaggccattcgaaattgggaaggtgatgacataaaaactctgggtaacgtcacatatatgtcgcaggtcttgatccagtgtgccggaagtgaggaaaagaacgagcggtatctactgctgtttcccaacgtcttactcatgcttagcgccagccctcgcatgtctgggtttatctatcagggaaaattgcctaccacagggatgaccatcacaaagcttgaagactccgagaatcacagaaatgcctttgagatatctggatctatgatcgagcgcatattggttagctgcaataaccagcaagatctgcaggagtgggtggagcacttgcaaaaacagaccaaggtgacgtctgtcggcaatcctaccatcaagccacactctgttcccagccacaccctgcccagccaccccgtgacaccgtcttctaagcatgctgactccaagcctgcacccctcacccccgcataccacactttgccacacccatcccaccacggaactccccacacaaccatcaattggggcccattggaaccccctaagactcccaagccctggagtctgagctgccttcgtccagcccctcctctgcggcctagtgccgcattgtgttataaggaggatttatccaaaagccccaagacaatgaagaaactcctgcccaaaaggaaacccgagcgcaagcccatgaggtcttcccggcctgggaaagcccaattgctgtggaaaaaaatgcttagattctag

SEQ ID NO: 30668 - DNA, 4065 bp, synthetic construct
  misc_feature 1..4065: note = Description of Artificial Sequence: Synthetic coding sequence
  source 1..4065: mol_type = other DNA
atgagcactggagatagtttcgagaccaggttcgagaagatggataacttgctccgcgacccaaagagcgaggtgaatagtgattgtctccttgatggactcgacgcgctggtgtatgatctggatttccctgctcttaggaagaataagaacattgacaattttctatctcgatataaagacactatcaacaagatccgcgacctgcggatgaaagctgaggattacgaagtcgttaaagtcatcgggaggggcgcttttggcgaggtacaattagtaagacacaagagcactcgcaaggtgtatgcaatgaagttgctctcaaaatttgaaatgatcaagcggtccgactcagccttcttttgggaagagcgcgacatcatggccttcgcaaatagcccgtgggtagttcagttgttctacgccttccaggatgaccgctacctgtacatggttatggagtatatgcccggtggggacctggtgaatctgatgagtaactatgacgtcccagagaaatgggcgcgattttacaccgccgaggtggttctggcactggacgccatccattctatgggcttcattcatagagatgtgaagcctgacaatatgctgcttgataagtcagggcacctcaagctggccgactttggcacgtgcatgaaaatgaacaaggaagggatggttagatgcgatacagccgtcgggacacccgactacatttctcctgaggtgttgaagagccagggcggagacggatattatggaagagaatgcgattggtggagcgtgggcgtcttcctgtacgaaatgcttgtgggcgatacccccttctacgcagattccctggtaggcacatacagcaaaatcatgaaccacaagaactccttaacctttcccgacgacaatgatatttctaaggaggccaaaaaccttatttgtgcttttttgactgatcgagaagtgcgactaggccgtaatggggtagaagagattaagaggcatctgttctttaaaaatgatcaatgggcctgggaaaccttgagggacacggtggccccagtagtgcctgatttatcaagtgacattgacacttccaactttgatgatttagaggaggataaaggagaagaggagacttttcccatccccaaggcgttcgtcggtaaccagctaccatttgtgggcttcacctactatagcaatcgccgatatctgtcttcagctaatccaaatgataaccggacaagctccaacgctgacaagtcactccaggaatcactccagaagaccatctacaaattggaggagcagctgcacaatgagatgcagctcaaggacgagatggagcagaagtgtagaactagcaacatcaagctggacaaaattatgaaggagctggacgaagaagggaatcagcgcaggaatttggaatctacggtgtcccagatagaaaaggagaagatgcttcttcaacaccgcatcaacgagtatcagagaaaagctgagcaggagaatgagaagcgcaggaatgtcgagaacgaggtcagcacacttaaggatcagctagaggatctgaagaaggtttcgcagaattcacagctggcaaacgagaagctctctcagctgcaaaagcaattggaagaagcaaatgacttgctgagaaccgagagcgacacagctgttcgtctgcggaagtcgcacactgagatgagtaagtctatcagtcaactggagtcccttaatagggagctgcaggagaggaatcggattctcgagaactcaaagtctcagacagacaaggattactaccaactgcaggcgatcttagaggcagagaggcgggaccgagggcacgacagcgagatgatcggggatctgcaggctcgcattacatccttgcaggaagaagtgaagcaccttaaacacaacctcgagaaagtcgaaggcgagagaaaagaggcacaggacatgcttaatcactcagaaaaggagaaaaacaacctggagatcgacttgaactacaagttgaagagcctgcagcagaggctggaacaggaagttaatgaacacaaggttaccaaggctaggttgactgacaagcaccaaagtatagaagaagctaagtctgtggcaatgtgcgagatggaaaagaaactcaaagaggaaagagaggccagagagaaagctgagaaccgcgtcgtgcagatcgagaagcagtgtagtatgctggacgtggatttaaagcagagccaacaaaagttggagcaccttacaggaaataaggaacgcatggaggacgaggtcaagaacttgacccttcaactggagcaagaatcaaacaaacggctgctcctccaaaacgagcttaagacccaggcgttcgaagctgataatctgaagggtcttgagaagcagatgaagcaggagatcaacacactgttagaagccaagcgtctcctggagtttgagctggcgcagttaacgaagcagtacaggggcaatgagggccaaatgcgcgagttacaggatcaactggaggccgaacagtatttctccacgctctacaaaacccaggttaaggagttgaaagaggagatagaagagaaaaacagggagaatctgaaaaagatacaagaactgcaaaatgaaaaggaaactttggcaactcagctcgatctggccgagaccaaagccgaatcagaacagctggcccgaggccttctcgaggaacagtactttgagctcacccaggagagcaagaaggccgcatcccggaatagacaagagataaccgacaaggatcacacagtgagccggctggaagaggcaaactcaatgttaacaaaagacattgagatcctgcgacgagaaaacgaggaactcaccgagaaaatgaaaaaagcagaagaggagtacaagctggagaaggaagaggaaatctcaaaccttaaagccgctttcgagaagaacattaataccgagagaacgttgaagacccaagcggtgaacaaactggccgagattatgaaccgaaaagattttaagatcgacaggaaaaaagccaacacacaggacttgagaaagaaggaaaaggagaatcgaaagctgcagctggagcttaatcaggagagggagaagtttaaccagatggttgtgaaacatcagaaagaactgaacgatatgcaggcccagttggtggaggaatgcgcccatagaaacgagctgcagatgcagctcgcttccaaagagagtgacatagagcaactcagagcgaaacttcttgatctgtcagattctacctctgtcgcctcttttcccagtgccgacgaaaccgatggtaacctgcccgagtcccgcatcgaaggatggctatctgtgcccaatagagggaacatcaaaagatatggttggaaaaagcaatacgtggtcgtgtcttccaaaaagatcttgttttataatgacgaacaggacaaggaacagtcaaatcctagcatggtcctagatatagataagctgttccacgtcagaccagtgacacagggtgatgtgtaccgcgctgagactgaggagatcccaaagattttccagatcctgtacgcgaacgaaggcgagtgcagaaaggacgtggagatggagccagtccagcaagcagagaaaacaaattttcagaaccataaaggacatgagtttataccgacactttatcactttcctgcaaattgcgatgcttgtgccaagcccctttggcatgtgtttaagcctcctcccgcattggagtgccgcagatgccacgtcaaatgtcatcgggatcacctagacaaaaaggaagacttgatctgtccctgtaaggtgtcatatgacgtgacttctgctagggacatgctgctccttgcttgctcccaggacgagcagaaaaagtgggtgacccaccttgtgaagaagattccaaaaaatcccccatcagggtttgtccgcgcttctcctcgcacactgagcacacgctcaaccgcaaatcagtcgttcaggaaggtcgttaagaatacctctgggaagacctcatag

SEQ ID NO: 30669 - DNA, 471 bp, synthetic construct
  misc_feature 1..471: note = Description of Artificial Sequence: Synthetic coding sequence
  source 1..471: mol_type = other DNA
atggctccggcacgcgcaggcttttgcccgttgcttctgttgcttctcctgggcctctgggtggccgaaatacctgtgtcggcaaaacctaagggcatgacctcttcccagtggttcaagatacagcatatgcagccgtctccccaggcttgtaattcagcaatgaagaatattaacaaacacacaaaaaggtgcaaggacttgaatacttttctccacgaaccattctctagtgttgcggctacttgtcagacacccaaaatcgcttgtaaaaatggagataagaactgtcatcagtcgcatggtgccgtgagcctcacaatgtgcaagttgacctcaggcaagcatccgaactgcagatacaaagagaagcgacagaacaagtcttatgtggttgcgtgcaagcctcctcagaaaaaagattctcagcagttccatctagttcctgtgcatcttgatagagtcctatag

SEQ ID NO: 30670 - DNA, 471 bp, synthetic construct
  misc_feature 1..471: note = Description of Artificial Sequence: Synthetic coding sequence
  source 1..471: mol_type = other DNA
atggccccagccagagctgggttctgccccctgttgctgttgttgctgctagggttgtgggtagccgagatccctgtgtctgctaaaccaaaaggcatgacttctagccagtggttcaagatccagcacatgcagcccagccctcaggcttgtaattccgctatgaagaatataaataagcatacaaagcggtgcaaagacctgaataccttcctgcacgaaccattttcgagtgtcgccgcaacttgtcagacccctaagatcgcctgcaagaatggggacaagaattgccaccaatctcacggtgctgtgtcactcaccatgtgcaagctgaccagcggtaaacaccccaactgtcggtataaggagaagagacaaaataaatcgtacgtcgtggcctgcaagcccccacaaaaaaaggattcccaacagtttcatctcgtccccgtgcatctggatcgagtcctgtag

SEQ ID NO: 30671 - DNA, 831 bp, synthetic construct
  misc_feature 1..831: note = Description of Artificial Sequence: Synthetic coding sequence
  source 1..831: mol_type = other DNA
atgttgcagcaagactctaatgacgatacggaggacgtgtctttgtttgacgcggaggaagaaaccacaaatcggcctcggaaggccaaaataaggcatcccgtggcatctttttttcacctattctttagggtgagtgctataatcgtctgcctgctctgtgaattgcttagctcctcatttattacttgcatggttacgattatattgttgctatcctgcgacttctgggccgtgaaaaacgtaactgggaggctgatggtcggcctgcggtggtggaaccacatcgacgaggatggtaagagtcactgggtgtttgaatcacgcaaagagtcctcccaggagaataaaaccgtgtctgaagctgaaagccgcatcttctggctcggactgattgcctgttctgttctgtgggtcatctttgctttctctgcactattttccttcaccgtcaaatggctgaggaggtcccgccacattgctcagaccggactcaaagtgcttggttcccgagacccccctgctagcgcttttcagagtgccggaataactggcgtgagtagatgtcctggacacccgtcacgcaagttccaccaggttgacatcaattctttcacgcggatcacggatagagcactttattggaaaccagctccacggttatcatctccaccgctacgggctgctcctggtaactgtcagcagatggcaccagccagactcttcctgtcattgcggctctgggcttggagaggcggaggagagtcaccaaactccagggggactggtgagcccggaccaaaattccacctggccagtggcatgcattag

SEQ ID NO: 30672 - DNA, 1419 bp, synthetic construct
  misc_feature 1..1419: note = Description of Artificial Sequence: Synthetic coding sequence
  source 1..1419: mol_type = other DNA
atggaccacggcggagtgggcccttacgagctaggtatggagcactgtgagaaatttgagatttcagaaacatctgtaaacagagggccagagaaaatccggcctgaatgcttcgagctgctccgggtgctgggcaagggaggctatggcaaagtcttccaggtccgcaaggttacaggggctaatacggggaaaatctttgccatgaaagtgctgaagaaagccatgattgtgcgcaatgccaaggatactgcacataccaaggctgagcggaacattctggaggaggtcaaacatcctttcatagtggacctgatttatgcgtttcagaccggcggaaaactttatctaatcctcgagtatctatctggcggtgagctcttcatgcagctggagagagaaggtatatttatggaagacaccgcctgtttctacctcgccgaaatttctatggccttaggacatctgcaccagaagggcatcatttatcgggatttgaagcctgagaatataatgctcaatcatcaggggcacgttaagctgacagactttggactgtgcaaggagtccatccatgatggaacagtgacacacacattttgcgggaccatcgagtacatggcccctgagattttgatgcggtcaggccataatagagctgtcgactggtggagtctgggcgcactcatgtatgacatgctcactggcgctcctccctttaccggcgagaataggaaaaaaaccattgacaaaattctgaaatgcaagttaaacctgcctccctatctcacacaagaggcgagagatttgcttaagaagcttttgaagcgtaatgccgctagccgactcggtgctgggcctggcgatgcaggagaggtccaagctcaccctttcttccggcatatcaactgggaggaactcttggcccgtaaagtcgagccaccttttaaaccgctgctccagtccgaagaagatgtgtcccaattcgactccaagtttaccaggcagacaccagtggattccccagacgactcgactctctcagagagcgctaatcaggtttttctgggtttcacctacgtcgcaccctccgtcttagaatccgtgaaggagaagttctcatttgagcctaaaattcggtctcccaggcggtttattggctcacccagaacgcccgtgtctcctgtaaagttctctccgggagacttttggggccgaggagccagtgctagtacggccaatccacagacccctgtggagtatccgatggaaaccagcggcattgagcagatggacgtgacaatgagcggtgaagcaagtgccccattgccaatacgccagcctaattctggaccttacaagaagcaggcctttcctatgatatcaaagagaccagaacatctgcgcatgaacttatag

SEQ ID NO: 30673 - DNA, 1356 bp, synthetic construct
  misc_feature 1..1356: note = Description of Artificial Sequence: Synthetic coding sequence
  source 1..1356: mol_type = other DNA
atgcgtcggagaaggcgccgagatgggttttatccggctccggactttagagacagggaggccgaagatatggctggcgtattcgacatcgatctagaccagccagaggacgccggatccgaggacgagctggaggaaggaggccagctgaatgagtcaatggaccacggtggcgttggaccctacgagctgggcatggagcactgcgaaaagtttgaaatctcggagacaagcgtgaaccgcggaccagagaaaattaggcccgagtgctttgaactcctaagggtgctgggcaagggaggctatggcaaggtttttcaggtgaggaaagtaactggggctaacactgggaagatcttcgccatgaaggtgctgaaaaaagcaatgattgtgcggaatgcaaaggacacagctcacactaaagctgagcgcaatattcttgaggaagtgaagcatcctttcatcgtcgacctgatatacgccttccagactggcggtaaattgtatctaatcctcgaatatctgtccggcggagaactgtttatgcaacttgaacgcgaagggatcttcatggaggacactgcatgcttttacctggctgagatctctatggccctcggccaccttcaccagaagggaatcatttatagagaccttaagccagagaacattatgctgaatcaccaaggccatgtcaagttgacggacttcggactgtgcaaggagagtatccatgatggcacggtgacccacacgttttgcggcaccattgagtacatggccccagagattctgatgagaagcgggcataacagggctgtggattggtggtctctgggcgctctgatgtacgacatgttgaccggagcaccccctttcacaggcgaaaatcgcaaaaagacaatagataaaatcctgaagtgtaaactcaaccttccaccatacctgacacaggaggccagagacttgttaaaaaaactgctgaaacggaacgccgcttctcgactcggcgctgggccaggcgatgcaggcgaggtgcaggcacaccctttctttagacacatcaattgggaagagctcttggcgaggaaggttgagcctcccttcaaacctctgctgcagtcagaggaggacgtttctcagtttgacagtaagtttacacgtcagacccccgtggattcacctgacgacagtactctgtccgagagtgccaatcaggtgtttttgggttttacgtacgtggcaccgtctgtgctggaaagcgtcaaagaaaagttttctttcgaaccaaaaatccgcagcccacgccgtttcatcggatccccgagaaccccagtgtcaacagccatgtgctag

SEQ ID NO: 30674 - DNA, 1509 bp, synthetic construct
  misc_feature 1..1509: note = Description of Artificial Sequence: Synthetic coding sequence
  source 1..1509: mol_type = other DNA
atgaggagacgacgaagacgggatggattctaccccgcacccgattttagggaccgagaggcagaggatatggctggcgtcttcgacatcgatcttgaccagcctgaagatgctggctccgaggatgagctcgaggaaggaggacagctgaatgaaagcatggatcacgggggagtggggccttacgaactggggatggagcattgcgagaagttcgagatttctgaaacctcggtcaataggggccctgagaagattaggcccgaatgttttgagctcctgcgagtgttgggcaagggtggctatggtaaggccatgatcgttcgaaacgcaaaggatacagcccacacaaaggccgaaagaaacatccttgaagaggttaagcatcctttcatagttgacctcatttatgcttttcagaccgggggaaagttgtatctgatcctagagtacctgtctggcggagagctattcatgcagctagagagagaaggaatctttatggaggataccgcatgcttctacttggccgagatatcgatggcacttggccatctgcaccagaagggtatcatctatagggacctcaagcctgagaatatcatgttgaaccaccagggtcacgtgaaactgacagatttcggtctgtgtaaagaatcaattcacgacgggaccgtgacacacaccttttgcggcacaatcgagtatatggctccggaaatcctgatgcgctcagggcataatagggctgtggactggtggtcattgggcgctctgatgtatgacatgcttacgggagcccctccattcaccggagaaaaccgcaagaaaactattgataagattttgaagtgtaagttaaatctgccaccgtacctgacgcaagaggctcgggaccttctgaagaaactcctgaagcggaacgccgcttcccgtttgggcgcagggcctggagacgctggcgaggtccaagcccacccgtttttcaggcacattaattgggaggaactgcttgccaggaaagtggagcctcccttcaagcccttgcttcagtcagaggaagacgtgtctcagttcgactctaaatttacacgtcaaaccccagtagactccccagatgattccacgctttccgaatcggcaaaccaagtatttctcggctttacctacgtagccccatccgttttagagtctgtgaaagagaagttcagcttcgagccgaaaattaggagccctaggcggttcattggaagccccagaacacccgtgagccccgtcaaattttcaccaggagatttttggggtcggggagcaagcgcctccacagccaaccctcagacacccgtcgaataccccatggaaacctccggcatcgagcagatggacgtgacaatgagcggagaggcttctgctcccttgcccatccggcagccaaattcaggcccttacaaaaagcaagcttttcccatgatctcaaaacggcctgaacacctacgaatgaatctgtag

SEQ ID NO: 30675 - DNA, 1932 bp, synthetic construct
  misc_feature 1..1932: note = Description of Artificial Sequence: Synthetic coding sequence
  source 1..1932: mol_type = other DNA
atgaaggtcttgaagaaagcaacactaaaggtgcgtgaccgcgtccggactaagatggaaagagacatactcgccgatgtgaatcaccctttcgtggtaaaacttcattatgcttttcagacagaagggaaactctacctgattttagactttctgcgtggaggcgacctctttacaaggcttagcaaggaagttatgttcactgaagaggatgtgaagttctatttggctgagctcgcccttgggctagaccacctgcacagcctgggaatcatctaccgcgatctgaaacctgagaacatcctcctggacgaggagggacacattaagctcacagactttggattgtctaaggaggcaattgatcacgagaagaaggcctatagtttttgtgggactgtggagtatatggctcccgaggtcgtcaataggcagggacacagccatagtgctgactggtggtcatatggggtgttaatgttcgagatgctgaccggcagcttacccttccagggtaaggatcgaaaagaaactatgacgctgatcttaaaggcaaaattaggcatgccacagttcttatctacagaggcacagagcttgctgagggcgctctttaagcgcaaccccgcaaatagactgggcagcggccctgatggtgccgaggaaatcaagagacatgtcttctatagcacaatcgattggaataagctgtatcggcgtgaaattaagcctccattcaaacctgctgtagctcaacccgacgatacattctatttcgataccgagtttacctctcgaactcccaaggactcacccggaatcccaccctctgcgggtgctcaccagctatttcgagggttttctttcgtggccacaggcttgatggaagatgatggcaagccccgagccccacaggccccacttcactcggtcgtgcagcagctccacggtaaaaatctagtgttcagcgacggctacgtggtgaaagagactatcggggtgggatcatacagcgaatgtaagaggtgtgtgcataaagcaacaaatatggaatatgccgtcaaggtcattgacaagtccaaacgggatcctagcgaggaaatcgaaatccttctcaggtacggacagcatcctaatatcattaccctcaaagatgtctacgacgacggcaaacacgtgtacctggtcacagaactaatgcgcggtggcgagcttctggacaagatcctccgccagaaattcttttctgagcgagaagccagcttcgtgctccacaccattgggaagacggttgaatatctacactcccagggtgtggtacatcgggatttaaaacctagcaatattctctatgttgatgagtccggcaaccctgaatgtttacgcatctgcgacttcgggtttgctaaacagctgagggctgaaaacggcctgctaatgaccccctgctatacagcaaacttcgtggctcccgaggtgctgaaacgccagggatacgacgaaggctgtgatatatggtctttaggtatactgctttacaccatgctcgccggttacaccccattcgctaatgggccatcagacacacccgaggaaatcctcacccgtattgggtctggcaagttcaccctgagtggcggaaattggaacacagtttccgagaccgcaaaggacctcgtgtctaagatgctacatgttgaccctcaccagcgccttaccgcaaaacaagttctgcagcacccttgggtcacccaaaaagacaaattgccgcagtcccagctgtcgcaccaggacctacagctggtgaagggagctatggctgctacttactcagccctcaactcatctaagcctaccccacagttgaagcccattgaatcatccatcctagcccagagacgcgtgcggaaactgccttctactaccctctag

SEQ ID NO: 30676 - DNA, 687 bp, synthetic construct
  misc_feature 1..687: note = Description of Artificial Sequence: Synthetic coding sequence
  source 1..687: mol_type = other DNA
atgccacagttcctctctactgaggcccaaagtttattgcgtgcgctgtttaaaaggaatcccgctaaccgcctgggctcaggaccagatggcgctgaagaaataaaacgccatgtcttttactccaccatcgattggaataaattgtacaggcgggagatcaagccccctttcaaacctgccgttgcacagcctgacgacaccttttacttcgataccgaatttaccagccgtaccccaaaggattcccccggaataccaccctcagctggggcacatcagctctttcgcggattttcgtttgtcgccacaggcttgatggaagacgacggtaaaccccgtgctcctcaggcaccactccactccgtggtccaagtgattgacaagagcaagcgcgacccgagcgaggagattgagatcttgctgcgttacggccaacatcctaatataatcacactaaaagatgtttatgacgatgggaagcacgtgtacctggtcaccgagctcatgagaggtggagaactgctggataagattctgaggcaaaagttcttcagcgagcgcgaagcctcttttgttctgcacaccatcggcaagacggtagaatatctccactctcagggcgtagtgcacagggatttgaaaccatccaatatcctgtatgtggacgagagcgggaatccctag

SEQ ID NO: 30677 - DNA, 2208 bp, synthetic construct
  misc_feature 1..2208: note = Description of Artificial Sequence: Synthetic coding sequence
  source 1..2208: mol_type = other DNA
atgcctctcgcccagttgaaggagccatggcctctgatggaactggtgcctctggacccggagaatgggcagacttccggggaagaggccggactgcagcctagcaaagatgagggagtccttaaggagatctccattactcaccacgtcaaggcaggcagcgaaaaagccgatcccagccacttcgagctcctcaaggttctcgggcaggggtcctttggcaaggtgtttttagttcggaaggtgacccgccctgacagcggtcacctgtatgccatgaaggtcctaaagaaggctactctgaaggtgcgggacagagtacggacgaaaatggagcgggatatcctcgcagacgtgaatcacccatttgtcgtgaaactgcactacgctttccaaacagagggcaagctctacctcatcctggattttctccgcggtggggacctcttcactaggttatccaaggaggttatgtttacagaagaggacgtgaagttttaccttgctgaactggccctcgggttagatcacttacactccctgggaattatttacagggaccttaagccagaaaatatactcctcgacgaggagggccatatcaaacttacggattttgggctgtcaaaggaggctattgatcatgaaaagaaagcctacagtttctgtggcacggtggagtatatggcacctgaagtggtgaaccggcaagggcacagccattcagctgattggtggtcgtacggagtcttgatgttcgaaatgctgaccggctcactgccttttcagggcaaggacagaaaggaaacgatgacactgatcctgaaagccaaactggggatgcctcagtttctgtccaccgaagcacagtcgttacttagggccctattcaagaggaatccagcaaaccgcctggggtccggcccagacggggcagaagaaatcaaacgccacgttttctactccactatagactggaataaactatatagaagggagatcaaacctcctttcaaaccggctgtcgcacagcctgacgataccttttattttgataccgaattcacctcacgaacacccaaagactcacccggtataccacccagcgcaggggcacatcagctatttcggggattttcttttgtcgccaccggcttaatggaggacgatggaaagccgagagctccgcaggctccactgcactccgtggtacagcagctccatggtaagaacctggtcttttctgacggctacgtggtgaaagagacgatcggagtgggatcttattccgaatgcaaacggtgcgtccacaaagcaaccaatatggagtacgccgtgaaggtgatcgacaaatcaaagcgggatccaagcgaggaaattgagatcctgctgaggtacggccagcatcctaacatcatcactttgaaggatgtttacgatgatggtaaacacgtgtacctggtcacagagctgatgcgcggaggtgagttgttggacaaaattctgcggcagaagttttttagtgaacgcgaggcttccttcgttttgcacaccatagggaaaacggtggaatacttacactcccagggggtggttcacagagatcttaaaccaagtaacattctctatgtggacgagagtggaaatccggagtgtctacggatctgtgactttgggtttgccaaacaactgcgggctgagaacggcctgctgatgactccgtgttatactgctaatttcgtcgctcccgaggtgctgaaaaggcaaggttatgacgagggttgcgacatctggtcgctaggcattctgctgtatacaatgcttgcaggctacactccctttgcaaatggcccatccgacacacccgaagagatcttaactagaattggctccggaaaatttaccctgagcggtgggaattggaacaccgttagtgaaaccgccaaagatctggtctctaagatgctgcatgtggatccacaccagaggttgaccgccaaacaagtgttgcagcacccttgggtcacacagaaagacaaactcccacagagtcagctgtcacaccaggatttgcagctggtgaagggcgcaatggccgctacatattctgctcttaacagttccaagcctactccccaactcaaacccattgagagttcaatccttgctcagcggagagtgagaaaactgcctagtaccactctgtag

SEQ ID NO: 30678 - DNA, 501 bp, synthetic construct
  misc_feature 1..501: note = Description of Artificial Sequence: Synthetic coding sequence
  source 1..501: mol_type = other DNA
gcccagcctgacgatacgttttactttgatactgaattcacctcacgtacccccaaggatagccccggtattccgccatccgccggagcacaccagctgttcaggggtttcagcttcgtggctaccggtctcatggaagatgacggtaagccccgagctccccaggcccctcttcacagcgtggtgcaagtgatagataagagcaaaagagaccctagtgaggagattgaaattctcctgcggtatgggcaacatcccaatatcattaccctgaaggacgtgtatgatgacggtaaacatgtgtacctggttactgagctcatgcggggtggtgaattattagacaagatattgcggcagaagttcttcagcgagcgagaggccagttttgtccttcatactatcggcaaaacagttgagtacttgcacagccagggcgtggtgcatagggatttgaaaccttcaaacattctctatgtcgacgagtctgggaatccatag

SEQ ID NO: 30679 - DNA, 2160 bp, synthetic construct
  misc_feature 1..2160: note = Description of Artificial Sequence: Synthetic coding sequence
  source 1..2160: mol_type = other DNA
atgcagactcccgcagatttccctagggtagagcgcgatcttgtaccttgccccagaaaagatgagggcgtattgaaggagatctcgattacgcaccacgtgaaagctggcagtgagaaagcggatccgagccattttgagttgctgaaggtgctcggccaggggtcatttggcaaggtgttccttgtgagaaaagttacacgcccagattctggccatctttatgctatgaaagtgctaaagaaagcaacccttaaagtgcgggaccgggtcaggaccaagatggagagggacattctggcggatgttaaccacccgttcgtcgtaaaacttcactatgcatttcagacagaaggaaagctttatctaatcctggatttcttgcggggtggtgacctgtttactcgccttagcaaagaagtaatgttcacggaggaggacgtcaaattttatctcgcggaactggctctgggattagatcacctgcattctctcggaatcatttaccgggaccttaaaccagagaacatccttctcgatgaggagggccatataaagctcaccgattttggcctgtctaaagaggccattgatcatgaaaaaaaggcctattccttctgcggcactgtcgagtatatggcaccagaggtggtgaaccgccagggccactcccacagcgctgactggtggagttacggggtactgatgtttgagatgttaactggaagcttaccattccagggcaaggacaggaaggaaacaatgaccctcatcctgaaagcaaagctaggtatgccgcagttcctcagcaccgaggcccaaagcctgctgagggctctgtttaagagaaatcccgcaaatcgactggggtccggacccgacggggctgaagagatcaagaggcatgtattctacagcacaattgattggaacaaactgtatagaagggaaatcaagccaccgttcaagccagcagtggcccagccagacgacacattctactttgacaccgaatttacatcccggacacctaaggacagtccgggaattcctccctcagctggagcacaccagctgtttagaggtttctcttttgttgccaccggtctgatggaggacgatggcaagccacgcgcacctcaggccccactgcactcagtcgtgcagcagcttcacggaaagaaccttgtcttctcagatgggtacgttgtgaaagaaactattggagtaggttcgtacagtgagtgtaaaagatgtgtacataaagctacgaacatggagtatgccgtcaaagtgattgacaagtccaagagggacccctcagaggagatagagatcctgctcagatatggccaacaccccaacattattactctgaaggatgtgtatgacgatggcaagcatgtatatctagtaaccgagctaatgagagggggagaacttctggacaagatcctgcgccagaagttcttcagcgagcgcgaggcgtcattcgttctccatactattggcaaaactgtggaatacctgcacagccaaggagtggtccacagagacctcaagccctccaatattctgtacgtggatgaaagcggtaaccctgagtgcctcagaatttgcgatttcggatttgccaaacaactccgtgccgaaaacgggctgctgatgaccccctgttacacagccaacttcgtggcccctgaagtgctgaaaaggcagggttatgatgaaggatgcgacatttggtcgctgggcattttactttatacaatgctcgccggatataccccttttgccaacgggcctagcgatacccccgaggagattctgacacgcatcggcagcggcaagttcactttgtccggcggaaactggaataccgtgagtgagacagctaaagatctcgtgtcgaagatgctccacgtggatccacaccaacgtctgactgctaagcaagtactgcaacatccttgggtcactcagaaagacaagctgccccagagccagctaagccaccaagacctgcaacttgtgaagggggcaatggcggcaacgtattccgcactcaactcctccaagccgactccacaactgaagcctatcgaaagctctattctcgctcaaagaagggtcagaaaactgccatctacaaccctttag

SEQ ID NO: 30680 - DNA, 2202 bp, synthetic construct
  misc_feature 1..2202: note = Description of Artificial Sequence: Synthetic coding sequence
  source 1..2202: mol_type = other DNA
atggacttgagcatgaaaaaattcgccgtgaggagatttttttccgtgtacctaagaaggaagagcaggtcaaaaagctcttccctcagccggttagaggaggaaggtgtcgttaaggagattgatattagccatcatgttaaagaggggtttgaaaaagcggacccctcccaattcgagttgctgaaggtgctgggtcagggctcttatggaaaggtcttcctggttcggaaggtgaagggcagtgatgcaggacagctctatgcaatgaaagtcctgaaaaaggcaacactcaaagtaagggaccgggtccggagtaaaatggagcgcgatattctggcagaagtgaatcatccatttattgtgaaactgcactacgctttccagaccgagggcaaactttatctaatactagattttttacgcggaggagaccttttcaccagactctccaaggaagtaatgtttaccgaagaggacgtgaagttttatttggctgaattggctctggctctggaccaccttcattctttaggtattatctatcgcgacctaaagccagagaacatactcctggatgaggaaggccacattaagattaccgattttgggttgtcaaaggaggccatcgaccacgacaaacgggcttattcgttctgtggcaccatagagtacatggcaccggaggttgtgaaccggaggggacatacccagtcagcagactggtggagctttggggttttaatgttcgaaatgctgacagggtccctcccattccaggggaaggaccgcaaagagaccatggcactcatcttgaaggccaaacttggaatgccacagttcctttccggggaggctcagagtctcctgagagccctattcaagagaaacccctgtaaccgactgggcgctggtattgacggagtggaggaaattaaacggcaccccttcttcgtaaccattgattggaatactttgtacagaaaagagataaagcccccttttaagccagccgtcggacggcctgaggatacgtttcacttcgaccccgagtttaccgccaggacgccaacagattctcccggagtgccacctagtgccaacgcgcaccacctcttccgcggtttttcttttgttgcctcctcgctcattcaagaaccatcccagcaggacctgcataaagtgccagtgcaccccatcgtgcaacagcttcacggcaataacattcatttcacagatgggtatgagatcaaggaggacatcggagtggggagctacagtgtgtgcaaaagatgcgtccacaaggcgactgatactgagtatgcagtaaagattatcgataaaagcaagagagacccgtctgaggagattgaaatcttactccgctatggtcaacatccaaatataattaccctaaaagatgtgtatgacgacggtaaattcgtgtacctggtgatggaactgatgagggggggagaattgctggacaggatcctgaggcagcggtatttttccgagcgggaagcctcagatgtcttatgtactatcactaagacaatggactacttacacagccagggtgtcgtgcaccgcgacctgaaaccatccaacatattataccgcgacgaatcaggttcacccgagagtatccgcgtgtgcgattttggcttcgctaaacaacttcgcgctggcaatggcctcctcatgaccccctgctacaccgcgaacttcgttgcaccggaagtcctgaaaaggcaaggttacgacgctgcgtgcgatatctggtcattaggaatattgctctacacgatgctggccggtttcactccctttgcaaatgggcctgacgataccccagaggagatactggccagaatagggtctggaaagtatgcacttagtgggggaaactgggatagcataagtgacgccgcaaaagatgttgtttctaagatgctacacgtggatccacatcagcgccttactgctatgcaggtgttaaagcatccttgggtggttaaccgggaatatctcagccctaatcagttatctcgccaggacgtccaccttgttaaaggagccatggcagccacttatttcgctctgaatcgaactcctcaggctccacgcctcgagcccgtgctctcgagcaacttagcgcagaggcgcggtatgaagaggttaaccagcacgcgcctttag

SEQ ID NO: 30681 - DNA, 501 bp, synthetic construct
  misc_feature 1..501: note = Description of Artificial Sequence: Synthetic coding sequence
  source 1..501: mol_type = other DNA
atgtttactgaggaggacgtaaagttctacttggcagagctggccctcgctcttgatcatctacacagcctgggaatcatataccgggatctcaagcccgagaacatactgctggacgaagaagggcatataaagatcacggactttggcttgtcaaaagaagctattgatcacgataagcgggcatactccttttgcgggacaatcgaatatatggcacctgaggtcgttaaccggagggggcatacccagtcagccgactggtggtcgttcggcgtgcttatgtttgaaatgctgacaggatcactcccctttcagggcaaggatcgcaaagaaacaatggctttgatcctgaaggccaagctcgggatgcctcagtttttgtccggggaggcccagtcccttctccgcgcattgtttaagcgcaatccgtgtaatcgccttggtgagaagacggctctgtgccctcgtgtctcctgcagccggttactgggattttag

SEQ ID NO: 30682 - DNA, 1935 bp, synthetic construct
  misc_feature 1..1935: note = Description of Artificial Sequence: Synthetic coding sequence
  source 1..1935: mol_type = other DNA
atgaaagtcctgaagaaggctacattgaaagtgagggatcgggtgcggagtaaaatggagagggatattctggcagaggtgaatcaccccttcatcgttaaactacactacgccttccagactgagggaaagttatatctcatccttgatttccttagaggtggagatttgtttacccgcctcagcaaggaggtgatgttcacagaagaggacgtcaagttctacctcgcagaactggccctggcacttgaccacctccactccctgggaattatctaccgggacttgaagcctgaaaacattctcctcgacgaggagggccatattaaaatcaccgatttcggcttgagcaaggaggccatcgatcatgataaacgcgcttacagcttctgcgggaccatcgagtacatggctcccgaggtggtcaacaggcgaggtcatacacagagcgcggactggtggtcgttcggggtgttaatgttcgagatgctgaccggttctctgcctttccagggaaaggaccgcaaagagaccatggctctgattttgaaggcaaaactgggcatgccgcagtttttgagtggggaagcacaatcattgctgcgcgcattgttcaagcgcaatccatgtaacagactgggggctggcatagatggcgtggaggagatcaagcggcatcctttcttcgtaacaatcgactggaatactctttaccggaaggaaataaagcccccttttaagccagcagttggcaggccggaggacacctttcacttcgatcctgagtttaccgctcgcactccaaccgactcgcctggtgttcctccctccgctaatgcgcaccatctgtttcggggattctcattcgtcgccagtagcttgatccaggagccctcgcagcaggatctacacaaagtgccagttcatcccattgttcagcagcttcatggaaacaatatccatttcacggatggctatgagataaaggaggacatcggcgtcgggtcttactctgtgtgtaaaagatgcgtccataaagccaccgatacagaatacgcggtaaagatcatcgataagtctaaaagggatccctcagaggaaattgaaatcctcctacggtacggccagcacccaaacattatcactttgaaagacgtgtacgacgacgggaagttcgtctacttggtcatggagcttatgagaggtggcgaactgctcgaccgaattctccgccagcgctacttcagtgaacgggaggctagcgacgtactgtgcaccatcacgaagactatggattatttacactcccagggcgtcgtgcatagagacttgaaacccagtaatatcctataccgagatgaatccggttccccagaatccatcagggtctgcgattttgggttcgcaaagcagctcagagctggaaacggactgcttatgacaccatgttacactgcaaatttcgtggcacctgaagttttaaaacggcaggggtatgacgctgcctgcgacatctggagcttaggcattctactatatacgatgctggccggttttacacctttcgctaatggacccgacgacacccctgaagagattctagccaggatcggcagcggaaagtacgcactgagtgggggtaactgggactctataagcgacgcagcaaaggatgtggtctctaagatgctccacgtggaccctcatcagcggctcaccgccatgcaggtactaaaacatccttgggtagtaaatcgcgagtaccttagccctaatcaactgtcccgacaggatgtacatcttgtcaaaggagctatggctgccacctatttcgccctcaacagaactccccaagcacccagacttgaaccggtattgtcctcaaatcttgctcagagaagggggatgaaaagactgaccagtacacggctgtag

SEQ ID NO: 30683 - DNA, 1935 bp, synthetic construct
  misc_feature 1..1935: note = Description of Artificial Sequence: Synthetic coding sequence
  source 1..1935: mol_type = other DNA
atgaaagttctcaagaaggccaccctgaaagtgagagatcgcgtgagatccaagatggagcgagacatcctggctgaagtgaaccatccattcatcgtaaagttgcactatgcctttcaaactgagggcaagctctatctcatactagactttcttcggggtggggatctttttaccaggttgtctaaagaagtcatgtttaccgaggaagacgttaaattctatctggccgagttggccttggccttggaccacctgcactcattggggattatctaccgggatttgaaacctgagaatatcctcctcgacgaggagggtcacattaaaataacagacttcggcctttctaaagaagcgatagaccacgataaacgcgcatactctttttgtggtactatagagtatatggcccctgaagtcgtgaatcgacggggtcatacccagtcagcagattggtggagtttcggtgttttgatgtttgaaatgctgacgggcagcttacccttccagggtaaggataggaaagagactatggcgctgattctaaaagccaagcttggaatgccacagttcctcagcggcgaagctcagagtttgctgcgcgctttatttaaacgaaatccctgtaaccgtctaggcgcaggaatcgacggcgtggaggagatcaaacgccacccttttttcgtgactattgactggaacaccctatatcggaaagagatcaagcccccattcaagccggctgtgggaagaccagaggatactttccacttcgacccagagttcaccgcacgaacccctacagacagcccaggcgtccctcctagcgcaaatgcccaccacctgttcaggggcttcagtttcgtcgcatcttccctgatccaggagcctagccagcaggacctgcacaaggtcccagtgcaccccatcgtccagcagctccacggaaacaacattcatttcactgacgggtacgagattaaagaagacatcggcgtaggcagctatagcgtgtgtaagcgctgcgtccataaagccacagacacggaatatgcggtgaagatcattgacaagagcaaacgggacccctccgaggaaattgagatcttgctgcggtatggacaacatcccaatattataaccctcaaggacgtgtatgatgatggcaagttcgtttacctcgtgatggagttaatgcggggaggggagcttcttgatagaatcctgagacagagatatttttccgagagggaggctagcgacgttttgtgcaccatcacgaagaccatggattatcttcacagccagggggtggtgcaccgggacttaaaaccatcgaacattttatatcgcgacgaatcaggttcccccgaatccattcgggtgtgcgacttcgggttcgccaagcaactgcgtgcgggaaacggattactaatgactccatgttatacggccaattttgtggcgccagaagtgcttaaacgccagggatacgacgccgcttgtgacatttggagccttggaatcctgctgtacacaatgctggcaggcttcaccccctttgctaacggccctgacgatacaccagaagaaattctggccagaattggctcagggaagtatgctctctcgggaggcaactgggactcaatctctgatgccgcaaaagatgtggtgagtaagatgctgcacgttgatccgcatcagaggttaacagccatgcaggtgctcaaacatccttgggtggtgaatagggaatatctgtctcctaatcagctcagccggcaggatgtgcatctcgtgaagggcgcaatggcagccacatatttcgcccttaatcgcactcctcaggcgccacgtttggagcctgtgctgtcttctaacctggctcagcgtcgtggtatgaaacgcctgacatctacaaggctgtag

SEQ ID NO: 30684 - DNA, 2226 bp, synthetic construct
  misc_feature 1..2226: note = Description of Artificial Sequence: Synthetic coding sequence
  source 1..2226: mol_type = other DNA
atgccaatagcccagctcctcgagctgtggaaaaagattgaggtggaacccatggagatcgagactaccgaggaggatttgaatttggacgtagaacccacgaccgaggacactgccgaagaggaggaaggcgtggtgaaggaaatagatatctctcatcatgtgaaggaagggtttgaaaaggctgatcccagccaattcgaactcctgaaagttctgggccaaggcagttacggaaaggtgtttctggtcaggaaagtgaaaggatctgatgcaggtcagttgtacgccatgaaggtcctcaaaaaagccacccttaaagtgagagatcgtgttcggagcaagatggaacgggacattctcgctgaggttaatcaccctttcatagtgaagttacactacgcttttcagacagagggaaaactgtaccttattctggacttccttagaggcggagacctgtttacacgattaagtaaggaggtcatgttcacagaagaggacgtgaaattttatctggcagaactagcgctagcactggatcacctgcactcccttggtatcatctaccgagatctcaaacctgaaaacatcctgctggacgaggagggtcacatcaagattaccgactttggactgtctaaagaagccatcgaccacgacaagcgtgcttatagcttttgtggcacaattgagtatatggccccagaagtggttaatcgcagaggccatacacaaagcgcagactggtggagcttcggagtgttgatgttcgaaatgctcacaggcagcttgccgttccagggaaaggatcggaaggagacaatggccttaatcctaaaggccaagttaggtatgccacagttcctgtcgggggaagctcagtctctcctgcgggcattgttcaagcgcaacccgtgtaatagattgggagccggaatcgatggtgtggaagaaatcaaaaggcacccctttttcgtgaccatagattggaacaccctatatcggaaagagatcaaacctccattcaaacctgctgttggcagaccagaggacactttccactttgaccccgagttcaccgcgaggactcccacagacagtcccggagtacccccaagtgcaaatgcccaccatctcttccgcggtttctccttcgtggcatcctccctgattcaggagccttcgcaacaggacttacacaaagtgccagtccacccgatagtgcagcagcttcacgggaataacattcacttcacagacggatacgagatcaaggaagatatcggcgtaggttcgtactctgtctgtaagcggtgcgtgcacaaggctacagacaccgaatatgctgtcaagattatcgacaagtccaaaagagaccccagcgaagaaatcgagatcctgctacggtatggtcagcacccgaacattattactctgaaggacgtttatgacgatggaaagtttgtgtacctcgtgatggaactgatgaggggcggagaacttcttgatcgaatactgcggcagcgctacttcagtgaacgggaggcgtccgacgtgctatgtaccatcaccaaaaccatggattacttgcactctcaaggcgttgtgcatagagacctaaagcctagcaacatcctctatcgggacgaatccggcagtcccgagagcattcgggtttgcgattttgggtttgccaagcaactgcgtgccggaaatggtctactgatgactccgtgctataccgccaatttcgtcgccccagaagtactgaagcgacaaggctacgacgcagcgtgcgatatatggagcctggggatactactgtataccatgcttgccggattcacaccattcgcaaacggacccgacgatacgcccgaggagattttggccagaatcggaagcggaaaatatgccttgtcaggaggaaactgggatagtattagcgacgccgcaaaggacgtcgtctcaaaaatgcttcacgtcgatcctcatcaacgcctgaccgctatgcaagtcctcaagcacccctgggtcgtgaatcgcgagtatttatctccaaaccaactcagtcgacaggacgtgcatctggtgaagggcgctatggccgctacctatttcgctcttaaccggaccccgcaagccccaagactggaaccagtgctaagctccaatttggctcagaggcgcggaatgaaaagactgacaagcacacggctgtag

SEQ ID NO: 30685 - DNA, 516 bp, synthetic construct
  misc_feature 1..516: note = Description of Artificial Sequence: Synthetic coding sequence
  source 1..516: mol_type = other DNA
atgcccattgcgcagctactggaactctggaaaaagattgaggtggaacccatggagatcgagaccactgaggaagacctgaacctcgatgtagaacctaccaccgaggacaccgctgaggaggggaaatctgactccgctgcttgcaagaccaaggttgcaggtagcgtggaagaggagggtgtggtgaaggaaattgatatcagtcaccacgtaaaagaggggtttgaaaaagcagaccccagccagttcgaattgctgaaagttctggggcaggggagctacggcaaagtcttcttggtgcgcaaagtcaaggggtctgacgccggacaactctatgcaatgaaggtgctgaaaaaagctaccctcaaggtgcgggatcgggtgaggtcaaagatggaacgagatatcttggctgaagttaaccaccccttcatagttaagctgcactacgcatttcagacagagggaaagctctaccttatcctggactttttaagaggtggcgacttatag

SEQ ID NO: 30686 - DNA, 2277 bp, synthetic construct
  misc_feature 1..2277: note = Description of Artificial Sequence: Synthetic coding sequence
  source 1..2277: mol_type = other DNA
atgccgatcgctcagttactggagctgtggaaaaagatcgaggtcgagcctatggaaatcgaaaccactgaagaggacctgaacctggacgttgaaccaactaccgaggacaccgctgaggaaggtaagtccgactcagccgcatgtaagactaaggtagccggatccgtggaagaagagggtgttgtgaaggaaattgacatcagtcaccacgtgaaggagggatttgagaaggccgatcccagccagttcgaattattgaaagtgcttgggcaggggtcgtatggcaaagtattcttggtgagaaaggttaagggctctgatgctggccagctgtatgccatgaaggtgctgaaaaaagccaccctcaaggtgagggaccgggtacgctcaaaaatggaacgagatatcctggcagaagttaaccacccatttattgtgaaactgcactacgcttttcagaccgagggcaagctgtacctcatcctagactttctccgcggaggtgacctgtttaccaggttgtcaaaggaggttatgtttactgaagaagacgtcaagttttatttggctgagctcgctctcgcgctcgaccatctgcatagcctggggataatttaccgcgatctgaaacccgaaaatatcctgctcgacgaggagggccacattaagataacagatttcggcctgtcaaaagaggccatagaccacgataaaagggcatactctttttgtggaactattgagtacatggcacctgaagtggtgaatagacggggacatacccagtcggccgactggtggtccttcggggtgctgatgttcgaaatgctgactggatctctgccctttcagggaaaggatcgcaaagaaacaatggccctaatccttaaggctaaactgggcatgcctcagttcctgagcggggaggcccagtctttgttgcgtgctctctttaaacgcaacccctgcaaccgccttggcgcaggaattgacggtgtagaggagattaaaagacaccctttcttcgtgactattgattggaataccctgtatcgaaaagagatcaaacccccttttaagccggctgtcgggaggccagaagacacatttcattttgatccagagttcaccgcccgaacacctactgactctccaggtgtgccaccttctgcaaacgcccatcatctgttccggggatttagttttgtagcttcttccctgattcaggaaccgtcccaacaggacctccacaaagtgcccgttcatcctatcgtccagcaactgcacggcaacaacatccattttacggacggctatgaaatcaaagaagatattggtgtcgggtcttatagcgtttgtaagagatgcgttcataaagccaccgacaccgaatacgccgttaagatcatcgacaagtccaaacgggatccaagcgaagagattgagatcctcctccgatacgggcagcatccgaacattattaccttgaaagatgtgtacgatgatggcaaattcgtgtaccttgttatggagctcatgaggggcggtgagctgctggaccgcatattaagacagagatacttttctgagagggaggcatctgatgtgctgtgcacaataaccaagacaatggattatcttcattcacaaggagtagttcatagggacctgaagccctcgaatatcctctatcgagatgagagcggctcacccgagagcatcagagtctgcgactttggatttgccaagcaattacgtgccggaaatggcctgctgatgaccccatgttacacagcgaacttcgtggctcccgaggttctgaaaagacaggggtatgatgcggcatgtgatatttggagtttagggatcctgctgtacactatgcttgcgggattcaccccgttcgccaacggtccagatgataccccggaagaaattttggcaagaatcggtagcggcaagtatgccttgtccggaggcaattgggatagtatctcagacgctgccaaagatgttgtatctaagatgcttcacgtcgatccgcaccaacgtcttacagctatgcaggtgctcaaacatccttgggtggtaaaccgggaataccttagcccaaatcagctttctcggcaggacgtgcatctggtgaagggagcgatggcggcaacatatttcgcactaaaccgaacaccacaagcaccacggctggaacctgtcctttcatcaaacttggcccaaaggcggggtatgaagaggttaacatccacacggctgtag

SEQ ID NO: 30687 - DNA, 888 bp, synthetic construct
  misc_feature 1..888: note = Description of Artificial Sequence: Synthetic coding sequence
  source 1..888: mol_type = other DNA
atgagcggagccctggatgtactgcaaatgaaagaagaggacgtcctaaagtttttggctgctggcactcatctgggtggtaccaacctggatttccagatggagcagtacatctacaaaagaaagtccgatggaatctacataatcaacttgaagcggacttgggaaaagctgctccttgcagcgagagctatcgtcgccattgagaaccctgcagacgtaagcgtaatcagttctcgcaacaccggccaacgggctgtactcaagttcgctgctgctaccggtgcgactcccatagcgggacgattcacacctggaacgttcacaaaccagattcaggctgccttccgagagcccaggctcctggtggtgactgatccgagggctgatcatcagcccctgaccgaagccagctacgttaatttaccaaccatcgctctgtgtaatactgacagtccattacggtacgtggacatagccataccctgtaacaataaaggggctcattctgtgggtctgatgtggtggatgctggccagggaagtgttgcgtatgcgtgggaccataagccgggagcacccatgggaagtcatgcctgatctgtacttttaccgggatcctgaggagattgagaaggaggagcaggccgctgctgagaaggccgtgaccaaagaggaatttcagggcgagtggactgctcctgcacctgaattcacggccactcagcctgaggtcgcggactggtccgagggagtccaagtgccttccgtgccaattcagcagtttccaacagaagactggagcgcacagccagccactgaggattggagcgctgccccaactgcccaggctacggagtgggttggagctaccacggattggtcttag

SEQ ID NO: 30688 - DNA, 795 bp, synthetic construct
  misc_feature 1..795: note = Description of Artificial Sequence: Synthetic coding sequence
  source 1..795: mol_type = other DNA
atgtccggcgctctggacgtcctacagatgaaagaagaggatgtgctcaaatttcttgcagccggtacccatttgggaggcacgaatcttgatttccaaatggagcagtacatatataagcggaagagtgatggaatctacattatcaatctgaaacgcacatgggagaagctcttactagccgcacgcgctattgtagccatcgaaaatcccgctgatgtttcagtaatttcgagcagaaacactgggcagagggctgtcctgaagttcgcagcggcaaccggcgcaacccctatcgccggtaggtttacgcccggaacttttaccaatcagatccaagccgctttccgcgaaccacggttgctcgtggtcacagaccctagggccgaccatcagcccttaacagaagctagttatgttaaccttcctaccattgcgctgtgcaacactgacagtcctttaaggtatgtggacattgctattccttgcaataacaagggcgctcatagcgtagggctgatgtggtggatgctggcccgtgaagtactaaggatgcgcggtactattagccgcgaacacccttgggaggtgatgcccgacctgtatttttacagggatcctgaggagatcgagaaagaggagcaggctgccgcagagaaggcagtcactaaggaagaattccagggggaatggactgccccagctcctgagttcacagccacacagcccgaggtcgctgattggtccgaaggagtgcaagttccgagcgttcccatccagcagtttccgacctag

SEQ ID NO: 30689 - DNA, 1458 bp, synthetic construct
  misc_feature 1..1458: note = Description of Artificial Sequence: Synthetic coding sequence
  source 1..1458: mol_type = other DNA
atgggagaacctggcttctttgtaactggcgaccgagccggaggcaggagttggtgtttgagaagagtaggcatgtctgcaggctggctactcctagaagacgggtgtgaagtgactgtgggacgtggatttggagtgacataccagttagtgagcaagatttgtcctctaatgatttcaaggaaccattgcgtgctgaaacagaaccccgaaggccagtggacaataatggacaataagtctttaaatggagtgtggctgaacagagcgagactagagccacttcgggtttattccattcaccagggcgattatatccaacttggggtgcccttagagaacaaggaaaacgcagagtacgaatacgaagttacagaggaggactgggagaccatttatccctgtctctctccaaagaatgatcagatgatcgagaagaataaggagctaaggactaagcgtaagttctcactggatgagttggccggaccaggagcagaggggccaagcaatctgaagtccaagattaacaaggtttcgtgcgaatctgggcaacccgttaaaagccagggtaagggggaggtggcctctacgccgtctgataacttagacccaaagctgacagccctagagccttccaagactaccggcgcaccaatctaccctggctttccaaaggttaccgaagtccatcacgaacaaaaagctagtaactccagcgctagccagaggtccctgcagatgtttaaggtcacaatgtctagaatactgcgtctgaagattcaaatgcaagaaaagcatgaagctgtcatgaacgtgaagaagcaaactcagaaagggaactccaaaaaggtcgtgcagatggagcaggagcttcaggatcttcaatcccaactgtgcgccgagcaggcacagcagcaggctagggtggagcagctggaaaagacatttcaggaggaagaacagcacctgcaagggctggagatcgctcaaggcgagaaggacctcaagcagcagttagcccaggccctgcaagaacattgggcccttatggaggagctgaatcgctcaaagaaggactttgaggctatcatccaagcgaagaacaaagagttggaacaaacaaaggaagagaaggagaagatgcaagcacagaaagaggaagtcctgtcccacatgaatgacgtacttgaaaacgaacttcagtgcattatctgctctgagtactttattgaagccgtgacactgaactgtgcgcattctttctgcagctattgcattaatgaatggatgaagaggaagattgagtgccctatttgtagaaaggacattaaaagtaagacctactcactggtcctcgacaactgcattaacaaaatggtcaacaacctgagcagcgaggttaaagaacgccgaatcgtgctcattcgcgagagaaaagctaaacggctcttttag

SEQ ID NO: 30690 - DNA, 297 bp, synthetic construct
  misc_feature 1..297: note = Description of Artificial Sequence: Synthetic coding sequence
  source 1..297: mol_type = other DNA
atgggagaacctgggttctttgtgaccggcgatagggctggcggacgttcttggtgtctgaggcgtgtgggaatgtccgccggatggcttctgctcgaagacggatgcgaggtgaccgtgggacgtggcttcggtgttacatatcagctggtctccaaaatttgcccactgatgatcagccggaaccattgtgtactgaagcagaatcctgaaggacagtggacaattatggataataagagcttcccgagtgagaaggcagaagatttcacggcagcaggtgagcggtttctgtag

SEQ ID NO: 30691 - DNA, 1347 bp, synthetic construct
  misc_feature 1..1347: note = Description of Artificial Sequence: Synthetic coding sequence
  source 1..1347: mol_type = other DNA
atgggggaacctggcttctttgtgactggggatcgggcagggggtcgaagttggtgtctacgacgcgtcggaatgagcgcaggatggctcttgctggaggatggctgtgaggttactgtggggaggggattcggggtgacttatcagctagtctctaagatttgccctctgatgataagccggaatcattgcgttctcaagcagaacccggagggccagtggacgatcatggacaacaaaagcctgaatggcgtttggcttaatagagcacggctcgagccactgcgagtctatagtatccaccagggggattacattcaattgggcgttcccctcgaaaataaggagaacgcagagtatgagtatgaagtgaccgaggaggactgggagactatttacccctgtttgtctccgaagaacgaccagatgatagaaaagaataaggagctgcggactaagagaaaattctccttggatgaactggccggaccgggagccgaaggcccttcgaatttgaaatcgaagattaacaaagtgtcgtgtgagtccggccagcccgtaaaatctcaaggaaagggcgaggttgcgagcaccccatcagacaatctggatccgaagctcactgcacttgaaccctccaaaacaaccggagcacctatctaccctgggtttcctaaagtgaccgaagttcaccatgaacaaaaagcaagcaatagctctgccagccaacgatcactccagatgtttaaagtcacaatgagcaggatcctcaggctaaagatacaaatgcaggagaagcatgaagcggtgatgaacgtgaaaaaacagacccaaaaaggcaactctaagaaagtggttcagatggaacaggagctacaagacctacagagccagctctgcgcagagcaggcccagcaacaggctcgagtggagcagttagagaaaacattccaagaggaggaacagcatttacaggggctggaaattgctcagggggagaaggatctgaaacagcagctggcacaggccctccaggagcactgggctctgatggaagaactgaaccgctccaagaaagacttcgaagcaattatccaggccaaaaacaaggagttggagcagaccaaggaggaaaaggaaaagatgcaggcacaaaaagaggaagtgctcagtcacatgaatgacgtactcgaaaacgaactgcagtgtattatttgtagcgagtattttatagagcaaagagattgttccgaggaccgcgcactgcgagcctttgagcgactgcctggctctgcgagcttgaggtggagcggaggatttagtctggcagtgacaccccttctgtag

SEQ ID NO: 30692 - DNA, 1593 bp, synthetic construct
  misc_feature 1..1593: note = Description of Artificial Sequence: Synthetic coding sequence
  source 1..1593: mol_type = other DNA
atggctgacgatattgatatcgaagcaatgctggaggctccttacaagaaagacgagaacaaactatctagcgccaacgggcatgaggagaggtctaaaaagcgcaagaaatcaaaatcccgtagcaggagccatgagagaaaaaggagtaaatccaaggagcggaagagaagccgggatcgagaaaggaagaagtcaaaatcacgtgaacgaaaacgcagcaggtcgaaggaaaggcggaggagcagatctaggagtcgggataggcgatttaggggcagatataggagcccctatagtggtcctaagttcaattccgctattaggggtaagataggactcccccacagtattaagctgagcagaagaagatcaagatcaaaatcaccattcaggaaggacaagagcccagtcagagaacccattgataatctaaccccagaagaaagggatgctcgtacagtgttctgtatgcagctggcagcccgaattcggcctagggacctggaggaattcttctctaccgtgggtaaagtacgggacgtgcgtatgatctcggatcgcaattccagaaggtcgaaaggaatcgcctacgtagaattcgtggatgtgtcctccgtccctctcgccatagggctgacggggcaacgcgtgctgggagtaccaatcattgtacaggcttcacaggctgagaagaatcgcgcagctgctatggctaacaacctgcagaagggttccgccggaccaatgaggctgtacgtcgggagcctgcattttaatatcaccgaagacatgcttcgcggaattttcgagcccttcgggaggatcgagtctattcagctcatgatggacagcgaaaccgggagatctaagggatatggcttcatcacattctctgactccgaatgcgccaaaaaagccctggaacaactgaatggtttcgaactggcgggaaggcccatgaaggtgggccacgttaccgaacggactgatgccagtagcgcgtcttcgttcctcgactctgatgagctagaaagaaccgggatcgatttgggaactaccgggaggttgcaactgatggccaggttagcagaaggaacaggcttgcagatccctccagccgcacagcaggctctgcagatgtccggatctctggcctttggcgcagtggcagagttcagtttcgttatcgacctgcagactcggttgtcccagcagacagaggcctcagccctggccgctgccgctagcgtgcaacctcttgctacgcagtgcttccagctaagtaatatgtttaatcctcagacagaggaagaggtcggctgggacactgaaattaaagatgatgtgattgaagagtgtaataaacatggaggagtgatccatatttatgtagataagaattctgctcagggtaatgtgtacgtgaagtgtccttctattgctgctgccatcgctgcagtcaatgccctccatggccgatggtttgccggaaagatgataaccgctgcatatgtcccattgcccacctaccataacttatttcccgacagcatgactgccactcaactgctggtcccctcacgcaggtag

SEQ ID NO: 30693 - DNA, 1272 bp, synthetic construct
  misc_feature 1..1272: note = Description of Artificial Sequence: Synthetic coding sequence
  source 1..1272: mol_type = other DNA
atggcggacgacattgacattgaagccatgttagaggccccttataaaaaagatgaaaataagcttagttccgctaacggacacgaagagcggagcaagaagcgcaaaaagtctaaaagccgtagccggtcacatgagcgaaagagatccaaatctaaagaacgaaaacgcagcagagaccgcgagcgtaagaagagcaagagcagagagagaaaacgtagcaggtccaaggagcggagacggtccaggtctcgttcccgggaccgcaggtttagagggagataccgcagcccttatagcggccctaaattcaactctgcaattaggggaaagataggattgcctcacagtataaagttgagccgacggaggtcccgtagcaaaagccccttcaggaaggataaatctcctgtacgggaaccaatcgacaatctgactccggaggaacgggacgctcggacagtgttttgtatgcagctggccgctagaatacgcccacgggacctagaggagtttttctcaactgtgggaaaagtgagggatgttagaatgatctccgatcgtaattcccgaagatccaaaggcatcgcgtacgtggaatttgtcgacgtttcctccgtgccactggcgatcgggcttaccggccagagagtgttgggagtgcccatcattgtccaggcctcccaagcggaaaaaaatagggcggctgccatggctaataacctgcagaagggatcagccggacccatgagactatatgtggggtccctgcattttaacatcacggaggatatgttgagaggaatctttgagccatttggtcgtattgagagtatccagcttatgatggacagcgagaccggtcgatccaagggctatgggttcatcaccttctccgacagcgagtgcgcgaaaaaagcactcgagcagctcaacgggttcgaattagctggtcggccaatgaaagtgggacacgtgactgaaagaaccgacgcctcctcagcctccagcttcctcgatagtgacgagttggagcgtaccggaattgatctgggaacaacaggcagactgcaactcatggccagactcgcggaaggaaccgggctgcagattcctccagcagcgcagcaagccctacagatgagtggaagtctggcattcggcgcagtggccgacctccagactcgtctttcccagcaaacggaggcgctctttgttatcatgttttggaatgagatctggtccgacaacatgatcaccctgcagctgtag

SEQ ID NO: 30694 - DNA, 1575 bp, synthetic construct
  misc_feature 1..1575: note = Description of Artificial Sequence: Synthetic coding sequence
  source 1..1575: mol_type = other DNA
atggctgacgacattgacatcgaggccatgctggaggccccatacaaaaaggatgaaaataagctgtccagcgccaatggacatgaggagaggagcaaaaagagaaaaaagagcaagagcagatctaggtcccacgaacggaaacggtctaaatccaaagagcgcaaaagaagcagggaccgagagaggaaaaagtcaaaatcaagggagagaaaaaggtcacgatctaaagagcgcaggcgatcccggtccagatctagggatcgtcgtttcagaggcaggtatagatctccatacagcggacctaagtttaactctgccattcgcggtaaaatcggcctaccccacagcatcaaactcagtagaaggaggtctcggtctaagtcccctttccgtaaagacaaatctccagtgcgagagcccatcgacaaccttactcctgaggagcgcgacgccaggaccgttttttgcatgcagttggccgctagaattcgcccaagggatctcgaggagttcttcagcaccgtgggcaaagtgcgtgacgtgaggatgatttctgaccgaaacagcaggaggtcaaagggcatagcctacgtcgaatttgtggatgtgtcatccgtgccacttgcgatcggattaactggccagagagtgctgggggtcccaatcattgtccaggcatcacaggctgagaaaaaccgtgcagccgctatggccaacaatcttcagaagggatccgctggtccaatgcgactgtatgtggggtcacttcattttaacatcacagaagacatgcttcgtggcatatttgaaccttttggacgcatcgagtcaattcagctcatgatggactcagaaacaggtcgctccaagggttacggctttattactttctccgacagtgagtgtgccaagaaggccctggagcagctgaatggctttgagcttgccggacgcccaatgaaggtgggtcatgtgaccgaaagaaccgatgctagcagcgcatcttcatttctcgatagtgacgagctcgaacgtaccgggatagatctggggacaacagggaggctgcaactcatggcccgactggcagagggcacagggctacagattccccctgccgctcagcaggcacttcagatgtcgggtagtcttgcattcggtgcagtggcagacctgcagacacgtctctcccagcaaacagaggcttccgcactggctgccgcagctagcgtccagccactcgcgactcagtgttttcagctcagtaatatgtttaatccacagaccgaagaggaggtgggctgggatacagagatcaaagacgatgtgattgaagagtgcaataagcatggtggggtcatacacatatacgtcgataaaaactcagctcaggggaacgtctacgttaagtgcccttcaattgctgctgctatcgcggcagtcaacgcccttcacgggaggtggtttgccggaaagatgatcacagcagcttacgtccctctgcctacatatcacaacctgtttccagactccatgactgccactcagctcttagtgccatctcggaggtag

SEQ ID NO: 30695 - DNA, 696 bp, synthetic construct
  misc_feature 1..696: note = Description of Artificial Sequence: Synthetic coding sequence
  source 1..696: mol_type = other DNA
atggccgacgacatcgacatagaggcaatgctggaagccccttacaagaaagacgagaataagctcagttctgcaaatggacacgaggagcgctccaaaaagcggaagaaatctaagagtcggtcgcggtcccacgaacgaaagaggagtaagagcaaggaacgcaagagaagccgtgaccgtgagcgaaagaagtccaagtcccgggagcgaaagcggtcaaggtctaaggagaggcgcagaagccgaagtcgaagccgagacaggagatttaggggacggtacagatctccgtactcgggccctaaattcaattcagctattcggggtaaaattgggctcccccatagcattaagttgcgcagacgatctaggtctaagtccccctttcgtaaggacaagtcaccggtccgggaaccgattgacaacttaactccagaggaacgggacgctagaaccgtgttctgtatgcaactggccgctcgaatccgacctagggacttagaagaatttttcagcacagtgggaaaggtccgagacgtcagaatgatcagcgaccggaattccaggcgcagtaagggcatcgcttacgtcgagttcgtcgacgtgagcagcgtgcccctggccattggacttacagggcagcgcgttcttggcgttccaataattgtgcaggcaagccaggctgagaagtag

SEQ ID NO: 30696 - DNA, 1122 bp, synthetic construct
  misc_feature 1..1122: note = Description of Artificial Sequence: Synthetic coding sequence
  source 1..1122: mol_type = other DNA
atgcagttggctgccaggataaggccccgtgacctggaggagttcttctctacagtaggcaaagtgagagacgtcagaatgatttcagaccggaacagcaggagatctaaaggtatcgcttatgtggagttcgtcgacgtgtcctctgttcctctcgccattggattgaccggtcagcgagttctcggtgtgcctattattgtgcaagcttctcaggccgagaaaaatagggccgcagctatggccaacaatctccagaaaggaagcgccggtccgatgaggctatacgtgggaagcctgcacttcaatataacagaagacatgttacgcggaatctttgaacccttcggccgaattgagtctattcagttgatgatggactcagagacgggcaggtctaagggttacggattcataacattctccgattctgagtgtgccaagaaggccctggagcagctgaacggatttgagcttgctggacggccaatgaaagtcggccacgtgacggagcgcacagatgcaagttctgcaagtagcttccttgattcagacgagctggagaggaccggtattgaccttggtactaccggcaggctccaattgatggctcgactggcagagggaaccgggctccagattccgcctgccgctcaacaggccctccagatgtcagggagcctcgcctttggagcagtcgccgagttctcttttgttattgacctccagacccgactcagccagcaaaccgaggcctcggccttagccgcagccgcaagcgtgcagcctctggcgacccagtgttttcagctgtcaaacatgttcaacccacagacagaagaagaagtgggatgggacacggagataaaagacgatgtaattgaggagtgtaataagcatggaggcgttattcacatttatgttgacaagaatagcgctcaaggcaatgtttacgtgaagtgtcctagcatcgcggctgccatagccgcagtcaatgccctccacggcaggtggtttgccggaaaaatgattactgctgcctacgtgcctttacccacctatcacaacttgttccccgatagcatgaccgctacacagctgctggtacctagcaggagatag

SEQ ID NO: 30697 - DNA, 582 bp, synthetic construct
  misc_feature 1..582: note = Description of Artificial Sequence: Synthetic coding sequence
  source 1..582: mol_type = other DNA
atggccgacgatatcgatatagaagccatgctggaagccccatacaagaaagatgaaaataagctatcatcagcgaatggccatgaggaacgtagcaagaagcgcaagaagagtaaaagtcgcagcaggagccacgagcgcaagcgtagcaagtcaaaagaacgcaagcgaagtagagacagggagcgcaaaaagagcaaatcacgtgagcgcaagcgatctagatcgaaggagcgaaggaggagtcgttcccgctccagagatagaagatttagaggtagatatagaagcccttacagcggacctaaatttaactccgctatccggggaaagatcggactaccacactccatcaagttgtcacggagacggtccaggtctaagagcccttttcgcaaagataaatcacccgtaagggagcctattgacaatctaactcctgaggagagagacgcaaggacagtgttctgcatgcaactggccgctcgcatcagaccaagggacctcgaggaattcttcagcactgttggcaaggtacgggacgtcaggatgatttccgataggaactctcgcaggtcctag

SEQ ID NO: 30698 - DNA, 1014 bp, synthetic construct
  misc_feature 1..1014: note = Description of Artificial Sequence: Synthetic coding sequence
  source 1..1014: mol_type = other DNA
tagagccctttcagaaaggacaagtctccagtacgcgaaccaattgacaacctcacaccagaagaacgcgatgctagaaccgtcttttgtatgcagttagccgctcgaataagaccgagagatcttgaagagtttttcagtactgttggaaaagttcgggacgtgaggatgatcagtgacagaaatagccgccgttcgaaagggatcgcctatgtcgaattcgtggatgtcagttcagtgcccttggccatcgggctcaccggacagagagtgctgggtgtgcccatcattgtccaagcatcccaggccgagaagaaccgggctgccgctatggccaataatctgcagaaagggagtgccggtcccatgcgcctctacgtcggtagcctgcactttaatattaccgaagacatgctgcgcggaatcttcgagcccttcggcaggttcagcgacagtgagtgcgcgaaaaaagccctggaacagctgaatgggttcgaacttgctgggaggcccatgaaggtcggccatgtcactgagcggaccgatgcgtctagcgcctcctctttcctcgattctgacgagctcgaaaggactggcattgacctcggcaccacgggacgcctccaactcatggccaggctggctgagggtacggggctgcagatcccaccagcagctcaacaagctttgcagatgtccggaagcttagcattcggcgcagtcgccgaattcagctttgtcatcgacctgcaaacccggttgagtcagcagactgaagcctccgctttggccgctgcagccagtgtgcagcctcttgcaacacaatgttttcagctgtccaacatgtttaatccccaaacagaagaagaagtgggctgggacacagagataaaggacgatgtgattgaggaatgtaataaacacggcggagttattcacatctacgtggacaagaattccgcgcaaggtaatgtatacgtgaaatgtccctccattgccgcagccatcgcctag

SEQ ID NO: 30699 - DNA, 1527 bp, synthetic construct
  misc_feature 1..1527: note = Description of Artificial Sequence: Synthetic coding sequence
  source 1..1527: mol_type = other DNA
atggccgatgacattgacatcgaagctatgctggaggctccttacaaaaaagacgaaaacaaactatcttccgccaatggtcacgaggagaggagcaaaaagcgcaaaaagtccaagagtcgctctagatcccacgaaagaaagcgctccaagagcaaggagcgcaagcgttctcgagatcgcgaacgtaagaaaagtaaatcaagggagcggaaaagatcccgctctaaggagagacggaggtcgaggagtcgttcccgggacaggcgcttcaggggcagatacagatctccatatcggaggagatcccggtcgaagtccccatttcgaaaggataagtctcccgtgagagagcccattgataatttaactcccgaggagagagatgccagaacggtgttttgcatgcagttggccgcaaggatccgtccaagggacctggaagagttcttctccaccgtgggcaaagtccgtgacgtccgcatgatctcagatagaaactctaggcgctctaagggcatcgcctatgtggagtttgtcgatgtttcttccgtgcctttagcgattggcctgacagggcagagggtactgggcgtgcctatcatagtgcaggcttctcaggcagagaagaaccgagccgctgccatggctaataacctacagaagggcagcgcaggccctatgagattgtacgtaggcagcttacattttaacattacggaggatatgttgagaggcattttcgaacccttcggtaggattgagtccatccaactaatgatggacagtgagaccggacggtcgaagggctacggatttatcacattctcagattccgaatgcgcaaagaaggcccttgagcagcttaatggctttgagctcgctggcaggcctatgaaagtcggccatgtcacagaaagaaccgacgcaagctcagcaagtagctttttggatagtgacgaactcgagagaaccgggatagatctggggactaccgggaggttgcaactcatggctaggctcgccgagggaaccggtctgcagattccgcctgccgctcagcaggccctacagatgtctggctcactcgcctttggtgcggtcgccgagttttcatttgtgatcgatttgcaaactaggctgtcccagcaaacggaggctagcgctctggctgcggcagctagcgtccagcctctggcaacccagtgttttcaattatccaatatgttcaacccacagacagaggaggaagtgggatgggataccgagatcaaagacgacgtgatagaagagtgtaacaagcacgggggagtgatacatatctacgtagataagaatagcgctcagggcaatgtttacgtcaaatgtcccagcattgcggcagcaatcgccgctgtgaacgctctgcatggaaggtggttcgccggtaagatgattacagccgcatacgtgcccttacccacgtatcacaatctctttcctgactcaatgaccgcaacgcaactcctagtgccctctcggagatag

SEQ ID NO: 30700 - DNA, 1176 bp, synthetic construct
  misc_feature 1..1176: note = Description of Artificial Sequence: Synthetic coding sequence
  source 1..1176: mol_type = other DNA
atggtggaagctgacaggccaggaaagctgttcatcggagggctaaacaccgaaaccaatgaaaaagccttggaggccgtgttcggaaaatatggcagaatcgttgaagtccttcttatgaaggatcgagagacaaataaaagtagagggtttgccttcgttacctttgagagccctgcggatgcaaaggatgcagcacgggatatgaatggcaagagcctcgacggtaaagctatcaaggtagagcaggcgacgaaaccaagcttcgagtccgggagacgcggtcctcctcctcctccccgaagccggggtccgccaaggggcctccgcggtggcagaggtggatctggaggtacacggggacctccatctcgcggtggacatatggatgatggcggttattcaatgaattttaacatgtcaagcagccggggacccttgccggttaagcgcggacctccgcctcgctccggtggaccacctcccaaacggagtgctccttcggggccagtccgctcttccagcggaatggggggacgggctcccgtgtcccgtggtcgggacagttatggagggcctccgagacgcgagcctctgccctccaggcgcgatgtatatctgagcccaagggatgatggttattccactaaagactcttatagttcgcgagactacccaagcagccgggatacacgtgactacgccccaccacccagagactacacctaccgtgattatgggcattcttctagtagagatgattaccccagtcgcggatactcagatcgcgatggatacggcagggatcgggactacagcgaccacccatcaggtggcagttatagagattcctatgagagttatggtaattcaagaagcgccccaccaactagaggacccccaccaagctatggcggaagtagtaggtacgatgattacagctcatcaagagatgggtacggcggatctcgggactcgtatagtagctctcgttccgatctctattcttcgggtcgagacagggtgggcagacaagagcgaggactgcctccctctatggaaaggggttaccccccaccccgtgattcctatagtagcagcagcaggggcgctccgagggggggtggacgcggtgggagtcgatccgatagggggggtggacgcagccgctattag

SEQ ID NO: 30701 - DNA, 309 bp, synthetic construct
  misc_feature 1..309: note = Description of Artificial Sequence: Synthetic coding sequence
  source 1..309: mol_type = other DNA
tgaatgtttatttgcccccaggaaatgatgggaatacttctcaaaaccgctattcaggcggaaatcacccaggtgttagtgatccttgagattatgcatcaccatcatgaaataatattgacagtcatcatggtgattccagtgcacgtcatgactattcatcaagaagatatcgccattgagatggatatggtggtgattgtaacaattcagattatccaggtcgaggttcccaccgaaatccacatgagggtgatggtgggagactttgctcactacggacggggtgtgctgatcgattcccaatag

SEQ ID NO: 30702 - DNA, 591 bp, synthetic construct
  misc_feature 1..591: note = Description of Artificial Sequence: Synthetic coding sequence
  source 1..591: mol_type = other DNA
atggtcgaggctgatagacccggaaaactgtttattggaggcttaaatactgagactaacgaaaaggcactagaggccgtcttcggcaaatatgggaggatcgtcgaggtgctgcttatgaaagaccgtgaaactaacaagagtcggggttttgccttcgtcactttcgaatctcccgctgatgctaaggacgccgctagagatatgaacgggaaattattgtaccacgtcgaggagatagtgatggaggtgcaccttgagggtaaccgctgtcctttagttgagatgttcatctgccctcaggaaatgatgggaattctcctgaaaactgcgattcaagcagagatcacccaggtgttggttattctcgaaatcatgcaccaccatcacgaaatcatcctgaccgtgatcatggtcattccagtgcacgtgatgacaattcatcaggaagacatcgctatcgagatggatatggtcgttattgtgacaatacagatcatacaggtcgaagtgccaaccgagattcatatgcgcgtaatggtgggagactttgcccattatggtcggggtgttctgattgactcacagtag

SEQ ID NO: 30703 - DNA, 1137 bp, synthetic construct
  misc_feature 1..1137: note = Description of Artificial Sequence: Synthetic coding sequence
  source 1..1137: mol_type = other DNA
atggtcgaggccgacaggccgggtaaattgttcattggtgggctgaatacggaaacgaacgaaaaagcactggaagctgtgttcgggaagtatggccgaatcgtagaagtgctgctcatgaaggacagagagtcaccggcagatgcaaaagatgctgcgagagacatgaatggcaagagcctagatggtaaagctataaaagtcgagcaggccaccaaaccatcgttcgaaagtggtcgaagaggcccaccacctccaccgagaagtagggggcctcccagaggcttgagaggcggtagaggtggttccggcggaactcgcggaccacctagcagggggggacatatggacgatggaggctacagcatgaactttaacatgtccagctctcgcggtccccttccagtaaagaggggaccacctccccgatctggcggacccccacctaaaagaagcgctccctctggcccagtgcgtagcagtagcggcatgggcggtagggccccagtgagcaggggcagagattcttatggtggaccaccccgaagagaacccttaccaagccgcagggacgtttatctgtcgcccagggacgacgggtactctacaaaagactcctattcttcacgagactacccaagttcaagggatacccgagactacgcccctcccccacgtgattatacatacagagattatggacatagctcctctcgcgatgactatccctctcgcggttattctgacagagatggatatggcagagatcgcgattacagtgaccatcccagcgggggaagctaccgggacagctacgagtcctacggaaacagcaggtccgcacctcccacgcgcggtcctcctccaagctacggtggctcatccagatacgatgactatagcagctcacgcgacgggtacggtgggagcagagactcgtattcgtcatccaggagcgatctgtactcgtccggaagagacagggtcgggcgacaagagcgcggtctgcctcctagtatggagcgcggttatccccctccacgggatagctactcctcaagtagtcgtggagctcctcggggtggcggtcgaggtggctctcggtccgaccgcggtggaggtcgatctcgctattag

SEQ ID NO: 30704 - DNA, 1443 bp, synthetic construct
  misc_feature 1..1443: note = Description of Artificial Sequence: Synthetic coding sequence
  source 1..1443: mol_type = other DNA
atggctagcgactcaatatttgagagtttcccctcataccctcagtgctttatgcgcgagtgcatcctgggaatgaatccctctcgcgacgtgcatgacgcatccaccagtcgtcggttcacccctccatctactgcactgagtcccggaaaaatgagcgaggccctgcccttaggagctcccgatgccggtgctgcgctcgcagggaaattacgatcaggagatcgttctatggtggaagtgcttgccgatcatcccggtgagcttgtgcgcactgacagccccaattttctgtgttccgtcctgccaactcattggcgctgcaataagacacttcccatagcatttaaagtcgttgctctgggggacgtgcccgacggaacactggtgactgtcatggcaggcaacgacgagaactactccgccgagctgaggaacgctacggcggctatgaaaaatcaggtggctaggtttaacgatttgcggttcgtgggcaggtctggcaggggcaaaagctttacactgacgattaccgtcttcacaaaccccccacaagtggccacgtaccatcgggctattaagattacagtggatggcccaagagagccgaggcggcatcgccagaaactggacgatcaaaccaagccaggttccctgtcgttcagcgagcggcttagtgagttggagcagctgcgcagaacagccatgagagtgtcccctcaccacccggcaccaacccctaaccctcgagcctcactgaatcatagcacagcatttaacccccagccccaatctcagatgcaggatacccgccagattcagcctagtccaccgtggtcttacgatcagagctatcagtacttggggtctattgcctccccgagcgtacatcctgctactcctatctccccgggacgagcttctggaatgacaaccctgtccgctgaactttcaagcaggctttcaacagcgcctgatctaacggccttctctgatccacgacagttccctgctctgcccagcataagcgacccacgcatgcactaccccggagcctttacttactccccaactcccgtgacatcaggaataggcatcgggatgagcgctatgggcagtgcaaccagataccacacgtatctgcctcctccctaccccggatcttctcaagctcaggggggaccattccaggcatcttccccatcataccacctgtattacggcgcttccgcgggaagctatcagttctctatggtgggcggagaaaggtctccacctagaatcttgccaccctgtaccaatgcttcgaccggttctgctttgttaaacccttcactcccgaaccagtctgacgtcgtggaggcagaggggtcccactctaattctcccactaacatggcccctagcgcgcgactcgaggaagctgtgtggcgcccatattag

SEQ ID NO: 30705 - DNA, 1407 bp, synthetic construct
  misc_feature 1..1407: note = Description of Artificial Sequence: Synthetic coding sequence
  source 1..1407: mol_type = other DNA
atgccggcagctccccgaggccctgcccagggcgaggccgctgcccgtacccgatccagggatgcttccacgtctaggcggttcacaccaccttccactgcactttctcccggtaagatgtcagaagcactgcctctcggagcccctgacgccggagcagcattggccggaaaactgcggtcaggcgatagaagcatggtggaggtactggctgatcatccgggtgagctcgtacgcactgactcacctaactttctgtgcagtgttctgcccactcactggcgctgcaacaaaaccctccccatcgcctttaaggttgtggccctaggggatgtccccgacgggaccctcgtcacagtgatggcaggtaacgacgaaaactactccgccgagctgcggaacgctactgcagccatgaaaaaccaagtggctagattcaatgacttgcgctttgtgggccgttccggacggggaaagagcttcacattaactattactgttttcactaaccctcctcaggtagcgacctaccatagagcgatcaagataacagtagacgggcctcgcgagccgagacggcataggcagaaactggatgatcagacaaagcctgggtccttgagcttcagtgagcggttatctgaactggaacaactccggagaaccgccatgagggtgtctccccatcacccagctcccactcccaacccacgggctagcctgaatcatagcacggcgtttaacccccagccacagtctcagatgcaagatactcggcagatccagccctcccctccctggtcatacgaccaatcgtatcagtatctgggctctatagctagtccttccgtgcacccggctactccaatttctcctggcagagcgtccggcatgactactctgtctgccgaactgtcctctaggctgagcaccgcacccgatctgaccgcattcagtgacccgaggcagtttcccgctctgccttccatctctgatcccagaatgcactatcctggcgcattcacctactcccccacgcctgtgacctctggaataggtattggaatgtccgccatgggcagtgcgacccggtatcacacctacctaccccctccatatcctggctctagccaggcccaaggaggtccgtttcaagcatcatccccatcgtatcatctgtattatggcgcaagtgctggctcctatcagttctcaatggtggggggagaacggtcccctccaagaattctccctccttgtaccaacgcatccaccgggagtgcattgctgaatccctcacttccaaatcaatccgacgtagttgaagccgagggaagtcacagcaatagcccaacaaacatggcgccatctgcccgtttggaggaggccgtatggcgaccgtactag

SEQ ID NO: 30706 - DNA, 1362 bp, synthetic construct
  misc_feature 1..1362: note = Description of Artificial Sequence: Synthetic coding sequence
  source 1..1362: mol_type = other DNA
atgcgcatccccgtggatgccagtacctcacggagatttacacctccctctacagccctgagcccaggcaaaatgtccgaagccctgccactgggggctccagacgcaggcgctgccttagctggtaaactgagatccggcgacagatctatggtcgaagtgctggcggaccacccaggggagttggtgaggactgattcccccaatttcctgtgcagcgtcctgccgactcattggaggtgtaacaaaacgcttcccatcgctttcaaagtggtggctttgggggacgtacccgatggcacccttgtaaccgtcatggccggtaacgacgagaattactccgcagaattgaggaacgcaacagcagccatgaagaaccaggttgccagatttaacgacttgaggtttgtggggcgatcagggcgaggcaagtctttcacactgactataaccgtgttcactaatcctccccaagtagccacatatcaccgggcaattaagattaccgtcgacggcccacgcgagcctcgacggcaccgccagaaactagacgatcaaacgaagcccggtagtttgtcattctcagagcgcctttccgagctcgagcagctcagaagaacagctatgcgtgtgagccctcaccacccagcacctacaccgaatccaagggcctctctgaatcactctactgcattcaacccccagccccaaagccagatgcaagatacccggcaaatccagccgagccccccatggagctacgaccagtcctaccagtacctcgggtccatcgcctccccaagcgtgcacccagcaacccccattagccccggacgggcttcggggatgactaccctgtccgcagagctctcttcaagattgtcaacggcccctgatttgactgcgttcagcgatcccagacaattcccagctctgcctagcatcagcgatcctcgcatgcattaccctggagccttcacttatagtccaaccccagtcaccagcgggatcggaattgggatgtccgcgatgggctccgccaccaggtatcacacgtacctaccccctccatacccaggatcttcccaggcacagggcggacctttccaggcatcttccccttcgtaccacttgtactacggtgccagcgccggttcatatcagttctccatggtggggggtgaaagatcacctccaagaatcctgcccccttgcaccaacgcgtcaactggtagtgctctgcttaatccttcactccccaaccagagcgatgtagtggaggccgagggcagtcactctaattctccaacaaatatggccccatccgcacgcctggaggaggccgtctggcgcccttactag

SEQ ID NO: 30707 - DNA, 1428 bp, synthetic construct
  misc_feature 1..1428: note = Description of Artificial Sequence: Synthetic coding sequence
  source 1..1428: mol_type = other DNA
atgaatcctagtcgggatgtccatgacgcatcgacatcgcgcagattcacccccccaagcaccgcgctatctcccggaaagatgagcgaagcactccctctgggggctcctgatgcgggagcagctctggcgggaaagctgagaagtggggatcggagcatggtcgaggtgctggcagatcaccccggagaattggtgcgcaccgactcccctaattttctgtgctctgtcttgccaacgcattggcgatgtaacaagacactgcctatcgcctttaaggtcgtggcactaggagacgttcctgatggcacattggttactgtgatggcgggaaatgatgaaaattattcagccgagctgaggaacgctaccgccgctatgaagaatcaggtggcaagattcaatgacctgaggtttgtcggaaggagtggaagaggcaaatccttcacactgaccataacagtgtttaccaatccacctcaggtagccacttatcaccgggctatcaagattacagttgacgggccacgggagcctcgcagacatcgacagaagctggacgatcagacaaaacccggatctctgtccttttcagagcgattgtccgagttggagcagttaaggcgtaccgccatgcgcgtcagtccccaccacccagcccctacacccaacccacgggctagcctaaaccattcaacagcttttaatccccagcctcagtcgcagatgcaagacactcgccagattcagccaagtccaccctggtcgtatgatcagtcatatcagtacctggggtccattgctagcccttcagtgcatcctgctacaccaatctctccaggacgtgccagcggaatgacaaccttgtccgctgagctgagttcgcgactcagtaccgcacccgacctgactgctttcagtgacccaaggcagtttccagcccttccgtccatctcggacccgcgtatgcattatcctggggctttcacgtatagccctacacccgtgacttccggtattgggatcgggatgtcagcgatgggcagcgcaaccagatatcacacgtatctgcccccaccttatccaggcagcagtcaggcccaaggtgggccattccaggccagctcgccatcataccatctctactatggagcctcggccggaagctatcagttctcaatggttggaggagaacggtctccacctcgtattttacccccttgcacaaacgcttctacaggcagcgcactgctgaacccttctctgcccaatcagtccgatgtggttgaggcggagggtagtcacagtaacagtccaacgaatatggccagggcgagttgctccaggcaagctagacgagatccaggaccctgggccaggccgccatcatggggtcggggaagaccaacagctagaatctcgctttag

SEQ ID NO: 30708 - DNA, 99 bp, synthetic construct
  misc_feature 1..99: note = Description of Artificial Sequence: Synthetic coding sequence
  source 1..99: mol_type = other DNA
atggcttctgacagtatattcgagagcttcccctcctacccccagtgttttatgagggaatgtatcctgggaatgaatccctcccgggatgtccactag

SEQ ID NO: 30709 - DNA, 414 bp, synthetic construct
  misc_feature 1..414: note = Description of Artificial Sequence: Synthetic coding sequence
  source 1..414: mol_type = other DNA
atgcaggatacgcggcaaattcagcctagtccaccatggtcctacgaccaatcatatcaatatttaggctccatcgcaagtccctcagtccatccagccacgccgatcagtcccggaagggcatcaggaatgaccacactctccgccgagctgtcctcccgcctctccaccgcacccgatctcaccgcattctcagacccgagacagtttcccgctctcccctccatctcagacccccgtatgcactacccaggcgcttttacatacagtcctacccccgtgacttctgggatcggcattggcatgtctgccatgggatctgccacacgctaccatacatatctcccacctccataccctggcagctctcaagctcaaggcggtccattccaagcctcatccccctcgtactag

SEQ ID NO: 30710 - DNA, 1443 bp, synthetic construct
  misc_feature 1..1443: note = Description of Artificial Sequence: Synthetic coding sequence
  source 1..1443: mol_type = other DNA
atggccagcgattccatttttgagagtttcccaagctatccacagtgttttatgagagagtgtatcctcggcatgaaccctagccgtgatgtgcatgacgcaagtaccagccgccgatttacaccaccctccactgccctctccccaggcaagatgtctgaggccttgccactgggggcacccgacgccggagccgctctagcaggtaagctgcggtcaggggataggtcaatggtggaagttctcgccgaccaccccggagaattggtgcgtaccgatagccccaacttcctctgtagtgtgctacctactcattggcgctgcaataagacactgccgatagcttttaaggttgtggctttgggcgacgtgcctgatgggactctagtcactgtgatggctgggaatgatgaaaattactcagctgagctgcggaatgccacagccgcaatgaagaaccaggtggcccgtttcaacgatctccgattcgtgggacgatccggtaggggtaaatccttcacgctgacaatcacagtgtttaccaatccaccacaggtcgccacctatcacagggccattaagattacagtggacgggccacgagaaccgagacggcacagacagaaactggacgaccagactaagccaggctcattaagcttttccgaaaggctttcggaacttgagcagttaagacgcacagccatgcgagtcagccctcaccatcctgcccctacgcctaatcccagggcctccttgaaccactcgactgctttcaacccccagccacagtcgcagatgcaggacactcgccaaatccagccaagccccccatggtcttacgatcaatcttaccagtacctcggaagcattgctagccccagcgtccaccccgctaccccaatcagccctggcagggcctctggaatgacaacgctgtccgccgagctaagctcccggctttccacggctccagatctgacagcttttagcgaccctagacagttccccgctctgccttccatctctgatccaaggatgcactacccgggagcctttacctactccccaacccctgtcacttccgggattgggattggaatgagcgctatgggttctgcaacgcgatatcatacttacctgcctccgccttatccaggctccagtcaagcgcagggtggcccattccaagccagttccccttcctatcacctctattacggtgctagcgctggctcgtatcagttttctatggtgggcggtgagcggtcaccaccgagaattcttccaccatgcacaaatgctagtaccggctcagccttgctcaacccaagcctgcccaatcagagtgacgtggtcgaggccgaaggaagccatagtaacagcccaacgaacatggcacctagtgcgaggttggaagaagccgtatggcgcccatattag

SEQ ID NO: 30711 - DNA, 576 bp, synthetic construct
  misc_feature 1..576: note = Description of Artificial Sequence: Synthetic coding sequence
  source 1..576: mol_type = other DNA
atgaatccaagtcgtgacgtgcacgacgctagcacaagtcgccgttttacccctccttcaactgctttgtcaccaggcaagatgtctgaggcacttccccttggagcaccagacgccggagccgcacttgcaggaaaactccgttcaggggatcggtcaatggtcgaggtgttggcagaccaccccggtgaactggtccgtaccgattcacccaacttcctgtgctctgtgctacccactcattggcggtgtaataagacactgccaatcgcttttaaagttgtggctttgggtgacgtccctgacgggactctggttaccgtcatggctggtaacgatgagaactactccgctgaactgcggaatgcaaccgcagccatgaaaaaccaggtggccaggtttaatgatctacggttcgtgggtcggagcgggaggggcaaatcttttacgctgacgattactgtgttcacgaatccgccacaagtggcgacctaccacagagctattaaaattaccgtagacggcccaagagagcccagaaattcacttacttggccccgataccctcacatatag

SEQ ID NO: 30712 - DNA, 753 bp, synthetic construct
  misc_feature 1..753: note = Description of Artificial Sequence: Synthetic coding sequence
  source 1..753: mol_type = other DNA
atgcggattcctgtagacgccagtacctctagacgatttacgcccccttccacagctctctcccctgggaaaatgagcgaagccctgcctctcggggctcccgatgccggagctgctctggctggtaaactccgcagtggagacaggtctatggttgaagttctggccgaccatcctggcgagctcgttcgcaccgattctccaaacttcttgtgcagtgtgctgcctacacactggcggtgtaacaaaacactcccgatagcgttcaaggtggtggcactaggagatgttcctgacggaacattagtgacagttatggccggaaacgacgaaaactacagcgcagaattaaggaacgccacagccgctatgaagaaccaggttgctcgttttaacgacttgagattcgtcggaaggtctgggaggggaaagtcttttaccttgacaataactgtctttacgaatccacctcaagtcgctacctatcacagggctatcaaaatcactgtggatggaccgagagagcctcgcagacaccggcaaaagctggacgaccagacaaagccaggttcactttctttctccgaacgtctctccgagctggaacagctgaggaggaccgccatgagggtgtctcctcaccaccccgcacccacccccaaccctagagccagcctaaaccactccaccgcattcaaccctcagcctcagagccagatgcaagaagaggataccgctccgtggcgatgctag

SEQ ID NO: 30713 - DNA, 1770 bp, synthetic construct
  misc_feature 1..1770: note = Description of Artificial Sequence: Synthetic coding sequence
  source 1..1770: mol_type = other DNA
atgctgcactccccccacaagcaaccacagaatcacaagtgtggagccaactttctgcaggaggatagcaaaaagagtcttgtctttaagtggctcatctcagctgggcactaccagccccctaggcctacagagagtttcaaggccgcatcctctatctacaatagaggttataagttctatttgaaaaaaaagggtggcactatggcatccaattcgctgttttcgactgttaccccatgtcagcagaattttttttgggatcccagcacaagccggcgatttagtccgccatcttccagtttgcagcccggtaagatgtcggatgtgagtccggtggtagctgcccagcagcaacagcagcagcaacaacagcaacagcagcagcaacagcagcagcaacagcagcagcagcaggaggctgccgcagccgctgccgcagctgcggctgctgccgctgccgctgccgctgtccctcgcctacgtccaccccatgacaaccgcaccatggtcgaaatcattgccgaccaccctgctgaactagttcgcacagattcgcccaatttcctctgctccgtgctaccaagccattggagatgtaataaaacacttccagttgccttcaaagttgtcgccctgggcgaagtgcctgacggtacagtggtcactgtgatggccggaaatgacgaaaattactcagcagaactgcggaacgctagcgcagttatgaaaaatcaggtcgctagatttaatgatttgagattcgtggggaggtcaggtaggggtaagagttttactttgacaatcaccgtgtttaccaacccccctcaggtagcaacgtatcacagagcaatcaaggtgactgtggacgggcctagggagccccgtcggcataggcagaaactggatgattccaagccatcactgtttagtgatcgcttgtcggatctgggacggatcccgcacccctccatgcgcgtcggcgtcccaccacagaatccacggccaagccttaacagcgccccttctccatttaatccccagggccagtcccaaatcaccgatccacggcaggctcaatcaagccctccctggtcctatgaccagtcttacccatcctatttgtctcagatgacctcgccttctatacactctaccacacccctatcaagcaccaggggaacaggccttcctgcaattacagacgtacccaggcgcatcagcgacgatgatacggccacatccgatttctgtctatggccgtccacgctgagcaagaagagccaggccggagctagcgaactgggccctttcagcgaccccagacaattcccctccatctccagcctgaccgagagcagattttctaaccccagaatgcattaccccgcaacatttacctatacccctcccgtcacctcgggcatgagcctcggaatgtctgcaacaactcactaccacacctacctgccgccaccctaccctggatcctcacaaagtcagtcaggaccatttcaaacaagctccaccccgtatctctattatggaacctcgagcggtagttatcagtttccgatggttcctgggggagaccgctctccatctcgcatgctgcccccatgtacaaccacatcaaatggcagcactcttctgaatcccaaccttcccaatcaaaacgacggcgtagacgctgacggctcccattcatctagtcctaccgtactaaattcctccggcaggatggacgagagcgtatggcgcccttactag

SEQ ID NO: 30714 - DNA, 1524 bp, synthetic construct
  misc_feature 1..1524: note = Description of Artificial Sequence: Synthetic coding sequence
  source 1..1524: mol_type = other DNA
atgaggataccagtggaccccagtacaagccgccgattttcccctccttcgtcttccctccagccgggaaagatgtcagatgtgtctccagtcgtggcggctcaacagcagcagcagcagcagcagcagcagcagcagcagcagcaacaacagcaacagcaacagcaacaggaggcagccgctgcagccgctgcagctgcggcagccgctgccgcagcggctgcggtgcccagactcagaccaccccacgacaaccgtacaatggtggagataattgctgaccatccagctgagcttgttcgcacagattctcctaactttctctgtagtgtgttgcctagccactggcgctgcaataagaccttgcccgtggcttttaaggtcgtggccctgggggaggtcccggatggcacagtggtgactgtgatggctggcaacgacgagaactatagtgcagaactgcgtaatgcatcagcggtgatgaagaatcaggtcgcccgatttaacgatctccggttcgtgggtcgttcaggacgcggtaaatcctttactcttaccatcactgtgttcacaaatcccccacaggtggcaacgtatcaccgcgcaatcaaggtaacagtggatggccctagagagcccaggagacacagacaaaaattggatgattcaaagccaagcctcttctcagaccgcctgagtgacctaggtcggattccacatccttctatgagagtcggggtcccacctcagaaccctcgcccaagtttaaacagcgccccaagtccgtttaaccctcaaggacaaagtcagatcactgatcctcgtcaggcccagtcctcccctccttggtcctacgaccagagctaccctagctatcttagtcagatgacatcaccatccatccattcaaccacccccctgtcatccacccgcggaaccggccttccagccatcactgatgttccaaggcggatctccgatgacgacacggctacctccgacttctgtctttggccctccacgctgtcaaagaagagtcaagcgggtgcaagtgagttaggcccttttagtgatccaagacaattcccaagtatttcaagcttgaccgagagtcgcttctccaatcctcgcatgcattacccggcaaccttcacctacacgccccctgtgacgagcggcatgtctctcgggatgtcagccacaacgcattatcatacatacctaccaccaccctatccgggaagcagtcagagccagtctgggccttttcagacaagctccacaccctatctgtattacgggactagttctggatcttatcaattcccaatggtccctggtggcgaccgatccccttcccggatgctgccgccttgtactaccacctctaatggctcaacgctgttgaatccaaaccttcctaaccagaacgacggagtggacgccgatgggtcccatagctcttcaccaacagtgctcaactcctcaggcagaatggacgaatctgtctggaggccctactag

SEQ ID NO: 30715 - DNA, 1458 bp, synthetic construct
  misc_feature 1..1458: note = Description of Artificial Sequence: Synthetic coding sequence
  source 1..1458: mol_type = other DNA
atgcgaatcccggtagacccttccacgtcaaggaggttctcccccccttccagcagtctgcagccgggaaaaatgtccgatgtttcaccggtggttgccgcacagcaacagcaacagcagcagcagcagcaacaacagcagcagcaacagcagcagcagcagcagcagcaggaagcagcagcagccgcagctgctgcggcagcagcagccgcagccgctgctgctgtgcctcggctgcggcctcctcacgacaaccggacaatggtggaaatcattgctgatcacccagccgagctggtcaggacggacagcccaaacttcctgtgctcggtactcccttcacactggcgctgtaacaaaacactgcccgtggcattcaaggttgtggcgctcggcgaggtcccagatgggacggtggtgacggtgatggcgggaaacgacgaaaattatagtgccgagctgaggaatgcttctgctgtcatgaagaatcaagtggctagatttaacgatttgaggtttgtgggtcggtcaggcaggggaaaatcgttcaccttaaccattactgtgttcaccaatcctcctcaggtggcgacatatcatcgggctatcaaagttacagtcgatggaccaagggagcctcgtcgacatagacagaagctcgacgattctaagccttcgctgttctccgacaggttgagcgacctgggaaggataccacacccaagtatgcgcgtgggagtgccccctcaaaatcctcgcccatcccttaatagcgcaccctccccctttaacccacaggggcaatcacagattactgaccccagacaggcccagtcttcacctccatggtcgtatgatcagtcctatccatcatacctcagccaaatgacatccccaagcatccattccaccacaccactttccagcactcggggtaccggcctccctgcaattacggacgtgccacgtcgtatctcaggcgcttccgagctaggccctttctcagaccctcggcagttcccatcgatctcaagcctgacggagtctcgcttcagtaatcccaggatgcactaccctgcaactttcacttatacaccacctgttacctctggaatgtcgctgggcatgagcgccacaacacactaccatacctatcttccaccaccctatccaggctcaagccagagccagagcggacctttccagacttcttcaactccatatttatactatgggacgtctagtggaagttaccagttccccatggtgccaggaggagatcgtagccctagccgaatgcttcccccatgtacaaccacgagtaatggctcaactttgctgaaccctaacctccccaatcagaacgatggcgttgacgccgacggatcacacagcagcagccctaccgtcctgaattccagcggaagaatggacgaaagcgtgtggcggccatattag

SEQ ID NO: 30716 - DNA, 1500 bp, synthetic construct
  misc_feature 1..1500: note = Description of Artificial Sequence: Synthetic coding sequence
  source 1..1500: mol_type = other DNA
atggcctccaactctttgtttagtaccgttacaccatgccagcagaatttcttttgggacccttcaacctccagacgtttttccccaccatcaagctctctgcagccaggtaagatgtccgatgtctcccccgtcgttgccgctcaacagcagcagcagcaacagcagcagcagcaacagcagcagcagcagcaacaacagcagcagcaacaggaagctgcagctgcagccgcagctgcagctgccgcagcagcagccgctgcggcagtcccccgtctcaggcctcctcacgataatagaaccatggtcgagatcattgcagatcaccccgctgagctggtgcggacagactcccccaattttctgtgcagcgttctcccatcacactggcgctgcaataaaacactccctgtggcttttaaggttgttgcgctgggagaggttcccgatggcaccgtcgtgactgtgatggcgggaaacgacgagaactattctgccgagctgagaaacgcgagtgctgttatgaagaatcaggtggcgagatttaacgacctacggttcgtgggcaggagcgggagaggtaagtcttttacattgactatcacagtctttaccaatccgccacaggtggctacttaccacagggccatcaaagtgacagtcgacggcccacgcgaacccaggaggcataggcaaaagctggacgattctaagccctccttgttttcagacaggttatctgacctgggcaggatcccacacccctccatgcgtgtgggtgtaccacctcagaatccaagacccagtctgaacagtgccccatctccctttaatccacaaggccagtcccagatcaccgatcccagacaggcacagtcgtcacccccatggtcttacgatcagtcctacccatcttacctatcccaaatgacatccccttctattcatagtactacaccattgagcagtaccagggggacgggtctgcccgctattactgacgtgccaagacgtatctcaggagcttccgagttgggtcctttctccgatccgcgtcaatttcctagtatctcctcgctgacagagagcaggttctcgaatccacgcatgcactacccggcaacattcacatatactcctcccgtgacaagtgggatgagcctcggtatgtccgctaccacgcattatcacacgtatctgccccctccttatcccggtagctcacagagtcagtccggtccttttcaaactagcagtactccatacttgtactatggtaccagtagcggaagttatcagtttccaatggtgccagggggagaccggagcccatcccgtatgctgccaccttgtacaacaactagcaatggatcgaccctactcaaccccaatttgcctaatcaaaacgatggagtggacgccgacggtagccattctagttcccctaccgtgttgaatagcagtggcaggatggatgagtctgtctggcgcccatattag

SEQ ID NO: 30717 - DNA, 1566 bp, synthetic construct
  misc_feature 1..1566: note = Description of Artificial Sequence: Synthetic coding sequence
  source 1..1566: mol_type = other DNA
atggcatccaacagcttattcagcacggtgactccctgccaacagaattttttctgggacccatctacttcacggaggttttctccaccatcaagctccctgcagccaggcaagatgagcgatgtgagccctgtagtagccgctcagcaacaacagcagcagcagcagcagcagcagcaacagcaacagcagcagcaacagcaacaacaacaggaagccgctgccgcagcggcagctgctgccgcagccgctgctgcagcggcagccgttccaagattaagaccgcctcatgataaccgcactatggtcgaaataatcgcagatcatcctgcagagctagtacgtactgactcgcccaacttcctctgcagcgttctgccctctcactggcgatgtaacaaaacattaccagttgcgtttaaggtcgtggccctcggagaggtacccgacggaactgtggtgactgtcatggccggtaatgatgagaactactctgcagaactgcggaatgcatcagcggtgatgaaaaatcaggtggcccgttttaacgatcttcgcttcgtcggacgaagtggaagagggaagagcttcaccctgaccatcactgtttttacaaacccaccccaggtggctacttaccaccgtgctatcaaggtgaccgttgatggcccacgagaaccacgccgacatagacagaagcttgatgattccaaaccgtcgctattcagtgaccggctgtcagaccttggaaggatccctcaccccagtatgagagtcggagtcccaccacagaatccaaggccttcattaaacagtgcaccctccccctttaacccacaaggccagagtcagatcacggatccaagacaagcccaatctagccctccctggtcctatgatcaatcgtacccctcctacctgtctcagatgacatcgccatcgattcacagtactactcctctgtccagcacaaggggaaccggccttccggcaatcacagacgtacccaggcgcatttctgatgatgacaccgcaacaagcgatttctgtctgtggccttccacactgtcaaaaaagtcccaggccggagcgtcagaattggggcctttttcagaccccagacagttcccctccatcagttcattgaccgaatcgcgtttcagcaatcccaggatgcactaccccgctacatttacttatacaccaccagtaacctcaggtatgtctctgggcatgtcagccactacccactaccatacctacctgcctcccccataccctggtagcagccagtctcaaagtggcccatttcagacaagtagtaccccctacctgtactatggaacttcaagtggatcttatcagtttcccatggttcctggcggtgatagatccccctccaggatgttgcccccttgcactacaactagcaatgggtcaaccctgttgaatccaaatctccctaatcagaacgatggagtcgatgcagatggatcacactccagctcccctactgtcttgaacagttctgggagaatggacgaaagcgtgtggagaccgtattag

SEQ ID NO: 30718 - DNA, 1566 bp, synthetic construct
  misc_feature 1..1566: note = Description of Artificial Sequence: Synthetic coding sequence
  source 1..1566: mol_type = other DNA
atggcaagcaacagcctgtttagtacggtgacgccctgccaacaaaactttttctgggacccctccacttcccgacgtttcagtccacctagctccagtctgcaacctggcaagatgagtgatgtctctccggtagttgcagctcagcaacagcagcaacagcagcagcagcagcagcagcaacagcagcagcaacagcaacaacagcaacaggaagccgctgccgctgctgcggctgctgcggcagctgcagccgcagctgccgcagttccccgattgcgccctccacacgataatcgaacaatggtcgagattatcgccgatcatccggctgagctcgttcgcactgattccccaaatttcttgtgttccgtcctgccctctcattggagatgcaacaaaacgctgcccgtcgcatttaaggtggtggccctgggagaggtccccgatggtaccgtggttactgtcatggcgggtaacgacgagaattactcagccgaactgcgtaacgcttccgcagttatgaaaaaccaggtggcgaggtttaacgacctcaggtttgttggtaggtccgggaggggaaaaagttttactctcactatcactgtctttaccaatccaccacaggtggccacttatcatagggctatcaaagtgacagtggatgggcctagagagccccgacgccatcgccagaagctggacgatagtaagcccagtctcttcagtgaccggctgtccgatctggggagaatccctcatccttccatgcgtgtgggagtgccccctcagaacccaaggccctcactcaattcagccccttctccatttaatccacaggggcagagtcagatcacagatccacgacaggcacagtcctctcctccctggtcttatgatcagagctatccctcatacttgtcccagatgacaagcccaagtatacatagcaccacccctctcagcagcaccagggggaccggactgccagctatcacagatgttcccagaagaatcagcgatgacgacaccgccacatccgatttttgcctgtggcccagcactctttctaaaaaatcccaggcaggtgcgtcagagctcggtccatttagcgatcctcgtcaatttccatcaatctcttcacttaccgaatctcgcttctctaaccctcgcatgcattatcctgctactttcacttatactcctccagtgaccagtgggatgtctctaggaatgtctgcaactacgcattaccacacatacctgccgcctccctatcccggatcaagtcagagccagagcggaccttttcaaactagttctacgccatatttgtattatggtacctccagcgggagttatcagttccccatggtcccaggaggagatcgtagcccgagccggatgcttccaccttgcactacaacaagcaatgggagcactctgctgaatcccaatctacccaatcagaacgacggagttgacgccgatggctcgcatagttcatcaccgactgtgctgaacagtagcggaagaatggatgagtctgtttggagaccctactag

SEQ ID NO: 30719 - DNA, 1704 bp, synthetic construct
  misc_feature 1..1704: note = Description of Artificial Sequence: Synthetic coding sequence
  source 1..1704: mol_type = other DNA
atgttgcatagcccccacaagcaaccccagaatcacaagtgtggcgctaattttttacaagaagacagcaagaaatcccttgtgtttaaatggctcatctcagcaggacactatcagccccctcggcctactgagtcctttaaggccgcttcctcaatatataaccggggttataaattctacctcaaaaagaaggggggaaccatggcttccaacagcctgttctctactgtcactccttgccagcagaactttttttgggatccatcaacctctaggcgtttcagcccaccaagcagcagtctccaacccggaaagatgtctgatgtgtctcctgtggtggccgctcaacaacagcaacagcagcagcagcaacaacaacaacaacagcaacagcaacagcagcagcagcaacaggaagcagccgctgctgctgctgctgcagctgctgccgctgccgctgcggcagccgtgcctcgcctgcgacccccacacgataaccgcactatggtggagattattgcagatcatcctgccgaactggtgcgtactgattcacccaatttcttatgttccgtgctcccttctcactggaggtgcaacaagaccctgccggtcgcatttaaggtggtggcattaggcgaggtaccagatgggacagtcgtgaccgtgatggcgggtaacgatgagaattacagtgcagagttgcggaacgctagtgccgtcatgaaaaaccaggtggcccgattcaacgacctgagatttgtcggtcgatccggcagggggaagagttttaccctgacaatcacggtatttacaaacccgcctcaggtcgctacttatcacagagccattaaagtaacggtggacggccctcgcgaaccaaggcgccatagacagaaactcgacgactctaaaccaagcctgttctccgacaggctgtccgatctcggccgaatcccacacccaagtatgagggttggtgtccccccacaaaacccacggcctagtctgaacagcgccccatccccctttaacccgcagggtcagtctcagattaccgacccgcgtcaggcccagagcagccctccttggtcgtatgatcagtcctaccccagctacctctcccagatgacctctccttctatacactcaaccacccccctaagctctacgcggggtaccggactgcctgcaattacggatgttcccaggagaatttctggggcaagtgagttggggccattctcggatccaagacagtttccgagcatctcctcacttacagaaagtcgcttttccaaccctaggatgcactacccggcaacttttacctacaccccgcctgtcacctcgggcatgtctctgggaatgtcggcaacaacacactatcatacctacctgccccctccgtatcccggatccagccaaagccagtccgggccttttcagactagcagtaccccctacctctactatggcacatcctctggaagctatcagttccctatggtgcctggtggtgaccgctccccctccagaatgcttccgccttgcaccactacatcaaatggttctactctgctgaatcccaaccttcccaatcaaaatgacggcgtggacgccgacggctctcacagttcatcccctacggtactcaattcttccgggaggatggacgagagtgtctggcgtccatattag

SEQ ID NO: 30720 - DNA, 1248 bp, synthetic construct
  misc_feature 1..1248: note = Description of Artificial Sequence: Synthetic coding sequence
  source 1..1248: mol_type = other DNA
atgagaataccggtcgatcccagtacctcaagacgctttaccccccctagccccgcatttccatgtggtgggggaggaggcaagatgggagagaacagtggggcactgtcagctcaggccgctgtgggcccaggcggacgagctcgccctgaggtcaggtccatggtcgacgtactggcagaccacgctggagagttggtgaggaccgactcaccaaattttctctgtagcgtgctgccaagccattggcggtgcaacaagaccctgcctgtcgccttcaaggtcgtcgcgctcggtgacgtgccagatggcacagtcgtcacagttatggccggaaacgacgagaactactctgccgagctcaggaacgcctctgctgtcatgaagaatcaggttgccaggtttaatgatctgaggttcgtgggtcgctcaggaagaggaaaaagtttcacactgactatcacagtgtttacaaatcctacacaggtagcaacttaccatagggcgatcaaggttacggttgacggcccaagagagccacggaggcaccggcagaagttagaggaccaaactaagccctttccagatagatttggggatttggagcgcctcagaatgcgagttaccccgtcgaccccatcacctcgaggatcattaagtaccactagccacttcagtagccagccacagacccctatccaaggcacgagcgagcttaacccattctctgaccctagacagtttgataggtcatttcccactcttcccaccttaactgagtcccggtttcctgacccacggatgcactatcccggagccatgtctgcagcctttccctactcagccaccccctctgggacatctataagctcacttagtgtagcgggaatgcctgctacgtctaggtttcaccacacatacctcccaccaccctaccctggtgccccacaaaaccaaagtggcccatttcaggcgaatcccagcccataccacctttactacggaacgagctccggttcctatcagttttccatggtagccggatcgtccagtgggggagaccgttcccctacgcggatgctagcatcatgcacatcctctgctgccagcgtggctgctggtaatttgatgaacccatctctagggggacagagcgatggagtggaggctgatggaagccactctaatagccctaccgccctgtctacgcccggaaggatggacgaggcagtgtggcgcccatactag

SEQ ID NO: 30721 - DNA, 1290 bp, synthetic construct
  misc_feature 1..1290: note = Description of Artificial Sequence: Synthetic coding sequence
  source 1..1290: mol_type = other DNA
atggcgagcaattctatctttgatagctttccaacttatagccctacattcatcagagatccgtccactagtagacgcttcacaccaccaagccctgcttttccatgcggaggagggggtggcaagatgggggaaaactccggcgctcttagcgcccaggccgcagtcggccctggcggtcgggcaagaccggaagtcagaagcatggtcgacgtgctcgcagaccacgcgggagaactcgtgcggacagacagtccaaattttctatgcagcgtgctaccctcccactggcgctgtaataaaactctgcccgttgctttcaaagttgtggccctgggagatgtcccggatggcactgtggtgacggtgatggcagggaacgatgaaaactactcagccgaactgcgaaacgcctcggcagttatgaagaaccaggtggcacggttcaatgacctccggttcgtcggacggagtgggagaggaaagagtttcacccttacaattacagtgtttactaacccaacacaggtggccacgtatcatcgtgcaataaaggtaacagttgatggcccacgcgagccaagaagacatcgacagaaactggaggaccagacgaaacccttccctgaccggtttggcgaccttgaacgcctgcggatgcgcgtgacgccgagcacacctagccccagaggatccctctccaccacttcacatttcagcagtcaaccccagactcctatacagggaacctccgaattaaaccctttttcagacccacgccagttcgatcgttcttttccaactcttcctacattgacggaatcccggtttccagatccgcgaatgcattacccgggtgctatgtccgcagcctttccatacagtgccacaccttctggaacctcaatcagttccctctccgtggccggtatgcccgcaacatctcgctttcaccatacatatctgccccctccctatccaggagcccctcagaaccagtccggaccatttcaggctaatccctccccctatcatctgtactacggaactagctcaggaagctaccagttttcaatggtcgcagggtcatccagtggcggtgaccggtcacctacacgaatgctggcctcttgcacttccagcgccgctagcgtcgccgctggtaacctaatgaaccctagccttggtggccaaagcgacggggtggaagccgatgggagccattcgaacagccctaccgctttgagcactcctggcaggatggacgaggccgtgtggcgaccctactag

SEQ ID NO: 30722 - DNA, 1290 bp, synthetic construct
  misc_feature 1..1290: note = Description of Artificial Sequence: Synthetic coding sequence
  source 1..1290: mol_type = other DNA
atggctagcaacagcattttcgatagttttcctacttatagcccaaccttcatacgcgatccttccacctctcggaggttcaccccacctagtcccgctttcccatgcggaggaggcggaggtaaaatgggggaaaacagcggagcgctgagtgcacaggccgctgtagggccaggtggcagggcacggccagaggtgcggagcatggtggacgttctcgccgaccatgcaggggagctagtgcggaccgacagtccaaacttcctgtgttcagtgctcccctcccactggaggtgcaataaaactttgcccgtcgcttttaaagttgtggcgttaggcgatgtgccagatggcactgttgtgacggtgatggccggtaacgacgaaaactactcagctgagctgcgaaacgcctctgccgtcatgaaaaaccaagtagctagattcaatgatctaaggttcgtaggtagaagcggccgtggcaagtcatttacgctgacaataactgtcttcaccaaccccactcaggtggctacctatcatcgagctatcaaggtgacagtagatggaccaagagagccacgcaggcataggcaaaagctggaggaccagacgaagccatttcctgaccggtttggagacttggaacgtctgcgaatgcgcgtgacccctagtacaccaagtccgaggggaagcctctcgacgacatcacacttttcctcacagccccagaccccaatacaaggtacatctgagcttaaccctttctctgaccccaggcagtttgacaggagcttccctactctaccaacccttactgaatcccgcttccctgatcctaggatgcactaccccggagctatgtccgctgctttcccctattccgccacgccaagcggcactagcattagcagtctatccgtcgcgggtatgcccgctacctcacgattccatcacacctacctccccccaccctaccccggagcccctcagaatcaaagcgggccattccaggctaaccccagtccataccatctctattatggaacgtcttctggatcctatcaattttctatggttgcaggtagttcaagcggtggggaccggtcaccaaccaggatgctcgccagctgtaccagtagtgccgcaagcgtggctgcaggtaatctcatgaatcccagcttgggaggccaatccgacggcgtggaggccgatgggtctcatagtaactcacccactgcattgagcacaccaggcaggatggatgaagccgtctggaggccctattag

SEQ ID NO: 30723 - DNA, 1089 bp, synthetic construct
  misc_feature 1..1089: note = Description of Artificial Sequence: Synthetic coding sequence
  source 1..1089: mol_type = other DNA
atgagaattcctgtggatccatccacttcccgtagattcacccccccttccccagctttcccatgtggagggggtggagggaaaatgggtgaaaatagcggagccttgtccgcgcaggctgccgtaggcccaggaggccgagcacggcctgaagtgaggagcatggtggatgttcttgcggatcacgccggtgagctggttcgcaccgactctccaaatttcctgtgctctgtgttgcccagccattggcggtgtaacaaaaccttgcccgtagccttcaaggtcgttgccctgggtgatgtgcccgatggcacagtggtaacagtaatggccggtaatgacgagaactactcagcggagctgcgcaatgcctcagctgttatgaagaaccaagtggcgcgattcaatgacttgagatttgtgggacggtcgggcagaggcaagtcattcaccttgactatcacagtcttcaccaatccaacgcaggtggccacgtatcaccgagctatcaaggtgactgtagacggcccaagagaacctcggagaacttctgagctgaatccattctccgacccacgacagttcgacagaagctttcccacgctccccacgttgactgaaagtcgcttccccgatcccaggatgcattaccctggggcaatgagcgccgcttttccctattcggccacgccttccgggacctccattagttcactgtcagtcgccggaatgccggctacttctaggtttcatcacacttatctgccgcctccatatcctggcgctccacagaaccagtctggaccattccaggccaacccaagtccatatcatctgtactatggcaccagctcgggatcttatcagttctccatggtcgcaggctctagttccgggggtgatcgcagccccacaagaatgctagcttcctgtacctcttcagcagctagcgtggcagccggaaacctcatgaatcctagcttggggggacagtcagacggcgtagaggctgatggcagccactccaattcccccacagctttgtctacgcccggacgtatggacgaagccgtgtggcgaccatattag

SEQ ID NO: 30724 - DNA, 969 bp, synthetic construct
  misc_feature 1..969: note = Description of Artificial Sequence: Synthetic coding sequence
  source 1..969: mol_type = other DNA
atggtggttgctctgggggatgtgcccgatgggaccgtcgtaactgttatggccggtaacgacgaaaattatagtgcggaactgcgtaacgcttcagctgtcatgaaaaatcaggtcgccaggttcaatgatcttcggttcgtcggcaggagtggaaggggaaagtcttttacacttaccatcaccgtgttcactaatcccacacaggtggctacgtaccacagagcaattaaagtgactgtcgacggacctcgggagcctaggagacaccggcagaaactcgaggaccagacaaagcccttcccagaccggtttggcgacctggagcgattacgtatgagggtcaccccttctaccccgtcccctcgtggctcattgagtacaacatctcattttagttcacagccccaaactcctatacagggaacgtctgaactcaacccatttagcgatcctcgacagttcgaccgaagttttcctacactccctactctaactgaaagtcgattccctgacccacgcatgcattaccccggagcaatgtctgccgcttttccttatagcgcgaccccaagtggcacttctatttcatcgctgtctgtagccggaatgcctgccacctcccggtttcatcacacctatctcccacctccctaccccggagcccctcagaaccagagcggaccctttcaggcaaaccccagcccgtatcacctgtactatggcacatcaagtggctcatatcagttttccatggtggccggatcctccagcggaggcgatcggtcccctactagaatgttggcatcttgtacttcctctgctgcgagcgtggcagctgggaatcttatgaatcccagtctgggcggacagtccgacggggtcgaggctgacggatcccatagcaattctcctacagccctgtcaacacccggaagaatggatgaagccgtctggaggccttattag

SEQ ID NO: 30725 - DNA, 2439 bp, synthetic construct
  misc_feature 1..2439: note = Description of Artificial Sequence: Synthetic coding sequence
  source 1..2439: mol_type = other DNA
atggacttcagccgactgcacatgtatagcccaccccagtgcgttcccgaaaacaccggatacacctacgcactttcatctagctatagctctgacgccttggatttcgaaacagaacataagctggaccccgtgtttgattcacctagaatgtccagacgttctttgcgtctagctacaacggcctgcactctgggtgatggtgaggcggtgggagctgattcaggcacctcgagtgccgtgagcctgaagaaccgcgcagctcggacaactaagcagagaaggtccaccaacaagtcagccttttcaatcaaccatgtgtctaggcaggtgacctcaagcggtgtgtcccatgggggtacagtgtctctccaagacgcagtgactaggagaccccctgtgttagacgagagctggattcgggaacagactacagtggaccatttttgggggctggacgatgacggtgatttgaagggcggaaacaaggcagccatacagggcaacggggacgtcggcgcagcggcagcgactgcacacaacggtttctcctgctcgaattgctccatgctctctgagaggaaagatgtgcttacggctcatcccgctgcgccagggccagtctctagagtctactcaagggatcgtaatcagaaatgtgatgactgcaaaggaaaacggcatctcgatgcccacccaggcagggccggtaccctctggcacatatgggcgtgcgcaggctattttttgctgcagatactcaggcgtattggtgccgttggacaggcagtgtccagaaccgcctggtccgccctctggctggcagtggtcgctccaggaaaagctgccagcggagtcttttggtggctgggcatcggatggtaccagttcgtgacgctgatcagctggctcaatgtgtttctcctgactcgttgcctgaggaatatatgcaaatttctcgtactcctgattcctctcttcctattgctcgccggtctgtccctgcggggacaaggaaacttcttctccttcctgcccgttctcaactgggcctccatgcacaggacccagcgggtggatgatccccaagacgtgttcaagccgacaaccagtcgcctgaagcaacctctgcaaggagatagcgaagccttcccgtggcattggatgtccggcgttgagcagcaggtagcttctctgtccggccaatgccaccaccacggagaaaatctgcgggagcttacgactctcctgcaaaagctgcaggctagagtcgatcaaatggagggtggagcggctggaccatccgcgtctgtccgcgacgcagttggtcaaccccctcgcgagacagatttcatggcatttcatcaagaacatgaagtgagaatgagccatctggaggatattttagggaagcttcgcgagaaaagtgaagccatacagaaagaactagaacaaactaaacagaagaccatttccgccgtcggagagcaacttctacccacagtggagcacctacaactggagctcgatcagctgaagtcggagctctcctcttggagacacgttaaaacgggttgcgagaccgttgatgccgttcaggagcgggtggacgttcaggtgcgtgagatggtcaaactcctcttcagtgaggaccagcagggaggtagtttggagcagttgctacagcgcttttcctcccaatttgtttctaaaggtgacctgcagactatgcttcgcgacttgcagctgcagatcctgaggaatgttacgcatcatgtgtcagtcaccaagcagctgccgacatcagaggctgtcgtatcagccgtcagcgaggcaggagcctccgggatcactgaagcacaggctagagccattgtgaactcagccctcaaactctatagccaggacaaaacaggcatggttgacttcgccctggaatccggcggaggctctatcctcagcactcgctgctctgagacgtacgagaccaagacggcacttatgtctctctttggcataccactgtggtatttcagtcagagccccagggtggttatccagcctgacatctacccaggaaactgctgggccttcaagggctcccaagggtacctggtggtccgcctctccatgatgatacatcccgctgcttttaccctggaacacatccctaagaccctgtcaccaacaggcaacatctcaagcgcccctaaggatttcgccgtttatggtctcgagaatgaataccaagaggaagggcagctgttaggtcagttcacctacgaccaggacggagagtccctgcagatgttccaggctctgaagcgacctgatgacaccgccttccagatcgtggaattgaggatcttctcaaattggggccacccagagtacacttgtctgtataggtttcgggtccacggtgagccagttaagtag

SEQ ID NO: 30726 - DNA, 2109 bp, synthetic construct
  misc_feature 1..2109: note = Description of Artificial Sequence: Synthetic coding sequence
  source 1..2109: mol_type = other DNA
atgtcaagacgcagcctgcgactcgctaccacggcgtgcaccttgggagatggcgaagccgtgggggctgactctggcacatcatccgcagtgtctttgaaaaacagggccgcacgcacaactaagcagcgtcgcagcaccaacaagtcagccttcagcattaatcatgtctcccgacaggttacttcctcaggagtgtctcatggtggaacggtgtccctgcaggatgcggtaacccggaggcctccagtgctggatgagtcctggataagggagcagactaccgtcgaccatttctggggcctagacgatgatggagaccttaaaggcggtaacaaagccgctattcagggtaatggcgatgtcggcgctgccgcagccactgcccacaacggattctcatgttcaaactgcagcatgctgagcgagcgaaaggacgtcctcaccgcgcaccccgctgctccaggacccgtgtctcgagtgtactctagggataggaatcagaagtggaaggctgcctctggcgtcttttggtggcttgggattggttggtatcagttcgttactctgatcagttggttgaacgtgtttctgctgactcgctgtctgcggaacatctgcaagttccttgtgctcttaatacctctgtttctgcttttggcagggctgagtctgcggggacagggtaatttttttagcttcctgcctgttcttaactgggccagcatgcaccggacacagagagtggacgacccccaggatgtgtttaagccaaccacatcaaggctgaagcagcccctgcagggggacagcgaggcattcccatggcattggatgtcgggagtagagcagcaggtggcgtcactgagtggtcaatgtcatcaccacggagaaaatctgcgcgaactgacaaccctgttacagaagctgcaagcccgagtggaccagatggagggtggggctgctggcccttcagcctccgtgagagacgccgtgggacagcctcccagggagacggacttcatggcgtttcatcaggaacacgaagtgcggatgtcgcatttggaagacatcctggggaaactgcgcgagaaatcggaagcaattcaaaaggagttagaacaaactaaacagaaaaccatctccgctgtgggtgaacagttgttgccaactgtggagcatttgcagctggagctggaccagctcaagtcagagctcagcagttggcgtcatgtgaagaccgggtgtgagaccgtggacgccgtgcaagaaagagtagacgtgcaggtgagagagatggtgaagctgctcttttcggaggaccaacaggggggtagcctcgagcaactgctgcagcgctttagcagccaatttgtttctaagggcgatctgcagaccatgttgcgcgatctccagctccaaatcctcagaaatgtgactcaccacgtgagtgtgacgaagcagcttcctacgagtgaggctgtcgtgtctgccgtatccgaagccggagcatctgggattacagaggcacaggccagagccattgtcaactccgccctgaagctttatagtcaggataagacaggaatggtcgattttgcacttgagagtggagggggtagtatactgtccacaaggtgttctgaaacttatgaaactaaaacagccctcatgtcactgttcggaatcccactctggtactttagccagtcccccagggttgtcatccagccagacatttaccccggaaactgttgggcgtttaagggttcgcaaggctatctcgtagtgagactttctatgatgattcaccctgcagcattcacactcgaacatatacccaagactctgtcccctaccgggaacatttcttctgcgcctaaggacttcgcagtatatgggctggaaaacgaataccaggaagaagggcagcttctgggacaatttacctatgaccaagacggtgaatccctgcagatgttccaggcgctgaagcgtccagatgatacagcctttcagatcgtggagctccgcattttttcaaactgggggcatcccgagtacacttgcttgtatcgctttcgagtacatggagagcccgtgaagtag

SEQ ID NO: 30727 - DNA, 2358 bp, synthetic construct
  misc_feature 1..2358: note = Description of Artificial Sequence: Synthetic coding sequence
  source 1..2358: mol_type = other DNA
atggacttttcccggcttcacatgtatagtccaccccagtgcgtgcccgaaaacaccggctatacatatgcactcagtagcagttatagtagtgacgccctggatttcgaaaccgagcacaagctggacccagtattcgacagtcctcgaatgagcaggagaagcctaaggttagccactactgcctgcaccctcggggacggtgaagctgtaggggctgattcgggcaccagctctgcagtctcacttaaaaatcgggcagctaggactacaaagcagcgacgatctacaaataagtccgcgttcagcataaatcacgtgtcccgccaggtgacatcctccggtgtcagtcacggcggtaccgtcagcctccaggatgctgtaacccgcagaccccctgtgttggacgaaagctggatacgggaacagaccactgtcgatcacttctgggggttggatgacgacggggacttaaaaggcggaaacaaggctgcaattcagggtaatggcgacgtgggagcagctgccgctactgctcacaatgggtttagctgctcaaattgtagtatgttgtccgaacgcaaagacgtgttgactgcgcaccctgctgctccgggtccggtctcgcgagtgtactcccgtgatcggaaccagaagtgctacttcttactccaaattctcaggcgcattggagctgtgggccaagcagtaagccggactgcatggtcagccctgtggctggcagtggtggcacctggcaaagctgcctctggggtgttttggtggcttggtatcggctggtaccagttcgtcacactgattagttggctgaacgttttcctcttaacccgatgtctgagaaatatttgcaaattcctcgttttgcttatacccctgttcctgcttctggctggactcagtttgcgtggccaaggcaatttcttttcttttctgccagtcctgaattgggcttctatgcaccggacccagagagtggatgaccctcaggacgttttcaagccaaccacatctcggttaaaacagccacttcagggcgatagcgaagctttcccgtggcactggatgtccggagtggagcagcaggtggccagtctgtccggccagtgtcatcaccatggcgaaaatctgagagagctgaccactctcctgcagaaacttcaagcccgagtggaccagatggagggcggagctgcaggaccttcggcctcagttcgggatgccgttgggcaaccccctcgagagaccgatttcatggcatttcaccaagagcatgaggtcagaatgtcacatttagaagacattctggggaagctccgggaaaaaagcgaggctattcaaaaggagttggagcagactaaacagaagacaatctcagccgtgggagaacagctacttccgactgtggagcacctgcaactggagcttgatcagcttaagagcgaactgagcagttggagacacgtgaaaactgggtgcgaaacagtggacgcagtacaggagagggttgacgtgcaggtccgcgagatggtcaagctgctcttcagcgaagatcagcaggggggtagcctggagcagctgctgcagcggttcagctcccagtttgtgagcaagggggacttgcagactatgttgcgagaccttcagctgcagatcctccggaacgtgacgcaccacgtttcagtcactaagcagctgcctacttccgaagcagtcgtctctgcagtctcagaagcaggggcatcggggatcacagaggcacaagccagagctattgtcaactccgccctcaagctctattcccaagataaaacaggtatggtggatttcgctctcgagagcggcggaggctctatactgtcaaccagatgttcagaaacatacgaaacaaagaccgcgttgatgagccttttcggcatcccgctctggtatttttcccagtcccctagggtggtgattcaacctgacatttatcccggtaactgctgggccttcaagggcagccaggggtaccttgtggtgaggctgtctatgatgatccacccagccgcatttacactggagcatattcccaaaaccctgagtcctacgggcaacatcagctccgccccaaaagatttcgccgtgtatggactcgagaacgagtaccaggaggagggacagctcctgggtcagtttacatatgatcaggatggcgaaagcttgcagatgttccaggctctcaagaggccggacgatactgcttttcagattgtagagctccgtattttttcaaactggggccaccctgaatacacatgcctctaccgcttcagggtgcacggcgagccggtgaagtag

SEQ ID NO: 30728 - DNA, 774 bp, synthetic construct
  misc_feature 1..774: note = Description of Artificial Sequence: Synthetic coding sequence
  source 1..774: mol_type = other DNA
atggatttctcccgcctgcacatgtattctcccccacagtgcgtgccagaaaataccggctacacctacgcactctcttctagctactccagtgacgcactcgactttgagactgaacacaaactggacccggtgttcgatagtccaaggatgtctcgaaggtctctgcgccttgccacaacagcgtgcactttgggagacggtgaggcagtgggggctgactcaggcacaagtagtgcagtctctctcaaaaacagggccgcacggacaaccaagcagagacgcagcactaacaagagcgcctttagcattaatcatgtaagtcggcaggttaccagtagcggtgtgtcgcatggaggaaccgtgtctctgcaggacgcagtgacccggaggccacccgtgttggatgaatcctggattagggagcagactaccgttgatcatttctggggcctggatgatgacggggatctgaaggggggtaacaaagccgcaatccagggtaacggggacgtaggcgctgctgctgccaccgcacataatggcttcagttgctcaaactgcagtatgctctccgaaagaaaggacgtactgactgcccaccccgctgctcccggacccgtttcgagggtttacagtcgagatcggaaccagaagtgcaaatcgcaatcctttaagacacagaaaaaggtctgctttcccaatctgatcttcccgttctgtaaaagtcaatgtctccactatctctcatggcggctgaaaattatcccatag

SEQ ID NO: 30729 - DNA, 2469 bp, synthetic construct
  misc_feature 1..2469: note = Description of Artificial Sequence: Synthetic coding sequence
  source 1..2469: mol_type = other DNA
atggactttagcaggctgcacatgtactcgcctcctcagtgcgtcccagaaaatacagggtatacctatgctttgtcctcttcttattcctcagacgccctggattttgagacagaacataagctggaccccgtgttcgattcgccgagaatgtcacggaggtcactccggctggcaacgacggcttgtactcttggagatggagaagcagtgggggctgattcaggaacctcctctgccgtcagcctgaaaaaccgggcagctaggacaacaaagcaaaggcgctccacaaacaaaagcgctttttctatcaatcacgtgtcacggcaggtgacatcatccggggtctcccatggtggaacagttagtttacaggacgccgtgacgcgccgacctccagtgctggatgaaagctggatacgggaacagacaaccgtcgatcacttttggggcttggatgatgatggcgatctgaaggggggaaacaaggccgctattcaggggaatggtgatgtcggtgcggctgccgcaactgctcataacgggttctcatgttcgaactgttctatgctgagcgaacgaaaggacgtcttaacggctcacccagcagctcctggcccagtatccagagtttactcacgggacaggaaccagaagtgcgacgattgcaagggtaagcgacatttagacgcccataccgccgctcatagccagagcccgaggttgccaggcagagcaggaactttgtggcacatctgggcctgcgccggatactttctcctacagatactgcgacggatcggcgcagtgggccaagctgtgagccgcaccgcttggagtgccctgtggttggccgttgtcgcacccggtaaagccgcaagtggtgtgttctggtggctgggcatcggctggtaccagtttgtgacactgatctcctggctcaacgtattcctgctaactaggtgcttgcgcaacatttgcaaattcctagtcctgttgattcctctgtttctccttttggctgggttatcactgcggggacagggcaactttttttcattcctgcctgtactgaattgggcctccatgcaccgtacccaaagagttgatgatccccaggacgtgttcaaacctaccacttctagactgaagcaacccctccagggggacagcgaagcattcccatggcactggatgtctggagtggagcagcaagttgcatccttatctgggcaatgtcatcaccacggcgagaatttgagagaactgaccaccctgcttcagaaactccaagcacgggtggatcagatggagggcggagccgctgggcctagtgcctctgtcagggatgccgttggccaacccccaagggagacagacttcatggcattccatcaggaacatgaagttcgtatgtcccacttggaagacatcctggggaaattgcgtgagaagagcgaagctatccagaaagagctggaacagacaaagcagaagacgatcagcgctgtaggcgagcagctactccctaccgtggaacacctgcaactggagctagatcaactgaagtcggagttgagcagctggcgccatgtgaagacaggctgtgagactgtggacgctgtgcaggaaagagtagacgtccaggttcgggagatggtcaagctcctgttttccgaggatcaacagggcggaagcctcgagcagctgttacagaggtttagcagccagtttgtgagcaaaggggatctgcagacaatgttgcgcgatctgcagctgcagattctcaggaatgttacgcaccacgtttccgtcacgaaacagttgcctacttccgaggcagtggtgtctgccgtctctgaagcaggcgcatcgggcatcactgaggctcaagccagggccatcgtgaactccgctctaaaactttattcacaggacaagactggaatggttgacttcgccttggagtccgggggaggatcgatcctcagcactcggtgcagtgaaacctacgagactaaaacagctttgatgtcactgtttggcattcccctctggtacttttcccagtctcccagagtagtgatccagcccgacatttaccccggaaactgctgggcctttaagggaagtcaagggtatctggttgtaagactttccatgatgatccatcccgctgcttttaccctggagcatataccaaagacgttaagtcctactggtaatattagttcagccccaaaagatttcgcagtgtacgggctggaaaacgaatatcaggaggagggacagttactggggcaattcacctatgatcaagacggtgaaagcctccaaatgttccaggctctcaaaaggccggatgacaccgccttccaaatagttgaactccgcatattcagtaattgggggcatcccgagtacacatgcctgtacaggtttagggtgcacggagagccagtgaagtag

SEQ ID NO: 30730 - DNA, 1752 bp, synthetic construct
  misc_feature 1..1752: note = Description of Artificial Sequence: Synthetic coding sequence
  source 1..1752: mol_type = other DNA
atgaaattgagctacgaatcagagaattataaattgaaaactcatgagtccaaagactgcgaatctgaatcttacaagagcaagagtcacgaatctaaagcacatgccagctattatggacgcatgaatgttcgtgaagtgctacgcgaagatgggcatctctcagtgaatggtgaggccctttggaaagccgcatcaggcgtgttctggtggttgggcatcgggtggtatcagttcgtgactttaatttcttggctgaatgtcttcctgcttacccgctgtctaaggaacatctgtaagttcctggtccttttaatccccttgtttttgctgctggccggattgtctttaagaggacagggaaactttttctcatttctgccagtgctcaactgggcgtccatgcatcgtacacagagagtggacgatccccaagatgtgttcaaacccacaaccagtcgactgaaacaacccttacagggcgattctgaggcatttccctggcattggatgagcggagtagagcagcaggtggcatctctgagtggacagtgtcaccaccacggcgaaaatctacgggagctgaccacactgctccaaaaactgcaggcacgggtcgatcagatggaaggtggcgctgctggtccttccgcttccaccgatttcatggcttttcaccaggaacatgaggtccgaatgagtcacctcgaagacatcctcgggaaactgcgagaaaagtccgaggctatccagaaagaactggagcagacaaagcagaagaccataagcgcggtgggggagcagttgttaccaacagttgaacatctgcaactggaactagaccaactaaaatctgagttaagtagctggcggcacgtgaaaacaggttgtgaaacagtggacgctgtccaagaacgggtcgatgttcaggtcagagagatggtcaagttactgttttcagaagaccagcaaggcggttcactggagcagctgctacagcgtttctcctcgcagtttgtcagcaaaggtgatctgcagacaatgcttcgagacctccaattgcaaatcctgaggaacgtcacacaccacgtttctgtaacaaagcagcttccaacctccgaagccgtggtcagcgccgttagtgaagcaggggcatctggaatcactgaggcacaggccagggccattgtcaactccgcacttaagctgtacagtcaggacaaaacaggcatggtggacttcgccttggagagcggagggggaagtattctatccacaagatgttccgaaacttacgaaactaagacggcactcatgagccttttcgggatccccctgtggtatttcagccagtcgccgcgagtggtgatccagcccgacatttatccaggcaactgttgggcctttaaaggttctcaggggtatctggtagtgagactgtccatgatgattcaccccgcagccttcactctggagcacatacctaaaaccctgtcccccaccggcaatatctcctcagctcccaaggattttgccgtctatggcttggaaaacgaataccaggaagagggacagctgttgggacaattcacctacgaccaggatggagaaagtctgcagatgttccaggctcttaaacgtccagacgatactgcattccagattgtggagctgagaatctttagcaactgggggcatcccgagtacacatgtctataccgcttccgagttcatggagagcccgtgaagtag

SEQ ID NO: 30731 - DNA, 342 bp, synthetic construct
  misc_feature 1..342: note = Description of Artificial Sequence: Synthetic coding sequence
  source 1..342: mol_type = other DNA
atggatttttcccgattgcatatgtatagtccccctcagtgcgtacccgagaatactggctacacgtatgccttgtcttcgagctactcatccgatgcactagactttgagaccgaacacaaattagatcctgtcttcgactcccccagaatgtctagaagaagccttcggctcgcaacaaccgcttgcactctgggcgatggagaagcagttggagccgactccggtactagttcggctgtttccctgaagaatagagccgcacggacaactaaacaacggcgatctactaataagagtgccttctctattaaccacgtttcaaggcaggtcacctcctag

SEQ ID NO: 30732 - DNA, 267 bp, synthetic construct
  misc_feature 1..267: note = Description of Artificial Sequence: Synthetic coding sequence
  source 1..267: mol_type = other DNA
atggactttagtcgactccacatgtacagcccgcctcagtgtgtgccagaaaatacagggtacacatatgccctgagctctagctattcaagtgatgccctcgatttcgaaaccgagcacaaactcgacccagtgtttgacagcccccgtatgagcaggaggtctctgcgattggcaactactgcctgcacactgggcgacggggaggccgtgggtgcggactcaggcaccagcagcgctgtgagcttaaaaaatagagccgcttag

SEQ ID NO: 30733 - DNA, 2109 bp, synthetic construct
  misc_feature 1..2109: note = Description of Artificial Sequence: Synthetic coding sequence
  source 1..2109: mol_type = other DNA
atgagcaggaggtccttgagactcgctactaccgcttgcacccttggtgacggagaagctgtgggcgcagactcgggtacatctagtgccgtatccctcaaaaacagagctgcacgcaccactaagcaacggcgttccacgaataagagtgcattcagcataaaccacgtgagccgacaggttacctcttcaggagtttcccatggaggaacagtgagcctccaggacgctgtaacacgacgcccaccagtactggacgagagttggatccgggagcaaacaaccgtggatcatttttgggggctcgacgatgatggtgacctgaaaggaggcaacaaggcggctatacaaggtaacggcgacgtgggagcagctgctgccaccgctcacaacggtttctcctgttctaattgctccatgctgtccgaacgaaaagacgtactgacagcgcatccagctgcgcctgggcctgtatctagagtttacagcagggacagaaatcagaagtggaaagccgcatcgggagtgttttggtggctcggtatcggatggtatcagttcgtcacacttatctcatggctgaatgtattcctcctgacgagatgcctgaggaacatttgtaagtttttggtcctcctcatccctcttttcttgctgttggccggactgtcccttcgtgggcagggaaactttttcagctttctgccggtacttaattgggcgtctatgcatcgaactcagcgcgtcgacgacccgcaagacgtgttcaagcctactacctcgcgactgaaacagccactgcagggcgactccgaggcgttcccttggcattggatgtcgggcgtggagcagcaggtagcatctcttagcggacagtgccatcaccatggcgaaaatctacgggaactgaccaccctgctgcagaaactgcaggcccgtgttgaccagatggaaggcggagcagctggaccctcagcctcagttcgagatgccgtcggtcagcctcccagagaaacggacttcatggcgttccatcaggagcacgaagtaagaatgtctcacctggaggatatactgggcaagctgcgggagaagtctgaagcgattcaaaaagagctagagcagactaagcaaaaaacgatttccgctgtaggcgagcaactactgcccacagtcgagcacttgcagctggagctggatcagctgaagtcagaactgtcctcttggcggcatgtgaagactgggtgcgagaccgtggacgctgtgcaggaacgggtagacgttcaagtccgagagatggtgaaactgctgttttcagaagatcagcagggagggtcccttgaacaattgctgcagcgatttagtagccaatttgtgtccaagggagatctgcagacaatgctgagggatctgcaactgcagatcctcagaaacgtgacccaccacgtgtctgtcacaaagcagctgccgacgtctgaggctgtggtgtctgcagttagtgaagccggtgcttccggaatcacagaggcccaggccagagcgatcgtgaacagcgcacttaagttgtattctcaggataagacggggatggtcgacttcgctctggaatccggtggcggttcgatactttccaccaggtgttctgagacatatgaaacgaagacagccttgatgagtttattcggaatccccctgtggtacttcagtcaatcaccccgagtcgttattcagcctgacatctatccagggaattgctgggcgtttaaaggctcccagggctacctagtagtgagactcagcatgatgattcatccagcggctttcactctcgagcatattcctaaaaccctaagtcctaccggaaacatctccagcgctcccaaggactttgccgtgtatggattggagaatgagtatcaggaagaagggcaactattgggccagttcacatacgatcaggacggagagtccttgcagatgtttcaggccttgaaaaggcctgacgataccgctttccagatcgtagaactcaggattttctccaactggggacaccccgagtacacctgtctatatcggttcagagtccacggggagcccgttaaatag

SEQ ID NO: 30734 - DNA, 525 bp, synthetic construct
  misc_feature 1..525: note = Description of Artificial Sequence: Synthetic coding sequence
  source 1..525: mol_type = other DNA
atggactttagcagactgcatatgtactctccgcctcagtgtgtccctgaaaacacagggtatacatacgcactctctagctcatactccagtgacgcccttgactttgagactgaacacaaactcgatcctgtgttcgactctccacggatgtccaggaggtctctccgcttggcaaccaccgcctgcactctcggggacggagaagcggttggggcagactccggaacctcctccgccgtctccctgaaaaatcgtgctgcgaggaccaccaagcagcggcgatcaaccaacaaaagtgcctttagtatcaaccatgtgtcccggcaggtgacttctagcggggtatctcatgggggaactgtttcgcttcaggacgccgtgacccgcagacccccagtcctcgatgagtcatggatacgggagcagactacagtggatcatttttggggacttgacgacgatggtgacttgaagggaggtaacaaagcggcaatacaggggaacggcgacgtgggggcttag

SEQ ID NO: 30735 - DNA, 408 bp, synthetic construct
  misc_feature 1..408: note = Description of Artificial Sequence: Synthetic coding sequence
  source 1..408: mol_type = other DNA
atggactttagcagattgcacatgtacagccccccacaatgtgtccccgaaaacactggatatacttacgccctgtcctccagctatagcagtgatgcactggactttgaaacagagcacaagctagaccccgtgttcgattctccgaggatgtctcggcgtagtctgaggctcgccaccaccgcttgtaccctgggagacggtgaggcagtcggcgcagattcaggcaccagctctgctgttagcctgaagaaccgcgcagctcggacgacgaagcaaaggcgctccacgaacaaatccgcgtttagtattaatcacgtctccaggcaagtcactagtagcggcgtcagccatggagggacagtgagtctgcaagacgccgtaacccgacggcctcccgtactgtag

SEQ ID NO: 30736 - DNA, 267 bp, synthetic construct
  misc_feature 1..267: note = Description of Artificial Sequence: Synthetic coding sequence
  source 1..267: mol_type = other DNA
atggatttcagccggctccatatgtatagcccaccacagtgcgttcctgaaaatactggttatacatatgctctgtccagctcatatagtagcgatgcattggattttgaaaccgaacacaagttagacccagtgtttgactctccaaggatgagtaggaggtcactccgacttgcaacaacggcctgtactctgggcgatggtgaggcggtaggcgctgactccgggacatcctcagcagtatcgttgaaaaatagagcagcttag

SEQ ID NO: 30737 - DNA, 2049 bp, synthetic construct
  misc_feature 1..2049: note = Description of Artificial Sequence: Synthetic coding sequence
  source 1..2049: mol_type = other DNA
atggacttcagtcggcttcatatgtactcccctccccagtgcgtgccagaaaacactggctatacctacgcactgtcgtcttcatatagcagtgacgcattggattttgaaactgagcacaagctggaccccgtgtttgactcacccagaatgtcacggaggagtctgagactggctaccacggcatgtactcttggtgacggcgaggccgtgggggcagactctggaacctcctcagctgtgtccctgaagaacagggccgcacgtactaccaaacagcggagaagcacaaacaaatctgctttctcaatcaatcacgttagccgacaggtaacctcctcgggggtgagccatggaggaacagtgtcccttcaggacgcagtgaccaggaggcctcctgtgctcgatgagagctggatccgagagcagaccaccgttgaccatttctggggcaaggctgcctcaggggtgttttggtggctcgggattggatggtatcagttcgtgaccctcatctcctggctcaacgtgtttctgctcactcggtgcctgcggaacatttgtaaatttctcgttctgctgatcccactgttcctgctcctgggcctcagccttcgcggtcaaggaaactttttcagcttcctcccagtgcttaattgggccagtatgcatagaacccagcgcgtggatgatcctcaagacgtgtttaagcccacaacaagccggttaaagcagcccctgcagggagactccgaggccttcccgtggcactggatgtctggggtggagcagcaggtggcctcccttagcggccagtgccatcaccacggggagaatctgcgcgagcttaccaccttactgcagaagctacaagccagagtggaccagatggaaggaggcgcagccggaccctcagcttccgtaagagacgccgtcggacagccacccagagagaccgacttcatggccttccaccaggagcatgaggtgcggatgagccatctcgaggatattttaggtaaactaagagaaaaatccgaagctatccagaaagagctggaacaaaccaaacaaaaaactatttccgccgtgggggagcagctcctgccaacagtggagcacctccaactggagctggatcagctgaagagcgagctgtcttcatggaggcacgtcaagacagggtgtgagacagtggatgcagtccaagaaagggtggacgttcaggtcagggagatggttaaacttctgttcagcgaggaccagcagggtggaagcctggagcagctgctgcagagattttcatcacagttcgtgtctaaaggggacctgcagaccatgctgcgcgacttgcaactgcaaatcctgcgcaacgttacacaccatgtcagcgttaccaaacagcttcctactagtgaagcggttgtaagcgcggtctccgaggcaggagcgtctgggatcaccgaggctcaagccagggcaatcgtcaactcagcactgaaactgtactcccaggacaagacggggatggtggacttcgcccttgaatctggcggtggctctatcctgagcactaggtgttcagagacctacgaaaccaagaccgctctgatgtccttattcggcatacccctgtggtacttctcccaatccccgagggttgtgatacaacctgatatatacccaggaaattgttgggccttcaagggaagccagggataccttgtggtgcgactttccatgatgatccatcctgccgcttttaccctggagcacataccaaagaccctcagcccaacaggtaacatttcctctgcgcctaaagactttgctgtgtacgggctcgagaatgaatatcaggaggagggacagttgcttggccagttcacctacgatcaggacggggaatcattgcaaatgtttcaagcattgaagcgcccagacgatacagcctttcagatcgttgagctgcgaatcttttcaaactgggggcaccccgagtatacttgtttataccgtttccgagtccacggtgaaccagtcaagtag

SEQ ID NO: 30738 - DNA, 2925 bp, synthetic construct
  misc_feature 1..2925: note = Description of Artificial Sequence: Synthetic coding sequence
  source 1..2925: mol_type = other DNA
atgggtgacgtcagaaaagctaaggaagcccttgcagaggttcagatccctcctcctgacgctggcccatcccccagatgtaagcccccacctgctgaaaggctgctgggacctggcagaagacgccgaggacttagacgcagacgggaagctgtgtggttcgaagtggttaatatggacttcagtcgattgcatatgtacagcccacctcagtgcgtccctgaaaatactggctatacgtacgcactgtcctcttcatactctagcgacgcgctggacttcgaaaccgagcataagctggacccagtgttcgatagccccaggatgagcagaaggtctctccgcctggctactacagcatgtaccctcggtgatggagaggcggtgggtgcagatagcggtacatcttctgcagtgtctcttaaaaaccgagctgcccgaacaaccaagcaaaggcggtccacaaataaatctgccttctcaatcaaccacgtatcacgccaggtgacttcatccggcgtgagccacggcggaacagtatcactgcaggatgcagtcactagacggcctcctgttttggacgagagctggattcgggaacagaccaccgtggaccacttttggggcctggacgatgacggcgaccttaaggggggtaacaaagctgccattcagggaaatggggacgttggggcagccgcagccaccgcccacaatggcttctcctgcagcaattgcagcatgctctcggaaagaaaagatgtcctcacagctcaccctgcagctccgggtccagtgtcgagagtttactcacgcgatcgcaaccagaagtgtggagcatccttctacgttaatcgcatcctttggctggccaggtacaccgcttcctcattctcgtctttcctggtccaactgttccaggttgttttgatgaagctttcctacgagtcagagaattataagctgaagactcacgaatcaaaagactgcgaatctgagagctataaatctaagagccatgaaagcaaggctcacgcttcctactacgggagaatgaacgtgcgcgaggtcctgagggaagatggtcatttatccgtcaacggcgaggcactctgcgacgattgcaagggaaagaggcacctcgacgcccataccgccgcacattcacagtcaccgcgactacctgggagggccggtaccctgtggcacatatgggcatgtgcaggctatttccttctgcagattttaagacggataggcgcagttggccaggccgtgtcccggactgcctggtcagccctatggcttgcggtcgttgcccctggaaaggctgcttctggtgtcttttggtggctgggtattggttggtatcagttcgtgacgctgatctcctggctaaacgtgttcctgctgacccgctgtttgcgtaacatttgcaaattcctcgtgttgctaatccctctgttcctactactggccggactcagtttaagggggcagggtaatttcttctcttttcttcctgtcctcaactgggcctctatgcaccggacacagcgcgtggacgatccgcaggacgtcttcaagccaacaacttcccggctgaagcagcctctgcagggcgactcggaagcattcccttggcattggatgagcggagtggagcagcaagtggcaagcctgtcagggcagtgtcatcaccacggagagaatctgcgtgagttaacaactctcctgcagaagctccaggctagagtggaccaaatggagggaggagctgccggtccatccgcatccgtacgggacgctgtaggccaaccccctagggaaacggactttatggcttttcatcaggagcacgaagtgaggatgtctcatctcgaggacatcttgggaaagctgcgcgagaaatcggaagcaattcaaaaagagctagaacaaaccaagcaaaagactattagcgctgtgggggagcagttgttgccaacagtggagcacctccagcttgagcttgatcagctgaaaagtgaattgtccagctggaggcacgtgaagactggatgtgagacagtggacgccgttcaggagcgagtggatgtccaggttagagagatggtgaagcttctcttctcagaggatcagcagggtggatcactggagcagcttctgcaaagattcagcagtcagtttgtgagcaaaggagacttgcagaccatgctgagggacctacagctgcagatattgaggaatgtcacccaccacgtatccgttaccaaacagctgccaacttctgaggcagttgtttcagcggtgtctgaggccggtgcgtctggcataacagaagcacaggccagagccatcgtcaacagcgccctgaagttatacagccaggacaagacaggcatggtcgactttgcattggagtcgggagggggaagtatactttccactagatgctcagagacctacgaaaccaaaactgctttaatgtcattgttcgggatccctctgtggtacttctcccaatctcccagggtcgtaatccagccagacatctaccctggtaattgctgggcgtttaagggttctcagggatacctggttgtgcggctctcaatgatgattcacccagccgcttttacattggagcatattcctaagaccctcagtcctaccgggaacataagctctgccccaaaggatttcgcagtgtacgggctcgagaacgagtatcaggaagagggccaactgctggggcaatttacttatgatcaggatggagagagtctgcagatgttccaggcccttaaacgacctgatgatacggcatttcagattgttgagctacgcatattttccaactggggacatccagaatatacctgtctttacaggttccgagttcacggcgaacccgtgaaatag

SEQ ID NO: 30739 - DNA, 837 bp, synthetic construct
  misc_feature 1..837: note = Description of Artificial Sequence: Synthetic coding sequence
  source 1..837: mol_type = other DNA
atggggcgtatttcacccggatcaccagggctccctaggactgtgtggttcgaagtggtgaacatggattttagcaggctgcacatgtactcaccgccacagtgcgtccccgagaatacaggctatacttacgccttatcctcatcctattcgagcgatgcacttgatttcgagacagaacataaactcgatcctgtcttcgatagccctagaatgagcagacgctcactgcgactcgcaactacagcttgcacactgggtgacggcgaggcagtaggggctgactcaggaacttcttctgccgtgagcctaaagaacagggccgcacgcacgactaagcaaaggaggtccactaacaagtccgctttttcaattaaccacgtgtcaagacaggtgactagctctggggtgtcccatggtggaacagtgtctttgcaggacgccgtcacccgcaggccgcctgtgctcgatgaatcctggattagagaacagacaaccgtcgatcacttctggggcttggatgatgatggcgatctcaagggcggtaataaagccgctatccagggtaatggagacgttggtgctgcggctgccactgcccacaacggattcagttgctcgaattgttccatgctgtccgaaagaaaagacgttctgactgcccacccagcagctccaggtcctgtgtcacgagtgtattcaagggatcggaaccaaaagtgcaagagccagtcttttaaaacccaaaaaaaggtctgttttcccaatcttatctttccattttgtaagagccagtgcctgcactacctgagctggagactcaaaattattccttag

SEQ ID NO: 30740 - DNA, 360 bp, synthetic construct
  misc_feature 1..360: note = Description of Artificial Sequence: Synthetic coding sequence
  source 1..360: mol_type = other DNA
atggatttttcccgtctgcatatgtactcacctcctcagtgtgttcctgaaaataccgggtatacatatgcactctcctcgtcttactcaagtgatgccctagacttcgagacagaacataagctggatcccgtgttcgatagcccacgcatgtctcgtcgcagccttaggctggcaacgaccgcatgcaccctcggcgatggagaggctgtaggcgcagactctgggacatccagcgctgtgtccctgaagaaccgcgcagcccgaactaccaaacagcggagatcaaccaacaaatccgccttcagtataaaccacgtgtcaaggcaggtaacttcctccggggttagtcatggttag

SEQ ID NO: 30741 - DNA, 2352 bp, synthetic construct
  misc_feature 1..2352: note = Description of Artificial Sequence: Synthetic coding sequence
  source 1..2352: mol_type = other DNA
atggtgatcatgtctgagttctctgcagaccccgctggtcaggggcaaggtcaacagaaacctctgagggtgggtttctatgatatcgagcgcaccttgggtaaggggaactttgcagtcgttaagcttgccagacatagagtaactaaaacgcaagtggcaatcaagatcattgataaaacccgcttagacagctctaacctagagaagatctaccgggaggtacagctcatgaaactgttaaaccaccctcacatcatcaagttatatcaggttatggagaccaaggatatgctttatatcgttacagaattcgcaaagaatggggaaatgtttgactatctcacaagtaacggtcatctgagcgagaacgaagccaggaagaagttctggcagatactcagcgccgtggagtactgccatgatcaccacattgtccatcgggaccttaaaaccgaaaaccttctcctggacgggaatatggacatcaaattggcagattttgggtttgggaacttttacaaatccggcgaacccctctctacttggtgcgggagccctccatacgccgctcctgaggtcttcgagggaaaggaatacgagggcccacagctggacatatggagtttgggtgtagtgctctatgtcctcgtgtgcgggtctttgccatttgacggcccaaacctcccgactttgcggcagagggtgctggagggacgcttcaggattcctttcttcatgtcccaggattgtgagtcgctaattcgccgtatgcttgtcgtagatcctgccaggcgcatcaccattgcccaaatccgacaacaccgctggatgcgcgctgagccttgtctaccagggcctgcttgccccgcatttagtgcccacagttatacaagtaatctgggcgactacgatgagcaagctttgggaatcatgcagactctgggagtggacaggcagcggacggtcgaaagccttcagaattcatcatacaatcacttcgcagcaatctattatctgttgcttgagcgtttaaaggaatatagaaacgcacagtgcgcccgtccaggccctgccagacagccaaggccacgctcatccgatctctccggcctcgaggttccccaagaggggctcagcactgatccattcaggccagcgttgctgtgtcctcagccccagacgctggtgcaatccgtgctgcaggctgaaatggattgcgagttacaaagctctctgcagtggcctctgttttttcctgtggacgcgagctgttcaggtgtgttccgacctaggcctgtgtcacccagctccctcctcgacaccgcgatatcggaagaggcacgccagggtcccggactcgaagaggaacaggatactcaggagtctctgcccagttcaacaggccgacgtcacaccctcgcggaagtgtcaacgcgcctttcccctctaaccgcaccgtgcatcgtcgttagccccagcaccaccgccagcccagcagagggtacatcctccgatagctgtcttactttttccgcttcgaagagccctgcagggctgtcagggacccctgcaacccagggcctgctgggggcttgttctccagtgcgtctggcgagtccctttcttggctcgcagtctgctacacccgtgctacaagcgcagggtggcctaggaggagcagtactgcttccagtaagtttccaggagggcaggcgagcctccgacacctcactcacacaggggctaaaggcctttaggcagcaactgaggaagacgacacgcacaaagggattccttgggctgaacaaaatcaaggggctggctcggcaagtctgccaggcacccgcatctagggcatctcgcggaggactcagtccctttcacgcacccgcacagtctcccggtctgcacgggggtgcagctggctcccgggagggttggagtctgttggaggaagtcctcgagcagcagagattgctacagctgcagcaccatccggctgctgcccctgggtgttcccaggccccacagcctgcacccgcaccttttgttatcgctccttgtgatggacccggagcagcgccactccctagcaccttattgacttccggactaccccttttgccacctcctctgctccagacaggcgcatctcctgtggcctcggccgctcaactgttggatacacacctacacatcggtacaggacctacagctctgcctgccgtgcctccccctcgcttagcgcgactggctcccggatgcgaacccctgggtctgctccaaggtgattgcgagatggaggatctgatgccatgctccttgggcacatttgtactggtccaatag

SEQ ID NO: 30742 - DNA, 3744 bp, synthetic construct
  misc_feature 1..3744: note = Description of Artificial Sequence: Synthetic coding sequence
  source 1..3744: mol_type = other DNA
atggaggatgccggtgcagcgggaccagggcctgagcccgaacccgagcccgagcccgagccagagcccgcacctgagcctgaacctgaacccaaaccgggagctgggacaagcgaggcttttagccggctctggaccgatgttatgggaattttggacggatccctggggaatattgatgatttggctcaacaatacgcagactactataatacatgcttttccgacgtttgtgagaggatggaggagctgcgcaagagacgagtttctcaggacctggaggttgaaaagccagacgcctcccccacttcattgcagctccgctcccaaatcgaggaaagccttggcttttgtagtgctgtcagtacccccgaggtcgagcgtaagaatcccctacacaaatccaatagtgaagattctagtgtgggtaaaggcgattggaaaaagaagaacaagtacttctggcagaatttcagaaaaaaccagaaaggcattatgcgccagaccagcaagggagaagatgtcgggtacgtcgcgagtgagatcaccatgtccgatgaggagaggatccagctcatgatgatggtgaaggaaaagatgatcacgattgaggaggcgctggccaggttaaaggaatacgaggcccagcaccggcaatcggcggcattagacccagctgactggccggacggttcttacccaacatttgacggtagctcaaactgtaatagccgagagcagagcgatgacgagaccgaggagtcagttaagttcaagaggttgcacaaactggttaatagtacccgcagggtccgaaagaaactcatacgcgttgaggagatgaagaagcccagcaccgaaggtggtgaggaacacgtgtttgagaacagcccagtgctcgacgaaagatcagccctgtacagcggtgtgcacaaaaagccacttttcttcgacggcagtccagaaaagccacccgaggatgactccgattcccttacaacatctccttcctcctctagcctggatacgtggggcgcaggcagaaagcttgttaaaaccttcagtaagggtgaatcaagaggactcatcaagccccctaaaaaaatgggtactttcttcagctatcctgaggaggagaaagcacagaaagtgtcacgctccttaacggagggggaaatgaaaaaggggctggggtctttaagccacggccgtacatgttcgtttggaggcttcgatttgaccaatagaagcttgcacgttggatctaacaactcggatcctatggggaaagaaggggatttcgtgtacaaggaagtcatcaaaagccccacggccagccggatctccctgggtaagaaggtgaaatccgtgaaggagacgatgagaaaacgaatgagcaagaagtacagcagttctgtgagcgaacaagacagcggcctggacggtatgcccggttcacctccaccgtcacagcccgacccagagcacctcgacaagccaaaactcaaggccggtggcagcgtagagagcctccggtcaagcctttcaggacaaagtagtatgagtggacaaacagtgtcaaccacggactcatccactagtaacagagaaagcgtgaaatctgaggatggtgacgatgaggaacccccatataggggtcccttttgtggcagggctagagtgcatacagacttcactccgagtccctacgacacagatagcctgaaattgaagaaaggtgatataattgacataataagtaagcctcctatgggaacctggatgggactgctgaacaataaggtgggcacctttaaattcatctacgtagacgtgttaagcgaggatgaggagaagcccaaacgtcctacccggcgacgtaggaagggacggcctcctcagccaaaatccgttgaggatttactcgaccgcattaacctaaaagagcatatgcctactttcctgtttaacggctacgaggatttggacacatttaagctactcgaggaggaggacctggatgaactgaacatcagggatcccgagcatagggctgttctcctgaccgcagtggaactgcttcaagagtatgacagtaacagcgaccagtctggttcccaagagaagctgttagtagactcacagggactgagtggctgctcacccagagatagtggctgctacgaatcaagcgagaatctggagaatggcaagacacgcaaggcctctctgctcagcgccaagagctccaccgagccctctctgaagtctttttctcggaaccaactggggaattaccccaccctcccacttatgaaatccggagacgccttaaaacagggccaggaggaaggcaggctgggtggcggactggcacctgacacaagcaaaagttgcgacccaccaggagttaccggcctcaataagaataggcgctccctgccagtcagtatttgtcgtagttgcgaaaccctggaggggccacagaccgtggatacgtggcctaggtctcactctctcgacgatctgcaggtggaacccggagccgaacaggacgtgccaacagaagtgactgaaccacccccacagatcgtgcccgaggtgccccagaagaccacagcgagctccacaaaagcgcagccacttgaacaggatagtgcagtggataatgccttattactgacccagagcaagcgtttttccgagcctcagaaactgaccaccaaaaagttagaagggagcatagcagctagcggcagaggactgagcccccctcagtgcttacccaggaactacgatgctcagccacccggtgccaaacatggcctcgcgcgtacacccttagagggccaccgcaaggggcacgagtttgaaggaacccatcatcctctggggacaaaagagggagtggacgccgaacaacgaatgcagccgaaaatccccagccaacccccacctgttccagcaaaaaaatctagggagcgtctggccaatggacttcaccccgtgccaatgggcccttctggtgccctaccctctcctgatgcaccatgcttacccgtaaaacgcggaagcccagcatctccaacatctcccagcgactgcccacctgcgcttgccccaagaccgctgtccggacaggccccaggctctcctccttctacccgtcctcctccctggctcagcgaactcccagagaacacttccctgcaggagcacggcgttaagttagggcctgctctcacccggaaggtctcctgtgcaagaggcgtcgacctagagaccctgacagaaaacaagttgcacgccgagggtattgatctaactgaagagccgtactcagacaagcacggcaggtgcggcatcccggaggccttggtgcagcggtacgcagaagatttggatcagccggaacgggatgtggctgcaaatatggatcagatcagggttaagcagctacgcaaacagcacaggatggctattccttccggtggcctcaccgaaatttgtcgcaagcccgtctcgccgggttgcatcagtagcgtgagcgactggctcattagcattggtttgcccatgtacgctggcacccttagcacagctggcttttccacattgagccaagtcccctctctttcccacacatgcctgcaggaagccggtattaccgaggagagacacatccggaagttgttgagcgctgccaggctcttcaagctgccccctggacccgaggccatgtag

SEQ ID NO: 30743 - DNA, 255 bp, synthetic construct
  misc_feature 1..255: note = Description of Artificial Sequence: Synthetic coding sequence
  source 1..255: mol_type = other DNA
atggaagaacaggattgtcgggatggcagtttaggaaatatcgacgatcttgcacagcagtacgcggactattacaacacctgcttcagtgatgtctgcgagaggatggaggagctccgtaagaggcgagtatcccaggacttggaggttgagaagccagatgccagcccaacttccctgcagctgagaagccaaatcgaagagtcactgggcttttgttcagccgtgagcactccagaggtggagaggaagtag

SEQ ID NO: 30744 - DNA, 249 bp, synthetic construct
  misc_feature 1..249: note = Description of Artificial Sequence: Synthetic coding sequence
  source 1..249: mol_type = other DNA
caggctcaggatttcaaagatggttctctcggcaatatcgatgacttagctcagcagtacgccgactactataatacctgtttctcagatgtgtgcgagcgcatggaggaacttcggaaaagacgcgtgagccaagacctagaagtggagaagcccgatgccagtccaacctccctgcagctaagaagccagatagaggagagtctgggtttctgttctgccgtgagtacacctgaggtcgagcgctag

SEQ ID NO: 30745 - DNA, 2091 bp, synthetic construct
  misc_feature 1..2091: note = Description of Artificial Sequence: Synthetic coding sequence
  source 1..2091: mol_type = other DNA
atgccaaagccttcccgcgagcagagcgatgacgagacggaggaatccgtcaaatttaaacgtctccacaagcttgtgaattctacgaggcgggtgaggaaaaagctgataagagtagaagaaatgaagaaaccttcaacggagggaggggaggaacacgtgttcgaaaacagccccgtgctggacgagcggagcgctctttactcgggtgttcacaagaaaccactattttttgatggaagccctgagaagcccccagaagacgatagtgacagcctaactactagcccatcgagcagcagtctagatacctggggagctgggaggaagctggtgaagactttctctaagggggaatcccgcggattgatcaagccccctaagaaaatgggtactttcttttcatacccggaggaggagaaggctcagaaggtaagcagatcattgacagagggcgagatgaagaagggcctgggatcactgtctcacggcagaacttgcagctttggcggattcgacctgacaaatagatcactgcatgtagggagtaacaacagcgatcccatgggaaaagagggcgacttcgtgtataaagaggtgatcaagtcgcctaccgcttctaggatctccctcgggaaaaaggttaagtccgttaaagaaacgatgcggaagcgaatgagtaagaagtacagctcttctgtcagcgaacaagacagtggtttggacggcatgcccggatccccaccaccttcccagcctgacccagagcatttggacaaacccaagttgaaggctggcggtagcgttgaaagcttgagaagtagcctgagtggccagtccagcatgagtggccagaccgtgtccaccactgatagcagtaccagcaaccgggaatccgtgaagtctgaggatggcgatgacgaggaacctccttaccgcggtcctttttgtggtagggctcgcgtgcacacagattttactccatccccgtacgatactgatagtctgaagctgaagaaaggggacattatagatatcatatctaagccacctatggggacttggatgggcctgctgaacaacaaggttggcaccttcaagtttatctacgttgacgtgttaagcgaagacgaggagaaaccgaagcggccaaccagacggcgtaggaagggacggcctccgcagccaaagtcagttgaagacttgctggatcgcatcaatcttaaagagcacatgcccacgttcctcttcaatgggtatgaggatctcgacaccttcaaacttctcgaggaagaagatctcgatgagctcaatattcgagatccagagcatagagcagtcttgttgacggccgtggaattattgcaggaatacgacagtaacagcgatcaatcgggttcacaggagaagctgcttgtggacagccaggggctgagcggctgctccccaagagacagcggctgctacgaatcctcagagaatttagagaacggtaagacccggaaggccagcttgttgtctgccaagagcagcactgaaccttcgctgaaaagcttctctagaaatcagctgggcaactatcccacactacccttgatgaagtcaggtgacgctctgaagcagggtcaggaagaaggcagacttggaggaggattggctcccgacacatccaagagttgtgatccacctggagtcaccggcttgaacaaaaatcgaaggtcattgcctgtgtccatatgtagaagctgcgagacactggaaggcccacaaacggtagatacctggccgaggtctcactcactcgacgacctgcaggtcgagcccggagcagaacaagatgttccaacagaagtgactgaaccaccgcctcaaatcgtgccagaggtcccacaaaagaccactgcaagctcaacaaaggcccaacccctggaacaggactctgcagtcgacaatgctctcctcctgacccagtcaaaacgattctccgagccacagaagctgacgacaaaaaaactggaaggctctatagcagcttccggcagaggcctgtcacctcctcaatgtctcccgaggaattacgatgctcagtag

SEQ ID NO: 30746 - DNA, 1974 bp, synthetic construct
  misc_feature 1..1974: note = Description of Artificial Sequence: Synthetic coding sequence
  source 1..1974: mol_type = other DNA
atgggaacctggatgggactgttgaataacaaggttggcaccttcaaattcatttacgttgatgtgctatccgaggatgaggaaaaaccaaagcggccaacaagacggagacggaagggtagaccaccccaacccaaatccgtcgaagaccttctggatcgtattaatctaaaggaacatatgccaacatttcttttcaatggttacgaagatctagacacctttaagttactcgaagaagaggatctggatgaactcaatatcagagaccctgagcatcgtgcggtcttgctgactgccgtcgaactgctgcaggaatacgactccaatagtgatcaatctggttcccaggagaaactcctcgtggacagtcaggggctctctggctgcagccctcgcgattccggttgctacgagtcatctgagaatttagaaaatggcaaaaccaggaaggcatccctcctatcggccaaatcttctaccgaaccttccttaaaaagtttttcacggaatcaacttggcaattatcctacattacccctcatgaagagtggagacgccctgaaacaaggccaggaagaaggaaggttgggaggcggattggctccggataccagtaagtcctgcgatcctcctggggtcacaggacttaataagaataggaggagtctgcccgtgagcatctgtcgctcctgcgagacattggagggccctcagaccgtggatacttggcctagaagccatagcttggacgatcttcaggtagagccaggagccgagcaggatgtgccaactgaggtcacagaacccccacctcagatcgtgccagaggtgccgcagaagactaccgcatcctctactaaggctcaaccactcgagcaggatagtgccgtggataatgcccttctgctcactcagtctaagaggtttagtgagccacagaaactgactactaagaagctagaggggtctatcgccgcttccggtcggggtctgtctccaccgcagtgcctgcccaggaactatgatgcccaacccccaggggcaaagcacggactggccagaaccccactcgagggccacagaaagggacatgagttcgagggcacccatcaccctttaggaacaaaggaaggcgtggatgccgagcaaaggatgcagcccaaaattccctcccagccaccccctgtgccagcaaagaagtctagagagcgactggctaacggcctgcacccagtccccatgggtccttcaggcgctcttcccagccccgatgctccttgtctccccgttaaaagaggctcacccgcttctcccaccagcccctccgattgtcctcccgctcttgcaccacgtcccctctccggacaggctccagggtccccgccatccactaggccgccaccatggttaagcgaattaccagagaatacttccttacaagaacatggcgtgaagttgggacctgcattgacccggaaggtgtcctgcgctagaggagtcgatttggagacactcacagagaataaattgcacgcagagggtatagaccttacggaagagccttattccgacaagcacggccgatgtggaatccccgaagctctggtccaaaggtacgccgaagacctcgaccaacccgaacgcgacgtggctgcgaacatggaccaaatccgggtgaaacagctgcgtaagcaacaccgaatggcaataccttctggaggactgacagagatctgtcgtaagcctgtttctccaggatgtattagctcagtgtccgattggctgatctcaatcgggctgcctatgtatgctggcacgctgagcacagcgggttttagcactcttagccaggttcctagcctgtcacacacatgtcttcaagaggccggaatcaccgaggaaagacacatccggaagctgctgtcagccgctagactatttaaactacctcccggaccagaggcaatgtag

SEQ ID NO: 30747 - DNA, 621 bp, synthetic construct
  misc_feature 1..621: note = Description of Artificial Sequence: Synthetic coding sequence
  source 1..621: mol_type = other DNA
atgttgccccctgcaatacatttctatctactccccctggcctgtattctgatgaagagttgtttagcatttaaaaacgatgctacagagatcttgtacagccatgtagtcaaacctgtgccagcccatccctcttccaactctactctgaaccaggctcgaaacggcggacggcacttcagtaatactgggctggatcggaatacaagagtccaggtgggctgtcgggagctgcggtcaacaaaatacatctctgacgggcagtgtacgagcatttccccactaaaggagctggtctgtgcaggcgaatgcttgccactgcccgtgctccccaattggattgggggtggatacggaacaaaatattggtccagaaggagctcccaggagtggcggtgtgttaacgataagactaggacacagaggatccagctccaatgtcaagatgggtcaaccagaacttacaagatcacagtagtcacagcctgcaagtgcaagaggtatacaaggcagcataacgagagttcgcataattttgagtctatgtcacccgctaaaccggtccaacaccaccgggaacggaaacgtgcttctaagtcgagcaaacacagtatgagctag

SEQ ID NO: 30748 - DNA, 693 bp, synthetic construct
  misc_feature 1..693: note = Description of Artificial Sequence: Synthetic coding sequence
  source 1..693: mol_type = other DNA
atgctgcctccagcaattcacttttacttacttccattggcatgtattttgatgaagtcgtgcctggcttttaagaatgacgccactgagatcctgtacagtcacgtagttaagcccgtacctgcacatccttcttctaattcaactctgaaccaggccagaaacgggggaagacactttagcaataccggtttggataggaaccgcacagagtccctcacacgccagaactacttctggttatttccaggggcttttttacgacagctgcaggaggccagagttcaggtaggttgccgggagttgaggtctaccaaatacatctctgatggccaatgtacatccatctcccctctcaaagagctggtgtgtgccggagagtgcctccctttaccagtgctgccgaattggattggcggaggctacggcaccaaatattggtctcgtcgctcttcccaggagtggaggtgtgtgaatgacaagacccggacgcagcggatccaacttcagtgccaggacggcagcacccggacctataagattactgttgtaacggcctgtaagtgcaaaagatatactagacagcataatgaatcttcacataacttcgagagcatgagtcctgccaagccggtgcagcaccatcgggaacggaaacgcgcttcaaagtctagcaaacattccatgagctag

SEQ ID NO: 30749 - DNA, 2229 bp, synthetic construct
  misc_feature 1..2229: note = Description of Artificial Sequence: Synthetic coding sequence
  source 1..2229: mol_type = other DNA
atggggagtgaaaattctgcactcaaatcctatacattacgtgagccaccgttcacacttccctctggtttagccgtgtaccctgcagtcttacaggacggcaagtttgcgtcggtctttgtctacaagagggagaacgaggataaggtgaacaaagcagcaaagcacttgaaaactctaaggcacccttgccttctgaggttcctttcctgtaccgtggaggccgacggaatccacctggtgactgaacgggtacagcccctggaagtggcactcgaaacactcagctcggctgaagtgtgtgccggtatttacgacattcttctggccttaatttttctgcatgataggggccaccttactcacaataacgtatgtctgtcttccgtgtttgtgtccgaagacggccattggaagctggggggaatggagacagtgtgcaaagtcagccaggccacacccgagtttctgaggtccattcagtctatccgggacccagcttcaatcccacccgaagagatgtcacctgagttcaccactctgcccgagtgtcacggccacgcgagagacgctttttcctttgggactctggtggagagcctgttaacaattctgaatgagcaagttagcgccgacgttctcagttcttttcaacagacccttcactctaccctcctgaacccaatccctaagtgtcgtcctgcgctgtgcacgttgctttctcacgacttctttcgcaacgacttcttagaagtggtgaacttcctgaagagcctgactctgaagtccgaagaggaaaaaacagagttcttcaagtttttgttagatcgtgtgtcttgcctctcagaggagttgatcgccagcaggcttgtgcctttactcctgaatcaattggtgttcgccgagccagtcgccgttaagagttttctcccctacctgttggggccaaagaaagatcacgcccagggcgaaacaccttgtctgcttagcccagctctcttccagtcgagggtgatccctgtgctcttgcagctgttcgaggtgcacgaggagcacgtacggatggttctactgagccatatcgaagcctacgtagagcattttacccaggagcagctaaagaaggttatcctcccacaggtcctcctcggcttaagggacacgagcgatagtatcgtagccattacccttcacagcctcgcggtgctggtgtctttgctgggcccagaagtcgtggttggaggggagcgtacgaagatttttaagcgcacggcgcctagttttactaagaatactgatttaagtctcgaagacagtccaatgtgcgtggtgtgctcgcatcactcacagatttctcctatcctggaaaacccttttagtagcatcttcccaaaatgtttcttctccgggtcaacccccattaattcaaagaagcacattcaaagggattactacaacaccttgttgcagacaggagatccttttagccaaccaatcaagttcccaattaacgggctgtctgacgtgaagaatacttcagaggattcagagaattttccttccagctctaagaagtccgaagagtggcctgattggtcagaacccgaggagcctgaaaatcagactgttaatatccagatttggcctcgagaaccttgtgatgatgtgaaatctcaatgcactacactggacgtcgaggagtcgtcatgggacgattgcgagccaagttccctagacacaaaggttaatccaggaggcggtatcactgccacgaaaccggtgacgtccggcgagcaaaagcctatcccagccctcctaagtttgactgaagaatccatgccgtggaagtcgtccctgccccagaagatctctctggttcagaggggtgacgatgcagaccagatagaaccacccaaagtttccagccaggagcgccctttgaaagtcccgtcagaactgggcctgggtgaggagttcacaatccaggttaagaaaaagccagttaaggatcccgaaatggattggtttgcagacatgattcctgagattaaaccctccgccgcatttttgattttacctgagctcagaactgagatggtgcctaagaaggacgatgtgagtccagtgatgcaattttcttctaagtttgccgcagccgagataactgaaggcgaagccgagggatgggaggaggagggcgaattgaattgggaggacaacaactggtag

SEQ ID NO: 30750 - DNA, 2067 bp, synthetic construct
  misc_feature 1..2067: note = Description of Artificial Sequence: Synthetic coding sequence
  source 1..2067: mol_type = other DNA
atgggctctgagaatagcgccctgaaatcatatactctcagagagccccctttcaccctgccttcggggttagctgtctacccagcggtgctccaggacggtaaattcgcttctgtgttcgtttacaaaagggaaaacgaagacaaagtaaataaagcagctaagcaccttaagaccctcaggcacccttgtctgttgcgcttcttgtcctgtaccgtggaggccgacggcatccacctggtgactgagcgcgtgcagcctcttgaggtcgcgttagagaccctgagtagcgccgaggtgtgtgccggaatttacgacatactgttggccctcatatttctgcacgatagagggcacctgacccataacaatgtatgtctgagcagcgtcttcgtttctgaggacggccattggaaacttggcggtatggagactgtgtgtaaggtctcacaagccacacccgagtttctcaggtccattcagagcattcgcgacccagcatcaatcccccctgaggaaatgagcccagaattcacaaccctgcccgagtgtcatggacatgccagagatgccttttctttcgggactctagttgaaagcttgctaaccattctaaacgagcaagtgtccgcggatgtgctttcctcctttcagcagaccctgcacagtacactcctgaaccccatccccaaatgccggcctgccctctgcaccttactaagccacgacttttttcggaacgactttttagaagtggtgaactttctgaaaagcctgactcttaagagcgaggaagagaagacagaattctttaaattcttgctggatcgcgtttcctgtctgtctgaggagctgattgcgtcaaggctggttcccttgctgctgaatcaactagtatttgcggagccagtggcagtgaagtccttcttgccttatctgctggggccaaagaaagatcacgcgcaaggggaaactccgtgtctcctctcacccgcactgttccagagtcgcgttattcctgtgcttctgcaactcttcgaagtgcatgaggagcatgtacggatggtgctactatcacacatcgaagcctatgtagagcattttacccaggaacagctcaaaaaggtgatacttccacaggtgctgcttgggctcagagacacctccgattccattgtagctatcacccttcacagccttgcagtccttgtgtctctgctgggaccagaagtggtggtcggtggagagcgtactaagattttcaaaaggaccgctcctagcttcactaaaaacactgacttgtctctggagggcgatcctttctcacaacccatcaagtttcccattaatggtctcagtgacgttaaaaacacctctgaagacagcgagaactttccttcatcttcgaagaagagtgaggaatggccggactggtccgagcctgaggaaccagagaatcagaccgtgaatattcagatctggccacgggagccctgtgacgacgtgaaatcccaatgtacaaccctagacgtagaggaaagttcttgggacgactgcgagccctcctccctggacaccaaggtcaacccagggggtggtatcacagccaccaagccagtgacctcgggtgagcagaaaccaattcccgcattgctctcactgaccgaggaatcaatgccatggaagagttcccttccccagaaaatttccctggtacagaggggcgacgatgcagaccagattgagcccccaaaagtctcgtcccaggaaagacccctcaaagtgccatctgagctgggtctgggggaagagttcacaatacaggttaagaaaaagcccgtaaaagatcccgagatggactggttcgcggacatgatacccgagattaagccatccgccgcatttctgatattgccggagctgagaactgaaatggtccctaagaaagacgatgtctctccagttatgcagttctccagcaagtttgccgctgctgaaatcactgaaggagaggccgagggatgggaagaagaaggcgaattgaattgggaagacaacaactggtag

SEQ ID NO: 30751 - DNA, 2229 bp, synthetic construct
  misc_feature 1..2229: note = Description of Artificial Sequence: Synthetic coding sequence
  source 1..2229: mol_type = other DNA
atggggagcgagaacagcgctctgaagagctatactttacgggaacccccttttaccctgccttctggactggccgtctaccccgctgtgcttcaggacggtaagttcgcctcggtctttgtttacaaaagagaaaacgaagacaaggtgaacaaagcagccaagcacctaaaaaccctgagacacccctgcttgctccgcttcctttcctgcactgttgaagcagatggtatacacctcgttactgagcgggtgcagcccctggaagtcgctctcgagacactctcaagtgcggaagtgtgtgcgggtatttacgatattctgcttgccctgatattcttgcacgaccgtggccacctgactcataataatgtgtgcctttcatctgtgtttgtttctgaggacgggcattggaagctcggcggaatggagacagtctgtaaggtgtctcaggccactcctgaatttcttaggtcaatccagtcaataagagatcccgctagcatcccgcctgaagaaatgagcccagagttcactacactccctgagtgccatggccacgccagagacgctttcagtttcggaactctggtagagagtctactgacaattctcaatgagcaggtgtccgcggatgtgctgtcttccttccaacagactctgcacagtaccctgctgaacccaatacccaagtgccggccagcactctgtaccctgctctcacacgatttcttcaggaatgactttctcgaggtcgtgaatttcttgaaatctctcacgctcaagtcagaagaggagaaaacggagtttttcaagtttctgctggatagagtcagttgcttgagcgaggagctgattgcgtcaaggcttgtgcctttgctgctgaatcagctagtttttgccgagcccgtggccgtcaaatcgttcctgccttatctgctgggaccaaaaaaagatcacgctcaaggcgaaaccccatgcctgctgtccccggctctttttcaaagcagagtgattcccgtcctactgcaactgtttgaggtacatgaggagcacgttcgaatggtgctgcttagtcatatagaggcctacgtagagcactttactcaggagcaactgaagaaagtgatcttgcctcaggtcctcctgggattaagggatacgtctgactcaattgtcgccatcactctgcacagcctggccgtgctggtgagcctgctgggacccgaggttgtggtgggtggggaacgcaccaaaattttcaaacgtaccgccccaagcttcacaaaaaacactgacctgtctctggaagacagccctatgtgtgtcgtgtgtagccaccattcgcagatctccccaattcttgagaaccctttttcatctattttccctaagtgttttttctccgggtctacccccataaactctaagaaacatatccagagggactactacaacactttacttcagaccggagacccgtttagccagccaattaagttccctatcaatggcctctcagatgtcaagaatacatcagaggatagcgagaattttcctagctcatccaagaagagtgaggaatggcctgactggtccgagcccgaagagcctgagaaccagacagtgaacatccagatatggcctcgtgaaccatgcgacgacgtgaaaagccagtgtaccactctggacgtcgaagaatcctcttgggatgactgcgaaccttcctcgctggatacaaaggtgaaccctggaggtggcattacagctactaagccggtgactagtggcgaacaaaagcccattccagccttgcttagtctcaccgaggaatccatgccctggaagtctagcctgccgcagaagatcagcctggtgcagaggggcgatgacgccgaccagatcgaaccaccaaaggtttcttcccaggaaagacctctgaaggtgccaagcgagctgggcctgggggaggagtttaccattcaggtgaagaagaagcctgtgaaagacccagagatggattggtttgccgacatgatacctgagattaagccttcagccgctttcttgatccttccagagttgcgtaccgaaatggtacccaagaaagatgatgtgtctcctgtgatgcaattctcttctaaattcgctgccgcagaaatcaccgaaggggaggccgaaggttgggaggaagagggtgagcttaattgggaagacaacaactggtag

SEQ ID NO: 30752 - DNA, 1767 bp, synthetic construct
  misc_feature 1..1767: note = Description of Artificial Sequence: Synthetic coding sequence
  source 1..1767: mol_type = other DNA
atgggttccgagaacagtgcccttaaaagttatacactgcgcgaacccccttttactttaccgagcgggctggcagtatatcctgccgtgcttcaggacggaaaatttgcttctgttttcgtgtataagagggagaatgaggacaaggtgaacaaagccgcaaagcacctaaagaccctgcgccatccttgtttgctgcggtttcttagttgcactgtcgaggccgacggcattcacttggtgacggagcgggtgcagcccctcgaggtagccctggagactctgagcagcgccgaggtctgtgcgggaatttatgacatcctgctggcactgatcttcctgcacgacaggggacacctcacccataataatgtttgtctgagctctgtcttcgtgtcagaggatggacactggaaactgggcggaatggaaacagtgtgcaaggtgagccaggctacacccgaattcctgcggagtattcagtccataagggatccagcgtccattccccctgaggagatgagccccgagtttactactcttccagagtgtcatggccacgcaagagatgcctttagttttggcactctggttgagagcctgctaactattctcaatgaacaggtgtctgccgatgtgctgagtagcttccagcagactctgcattcaaccctcctcaatccaattccaaaatgccggccagccctttgcactttactgagccacgacttcttcagaaacgactttttggaagtggtgaatttccttaaatctttaactctcaagtctgaagaagagaagactgagtttttcaagtttctactggatagggtttcgtgcctgtctgaggagctgatcgcctccagactcgtgcccctccttctgaatcagctggtttttgccgaaccggtggccgtcaagagttttttgccatatctcctgggacccaaaaaggatcacgcacaaggcgagaccccgtgtctgttgagtcctgccctcttccagagtagggtcattcccgtccttctccagcttttcgaggttcatgaagaacacgtgagaatggtactgctctcacatatcgaggcttacgtcgagcattttacccaggagcagctcaaaaaggtcatacttccccaggtgctgctgggcctccgcgacaccagtgatagcatagtcgccatcacgctacattcgctagccgtgctcgtgtccctgctgggacccgaggttgtcgtggggggagagaggactaagattttcaagaggacagcgccatcttttacaaaaaataccgatctgagtctcgaaggcgacccattcagccagcccattaaatttcctatcaacggcctgagcgatgtgaaaaacaccagcgaagactcagaaaacttcccatctagcagcaagaagtctgaggagtggcctgactggagcgaacctgaagagcccgagaatcaaacagtcaatattcagatctggccacgggaaccttgcgatgatgtcaagagccagtgcacaacccttgacgtcgaggaatcgtcatgggacgactgtgagccaagctctcttgacacaaaagtcaatcctggcggaggaattacggctaccaaacccgttacttcaggcgaacagaaaccgattcccgcattgctgagcctgaccgaagaaagcatgccatggaagtcctctctgcctcagaagatcagtctggtgcagcgaggcgacgacgccgatcagattgagcctccaaaagtgagcagttag

SEQ ID NO: 30753 - DNA, 1008 bp, synthetic construct
  misc_feature 1..1008: note = Description of Artificial Sequence: Synthetic coding sequence
  source 1..1008: mol_type = other DNA
atgaagctgccagcacgagtcttcttcacactcggcagcaggctaccttgtggtttggctcccagacgatttttcagctacgggactaagattctgtaccaaaataccgaggctctgcagagcaaattttttagccctttgcagaaggcgatgttacctcccaattcgtttcaagggaaggttgcgtttatcactggaggagggactggacttggaaaaggcatgaccactttattatcttcattaggcgcacagtgcgtgatcgcgagcaggaaaatggatgttttaaaggccactgctgaacaaatttccagtcagaccgggaataaggtgcacgctattcagtgcgacgttagggacccagacatggtgcagaatacggtgagcgaactgataaaagttgcaggccaccccaacatcgtcatcaataatgcagccggaaattttatttctcctacagagcggctgagcccaaatgcgtggaagacaatcactgacatcgtgctgaacggcactgccttcgtgacccttgagatagggaaacagctcatcaaagcccagaagggcgctgctttcttgtcaattaccacaatttatgccgagactggttccggcttcgtagtaccatccgcctctgcaaaagcgggagtcgaggcaatgtctaagtccctagcggcagaatggggcaagtacggaatgagatttaatgtaatccagcctgggccaatcaaaactaaaggcgcttttagccggttggatcctactggcacgtttgaaaaagagatgattggtaggatcccctgcgggagactaggtactgttgaggagctggccaacctcgccgcttttctgtgctctgactacgcttcttggatcaatggcgctgtgatcaagtttgacgggggagaagaagttttgatctcaggagagttcaatgatctgcggaaagttacaaaggagcagtgggatactattgaggagttgatcaggaagactaaaggcagctag

SEQ ID NO: 30754 - DNA, 945 bp, synthetic construct
  misc_feature 1..945: note = Description of Artificial Sequence: Synthetic coding sequence
  source 1..945: mol_type = other DNA
atgggaatcggtcgaagtgaaggtggacgcaggggggctgccttgggagtactgctggcgcttggcgcagcactcctggctgtggggtcagcttccgagtatgattatgtcagctttcaatctgacattggcccatatcaatcgggacgcttttataccaaacctccccaatgcgttgatatacccgcagatttgcggctttgccataacgtgggatataaaaaaatggtgttgccgaacctgttggagcacgaaaccatggctgaagtgaagcagcaggcctcctcgtgggtgccactcctcaataagaattgtcacgccggtacgcaggtatttttatgctccctgttcgcccctgtatgccttgatagaccaatctacccttgtcgttggctttgcgaagcggtgcgagatagctgcgagcccgtgatgcaattttttgggttttattggcctgaaatgctgaaatgcgacaagtttcccgaaggcgacgtgtgtattgctatgaccccccctaatgccacggaggcctcaaagccccaagggaccaccgtgtgccccccttgtgacaatgagctgaagtcagaagctatcatcgagcatctgtgcgctagcgagtttgctcttcgcatgaagatcaaggaggtgaagaaagagaatggagataagaagattgttccaaaaaagaagaaaccactgaagttaggtccaatcaagaaaaaggacctgaaaaaactcgttctttaccttaagaatggggctgactgcccatgtcatcaactcgataatctctcccatcattttctaattatggggaggaaggttaagtcgcagtacctgctgaccgctattcacaagtgggataagaagaacaaagaattcaagaattttatgaagaagatgaagaaccacgaatgtcctacattccagagcgtgtttaagtag

SEQ ID NO: 30755 - DNA, 1041 bp, synthetic construct
  misc_feature 1..1041: note = Description of Artificial Sequence: Synthetic coding sequence
  source 1..1041: mol_type = other DNA
atgttcctgtcgatccttgtggcactatgcctgtggctgcacctcgcactcggtgttcgaggcgcaccctgcgaagctgtcaggattccaatgtgtaggcatatgccgtggaacatcacaaggatgccaaatcacttgcatcactcgacccaggaaaatgcaattttagcaattgagcagtatgaggagttggtggatgtgaattgttccgcagttttgaggtttttcctctgcgccatgtatgctcccatttgtacactggagtttctacacgacccaatcaaaccttgcaaatccgtgtgtcagcgcgctcgggacgactgtgaaccactgatgaagatgtacaaccattcttggccagaatccttagcatgtgacgaattgcccgtctacgatagaggggtgtgcatctctcctgaggccatcgtgacagatctgcccgaggacgttaagtggatcgacataacaccagacatgatggttcaggaacggccactggacgtggactgtaaacgcctttcccctgatagatgcaagtgtaaaaaggtgaaacctacattggccacctatctatccaaaaactactcgtatgtgatccacgctaaaattaaggccgtgcaacgatctggttgtaacgaggtgaccacagtggtagacgtaaaagaaatattcaagagttcttcccctataccgaggacgcaggtacctttgatcacaaatagcagttgtcagtgccctcacattttgccacaccaggatgtgcttattatgtgctacgaatggcgttcgagaatgatgctgctggaaaactgcctggtcgaaaaatggcgcgatcaattaagcaaaagaagcatccaatgggaggagaggctacaagaacaacggcgaaccgtgcaggataaaaaaaaaacagccggtcggacctctagatctaatccccctaaacccaaaggcaagccaccagcacccaagcctgcttcacccaaaaagaatatcaagacaagatccgcccaaaagcggacaaacccaaaaagagtatag

SEQ ID NO: 30756 - DNA, 1032 bp, synthetic construct
  misc_feature 1..1032: note = Description of Artificial Sequence: Synthetic coding sequence
  source 1..1032: mol_type = other DNA
atgcgtgtggccggacgtgagggcagatttctctcggccggtgtcgccgcaagagaaggatctgctatgttcttgtctatcctggtggccctgtgtctctggcttcacttagcactgggagtgcgcggtgccccttgcgaagccgtgcgcatacctatgtgccgacatatgccatggaatattacccgcatgcctaaccacctgcatcattctacacaggaaaatgccatgtacgccccaatctgtacgttggagtttctgcatgatcccatcaaaccctgcaaaagcgtttgccagcgcgcaagagacgactgcgaaccactgatgaaaatgtataatcacagttggcccgaatccctggcatgtgacgagctcccggtctatgaccggggtgtgtgtatttcccccgaagctattgtaaccgatctcccagaggacgtcaagtggattgacatcaccccagatatgatggtccaagagcgaccccttgacgttgactgcaagcgcctgtcgcctgataggtgcaaatgtaagaaggttaaacctacacttgccacatatctgagcaaaaattatagttacgttatccacgccaaaatcaaggccgttcagcgatccggctgtaacgaagtgacaacggtggtcgatgtaaaagaaatatttaaatccagctcgcccattcccagaacccaggtgcccctgatcaccaatagttcctgtcagtgtcctcacatcctcccacaccaagacgtcctcataatgtgttacgagtggcggagccggatgatgctgctcgagaactgtttagttgagaaatggcgcgaccaattgagcaaaagatcgattcaatgggaggagaggcttcaggagcaaaggagaacagttcaagacaaaaaaaagacggcaggccgtacctcccggtccaacccacccaaacctaagggcaaacctcctgctcctaagcctgcgtctcccaagaaaaatatcaagactcgcagtgctcagaagcgcaccaacccaaagcgtgtctag

SEQ ID NO: 30757 - DNA, 954 bp, synthetic construct
  misc_feature 1..954: note = Description of Artificial Sequence: Synthetic coding sequence
  source 1..954: mol_type = other DNA
atgcgcgctgccgctgccggtggcggagtcagaaccgccgctttagctctccttctgggtgcccttcactgggctcccgctcgatgtgaggaatatgactactatggttggcaggcagaacccctccatgggcgaagctattctaagccgccacaatgcctggacattccagctgatctgcctctctgccataccgtcggttacaaaaggatgcgtcttcctaatctgcttgaacatgaatcactcgcggaagtgaaacagcaggccagtagctggttgcctctcctggctaaaagatgtcactccgacacccaggtgttcctctgcagcttattcgctcccgtgtgcctagatcgacccatctacccttgccggagtctttgcgaggcagtccgggctggatgcgcccctctgatggaggcgtatggcttcccctggcccgaaatgcttcactgccacaaatttccgttagacaatgatctttgtatcgcagtgcagttcggacatctgcccgctaccgccccaccagtgactaaaatctgcgcccagtgtgaaatggaacatagcgcagatggcctgatggaacagatgtgcagctctgattttgtagtgaaaatgcgaattaaggagatcaaaattgagaacggggataggaaactgattggtgcccagaaaaagaaaaagctgttaaagcccggacccttaaaaaggaaagatacaaaacgcctagtcctgcacatgaagaatggtgctgggtgcccctgtcctcagttagacagcttagctggttcattcctggtgatggggagaaaagttgatggtcaactgctcctcatggcggtgtaccggtgggataaaaaaaacaaggagatgaaatttgcagtgaagttcatgttctcctacccctgcagtctgtactaccctttcttctacggagccgctgaaccccattag

SEQ ID NO: 30758 - DNA, 903 bp, synthetic construct
  misc_feature 1..903: note = Description of Artificial Sequence: Synthetic coding sequence
  source 1..903: mol_type = other DNA
atgagaatcgctgtgatttgcttctgcctgctgggcatcacatgtgctattccagtaaagcaggctgacagtggcagcagcgaagagaagcagctctacaacaagtacccagacgccgtcgctacttggctcaacccagacccttcccagaaacagaatctgctcgccccacaaacattaccttccaaatccaatgagtcccatgatcacatggacgacatggacgacgaggacgacgatgatcacgtggactcccaggacagtatcgacagtaacgatagtgatgacgtggacgatacagacgattcccaccagtccgacgagtcccatcactccgacgaaagcgatgagcttgtgacagacttcccaacggatctgcccgcaacggaagtgttcacccccgttgtacccactgtggatacatatgacgggagaggagatagcgtcgtgtacggtctgcgtagtaagtccaagaaattcagacgacccgatatccagtaccctgacgcaacggacgaggacatcacctcccatatggagtcagaggagctgaatggcgcttataaggccattccagtcgcccaggatctcaacgcccctagcgattgggacagccgcggtaaagactcatatgaaacatcacagttggatgaccagtcagccgaaactcacagccacaagcaaagtagactgtacaaacgcaaggctaatgacgagagcaacgagcactccgacgtgatcgattcacaggagctttcaaaggtgtctagggagtttcactcacacgaatttcacagccacgaggacatgctggtggtcgatccaaaatcaaaggaggaggacaaacatctcaagttcagaatctctcacgagctcgattctgcgtcttctgaggtgaactag

SEQ ID NO: 30759 - DNA, 879 bp, synthetic construct
  misc_feature 1..879: note = Description of Artificial Sequence: Synthetic coding sequence
  source 1..879: mol_type = other DNA
atgcgcatcgctgtcatctgcttttgcctcttgggaattacctgtgcaattcccgtgaagcaggcagattccggatccagtgaagaaaagcagctttataataagtacccagacgccgttgccacttggttaaatcccgacccatcacagaagcagaacttactggcaccgcagaatgcagtcagctccgaggaaactaatgattttaagcaggagacactgccaagcaagtctaacgaatctcacgaccacatggatgatatggatgacgaagatgatgacgatcaccagtccgatgaatcacaccatagcgatgagtcagatgagcttgtgaccgattttcctaccgatttacccgcaaccgaagtatttacgcccgtggtccctactgtggatacttacgacggcaggggggactcggtagtgtatgggttacggtcaaagagtaaaaagtttagaaggccagatatccaatatccggatgctacggatgaggatatcacgtcccacatggagagcgaggagctgaatggcgcttacaaggcaattccagttgcacaagatctcaacgccccttccgattgggattcgagggggaaggattcatatgagacgagccagctggacgaccaatcagctgagactcactcccacaagcagtctcgcttgtacaagagaaaggctaatgacgagagcaatgagcacagcgatgtgatcgactcacaggagctgtccaaggtcagcagggaatttcactcccacgagtttcactcgcacgaggacatgttggtggtggatccgaagtctaaagaggaagacaagcatctcaagtttaggatttcacacgagctcgattccgcttcttcagaggttaactag

SEQ ID NO: 30760 - DNA, 864 bp, synthetic construct
  misc_feature 1..864: note = Description of Artificial Sequence: Synthetic coding sequence
  source 1..864: mol_type = other DNA
atgaggatcgcagtgatctgtttctgccttctgggtatcacctgcgccataccagttaagcaggcagactccgggtccagtgaggagaaacaaaatgccgtgagttcagaggaaactaacgactttaaacaggagactctgccaagtaaatccaacgagagtcatgatcacatggacgatatggatgatgaagacgacgacgatcacgtcgactcacaagattctatcgactcgaacgattcagatgacgtggacgacacagacgactcccatcagagcgatgagagccaccactccgatgagtctgacgagctggttacagactttccaacagacttgcccgctaccgaagtgtttactccagttgtgcccacagtggacacttacgacgggagaggcgacagtgtggtatatgggttgcgatcaaagtcaaaaaagttcaggagaccagacatccagtacccagatgccaccgatgaggacattacttcacatatggaatctgaggagttaaatggcgcttacaaagcaattcccgtggctcaagatttaaacgctccctcagactgggattcccgaggtaaggatagctatgagaccagccaactcgatgaccagagcgcagaaactcactctcataaacagagcaggctgtataagcggaaggcaaacgatgaatccaacgagcactccgacgtgattgacagtcaagagctgagtaaggtctcaagagagtttcacagtcacgaattccacagtcacgaagatatgctggtcgtagacccaaaaagcaaggaggaggataagcatctgaagttcaggatctcacacgaactggattcagcatcctctgaggtgaattag

SEQ ID NO: 30761 - DNA, 945 bp, synthetic construct
  misc_feature 1..945: note = Description of Artificial Sequence: Synthetic coding sequence
  source 1..945: mol_type = other DNA
atgcgcatcgcagtaatttgcttttgtctgttaggaattacctgtgctatacccgtaaagcaggctgactccggatcaagcgaagagaagcagctgtataacaaatatccagacgcggtcgctacatggctgaaccccgatccaagccagaaacaaaacctgttggctccccagaatgctgtttcttcagaagagacaaatgactttaagcaggaaacactcccttccaagagcaatgaatcgcacgaccatatggatgatatggacgacgaggatgatgatgaccacgttgactcacaggactctattgactctaacgattcagacgacgtagatgatacagacgactcccaccagtcggacgaaagtcaccactccgacgaatccgatgaactcgtgacagactttccaaccgacttaccagccacagaggtgtttaccccggtggttccaaccgtggacacctatgatggccgaggcgacagcgtggtgtatgggttgcgctctaaaagcaagaagttcagacggcctgacatccagtatcctgatgccaccgacgaggacatcacttctcacatggaaagcgaggaactaaacggagcctacaaagctataccggtggcccaggacctgaatgctccatccgactgggatagtcggggaaaggatagttatgagacttcccagttggatgaccagtcagctgaaacacacagtcataagcagagtcgcctctacaagagaaaggccaatgacgaatcaaatgagcattcagacgtcatcgactcccaagagctgagcaaagtaagccgtgagttccatagccacgagtttcactcacacgaagatatgttggtggtcgacccaaagtctaaagaggaggataagcatctaaaatttcggatctcacacgagttggatagcgccagttccgaggtgaactag

SEQ ID NO: 30762 - DNA, 822 bp, synthetic construct
  misc_feature 1..822: note = Description of Artificial Sequence: Synthetic coding sequence
  source 1..822: mol_type = other DNA
atgagaatcgccgtgatttgtttttgcctcctcgggatcacatgcgctatcccagtgaaacaggccgattccggttctagcgaggagaagcagacccttccaagcaaatccaacgagtcccacgaccacatggacgatatggatgatgaggacgacgacgatcatgtcgattcccaagattctattgacagcaatgattcagacgatgtcgacgacaccgatgactcccaccagtccgacgagtctcaccacagtgatgaaagcgatgagctcgtcaccgactttcctaccgatctgccggcaactgaagtatttacccctgtggtgccgacagtcgacacctatgacgggcgtggtgatagtgtggtgtacggcctgcgttccaagtctaagaagtttcggaggcccgatatacagtacccggatgccactgatgaagacatcacaagccacatggagtccgaggaattaaacggtgcatataaggcgatcccggtggctcaggatctgaatgcacctagcgactgggattctcgcggaaaagactcatacgagacttcccaactggatgaccaatctgctgagacccactcccataaacagagcaggctttataaacggaaggccaacgacgagtccaacgaacacagtgatgtcatcgacagccaggagctgtccaaagtgtcccgggaatttcatagccacgagtttcattcacatgaagacatgttggtagtagatccaaagagcaaagaggaggacaagcacctgaaatttcgtatttcacatgaattggatagcgcctcatcggaggtcaattag

SEQ ID NO: 30763 - DNA, 2370 bp, synthetic construct
  misc_feature 1..2370: note = Description of Artificial Sequence: Synthetic coding sequence
  source 1..2370: mol_type = other DNA
atgaggacctaccactacatcccgttgttcatctggacgtacatgtttcacaccgtggatactatacttttacaggagaagcctaattcttacctgtcctctaagaagatcgccggactcaccaaggacgatggcaaaatgttgaggcgtactaagcgaggctggatgtggaaccaattctttttgttggaagaatacaccggaactgatacacagtacgttggaaagcttcacaccgatcaggataagggcgatgggaatttaaaatacatcctcaccggcgatggggctggaagtctgttcgtgatcgatgaaaacactggggacattcatgccgctaagaagctggatcgggaagaaaagtccctctacattcttcgagccaaagcaatcgaccggaagacaggacgtcaggtcgaaccagagagtgagttcatcatcaagattcacgacatcaacgacaatgaacctaagtttacgaaggacctgtacaccgcatcggtccctgaaatgtccggcgtaggaaccagcgtgatacaggtcacagccacggatgccgatgacgccaattatggtaactcagctaaggttgtgtattcaattctccaagggcagccctattttagtgtagaccccgagtcaggaattatcaaaaccgccctgcccgatatgtctagggaaaatagagagcagtatcaggtagttatacaggcaaaggacatgggaggtcaaatgggaggtttatccggaactacgacagttaacatcaccttgacagacgtgaataacaatcctccccgattcccacagtccacctatcagttcaactctcccgagagcgttcccctgggcacgcatctcggtaggatcaaagctaatgatccagacgttggggagaacgcagagatggagtacagcattgctgagggcgacggtgccgacatgtttgatgtaatcacagacaaagacactcaggagggtattattacagttaaacagaatctggattttgaaaatcagatgctgtataccctacgagtcgacgcctccaatactcacccagaccctagattcttgcacctaggccctttcaaggacactgccgttgtaaaaatttccgtagaggatatcgacgaacctcctgtgtttacaaaagtcagttacctgatcgaagtcgacgaagacgtgaaggaaggctccatcattggacaggtgacagcatatgatccggacgcccgaaataacctaattaaatatagtgtcgaccgccacactgatatggacaggatctttgggatacacagtgaaaacggctcaatatttaccctaaaggctctcgacagggagagctcaccttggcacaatattacggtcacagccaccgaaattaacaaccccaaacagtcctcgcacattcccgtgttcatcagaatcctggacataaacgaccacgcacctgagttcgccatgtactacgagacgtttgtgtgtgaaaacgccaaacccggtcagctcattcagaccgtgtctgtcatggacaaagatgatcccccacgcggtcacaagttttttttcgagcccgtgccggagttcacgctcaacccgaactttaccatcgtcgacaacaaagacaatactgccggaattatgacacgaaaggatggctatagcagaaataagatgtccacttatctgcttccaatcctaatttttgataatgactatcctatccagtcgtctacaggcaccctcactattcgcgtctgcgcgtgcgacaaccaggggaatatgcagagctgcacggccgaggctctgatactgagtgcgggactgtctaccggagcgttagtggcaatcctgctgtgtgtgctgatcctgctaatcctggtggtgcttttcgccgctctgaaacgacaacgtaagaaggagcccttgataatctctaaggatgatgtgcgggataatatagtcacctacaatgacgaaggtggaggcgaggaggatacacaggccttcgatattggaacactcagaaaccctgaggcaagagaggactcgaaactcagacgcgatgtgatgcccgagaccatttttcaaatacgtcggacagtcccactctgggaaaacattgatgtccaagatttcatccatagacggctcaaggaaaatgatgcggatccctctgctcctccatacgattcactggccacttacgcttatgagggtaacgatagtatagccgactcactgtcttctctcgagtccctgaccgcggactgtaaccaagactatgactacctctccgactggggcccaagattcaagaagctggcggatatgtacgggggagacgactccgacagagattag

SEQ ID NO: 30764 - DNA, 162 bp, synthetic construct
  misc_feature 1..162: note = Description of Artificial Sequence: Synthetic coding sequence
  source 1..162: mol_type = other DNA
atgcgggcatggatcttcttcctcctgtgtctggctggcagagcccttgcagcacctcaacaggaagccctgcctgatgagacggaggtggtagaagaaactgtcgccgaggtgacggaagtgtcggtgggggctaatccggtccaggtggaagtgggttag

SEQ ID NO: 30765 - DNA, 336 bp, synthetic construct
  misc_feature 1..336: note = Description of Artificial Sequence: Synthetic coding sequence
  source 1..336: mol_type = other DNA
atgagggcttggatattcttccttctctgtcttgccggacgggcactcgccgctcctcagcaggaggcactgcctgatgaaaccgaggtggtcgaagaaacggttgctgaagtcactgaggtgtcagtgggtgcgaatccggttcaggtcgaagtgggtgagttcgacgacggggcagaggagacagaggaggaggtagtggccgagaatccttgccagaatcatcactgcaagcacggaaaggtctgtgagctggacgaaaacaatacacccatgtgtgtatgtcaggatcctacctcctgccccgcacctattggcgagtttgaaaaagtttag

SEQ ID NO: 30766 - DNA, 276 bp, synthetic construct
  misc_feature 1..276: note = Description of Artificial Sequence: Synthetic coding sequence
  source 1..276: mol_type = other DNA
atgaagctggcagtgacgctgaccttggtgaccctggccttgtgttgctcaagcgcctccgcggagatctgcccatcatttcagagggtcatagagactctccttatggacacgccatcttcgtacgaggccgctatggagctgttcagtcctgaccaagatatgagagaggcgggagcacagctcaaaaaactggtggataccctgccccaaaagccccgtgaaagcatcattaaacttatggagaaaatcgcccaatcttccttgtgtaattag

SEQ ID NO: 30767 - DNA, 1380 bp, synthetic construct
  misc_feature 1..1380: note = Description of Artificial Sequence: Synthetic coding sequence
  source 1..1380: mol_type = other DNA
atgatcaaaaggtttcttgaggataccaccgacgatggcgaactgtcaaaatttgtcaaggactttagcggaaatgctagctgtcatcctcctgaggctaagacgtgggccagccggcctcaggtgccggagccacggccacaagcccctgatctgtacgatgacgacttggagttcagaccaccatcgagacctcaatcctccgataatcaacagtacttctgtgccccagccccactctccccttctgcacgaccacgttcaccctgggggaagttggatccatacgactcgagtgaggatgacaaggagtacgttggctttgcaacactccccaaccaagtccacagaaagtccgtcaagaaggggttcgatttcaccctcatggtggcgggagagtcaggcttgggcaagtctacactcgtaaacagcctatttctgaccgatctgtacagggatagaaagctgttgggtgccgaagaacgcatcatgcagaccgtcgagatcaccaaacatgccgttgatatcgaagaaaaaggagtacgcctaagacttaccatcgtggataccccaggctttggagacgccgtcaataataccgagtgctggaaaccagtagctgagtacatcgatcagcagtttgaacaatacttccgtgacgagagtggacttaacagaaagaatatccaggataatcgagtgcactgttgcctttatttcatttctccatttggccatggattgagaccgctggatgtggaatttatgaaagcgctccatcaaagggtgaacatcgtgccgattttagctaaggcagacacgctgactcctcccgaggtggatcacaagaaacgtaagattcgggaggagatcgaacatttcggaatcaaaatctaccagtttcctgactgtgattctgacgaggacgaggattttaaactccaagaccaggcactgaaggagtccatcccattcgctgttatcgggtccaatacggttgtggaggcgaggggcaggcgcgttcggggacggctctacccttggggaatcgtcgaggtggagaacccaggacattgcgactttgtgaaattacggactatgctggtgagaacccacatgcaagatctgaaggatgtgacccgggagacacactacgaaaactatcgcgctcagtgtattcagtctatgacccgcctggtggtgaaagagcgcaatcggaataaactcacacgggagtcagggactgacttcccaattccagccgtgccccctggcacagatccagagactgaaaagttaattcgggagaaggatgaggaactgcggcgaatgcaggaaatgctgcacaagatccagaaacagatgaaggaaaactactag

SEQ ID NO: 30768 - DNA, 1437 bp, synthetic construct
  misc_feature 1..1437: note = Description of Artificial Sequence: Synthetic coding sequence
  source 1..1437: mol_type = other DNA
atggaccgcagcctgggatggcaaggtaattctgtgcctgaggacagaacagaagcaggaataaaaaggttcctcgaggacaccaccgacgatggtgagctgagcaagtttgtgaaagacttcagcggcaacgcctcgtgtcatcctccagaggccaagacctgggcatcccggcctcaggttcctgagccccgtcctcaagcaccagacctgtacgacgatgacctcgaattccgccctcccagccgccctcaatcgtccgacaaccagcagtatttttgtgctcccgctcccctctctccaagtgcacgtcccagaagtccttggggcaagctagacccctatgatagttctgaagacgacaaggaatacgtgggatttgcaaccctgcccaaccaggtacaccggaaatccgtgaaaaagggcttcgatttcaccttgatggtggctggggagagcggtttgggcaaatcgactctggtcaacagtctgttcctgaccgacctgtatcgggaccgtaagctgctgggggcagaagaaagaataatgcagacggtggagataacaaagcatgcagtcgatatagaggaaaagggagtgaggctgcgcttaactatcgtggatactccaggtttcggtgacgcggtgaataataccgagtgttggaaaccagtggccgagtatatcgatcaacaattcgaacagtattttcgggatgagtccggcctgaataggaagaacatacaagacaaccgagtccactgttgcctgtattttatcagtcccttcggacacggattacgccctttagacgtcgagttcatgaaggcacttcaccaaagagtgaatattgttccaattctcgccaaggccgacacactgacgcctcccgaagtcgaccacaagaaaagaaaaatacgtgaagaaatagagcacttcgggattaagatctatcagttccctgattgcgacagcgatgaagacgaggacttcaagctgcaagatcaggccttgaaagaatccattccttttgcggtgatcggctctaacacagtggttgaggcccgaggtagacgtgttcggggtcggctgtacccatgggggatagttgaggtcgagaaccctggtcactgcgatttcgttaagttgcgcaccatgctggtgcgtacacacatgcaggaccttaaagatgtaacccgtgagacacattatgagaattacagggcgcagtgcatccagtctatgaccaggcttgtggtgaaagagcgaaatcgcaataaattaacccgtgaatctggaaccgacttccctatcccagccgtaccccctggaactgatcccgagaccgaaaagctcattcgcgagaaagatgaagaactaagacgaatgcaggaaatgctgcataagatccaaaagcagatgaaagaaaactactag

SEQ ID NO: 30769 - DNA, 1380 bp, synthetic construct
  misc_feature 1..1380: note = Description of Artificial Sequence: Synthetic coding sequence
  source 1..1380: mol_type = other DNA
atgatcaagagattccttgaggatactacagatgacggggagctgtctaagtttgtgaaagatttcagcggaaacgcctcttgtcatccaccagaagcaaagacgtgggcctcacggcctcaggtgcctgagccaaggcctcaggccccagacctgtatgacgacgaccttgagttcaggcctccttctagacctcaatccagtgataaccagcagtacttttgcgctccagcccctcttagtccaagcgccagaccacgaagcccctgggggaagttagatccctatgatagttccgaggacgacaaggagtacgtgggcttcgccactctcccaaaccaagtgcatcgaaagtcagtcaagaagggtttcgactttacactcatggtggcgggtgagtccggactgggaaagagcacactcgtgaatagcttattcctgaccgacctgtatcgggatcgcaagctgctcggagccgaagagagaataatgcagactgtggagatcaccaagcacgcagtagacattgaagaaaagggagtcagactacgcttgacaatcgtcgatactcccggatttggcgacgcagtgaataacaccgagtgctggaagcccgtggccgaatatatcgaccagcagtttgagcagtatttccgggacgagagtggactgaaccggaagaatatccaggacaatagagtacactgttgcctctacttcatctcccccttcggacacggcctcaggccactggatgtagagtttatgaaagccttacaccagcgggtcaacatcgtgccaatcctggccaaggcagatacactcaccccacctgaagtggatcataaaaaaagaaagatccgcgaagaaattgagcacttcgggattaagatttaccagttccccgattgcgactccgatgaggacgaggattttaaactgcaggatcaggctctgaaagagtccataccttttgctgtgataggtagcaacaccgtagtggaggcccgagggagacgcgtgagaggcaggctgtacccttggggcattgtcgaggttgagaacccgggacactgcgactttgtgaagttaaggactatgctggtgcggacccatatgcaggacctgaaagatgtgacccgggaaacccattacgaaaactatagagcccaatgcattcaaagtatgacaagactggttgtgaaagagcggaataggaacaaattgacacgggaaagcggcactgattttcctatcccagccgtgcccccagggacagatcctgagaccgagaaactcatccgggaaaaggacgaagaattacgccgtatgcaggaaatgctccataagatccagaagcagatgaaagaaaattattag

SEQ ID NO: 30770 - DNA, 1413 bp, synthetic construct
  misc_feature 1..1413: note = Description of Artificial Sequence: Synthetic coding sequence
  source 1..1413: mol_type = other DNA
atgcctggattctatagtgtcatgactgatgaggagattaagcgctttctggaggataccactgatgacggagagctgagtaaatttgtgaaggattttagcggtaatgcttcgtgccatcccccagaggccaagacatgggcctctaggccacaagtcccggagcctagaccacaggccccagatctctacgatgatgatctggagttccggcctccgtcccgaccacagtcctcagacaatcagcaatatttctgtgctccggcaccactctcccctagtgccagacctcgcagcccttggggcaagttggatccttatgactccagcgaagatgacaaagaatatgttggatttgccaccctgcccaatcaggtgcatagaaaatccgtcaagaaggggtttgatttcactttaatggtagctggcgagagcgggctgggtaaatcaacacttgtgaattcattattcctgacggacctgtatcgggacaggaaattactgggggctgaggaacggattatgcagacggtcgaaattacgaagcacgcggttgatatagaggaaaaaggggtccggctgagactgactatcgttgacacacctggctttggagacgctgttaataatacagaatgttggaagcccgtggcagagtatatcgatcagcagtttgagcagtatttccgcgatgagagcggcctgaatagaaaaaacatccaagacaatcgtgttcactgctgcctgtactttatcagtcccttcggccacggcctccggccactagacgttgaattcatgaaagctttacaccaaagagtgaacatcgttccgatccttgcaaaggcagacaccctgacaccgccagaagtggaccacaagaaaagaaaaattagagaagagattgagcacttcggcataaagatttaccagtttccagattgtgactccgacgaagacgaggatttcaagctccaagatcaggcactcaaagagagcatcccttttgccgtcatcggctccaataccgtggtggaggctcgtggcagaagagtccgcggacgtctgtacccttgggggattgtcgaagtcgaaaaccctggtcattgtgactttgtgaaattgcgtaccatgctggttcggacccatatgcaggacttaaaagacgtgactagggagacccactacgaaaattatagagcacagtgcatccaaagtatgacccggttagtggtgaaggaaaggaatagaaataagctcaccagagagtccgggaccgatttcccaattccagccgttcccccaggtactgaccccgagaccgaaaagttgattagagagaaagacgaggagcttcgacgcatgcaagaaatgctccataaaatccagaaacagatgaaggagaactactag

SEQ ID NO: 30771 - DNA, 825 bp, synthetic construct
  misc_feature 1..825: note = Description of Artificial Sequence: Synthetic coding sequence
  source 1..825: mol_type = other DNA
atgataaaaaggtttctggaagataccacagatgacggagagctatccaaattcgtcaaagacttttcgggaaacgctagttgtcacccaccagaggccaagacgtgggcatccaggccccaggtgccagaaccgagacctcaggccccagatctgtatgacgacgacttggaatttcgcccaccgagtcgccctcaatctagtgataatcagcaatatttttgcgcgccagccccactttccccctctgcaaggcccagaagtccctggggcaagttggacccgtacgattccagcgaggatgacaaggaatatgttggcttcgcaactcttccaaatcaggtgcacagaaagagtgtgaagaaaggatttgactttacactcatggtcgctggcgaaagcgggctgggcaaatccacactggtaaactctttgtttctgaccgatctctaccgcgacaggaaattgttaggagctgaggagcgcattatgcagactgtggaaatcaccaagcatgctgtggacattgaagagaagggagtcaggttgcggctgactattgtggataccccaggattcggagatgccgtgaataatactgaatgttggaaaccggtcgccgaatacatcgatcagcagttcgaacaatattttcgtgacgagtccggattaaaccggaagaacatacaagataaccgtgttcactgctgtctgtacttcatatcacccttcgggcatggttatggcccttccctccggctccttgcgccacccggtgccgtcaaggggacaggccaagagcaccaggggcaaggctgccactag

SEQ ID NO: 30772 - DNA, 1479 bp, synthetic construct
  misc_feature 1..1479: note = Description of Artificial Sequence: Synthetic coding sequence
  source 1..1479: mol_type = other DNA
tactcttccccggcactcttctcatcaagagcggctcctcagaagcctaggaaggagggatcccaggccgctgggttacttgtgtttagcgatagtctggagattaagcgattcctggaagacacaaccgatgacggggagttaagtaagttcgtgaaggatttttccgggaatgccagctgccatccacccgaagctaaaacttgggcgtcccggccacaggtccctgaacccagacctcaggcaccagacttgtacgacgacgatctggagttcaggccaccatcacgcccacagtccagtgataaccagcagtacttctgcgccccagccccactgtcaccatcggctcgcccaagatccccctggggaaagctcgatccatatgactcctctgaggatgacaaagaatatgtggggtttgctacgctgcctaatcaggttcatcggaaatctgtaaaaaagggttttgactttaccctgatggtggccggtgaaagtggacttggtaagagtaccctcgtgaattccctgtttctgacagatctgtaccgggaccgcaaactgttgggagccgaggaaagaatcatgcagacagtagagattacaaaacatgccgtggatatcgaggagaaaggcgtgcgcctccggttgaccatcgttgatacccctggcttcggagacgcagtgaacaacacggagtgctggaagcctgtggccgagtatatcgaccagcaattcgagcagtacttccgggatgagtccggtttgaataggaagaatatccaagataaccgcgttcattgctgtctgtattttataagcccattcggtcatggactccggccacttgatgttgaatttatgaaggcgcttcaccaacgagtgaatatcgttccaatcctcgccaaagcggatacccttactcctcccgaggtcgaccataaaaagcgcaagatcagggaggaaatagaacatttcggaatcaaaatataccagtttcctgactgtgactctgacgaggacgaggacttcaagttgcaggatcaagcgctcaaagaaagtattccgttcgcggtgatcgggtctaacaccgtcgtggaagcaagaggcaggagggtgagaggcagactgtatccttggggtatcgtcgaagtggaaaacccaggacactgtgactttgttaagcttcggacaatgctggtaagaactcacatgcaggatctgaaggacgtcacgagggagacccattacgagaattaccgcgctcagtgcatccagagcatgactcgacttgtggtaaaggagaggaatcgcaacaagctgactcgggagagcggaactgactttcccatacccgcagtgccaccgggaaccgacccagagacagaaaagctgatcagagaaaaggacgaggagctgcgcagaatgcaggagatgctgcacaagatacaaaagcaaatgaaggagaactactag

SEQ ID NO: 30773 - DNA, 996 bp, synthetic construct
  misc_feature 1..996: note = Description of Artificial Sequence: Synthetic coding sequence
  source 1..996: mol_type = other DNA
atggtggcaggagaatccgggctgggcaaatctacactcgtgaactcactgtttctcactgatttgtatcgcgaccggaaactacttggggctgaagagcgcataatgcagactgtcgagatcacaaagcatgccgttgatattgaagaaaagggggtgcggttacgactcaccatcgttgataccccaggcttcggtgacgcagtgaacaataccgagtgttggaaaccagtggcagaatacatcgaccaacaatttgagcagtatttccgggatgaatctgggcttaacagaaagaatattcaagacaatagagttcactgttgtctctatttcatttctccctttgggcacgggcttaggccgctggatgttgaattcatgaaggctctacaccaacgcgttaatatcgtgcccattctggccaaggctgatactctaactccacctgaagtcgaccataagaaacgcaagatcagggaggaaatcgagcattttggcattaaaatctatcagttccccgattgcgactcagatgaagacgaggactttaagctgcaagatcaagctttgaaggagtcgattccatttgccgtgatcggatcaaacacagtagtggaagctcgcggtaggagggtacgcggtcgtctgtacccatggggaatcgtggaagtggaaaaccctggacattgtgatttcgtaaagttaagaactatgctggttaggacccatatgcaggatctaaaggacgtcacccgcgagacacactatgaaaactaccgagctcagtgtatacagtcaatgacacggctggtcgttaaggaaagaaatagaaataagctcactcgcgagagtgggaccgactttcccatcccagccgttccacctgggactgaccccgagaccgagaagttaatccgtgaaaaggatgaagaattaaggaggatgcaggagatgcttcataaaatccaaaaacagatgaaagagaattattag

SEQ ID NO: 30774 - DNA, 1311 bp, synthetic construct
  misc_feature 1..1311: note = Description of Artificial Sequence: Synthetic coding sequence
  source 1..1311: mol_type = other DNA
atgtcagttagcgctagaagcgctgccgcagaagagcggagtgttaatagttccacgatgggccagcaaaagaatcttgagggctacgtagggtttgccaacttacccaaccaggtgtaccggaagtctgtgaagagaggattcgagttcaccctgatggttgtgggagagtcgggcctaggaaagtcaacgttgattaattccctgttcctgactgatttatacagtcccgagtacccgggtcctagtcacaggattaaaaagactgtgcaggtcgagcagtctaaagttttgatcaaggagggaggggttcagctgcttttaacaattgttgatacccctgggttcggagacgcagtcgacaactccaattgctggcagcctgtgatcgactatattgactctaagtttgaggattacctcaatgcagaaagtcgagtgaatcgcaggcaaatgccagataatagggtgcagtgctgcctatactttatagctccatcagggcacggactgaagccactggacatcgaatttatgaagagacttcacgagaaggttaatataatccccctaattgcgaaagccgatactttgactccagaggaatgtcagcagtttaagaaacagattatgaaagaaattcaggaacataaaataaagatatacgagtttccagaaacagacgacgaggaggaaaataagctcgtgaaaaaaattaaagaccgcctccccctcgccgttgttggctccaacacaataatagaggtgaacggcaaaagggtgcggggtcgccagtacccctggggtgtcgccgaagtcgagaacggcgagcactgtgatttcacaatcctgcgcaatatgctgataaggacccacatgcaggacctgaaggatgtcaccaacaacgtccactacgaaaactacagatccagaaagcttgctgctgtgacttacaacggggtggataacaacaagaataaaggccagctcacgaaatcccccctcgctcaaatggaagaggagagaagggagcacgtcgcaaaaatgaagaagatggaaatggaaatggaacaggtctttgagatgaaggtgaaggagaaggttcaaaagctgaaagattcagaggcagaacttcagcggaggcacgagcagatgaaaaagaatttagaggctcaacataaggagctcgaggagaaacgccgtcagtttgaggatgagaaggcgaactgggaggcccagcaacggattctcgaacagcaaaattcttctcggactctcgagaagaacaaaaaaaaaggcaagatcttctag

SEQ ID NO: 30775 - DNA, 1317 bp, synthetic construct
  misc_feature 1..1317: note = Description of Artificial Sequence: Synthetic coding sequence
  source 1..1317: mol_type = other DNA
atgtctgtgtcggcaagatcagccgcagcggaggagcgttcggtgaacagtagcaccatggaagtggctcagcagaagaatctggagggctatgtcggcttcgccaatttacccaaccaggtgtaccgaaaatccgtgaagcgaggcttcgaatttactctcatggtcgtgggcgagtctggactggggaagtccaccctgattaacagcctcttcctcaccgatctgtattccccagagtatcccggtcctagccaccgcataaagaagacagttcaggtggaacagtcgaaagtgcttattaaggagggaggcgtgcaactactcctgactatagttgacacacccggattcggcgatgccgtagacaacagtaactgttggcaaccggtcatcgactatattgacagtaagtttgaagattaccttaacgcggagagtagggtgaaccgtaggcaaatgccagacaatagggttcagtgttgcctgtatttcatagcccctagtggccacggcctcaagcccctggacatagagttcatgaagcggttacatgagaaggttaatattattcctctgatcgcgaaagccgacacacttacccccgaagaatgtcagcagttcaaaaagcagattatgaaggagatccaggagcacaaaattaagatttatgagtttcccgagaccgatgatgaggaagagaacaagctcgtgaaaaagatcaaagaccgcttacctttggctgtggtagggtctaacactataatcgaggtgaacggaaagagggtgagggggaggcagtacccgtggggggtggccgaggtagaaaatggcgaacactgcgactttaccattcttagaaatatgctgattcggactcatatgcaggacctgaaagacgtaacaaacaacgtacactacgagaactatcggtcccggaaactcgctgcagtgacgtataacggcgtggacaataacaaaaacaaaggacagctgaccaagtcccctcttgcgcagatggaggaggaaaggagggagcacgtggccaagatgaagaagatggaaatggagatggaacaagtatttgagatgaaagtgaaggagaaggtgcagaagctcaaagactccgaggcggagctgcagaggagacatgaacaaatgaaaaaaaatctagaagcacagcacaaggagttggaagagaaaaggaggcagttcgaagacgagaaagccaattgggaggctcagcaaagaatcttggagcagcagaactcaagtcggactctagagaagaacaagaagaagggcaaaattttctag

SEQ ID NO: 30776 - DNA, 1311 bp, synthetic construct
  misc_feature 1..1311: note = Description of Artificial Sequence: Synthetic coding sequence
  source 1..1311: mol_type = other DNA
atgagtgtatcggctcggagcgctgccgcagaggaacgttctgtcaactcctccaccatggtccagcaaaagaacctcgagggatacgtgggatttgctaacctcccgaaccaggtgtaccgtaaaagtgtaaaacgcggatttgaattcactttaatggttgtcggtgagtcagggctgggtaaatccactctgattaatagtttattccttaccgacttgtattcaccggaataccccggtccctcccatcgaatcaagaagaccgtgcaggtcgagcagtctaaagtgctaataaaggaaggcggtgttcaactgctgttgacaatagtcgataccccaggatttggagatgccgtagataactcgaactgctggcagcctgtaattgactatattgactctaagtttgaagactacctaaacgccgaaagtcgcgtcaacaggagacagatgccagacaacagagtccagtgttgcctgtatttcatagctccaagcggacacggcctgaaaccgctggacattgagtttatgaaaagactgcatgagaaagtgaatatcatccccctcatcgccaaggcagatactttaacccctgaagaatgccaacagttcaagaagcagatcatgaaggaaattcaggaacataagataaagatttacgagtttcccgagacagacgatgaggaagaaaacaaactggtgaaaaagatcaaggatcgactgcctctagccgtggtgggcagcaatactatcattgaagtgaacggcaaacgggttaggggcagacaatacccatggggtgtggcggaagtagaaaatggagagcactgcgacttcaccattttacggaatatgctgattagaactcacatgcaggatctcaaggatgtgacaaataacgtgcactacgagaactaccgctcacgaaagctagccgcagtgacttacaatggggtcgacaacaacaaaaacaagggacaactgactaagagccccctggcacagatggaggaggaacggagagaacacgtcgctaaaatgaaaaagatggagatggaaatggaacaagtgtttgagatgaaagtaaaagagaaggttcagaagcttaaggatagtgaggcagagttgcagcggagacatgagcaaatgaagaaaaatctggaagctcagcataaggaactggaagagaagcggaggcagtttgaggacgagaaagccaactgggaagcccagcagcggatcctggaacagcagaattctagccgcacactggagaagaataaaaaaaagggaaagattttctag

SEQ ID NO: 30777 - DNA, 267 bp, synthetic construct
  misc_feature 1..267: note = Description of Artificial Sequence: Synthetic coding sequence
  source 1..267: mol_type = other DNA
atgaagaaaatggagatggagatggaacaggtgttcgagatgaaagttaaggagaaggttcaaaagctcaaggactctgaggcagagctccagcgaagacatgagcagatgaaaaaaaatctagaggcacagcataaagaactggaggagaaacgacgccagtttgaagacgagaaggcgaattgggaagcccaacagcggatcttggaacagcagaactcttctcgtaccctggagaagaataagaagaagggcaagatcttttag

SEQ ID NO: 30778 - DNA, 1155 bp, synthetic construct
  misc_feature 1..1155: note = Description of Artificial Sequence: Synthetic coding sequence
  source 1..1155: mol_type = other DNA
atggtggtaggcgaaagtggcctggggaaatccactctgatcaattcactgttcctgacagacctgtattcccccgagtatcccggaccctcgcaccgcattaaaaaaaccgtccaggtcgaacagtccaaggtactgattaaggagggaggggtccagctgcttctgacaatcgtggatacccctgggtttggtgacgctgtggataacagtaactgttggcagccagttattgattacatcgattcgaaatttgaggactacttgaacgcagagtcccgggtgaaccgccgtcagatgccagataaccgagtgcaatgttgtttatatttcattgccccttccggacacgggctcaaaccattggacatagagtttatgaagcgcctccatgaaaaggtaaacatcatccctctcatagcaaaagccgacacgttgacaccggaagagtgtcagcagttcaagaagcagatcatgaaggaaatccaggagcacaagattaaaatttacgaatttcccgagacagacgatgaagaagaaaataagttggtcaagaagatcaaggataggctgcctttggctgtggtcggcagcaacaccattatcgaagtcaatggtaagagggtacgaggcagacagtacccttggggggtcgctgaggtggaaaatggggagcattgcgacttcaccatcttaaggaatatgcttataaggacccacatgcaagacctgaaagacgtcacaaataacgtgcactacgaaaattatcgctccagaaaattggcagcagttacgtataatggtgtagacaataacaaaaacaagggccagctaacgaagagtcctctcgctcagatggaggaagagcgacgggagcacgtcgcaaaaatgaaaaaaatggagatggaaatggaacaagtcttcgaaatgaaagtcaaggaaaaggttcagaaattgaaagactcagaagccgagctgcagaggaggcacgaacagatgaagaaaaacttagaggcccaacataaggaactcgaggaaaagcgcaggcagtttgaggacgaaaaagccaattgggaggctcaacagcggatcctggaacagcagaattccagccggacacttgagaagaacaagaagaaggggaaaattttttag

SEQ ID NO: 30779 - DNA, 708 bp, synthetic construct
  misc_feature 1..708: note = Description of Artificial Sequence: Synthetic coding sequence
  source 1..708: mol_type = other DNA
atgagtgtgagtgcccgttctgctgcagctgaagaaagatccgtaaattctagcaccatgggccagcaaaaaaacctcgaaggatacgtggggttcgcgaacctacctaaccaggtttataggaaaagcgtcaaaagaggctttgaatttaccctgatggtggtgggcgaaagcgggctgggcaaatccaccttaatcaactctctcttccttacagatctctacagccctgagtacccaggaccaagtcaccgcatcaaaaaaaccgtgcaagtagaacaatccaaggtgctcattaaggagggcggtgtgcagcttttgctaacaatcgtggacacccctggcttcggagacgcagtggacaacagtaactgttggcaacctgtgattgactatatcgacagcaagttcgaggattatctcaatgcagaatcaagagtaaatcgacggcagatgccagataacagagtccagtgttgtctgtacttcatagcaccctccggccatggccttaaacctctagatatagaatttatgaagaggctacacgaaaaggttaacataatacccctgattgctaaggcggataccttaactcctgaagaatgtcagcagtttaagaaacagatcatgaaagaaatccaggagcacaagattaagatctacgaattccctgagactgccaagaagaaaaagaagaagaaatag

SEQ ID NO: 30780 - DNA, 1155 bp, synthetic construct
  misc_feature 1..1155: note = Description of Artificial Sequence: Synthetic coding sequence
  source 1..1155: mol_type = other DNA
atggtcgttggggaaagcggcttagggaagtcgacactgattaacagcctttttctcaccgacttgtacagccctgagtatcctggacctagccacaggatcaagaagaccgtacaggtggagcagtctaaagtcctgatcaaggagggcggagtccagctgcttctgacaatcgtggacaccccagggttcggggatgccgtggacaactctaattgttggcagccagtcatcgactacattgactcaaaattcgaagactacctgaatgctgaaagcagagtcaacagaaggcaaatgccggacaaccgggtgcagtgttgtctgtactttatcgcgccttctggccacggacttaagcctcttgatatcgagttcatgaaacgcctccatgagaaagtcaatattatacctctcattgctaaggcggacactttgacccccgaggagtgccagcagttcaagaaacagattatgaaggagattcaggagcacaaaatcaagatttacgaatttccggagaccgacgacgaagaggagaacaagctggttaaaaaaataaaggatcggcttccgttagcagtcgttggatcaaatactatcatagaggtaaatggtaaaagagtcaggggaagacaatatccctggggagttgcagaggtcgaaaacggcgagcactgcgacttcacaatcctgcggaatatgctgatcagaacacatatgcaagacttgaaggatgtgaccaataacgtgcattacgaaaattatcgatcccggaagcttgctgcagtcacgtataacggggtggacaacaataaaaacaaaggtcagctgacaaagagccctctcgctcaaatggaagaagaacggagagagcacgttgctaagatgaagaagatggaaatggaaatggaacaggtgttcgagatgaaagtgaaagagaaggtccaaaagctgaaagactctgaggcagaactgcagagaagacacgaacaaatgaagaagaatctcgaggctcagcataaggagttggaggaaaagagaagacaatttgaggacgaaaaggctaattgggaagcccagcagagaatacttgagcaacagaactcgtcaaggaccttagaaaagaataaaaaaaagggaaaaatcttttag

SEQ ID NO: 30781 - DNA, 1146 bp, synthetic construct
  misc_feature 1..1146: note = Description of Artificial Sequence: Synthetic coding sequence
  source 1..1146: mol_type = other DNA
gttacccatgaaaccattgtcgagcaacagaagaatttggaaggttatgtcgggtttgctaatttacctaatcaggtttataggaagagtgtgaaacgaggatttgaattcacccttatggtcgtgggggagtccggcttaggtaaaagcacccttattaactctctgtttctcactgacctgtactcccccgaatatccaggacccagccaccgaatcaagaaaactgtgcaagtcgagcagtcaaaggttctcatcaaggagggaggggttcaactcctgctcacaatcgtggacacacctgggttcggagacgccgttgataattctaactgttggcagcctgttattgattatattgactctaagtttgaggattatctgaacgccgagtccagggtaaaccgtagacagatgccagataatcgagtccagtgttgcctgtatttcatagccccatccggtcatgggctcaagcccctggatattgagtttatgaaaaggcttcacgaaaaggtgaatattatccccctgattgccaaagccgacactctcacacctgaggaatgtcaacagttcaaaaagcagatcatgaaggagatccaagaacataaaattaaaatttacgagttccccgaaactgacgacgaggaggagaataagctcgtcaaaaaaattaaggaccgacttcctctcgctgtggtgggatccaataccattatagaagtcaatggcaagcgcgtccggggacggcaatacccgtggggtgtcgctgaggtggaaaatggcgaacactgtgactttacgattttgagaaatatgctgattcgcacacatatgcaagacctgaaagatgtgactaataatgtacactacgaaaactaccggtcgcgtaagctggctgccgtaacctataatggggtcgacaataataaaaacaagggacagttaacgaagagtcctctcgcccaaatggaggaggaaaggcgggagcacgtggccaaaatgaagaaaatggagatggagatggagcaagtctttgagatgaaggtgaaggagaaggtgcagaaattaaaggattccgaagcagaagtcatctctcttatcagccacctgttagccgatattgtttttctcttcaagtag

SEQ ID NO: 30782 - DNA, 1149 bp, synthetic construct
  misc_feature 1..1149: note = Description of Artificial Sequence: Synthetic coding sequence
  source 1..1149: mol_type = other DNA
atgggcgaatcggggctgggtaaatccacccttataaactctctgtttctgacagacctgtattcacctgagtatcccggaccaagtcataggatcaagaagactgttcaggtggagcagagcaaagttctgattaaagaaggaggagtgcaactcttgttaacgattgtagacacgccagggttcggcgacgccgttgataacagcaattgctggcaaccagtcatagattacatcgatagcaagtttgaggactatctgaatgctgaatctcgggtgaaccgccgtcagatgccggacaatcgagtccagtgctgcctctactttattgccccatccggacatggattaaagcccctcgacattgagtttatgaaacgactacacgagaaggtgaacattatccctctaattgccaaggctgacaccctcactccggaagagtgtcagcagttcaaaaagcagatcatgaaggaaatccaagagcataagataaaaatctacgaatttcctgagaccgacgacgaggaggagaataagctggtgaaaaaaattaaagataggctgccacttgccgtggtgggttccaacactataattgaagtgaatggaaagagagtgcggggtcggcagtacccttggggagtggcagaggtcgagaatggggaacactgtgacttcacaatcctgagaaacatgttgatccggactcatatgcaagatctgaaagatgtgaccaataacgtacactatgagaattatcggagccgcaagcttgctgcggtcacttataacggggtagacaataataaaaacaagggacaactaaccaaaagtcctctggctcagatggaggaagagcggagggagcatgtagcaaaaatgaagaagatggagatggagatggaacaggtattcgagatgaaagttaaggagaaggtgcaaaaactgaaagactccgaggctgagcttcagagaagacatgagcaaatgaagaaaaacttagaagcccagcacaaggaattggaggagaagcgcagacagttcgaggatgaaaaagcaaactgggaggcccaacagagaattttagaacagcaaaattcaagccggactctcgaaaaaaacaagaaaaagggcaagatcttttag

SEQ ID NO: 30783 - DNA, 1302 bp, synthetic construct
  misc_feature 1..1302: note = Description of Artificial Sequence: Synthetic coding sequence
  source 1..1302: mol_type = other DNA
atggaagtcgtggaccctcaacagctgggaatgtttactgagggagaactaatgtccgtgggcatggatacctttatccatcgcattgactctaccgaggtcatctaccagccaaggcgtaaacgggcaaagcttatcgggaagtatcttatgggagacctgctgggagagggctcatatgggaaagtgaaggaggttctggattcagagactctttgtaggagggccgtgaaaatccttaaaaagaagaaactacggcgtatcccaaacggcgaggcaaatgtcaaaaaggaaattcagcttctgcgacgccttcggcataagaacgtcatacagcttgtggacgtcttatacaatgaggagaagcaaaagatgtatatggtgatggaatactgcgtgtgtggcatgcaggaaatgttagacagcgtgccagaaaagagatttccggtgtgccaggcccatggctatttttgtcagctgatcgacggactggaatatctgcatagccaggggatagtgcataaggatatcaagcctggaaacctgctgctcactaccggcggaaccttgaagattagtgatctgggagtggccgaagctcttcaccccttcgctgcagatgatacgtgtcggacatctcaggggtcccctgcattccagcctccagagatcgcgaacggtctcgacacattcagcggttttaaggtggacatctggtcggccggtgttaccctttataatattactacaggattatacccgtttgaaggggacaatatctacaaacttttcgaaaacataggtaaaggatcttatgccattccaggcgactgtggccctccactgagcgacttgctaaagggcatgttagagtatgaacccgcaaaacggttcagcatacgccagatcagacagcacagctggtttcgaaagaaacaccctccagccgaggctcccgtccctattccaccctctccagatacaaaggacagatggagatcaatgactgtggtcccttatctggaggatctgcatggagctgacgaggatgaggacctgttcgacattgaagatgatatcatttacacgcaggacttcaccgttccaggccaagtgcctgaggaagaggcaagccataatggccagaggcgaggcctaccaaaagcggtctgcatgaatggcactgaggccgcacagctctctaccaagtctcgcgcagagggtagggcccctaaccctgcccgtaaagcctgcagcgcaagcagcaaaattcgacggttaagcgcatgtaagcaacagtag

SEQ ID NO: 30784 - DNA, 1299 bp, synthetic construct
  misc_feature 1..1299: note = Description of Artificial Sequence: Synthetic coding sequence
  source 1..1299: mol_type = other DNA
atggaggtggttgacccccaacagttggggatgtttaccgagggagaactcatgtcagtaggcatggataccttcatacataggatcgacagtactgaggtaatctatcagcccagaaggaaaagagccaagctgatcggtaagtacttgatgggagatctccttggcgagggctcatatggcaaagtcaaggaagtgctggattccgaaaccctctgccgcagagctgtaaaaattctgaagaagaagaaactgagacgaattccgaatggcgaggctaacgtgaaaaaagaaatacagttacttaggaggttaaggcacaaaaacgttatccagttggtcgacgttctgtacaatgaggagaagcaaaagatgtacatggtcatggagtattgtgtgtgtggtatgcaggagatgttggattccgtccctgaaaagcggtttccagtgtgtcaggcccatggctacttttgccagttaattgatggactggagtatctgcacagtcagggtattgtgcacaaggatatcaagcccggaaatttactgctgaccactggcggtacccttaaaatttccgacctgggagtcgcagaggccctccatccattcgcagccgacgacacgtgccggaccagccaaggctcccccgcattccagcccccagaaatcgccaatggacttgataccttttcagggttcaaggtcgacatctggtcggccggagtgactctttataatatcaccaccgggctctatccgttcgagggcgacaacatatacaagctatttgaaaatatcggcaagggatcctacgccatcccaggcgattgcggccctccattgagtgacctactgaaaggcatgcttgagtatgagccagccaagagattcagcatacggcaaatccgccagcattcttggttccgcaaaaaacatccaccagcagaagcgcctgtgccaattcctccttctcctgacaccaaagaccggtggagatcaatgaccgtcgtgccctacctggaagatctccacggcgctgatgaggatgaagacctcttcgatatcgaggacgatataatttatacgcaggacttcactgtgcccggacaggttccggaggaggaagcatcacacaacggccagcggcgaggcctgcctaaggcagtatgcatgaacggtaccgaggcagcacaactgtctaccaaatctcgggcagaagctggccctccaacactgccagccagaccagccgctagcagtaagataaggcggctcagtgcctgtaaacaacagtag

SEQ ID NO: 30785 - DNA, 1248 bp, synthetic construct
  misc_feature 1..1248: note = Description of Artificial Sequence: Synthetic coding sequence
  source 1..1248: mol_type = other DNA
atggaggacctttgcgtggccaatacgctgtttgccttaaatctctttaaacaccttgcaaaggccagcccaacacaaaatttgttcttgtccccatggagcatctcctccactatggccatggtgtatatgggctctcggggatccaccgaggatcagatggctaaggttttgcagtttaacgaggtaggcgcaaatgcagtaactccgatgacccctgagaattttaccagctgtgggtttatgcaacagatccagaagggcagctacccggacgctatattgcaggcacaggcggctgataagattcattccagcttccgctccttatccagtgccatcaatgcatcaacaggaaattacttactcgaatcagtgaataaactgtttggcgaaaagtccgcctctttccgcgaggagtacatcagactgtgccagaaatattattccagcgaaccacaggccgtggacttccttgagtgtgccgaggaagcccgtaagaagatcaactcatgggtcaagactcagactaagggaaagatccctaacttgctcccagaaggctctgttgatggagatacaagaatggtcctggtgaacgcggtgtatttcaaggggaaatggaaaacacccttcgaaaagaaattgaacggcctctaccctttccgggtgaatagcgcccaaagaacgcccgtccagatgatgtacctgagagaaaagttaaatataggctatatcgaggatcttaaggcccagatcctcgaactcccatacgccggagacgtgtcgatgtttctgttgttacccgatgagatcgctgatgtaagcactgggctagaactcttagaatccgagataacatacgataaacttaataaatggacaagtaaggacaagatggccgaagatgaagtggaggtctacatccctcagttcaagctcgaggagcattatgagctccggtcaattctgcggtctatggggatggaagacgccttcaataagggcagagccaacttctctggcatgtccgaaagaaacgacctcttcctttccgaggtctttcatcaggcaatggtagacgtcaacgaggaaggaacagaggctgcagcaggaaccggaggagtgatgactggtcgcaccggtcacggagggccacaattcgtggctgaccacccgtttctgttcttgataatgcataagataaccaattgtatcctcttctttgggagattttcatctccctag

SEQ ID NO: 30786 - DNA, 342 bp, synthetic construct
  misc_feature 1..342: note = Description of Artificial Sequence: Synthetic coding sequence
  source 1..342: mol_type = other DNA
atggaggacctctgcgttgcgaacaccttattcgctctgaatctctttaagcaccttgccaaagcttcacctactcagaatttgttcctctccccttggtctatctcttcaacgatggcaatggtgtacatggggtcacgcggatctacagaggatcaaatggcgaaagtacttcagttcaatgaggtgggagcaaacgccgtgacgccaatgacacccgagaacttcactagttgtggtttcatgcaacagattcaaaaggggtcataccccgacgccattctgcaggctcaggccgcagataaaatccacagtagttttaggagcctgtctagcgcctag

SEQ ID NO: 30787 - DNA, 486 bp, synthetic construct
  misc_feature 1..486: note = Description of Artificial Sequence: Synthetic coding sequence
  source 1..486: mol_type = other DNA
atggaagacctgtgtgtcgcgaataccctcttcgccttaaatctgtttaagcaccttgccaaagcatctcccacacagaatttgtttttatccccctggagcatcagcagcactatggctatggtctatatggggtcccgagggagcacagaggaccagatggctaaggttctgcagtttaatgaggtgggcgcaaatgcagtgacgcctatgacacctgagaacttcacctcctgcgggttcatgcagcagattcagaagggcagctatcccgacgcaatcctgcaggcccaggcagccgacaagatccactctagttttcgcagcttatcctccgccataaacgcgagcactggaaactatcttctggagagtgttaataaactgtttggcgagaagtccgccagtttcagggaggaatacattcggttgtgtcagaagtattattctagcgagccacaagctgtggattttcttgaatgttag

SEQ ID NO: 30788 - DNA, 399 bp, synthetic construct
  misc_feature 1..399: note = Description of Artificial Sequence: Synthetic coding sequence
  source 1..399: mol_type = other DNA
atggaggacttgtgtgtagccaacacgcttttcgccctcaacctgtttaagcacctggccaaagcatctcccacccagaatctgttcctttctccttggtcaatatcatctactatggccatggtttacatgggatcgcgtgggtccactgaagatcagatggcgaaggtactacagtttaacgaagtcggcgctaatgcggttactccaatgactccagaaaatttcacctcctgcgggtttatgcagcagatccagaaggggagttaccctgacgccattctgcaagcccaggccgcagacaaaatacatagttccttccgcagtctcagcagcgccattaatgcctcgaccggcaattacctgttggaatctgtgaacaagttattcggtgagtag

SEQ ID NO: 30789 - DNA, 1248 bp, synthetic construct
  misc_feature 1..1248: note = Description of Artificial Sequence: Synthetic coding sequence
  source 1..1248: mol_type = other DNA
atggaggacctttgtgtagccaacacattgttcgctctgaatctgtttaagcacctcgccaaggcttctccgacacaaaatctcttcttatctccttggagtatctcctctaccatggccatggtttatatgggtagcaggggctccacggaggatcagatggcaaaggtgctgcaatttaatgaagtaggcgcaaatgcggtgaccccaatgacccccgaaaacttcacctcctgcggtttcatgcagcagattcaaaaggggtcataccccgatgccattctgcaagcacaggccgctgataaaatacactccagtttcaggtcgttatcgagcgcaattaacgcctcaacaggcaactatctccttgagtctgtcaataaattgtttggcgagaaaagtgccagcttcagagaggagtatatccggctatgtcaaaagtactacagttcagagcctcaggctgtagatttcctggagtgcgcagaagaggccaggaaaaaaattaactcctgggtaaaaacacaaactaagggaaaaattccgaacctcctgcctgagggatcagtcgacggtgatacccgaatggtgcttgtgaatgccgtgtactttaaagggaagtggaaaaccccattcgagaagaagctgaacggtctctaccctttccgcgttaacagcgcacagaggacccccgtgcagatgatgtatctgcgggaaaaactgaatatcggctatatagaagacctcaaagcgcagattctcgaactgccatacgcaggggatgtatcaatgttccttttactgccagacgaaatcgccgacgtatcgacaggactggaattactcgagtctgagatcacgtacgacaagctaaacaagtggacatctaaggataaaatggcagaagacgaggttgaagtgtatatccctcaatttaagttggaggaacactacgaactgcgcagcatcttgcgctcgatgggcatggaagatgcattcaacaaggggagagccaacttcagtggtatgtcggagcgcaatgatcttttcctgtctgaggtcttccatcaagctatggtcgatgtgaatgaagagggcactgaggctgccgctgggacgggaggagttatgacaggacggacaggccacggcggtcctcagttcgtggcagatcacccttttctatttctgatcatgcataaaatcacgaattgtattctcttctttggccgatttagctctccctag

SEQ ID NO: 30790 - DNA, 2280 bp, synthetic construct
  misc_feature 1..2280: note = Description of Artificial Sequence: Synthetic coding sequence
  source 1..2280: mol_type = other DNA
atggctggactgaccctgtttgttgggagacttcctccgtccgccaggagtgagcaactcgaggaactgtttagtcaggtcggcccagtaaaacagtgcttcgtggtaacagagaagggtagcaaagcgtgtagagggttcggctacgttaccttttctatgctggaggatgtgcagagggcgctgaaagaaattacaacttttgaagggtgtaagatcaacgtgaccgttgccaagaaaaagctgagaaataaaactaaagaaaagggaaaaaacgagaactctgagtgccccaagaaagaacccaaagctaaaaaagcaaaagtggccgacaagaaagcgcgtcttataattcggaatttgtcctttaagtgctccgaggatgacctcaaaacagtgtttgcccagtttggcgcagttttagaagtaaatatccctaggaaacccgacgggaagatgcgaggtttcggcttcgttcaattcaaaaatctcctggaagcgggaaaggctctgaaggggatgaacatgaaggagatcaaaggaaggaccgttgctgtcgattgggccgttgcgaaagacaaatacaaggacacccaaagtgtctccgccatcggtgaggaaaagagccacgaatctaaacatcaggagtctgtcaagaagaaggggagggaagaggaggatatggaagaggaagaaaatgatgatgacgacgatgacgatgacgaggaggacggcgtctttgacgatgaagatgaggaagaggaaaacattgaatccaaagtgacgaagccggtgcagattcaaaaacgagcggtgaagcggcctgctccagccaaaagcagcgaccactcagaagaggacagtgacctagaggagagcgattctattgacgatggggaggagttggcccagtccgacacatccaccgaagaacaggaggacaaagccgtccaggtgagcaataaaaaaaagcgtaagctgccttccgatgtgaacgagggaaaaaccgtgttcatccgcaacctctcttttgacagcgaagaagaggagttgggagagctgttgcagcagtttggggaactaaagtatgttagaattgtgttgcatccagacacagaacatagcaaaggctgtgctttcgctcagttcatgactcaggaggcggcacagaagtgtctactcgccgcttcacccgagaacgaagctgggggtcttaagttagacggaagacagttgaaggtagatctagcggtgacccgcgacgaagccgctaagcttcagacaacaaaagtaaaaaagcccacagggactaggaatctgtacctcgcaagggagggcctgattcgggctggaacgaaagctgccgagggggtgagtgcggctgacatggccaagcgcgaaaggtttgagcttctgaaacaccagaagctcaaggatcagaatatatttgtgtcacggacgagactttgccttcacaacctcccgaaagccgtggatgataaacagctcaggaagttgctactgtcggcgacaagcggcgaaaagggcgtaaggataaaggaatgcagggtaatgcgggacctgaagggagttcatggcaacatgaagggtcaaagcctgggttacgccttcgccgaatttcaggagcacgagcacgcactgaaggccctacggctgatcaataacaaccctgagatttttggccctttgaaacggccaatcgtggagttttcactggaagaccgacggaagctgaaaatgaaggagcttaggatccagagatcactgcaaaagatgaggagcaagcctgcaacaggggagccgcagaaagggcagccagaacctgccaaggatcagcaacagaaggcagctcaacatcacactgaagaacagtcgaaagtgccccctgagcagaaaaggaaagctggctcgacttcttggacaggattccagaccaaggctgaggtcgaacaggtggagctcccagatggaaagaaacggaggaaggtgctcgctcttccctctcatcgtggacccaaaattcgacttagggacaaaggaaaagtgaagccggtgcacccaaaaaaacccaaacctcagattaaccaatggaagcaggagaagcagcagctcagctccgagcaggtgagtaggaagaaagcaaaaggaaacaaaacagagacccggttcaatcaacttgtagagcagtataagcagaagctgctgggcccttccaagggcgctcctttggctaagcgttccaaatggttcgactcatag

SEQ ID NO: 30791 - DNA, 1164 bp, synthetic construct
  misc_feature 1..1164: note = Description of Artificial Sequence: Synthetic coding sequence
  source 1..1164: mol_type = other DNA
atgcaaatgagccctgccctcacatgccttgtcttggggctggccctggtgttcggagaagggtccgctgttcatcaccctcctagctacgttgcgcaggcgagcaaggatagaaatgtggtcttctcaccttatggcgtggcgagcgtgttagccatgttacagctcactaccggcggagaaacacaacagcaaattcaggcggcaatgggctttaaaatcgacgataaggggatggccccagcgctaaggcatctgtacaaggagttgatgggcccttggaacaaggatgaaatctcaaccacagatgccattttcgtgcagcgggacttaaagctggttcaagggttcatgcctcattttttcagactgttccggtccactgtcaagcaagtggattttagtgaggttgaacgggctaggtttattataaacgattgggtaaagacacacactaaaggtatgatttctaatctcttaggcaagggagccgtcgaccagttgaccagactggtcctggtgaacgcgttatattttaacgggcagtggaaaacgccctttccagactctagtacccacagacggttgtttcacaaatccgacggctccaccgtgagcgtgcctatgatggcccagaccaacaaattcaactataccgaattcacaacgcctgatggacattattacgacatcctcgaacttccttatcacggggacactttgtcaatgtttatcgccgcaccttacgagaaggaagttcctcttagtgcactcaccaacatcctaagtgcccaactgattagccactggaaggggaacatgacgcgcctccctcggcttctcgttctgcccaagttctctctggagacagaagtggatctccggaagccgctagagaacctgggcatgactgatatgttccgccaatttcaggccgatttcacctcattgtccgaccaggaaccccttcatgtggcccaggccctccagaaggtgaagatcgaagtgaacgagtcagggactgttgccagtagttctactgccgttatcgtgagcgctcggatggccccagaagaaatcatcatggataggccatttctcttcgtggtgaggcataatccgacgggaacagttctctttatgggccaggttatggaaccttag

SEQ ID NO: 30792 - DNA, 540 bp, synthetic construct
  misc_feature 1..540: note = Description of Artificial Sequence: Synthetic coding sequence
  source 1..540: mol_type = other DNA
atgatggcacagaccaacaagttcaattatacagagtttaccacacctgatggccactattatgatatactggagcttccttatcacggtgataccttgtcgatgtttatcgctgcaccctatgagaaagaggtacctctctctgcactgacaaatatccttagcgctcagctcattagccattggaaaggaaacatgactcggctcccgaggctgcttgtgttacccaaattctctctggagactgaagtagacctgcgcaagcctcttgaaaacctgggcatgactgacatgtttcgccaatttcaagccgactttacctccctgtccgaccaagaacccttacatgttgcccaggccctgcagaaagtgaaaattgaggtcaatgagagcggcacagtggccagctcctcaactgctgtcattgtatctgcgcgaatggcacccgaggagatcataatggataggcctttcctgttcgtcgtgcgtcacaatcccacagggacagtcctcttcatggggcaggtgatggagccttag

SEQ ID NO: 30793 - DNA, 711 bp, synthetic construct
  misc_feature 1..711: note = Description of Artificial Sequence: Synthetic coding sequence
  source 1..711: mol_type = other DNA
atgctttccaagggcctgaaaaggaagcgggaggaggaggaggagaaagaaccccttgcggttgattcctggtggctggacccgggacataccgccgtggcccaggcgccaccagctgtagcttcatcatccctgttcgatctcagtgttctgaagctacaccacagcttgcagcagagtgagccggatcttcgccacctggtgctggtcgtcaatacccttcggcgaattcaagcaagcatggctccagccgctgccctgcctcccgtcccttctcctccggcagccccatcagtggcggacaacttactggcctcctccgacgctgcgctgtctgcgagcatggcatcactgctggaagacctcagtcacattgaaggcctgtcacaagcccctcagccactggcagatgagggacccccaggaagatcaatcggaggggcagccccatcattgggtgcactggatttacttgggcctgccaccggttgtttgctggacgacgggctggaaggtctgttcgaggacattgacactagcatgtacgacaacgagctgtgggcccctgcaagtgagggcctgaagcccggtccagaggacgggccagggaaggaggaggctccagaactggatgaggctgagttggactatttgatggacgtgctcgtgggtacccaggctctcgaacggccaccgggacccggtcgttag

SEQ ID NO: 30794 - DNA, 1527 bp, synthetic construct
  misc_feature 1..1527: note = Description of Artificial Sequence: Synthetic coding sequence
  source 1..1527: mol_type = other DNA
atgttgccgactcaggccggtgctgccgctgcacttgggagagggtccgcattgggaggttctctcaacaggacgcctaccggaaggcccggagggggaggcggaactagaggcgcaaacggaggacgagtgcctggcaatggggcagggttgggtccaggcaggctggagagggaagctgccgctgccgcagcgacaacaccagcccctacagctggagccctgtattcagggtcagagggcgattcggagtcaggtgaggaggaagagcttggggctgagcgtaggggcctaaagcgctcactcagtgaaatggaaattggcatggtggttggagggcctgaagcatcggcggcagctacaggtggatacggccctgtgtctggggctgtgtccggtgccaaaccaggcaagaagacacggggtagagttaaaatcaagatggaattcattgataacaaactccgaaggtacactacctttagtaaaagaaaaaccgggatcatgaaaaaagcctatgagctgagtacccttacgggcacacaggttcttctgctcgtcgcctctgagaccggacatgtttacaccttcgccacacgaaaactgcagccaatgatcaccagcgagaccggtaaggcccttattcagacatgtctcaattctccagatagcccacccaggagcgacccgacaactgatcaaaggatgagcgccaccggcttcgaggaaacggatctgacctatcaagtctccgagtcagactcctctggcgaaacgaaagacacacttaagcctgcgttcaccgttaccaatttgcccggtacaacctccaccattcagaccgcaccctctacatccacgaccatgcaagtgtcatctggcccttcatttcctatcacgaattacctggcccctgtgtccgcatctgtttctccctcagctgttagttccgcaaatggaactgtgcttaaaagcaccggatctggaccagtcagttcaggcggtctaatgcaacttcccaccagcttcacgctgatgcctgggggagcagtggcccaacaggttccggtccaggccatccaggtgcatcaagccccacagcaggctagcccctctcgggattctagcacagatctaacacagactagctctagcggcactgtaactctgccagcgaccatcatgacctccagcgtgccaaccacagtgggcggacatatgatgtacccgtccccccatgcagtaatgtatgccccaacctcgggactcggcgatgggtctcttactgttctgaacgctttcagccaggcaccctctactatgcaggtgtcccactcgcaggtgcaggaaccaggtggcgtcccgcaggtctttctgaccgcctcgagcggtacagtccagatccctgtctcagctgtccagctacatcagatggcagtaattggccagcaggcaggctctagtagcaatctgacagagttgcaggtggttaaccttgacacagcgcattccacgaagtcagagtag

SEQ ID NO: 30795 - DNA, 915 bp, synthetic construct
  misc_feature 1..915: note = Description of Artificial Sequence: Synthetic coding sequence
  source 1..915: mol_type = other DNA
atgatcacatctgagaccggcaaagctctcatccagacgtgtctgaattcaccagactctccccctagaagtgacccaacaacagaccagcggatgagcgccacaggatttgaggaaaccgacctaacataccaggtgagcgagagcgatagctccggagaaacgaaggacaccttgaagccagccttcactgtcactaatctgcccggtacgaccagcactatccaaacagcgccatctacctctaccactatgcaggtgtcctctggtccaagtttccctataacaaattacctggctccggtcagtgctagcgtgtctcctagtgctgtatcgagcgccaatggcaccgtgcttaagtcaaccgggtctggccctgtgagctccgggggactgatgcagttgcctacctcttttactttgatgcctggaggggctgtggcacagcaggttcctgtgcaagctatccaggtgcaccaagcaccgcagcaggcgtctccctccagagattcctccaccgatctaactcagaccagctcgtccggcaccgtgacactccccgcaacgattatgacttcctccgtgccgacaacagtgggtggccacatgatgtatccttctcctcacgccgtaatgtatgcaccaacctcaggcttgggagatgggtctctgactgttctgaacgccttttcccaggctccaagcacaatgcaggtcagtcacagccaggttcaagagcccggaggggttccacaagtctttttgacggcctccagcggtacagtacaaatccctgtttctgccgtacaactccaccagatggcagttattggacaacaggctggatcaagttctaatttaaccgagctgcaagtagtgaaccttgacaccgcacattcaaccaaaagtgaatag

SEQ ID NO: 30796 - DNA, 834 bp, synthetic construct
  misc_feature 1..834: note = Description of Artificial Sequence: Synthetic coding sequence
  source 1..834: mol_type = other DNA
atgtccgctcccgctgccaaagtctctaaaaaggaactgaatagcaatcacgatggagcagacgagacaagtgagaaagagcagcaggaggctatcgaacacatcgacgaagtgcaaaatgaaattgacaggctgaacgaacaggcctcggaagagattttgaaagtggagcagaaatacaataagctacggcaaccgtttttccagaaacgaagcgaattgattgccaagatcccaaacttttgggtaacgacctttgtcaatcatcctcaggttagcgccttgttgggcgaggaggatgaggaggcgctacattaccttacccgcgtcgaagtgaccgaatttgaagatatcaaatctgggtatcgcatcgacttctacttcgacgaaaacccctacttcgagaataaagtcttgagcaaagagttccacctgaacgagtcaggagacccttcctcgaagtccaccgagatcaagtggaaatctggcaaggaccttactaaaagaagttcacagactcagaataaggccagtcgcaaaaggcaacatgaggagcccgaatccttttttacttggtttaccgaccactcagacgccggtgctgatgaactcggtgaggtcattaaggatgacatctggcccaaccccctacagtactacttggtgccagatatggatgatgaggaaggggagggagaagaagacgatgatgacgacgaagaagaggagggtctggaagacatcgacgaggagggggacgaggatgagggagaggaagacgaggatgacgacgagggagaggagggcgaagaggatgagggagaggacgactag

SEQ ID NO: 30797 - DNA, 798 bp, synthetic construct
  misc_feature 1..798: note = Description of Artificial Sequence: Synthetic coding sequence
  source 1..798: mol_type = other DNA
atgcctagaagccaccagccccctccaccaccccacgaaaaggagcaacaggaagcaatagaacacatagatgaagtccagaatgagattgacaggcttaatgagcaggcatccgaggaaattctgaaggtcgagcaaaaatacaacaagctgaggcagcctttttttcaaaagcggtcagaactaattgccaaaatccccaacttctgggttaccaccttcgtcaaccatccacaggtgagtgctctcttgggtgaggaggatgaagaggccctgcactatctcaccagagtggaggtcaccgagttcgaagatattaagagcggttaccgaatcgatttctattttgacgagaacccttacttcgaaaataaggtcttatccaaggagttccacctgaatgagtcaggggaccccagctcaaaatcaaccgaaatcaaatggaaaagcggaaaggacctaacgaagcgatcctcccagacccagaacaaagcaagccggaaacgccaacacgaagagccagagtccttttttacttggtttactgatcactctgacgcaggtgccgacgaacttggagaggtgatcaaagacgacatttggccaaacccactgcagtattacttagtcccagacatggacgacgaagagggagaaggagaggaagatgacgacgacgatgaagaggaagagggccttgaagatatcgacgaggagggcgacgaggacgagggagaggaagacgaggatgatgatgagggcgaggagggggaggaagacgagggagaggacgactag

SEQ ID NO: 30798 - DNA, 801 bp, synthetic construct
  misc_feature 1..801: note = Description of Artificial Sequence: Synthetic coding sequence
  source 1..801: mol_type = other DNA
atgatgcccaggtcacatcaacctcctcctcccccacatgagaaagagcaacaggaggccatcgagcacattgacgaagtgcagaatgaaatcgaccggctgaacgaacaggcgagcgaggaaattctgaaggtcgagcaaaagtacaataagttacgacagccattttttcaaaaacggagcgagctgattgctaagattcctaacttttgggttacgacattcgtgaaccacccacaggtaagtgcgctgctgggagaagaggatgaagaagccttacactacctgacccgcgtggaggtaaccgaattcgaggatatcaaaagcggctatcgtatcgatttttactttgacgaaaacccttactttgagaacaaggtcctttccaaagaattccatctgaacgaatctggtgacccgagtagtaagagcacagagatcaagtggaaatctggtaaagatctcaccaagagaagctcccagacacagaacaaggcctctaggaagcgccaacatgaagagccggagagcttctttacatggttcaccgatcacagtgacgcaggcgctgatgaattgggcgaggtgatcaaagacgacatttggccaaacccactgcaatactacctggtacctgacatggacgacgaggaaggggagggggaggaggatgacgatgatgatgaagaggaggaaggtcttgaagatatcgacgaagaaggagatgaggatgagggtgaggaggatgaagatgacgatgaaggcgaggaaggcgaagaggatgagggcgaggacgactag

SEQ ID NO: 30799 - DNA, 873 bp, synthetic construct
  misc_feature 1..873: note = Description of Artificial Sequence: Synthetic coding sequence
  source 1..873: mol_type = other DNA
atggcccctaagcgacagtcccctctaccgcctcagaagaagaaacccaggcccccacctgccttaggccctgaagagactagcgcttcggccggactgccaaagaaaggcgagaaagagcagcaggaggcaatcgaacatattgacgaggtacagaatgagatcgaccggctgaacgaacaggccagcgaggagattctgaaggtcgagcagaagtataacaagctgagacagcccttctttcagaaacggagcgaactgatcgcgaaaattccgaacttttgggttacaacatttgtgaaccatccccaggtgagcgccttgctcggcgaagaagacgaagaggcactgcattacttgaccagggtcgaggtgacggaatttgaggacatcaagagcgggtatagaatagacttctacttcgacgagaatccttatttcgagaacaaagtgctaagcaaagaatttcacctgaatgaatccggagatcccagcagtaagtcaactgagatcaaatggaaatctgggaaagatttaactaaacggtcaagccaaacccagaacaaggcatccagaaaacgtcagcacgaggaacctgagtccttttttacgtggtttacagatcactcagacgcaggcgcagatgagctgggcgaagtgatcaaagatgatatctggccgaaccccctccagtactacttagtgcctgatatggacgacgaggaaggagagggcgaggaggacgacgacgacgatgaagaagaagagggccttgaagacatcgatgaggagggagatgaggacgagggagaggaggatgaggacgatgatgagggtgaagaaggagaagaggatgaaggtgaggacgactag

SEQ ID NO: 30800 - DNA, 807 bp, synthetic construct
  misc_feature 1..807: note = Description of Artificial Sequence: Synthetic coding sequence
  source 1..807: mol_type = other DNA
atgggctgccgagatcttttgccatctctcaagcccacactgcttgaaaaggaacaacaagaggccatcgagcacatagatgaagtccagaacgagatagaccggcttaacgagcaggcaagcgaggagattctgaaagtggagcagaaatataataagcttcggcagccattcttccagaaaagatccgaattgattgcgaagatcccaaacttttgggtgaccaccttcgtcaaccacccgcaggtaagcgcattgctgggggaagaagacgaggaagctctgcactatctgaccagggtcgaggtgaccgaattcgaagatattaagtctggttacagaatcgacttctactttgacgagaatccttacttcgagaataaagtcctgtcaaaagaattccatctgaacgagtctggggatccttctagcaagagcaccgagattaagtggaagagtgggaaagatcttaccaagcgttcctcacagacgcaaaataaagctagtaggaagcggcagcacgaggaaccagaaagcttctttacatggttcaccgaccattcggatgctggagccgatgagcttggggaagtcatcaaggatgatatttggcccaaccctcttcagtactatttggtgccggatatggatgatgaggaaggggaaggcgaggaggacgatgacgacgatgaagaggaggagggcctagaagacatcgatgaggagggagatgaggacgagggtgaggaggacgaggatgatgatgagggagaagaaggtgaagaagacgaaggggaagacgattag

SEQ ID NO: 30801 - DNA, 99 bp, synthetic construct
  misc_feature 1..99: note = Description of Artificial Sequence: Synthetic coding sequence
  source 1..99: mol_type = other DNA
atggcgcctaagagacaatctccgcttccaccacagaaaaagaagccaagaccaccacctgccctgggacccgaagaaacttcggcctcagccggttag

SEQ ID NO: 30802 - DNA, 942 bp, synthetic construct
  misc_feature 1..942: note = Description of Artificial Sequence: Synthetic coding sequence
  source 1..942: mol_type = other DNA
atgactggcaaggcaactcctccctccctctattcgtggcgaggcgtcctgttcacttgtttgccagccgcacggacccggaagcgaaaggaaatgagccggcagaccgcaacggccctaccaacgggtactagcaagtgtccgccatctcagcgcgtgccggcacttacagggaccactgcctccaataacgacctggcatcacttttcgagtgtcccgtttgttttgattacgtcctacctcctatcctacagtgccagtccggccacttagtctgctcaaactgtcggccaaagctgacctgctgcccaacgtgccgcggaccattgggctcaatcagaaatttagccatggagaaagtggctaactcagtgctgtttccttgtaagtatgcgagctcgggttgtgaaatcactttgccccatacagagaaagccgatcacgaggaactctgtgagtttaggccatactcctgtccatgccccggagcttcctgcaaatggcaaggcagtctggacgccgtcatgccacatctcatgcaccagcataagagcataaccacgctccaaggagaggatatcgtatttctcgccaccgacatcaacctccctggtgctgtcgattgggtcatgatgcagtcctgcttcggtttccacttcatgctcgtactggagaagcaagagaaatacgacggtcaccagcagttcttcgcgattgtccagctcattggcacccgtaagcaggccgaaaatttcgcgtatagactagagttaaatggacacagaagaagattaacctgggaggccaccccgagaagtatacacgagggaattgccacagccataatgaactcagactgccttgtctttgatacatctatcgcccaattatttgccgaaaacggaaacctgggtatcaacgtgacgatttccatgtgttag

SEQ ID NO: 30803 - DNA, 897 bp, synthetic construct
  misc_feature 1..897: note = Description of Artificial Sequence: Synthetic coding sequence
  source 1..897: mol_type = other DNA
atggtcattatcattttccttctgcccccttacgtatttatctctgagatgagcagacagacagccactgccttacctaccggcacctccaaatgtcccccaagccagagagtgcctgctttaaccggcacaacggctagcaataacgatctggctagtctgtttgaatgtcccgtgtgcttcgactacgtgctgccaccaattttacagtgccaatctggacaccttgtgtgtagtaattgtagacctaaactcacctgctgccccacttgcagaggccctctcggttctataaggaacttggcgatggagaaagttgcaaattcagttttgtttccttgcaaatatgcatcaagtggctgcgagattactctgcctcatacagaaaaggcagaccatgaagagctgtgcgaattcaggccctatagttgcccctgccctggtgcaagctgcaagtggcaggggtcactggacgcggtgatgccccaccttatgcaccagcataaatcgatcacaacactacaaggtgaagacattgtctttctcgcaactgatatcaatcttcctggagccgttgattgggtgatgatgcagtcttgctttggtttccacttcatgctagttttggaaaagcaggaaaaatatgatggacaccagcagttttttgccattgtgcagcttattgggacgaggaaacaggctgagaacttcgcctacagacttgaactcaatggccatagaagaaggctgacctgggaggctacccctcgatctatccatgagggcatcgcgacggccataatgaatagcgactgcctggtctttgatacctccatcgcccagttattcgcagagaacgggaacctcggaattaacgttacaatttctatgtgctag

SEQ ID NO: 30804 - DNA, 849 bp, synthetic construct
  misc_feature 1..849: note = Description of Artificial Sequence: Synthetic coding sequence
  source 1..849: mol_type = other DNA
atgagccggcagacggctactgccctgcccacgggcacatcaaagtgtcctccttcccagcgtgtgccggctctgactggtacaaccgctagcaacaacgacctggcgtccttatttgaatgccccgtatgttttgattacgtccttccacccatactgcaatgccagtctgggcaccttgtttgctccaactgcaggcctaagctcacatgctgccctacatgcagggggcctctcggatcaattcgaaatctcgcaatggaaaaggtcgcaaattctgttctatttccctgtaaatacgcttcttctggttgcgagattacgcttccacacaccgaaaaggcagatcacgaggagctctgcgaattccgcccatatagctgcccatgcccaggcgctagctgcaagtggcagggaagtctggacgcggtgatgcctcacttgatgcatcagcacaagtcaataaccaccctgcaaggtgaggacatagtgtttttggcaactgatataaatctccccggtgctgtggattgggtcatgatgcagtcttgctttggattccatttcatgctagtactagaaaagcaggagaagtatgacggccaccagcagttttttgcaatcgtgcagctgattggcacccgaaagcaagctgagaatttcgcttaccggctggaacttaacggacacaggcggaggttaacctgggaggctacccccaggtctattcatgaaggtattgctactgccattatgaacagcgattgccttgtctttgatacgagtattgcccagctgttcgccgagaacggcaacttgggtattaatgtcacaatctccatgtgctag

SEQ ID NO: 30805 - DNA, 708 bp, synthetic construct
  misc_feature 1..708: note = Description of Artificial Sequence: Synthetic coding sequence
  source 1..708: mol_type = other DNA
atgacgttcgatctgaccaagatcactaagacttcttcctccttcgaggtgaggacctgggatccggaaggtgtgattttctacggggacacgaacccaaaagatgattggtttatgctggggcttagagacggcagaccggagatccaattacacaatcactgggcacagttgacagtcggagccggacccagactggatgacggacggtggcaccaagttgaggtgaaaatggaaggcgactccgtgctgttagaagtggacggggaagaggtcctgaggctgcgtcaggtaagcgggcctttaacaagcaagagacatcctataatgaggatagcactggggggtctactcttccccgctagtaatctgcgactccccttagtaccagcgctggatggatgtctccgtagagactcttggctggataagcaggccgaaatatccgcgagcgcgcctaccagtctgcgctcatgcgatgtagaatccaaccccggtatatttctgcccccaggcacacaagccgagttcaacttacgggacattccacagccgcatgcggaaccctgggcctttagtctggatcttggcctaaagcaggctgcgggaagcgggcatctgctagccttgggtacacctgagaatccttcctggttatctctccatttacaagaccaagaaaagactctaccacccctctttgcttag

SEQ ID NO: 30806 - DNA, 1209 bp, synthetic construct
  misc_feature 1..1209: note = Description of Artificial Sequence: Synthetic coding sequence
  source 1..1209: mol_type = other DNA
atggagtcgcgcggtccccttgccaccagtcgcctgctcctcctattgctcctcctcctgctgcgccacacacgacagggctgggcactccgccctgtgctgcccacccagagcgctcatgaccccccagcagtgcatctatcaaatggtccaggccaagaacccatcgctgtgatgactttcgacctcacaaagatcactaagacttctagttcattcgaggtccgaacctgggatccggaaggcgtaattttctatggagacaccaaccctaaagatgactggtttatgctgggcctccgagatggaagacctgagattcagctccacaatcactgggcccagcttaccgtgggcgcaggccctaggctcgatgacgggcgttggcaccaggtggaggtgaagatggaaggagatagtgtgctcctcgaggtggacggagaggaagtgctgcggctccgccaggtttctggacccctgacctcaaagagacaccccatcatgagaatcgccctgggcggtctgctcttccccgctagcaatctgaggttgcctctagtacctgcccttgatggatgcttacgaagagatagctggttggataaacaggctgagatctctgccagcgccccaacgtcccttcgatcgtgtgatgtggaatccaatcctgggatcttcctaccgccaggcacccaagctgagtttaatctacgcgacatacctcagccccacgccgagccttgggcttttagcctggatttaggtctcaaacaagccgctgggtccggccacctgttggcccttggtacgcccgagaaccctagctggctaagcctacacctgcaggatcagaaagtcgtgctctcgtctggttcaggcccaggactagacctgcctctcgtgctgggcctcccgcttcagctgaaactgtcaatgtctcgggtggtactctctcagggctcaaagatgaaagcccttgcacttccacctttaggcctggcaccactgcttaatctctgggcgaaaccgcagggtaggctcttcctgggtgcactcccaggggaagactctagtaccagcttttgtctcaacgggttatgggcccaagggcagcgactggacgtggaccaagccctgaatcggtcccacgagatctggacacacagctgcccacagagcccgggtaacggcacggacgcatcacactag

SEQ ID NO: 30807 - DNA, 882 bp, synthetic construct
  misc_feature 1..882: note = Description of Artificial Sequence: Synthetic coding sequence
  source 1..882: mol_type = other DNA
atggaatcgagaggccctctcgctacgtctcgactcttgttactgctgcttctgctgctgttgcggcatacccggcaagggtgggccctgcgcccagtgctgccaactcagagcgcccatgacccacctgccgtccatctctccaacgggcctggccaggaacctatcgcagttatgaccttcgacttaaccaaaattactaaaacctcctcatcttttgaagtgagaacctgggatccagagggagtcatcttctacggagataccaatcccaaagacgactggttcatgttaggcctgcgcgacggcagaccagagatccagctccacaatcactgggctcaactgactgtgggggctggcccacgtcttgatgatggaagatggcatcaggtagaggttaagatggaaggggactctgtgctgctggaggttgacggcgaagaggtgttgcggctacgtcaggtatccgggccacttacttcaaaacgccacccaattatgaggatcgctctaggcggactgctgttcccagcaagcaatctgcgcttacccttggtccctgccctcgacgggtgcctgagaagggactcttggttggataaacaggctgaaatctcagcgagtgccccaacatcactcaggtcctgcgacgtcgaatcgaaccccggtatatttctgcccccaggcacacaggcagaattcaacctcagagatattccacagccccatgctgagccttgggcattcagcctcgacctcggcctcaagcaagcggcaggatccggccacctacttgccttaggcacgccagaaaatccttcttggctctcactacatctgcaggaccaggagaaaacccttccacctctttttgcgtag

SEQ ID NO: 30808 - DNA, 720 bp, synthetic construct
  misc_feature 1..720: note = Description of Artificial Sequence: Synthetic coding sequence
  source 1..720: mol_type = other DNA
atggaatcccggggtcccttggcaacgtctagacttttgctgctgctcttgctgctgcttcttaggcacactcggcagggttgggcgcttcgccctgttttacctacgcagtccgcacacgaccccccagctgtgcacctcagtaatggccctggtcaggagcccatagctgtgatgacctttgatctgaccaagattactaaaaccagctctagctttgaggtccgaacttgggatcctgaaggcgtgattttttacggcgacaccaaccctaaggacgactggttcatgttgggcctacgcgacggcagaccggagatccagttgcacaaccattgggctcaactcaccgttggggcagggcctcgccttgatgatggcagatggcatcagctagtacccgcactggatggctgcttgaggcgggactcctggctcgacaaacaggccgagattagtgcttccgccccaacgtccttgaggagctgtgacgtcgagtccaaccccggtatcttcctccccccaggaacgcaggctgaattcaacctacgcgacatcccacaacctcacgcagaaccgtgggccttctcccttgacctggggttgaagcaggccgcaggcagtggccatcttctggccctcggcacccctgagaatcccagttggctctctctccatttgcaggaccaggaaaaaaccttacccccattattcgcatag

SEQ ID NO: 30809 - DNA, 864 bp, synthetic construct
  misc_feature 1..864: note = Description of Artificial Sequence: Synthetic coding sequence
  source 1..864: mol_type = other DNA
atggaaagcagaggtcccctggccacaagtcgcttactgctgttactcctcctcttactgctgagacatacaagacagggctgggccctgcgacctgtgcttcctacacaaagtgcccatgaccccccagccgtgcacttgtccaatgggcctggccaggagcctattgcagtaatgaccttcgacctaaccaagataacaaaaacttcaagctcttttgaggttagaacttgggatcccgagggtgtcatattctatggtgacactaaccctaaggatgactggtttatgttgggcttgcgtgatggtaggccagagatacagcttcacaatcattgggcccagttgacagtgggcgctggacccaggttggacgatggaaggtggcaccaggtggaggtgaaaatggagggcgacagcgtcctgttggaggtggacggggaagaggtgttacggctgaggcaagtgagcgggccactcacaagcaagcgacacccaataatgcggatagctctgggcggactgctgttccctgcatccaatctgcgactgcccctggtgccagctcttgatggctgccttagacgcgattcctggcttgacaaacaggcagaaattagcgcttcagcaccgacctccctgaggagttgcgacgttgaaagcaacccgggaattttcctcccccctggtacccaggccgagttcaatttgagaggcgaggactccagcactagcttttgcctgaatgggctgtgggcacaggggcagaggttggatgtggatcaggccctaaaccgctcacatgagatctggactcatagctgcccacagtctccgggaaacgggacagacgcctctcactag

SEQ ID NO: 30810 - DNA, 423 bp, synthetic construct
  misc_feature 1..423: note = Description of Artificial Sequence: Synthetic coding sequence
  source 1..423: mol_type = other DNA
atggaatcaagaggacccttggccacctctagactgcttctccttctgctgctgctcctgttacgtcacactcgccagggctgggcactgcgccctgttctgccgacacagtcagcccacgatccacccgctgtgcacctgagcaatggtccaggccaggaacccattgccgtcatgacatttgatctcaccaagattactaagacctccagttctttcgaggttaggacctgggaccctgaaggggtcatattttatggcgacaccaatccaaaggatgattggtttatgctgggcctaagagatggtcggcctgagatccagctgcataaccactgggcacagctgactgttggagcaggacctagacttgacgatggacgatggcaccaggagaagacattacccccactgtttgcctag

SEQ ID NO: 30811 - DNA, 1155 bp, synthetic construct
  misc_feature 1..1155: note = Description of Artificial Sequence: Synthetic coding sequence
  source 1..1155: mol_type = other DNA
atggaatcaaggggccctcttgccacatctagattactgctgctgctattgttactgttacttcgacacacccgacaggggtgggctctgcgccctgtgctcccaacacagtccgcccatgatcctcctgcagtacacctgagcaatggcccagggcaggaacctattgcggtcatgacattcgacctaactaagatcacgaagaccagcagctcgttcgaagtgcggacctgggatcctgagggcgtgatcttttacggggacactaatcctaaggacgactggttcatgctgggtttgagggacggtagacccgaaatacagctgcacaaccactgggctcaattaacggtgggggctggtccgcgtctggacgatggcagatggcaccaggtggaagtgaaaatggaaggagactccgttcttcttgaggtcgacggggaagaagtgttgcggctgcggcaggtgtcaggtcctctgacaagtaaacgccatccaattatgcgcatcgctctggggggactgctgtttcctgccagtaacctccgtcttcctgcagaaatctcagccagcgcaccaacaagtctgcggtcttgcgatgttgagagcaatccaggcatttttctgcctcccggaacccaggccgagttcaacctgcgggacatcccccaaccccatgccgagccgtgggcattcagcctcgacttggggctcaagcaagctgccggtagtggccacctcctcgcactcggcactcccgaaaatcccagttggctcagtctccatttacaggatcagaaagtggtcttgtcaagcgggtcaggacccggactggacctcccacttgtgctggggctgccactgcagctcaaactttccatgtcccgggtcgttctttcccaggggtcaaaaatgaaagctcttgcccttcctcctctgggactagctcctctcttgaatctgtgggccaagccccaaggaaggctgtttcttggggctctgccgggagaggactccagcacatccttttgcctgaacgggctctgggcgcagggccaacggctcgacgtggaccaggcacttaatcgcagccacgaaatttggacacattcttgcccccagagtcctggtaatggcactgacgccagccactag

SEQ ID NO: 30812 - DNA, 1116 bp, synthetic construct
  misc_feature 1..1116: note = Description of Artificial Sequence: Synthetic coding sequence
  source 1..1116: mol_type = other DNA
atgtcaccctccaccttccagataaccgatatgactagaagatcgtgccagaatttgggctatactgccgcatcaccacaggcacctgaagcagcctccaataccgggaacgctgagcgcgcagaggaagtgccgggagagggctctcttttcctgcaggccgagaccagggcctggttccagaagactcaggcacactggctcctccagcacggggctgccccagcgtggtttcacggtttcataactagaagggaagcagagagactgttggagcctaaaccccagggatgctatctggttcgattttctgaatctgcagtgacctttgtgctcacatacaggtctaggacctgttgccgccactttctgttggcccagctgcgcgatgggcgtcacgtcgtgttgggggaggactccgcacacgccagattgcaggacctgctcctgcattacactgcacacccgctttcaccctatggagagaccttgactgagcccctagctcggcaaaccccagaaccggcaggactttcccttcgcaccgaagaatcaaattttggctctaaaagccaggatcccaatcctcagtatagccctataatcaagcagggtcaggcgccagtacctatgcagaaagagggggcaggcgagaaagaaccttcgcagttgctgcgccctaaacccccaattcccgcaaagcctcagctccctcccgaggtctatacaatacccgtgccaagacataggcccgctccccgtcccaagcccagcaatcctatttataacgaaccagatgaacccattgcgttctatgccatgggccgaggaagcccgggagaagccccttcaaacatttatgtcgaagttgaggatgaagggctccctgcaacccttgggcacccagtactgagaaagtcatggtcccgtccagtcccaggaggacagaacacaggtggaagccagctgcactcagagaattctgtgattggacagggcccaccgctgcctcaccaaccaccccctgcgtggcgccatacgctgccccataacctatccagacaggttctgcaagaccggggtcaggcttggctacccctggggcctccacagtag

SEQ ID NO: 30813 - DNA, 1170 bp, synthetic construct
  misc_feature 1..1170: note = Description of Artificial Sequence: Synthetic coding sequence
  source 1..1170: mol_type = other DNA
atggagttccctctggcccaaatctgtccgcagggctcgcatgaggccccaattccaacattcagcacgtttcaaataaccgacatgacaaggagatcctgtcaaaacctgggctatactgctgcgtcacctcaagctcccgaggctgcatctaatacgggcaatgctgagcgagccgaggaggtgcctggggagggcagcttatttctacaggctgaaacacgagcgtggttccagaaaacccaggcccactggctgctccaacacggagctgcgcctgcctggttccatgggtttattactagaagggaggccgagcgcctgctggagccaaaaccccaggggtgctaccttgtgcgcttctctgagagcgccgtgacttttgtactcacttatagatcaaggacttgttgcagacactttctcttggcacagctcagagatggcaggcacgtcgtcctgggagaggattccgctcacgctagactacaggatttgctcttgcactatactgcccatcccctcagcccatatggggaaactctgacggaaccccttgcacgccagactcccgagcctgccggtctgagcctgaggaccgaggagagtaactttggttccaagagccaggaccctaacccccaatactccccaattattaaacaggggcaagctcctgtcccgatgcaaaaggagggagccggtgaaaaggagccctcccagttgttgcgtcctaagcccccaatcccagctaagcctcaacttcctccagaagtgtacaccatcccggtcccaagacaccggcctgccccacggcctaagccaagcaatcccatctacaacgaaccggatgagcctatcgccttctatgctatgggccgagggagccctggagaggccccaagcaacatttatgtcgaagtcgaagacgagggtcttccagccacgctggggcacccagtgctccggaagtcctggtcccggcctgttccaggcggacaaaacaccggaggcagtcagctgcactcggaaaactcagtgataggccaagggcctcccttaccccaccagcctccccctgcatggcgccacaccctacctcacaatcttagccgacaagtgctgcaagatagggggcaggcttggttgcctctaggaccaccccagtag

SEQ ID NO: 30814 - DNA, 1200 bp, synthetic construct
  misc_feature 1..1200: note = Description of Artificial Sequence: Synthetic coding sequence
  source 1..1200: mol_type = other DNA
atggagttccccttagcccagatctgcccgcagggctcccatgaggctcctattcctaccttttcaacattccaaattactgacatgacccgacggtcttgccagaatctcggctacaccgctgcaagcccgcaggcccctgaagcggcatctaacacggggaatgccgagcgcgctgaggaggtgccgggagagggctctttgtttctacaagctgaaaccagggcatggttccaaaaaactcaggcgcattggcttttgcagcacggggcagctccagcttggttccatggctttattacgcgacgagtgcgaccccctctgtccgtgacccatcgggaggcggagaggctcctggagcctaaaccacagggttgctacctggtccggttcagcgagtctgcagtcacttttgtgttgacttaccgatctcgcacatgttgcaggcacttccttcttgcccaactccgagatggacgccacgtggtgctcggtgaagactccgcacacgcacgcttgcaagacctgttactgcactacacggctcaccccctgtcaccttatggggaaactctgacagagccactcgccagacagactccagaacctgccggtttgtccctgaggaccgaagaatccaatttcggaagcaaatcgcaggatcctaacccccagtattcacctattataaagcagggtcaagccccagtacctatgcagaaggagggggcaggcgaaaaggagccttcacagctgctaagaccaaagcctccaattccagcaaaaccacagttgcctcccgaggtttacacgataccagttccccgacaccgccctgcaccaagacctaagccatccaatcccatctacaacgagcctgatgagccaatcgcattctacgccatgggcagaggatcgccaggcgaagccccatccaacatctacgtggaggtggaagatgaaggtctaccagctactctggggcatccggtgcttagaaagagttggtcgcggcctgtgcccggtggccaaaacacaggaggcagtcaattgcattccgaaaacagtgttatcggccagggccctcctcttccgcatcagcctcctcctgcttggcgtcacactctcccccataatctgtcaaggcaagtcctgcaagaccggggtcaggcatggctgccattgggcccaccccaatag

SEQ ID NO: 30815 - DNA, 2823 bp, synthetic construct
  misc_feature 1..2823: note = Description of Artificial Sequence: Synthetic coding sequence
  source 1..2823: mol_type = other DNA
atgattttagagcaatacgtcgtggtgagcaactataagaaacaggagaacagcgaactgagtttacaggcgggagaagtagtggacgtgatcgaaaagaacgagagtgggtggtggtttgtgagcacaagcgaagagcagggctgggtgccagccacgtatctcgaggcacaaaacgggactcgcgacgattctgatattaatacctcgaaaaccggagaagaggaaaagtacgtgaccgtgcagccctatacaagccagagcaaggatgagattggcttcgagaagggagttaccgttgaagtgattagaaaaaacctcgagggatggtggtacatcagatatctgggtaaagagggatgggcccctgcatcctacctcaaaaaggcaaaggatgatctgccgacccgcaaaaagaatctggcaggtccagtagagattatcgggaatatcatggaaatctctaacctattgaacaagaaagcttcgggggacaaagagacacctcccgctgaaggcgaaggccatgaggcgccaattgctaagaaagagatttccctgcctatcctatgtaatgcttctaacggatcagcggtaggagtgcctgacagaaccgtaagccggctggcgcagggaagtcccgcagtcgccagaatcgccccacagcgcgcacagatttcctctcccaatctgcgcacccgcccacctccgaggagagagtcctctctgggattccagctgcccaaaccaccagaaccccctagcgttgaagtcgagtactatacgatagcagaatttcaaagttgtataagcgacggaatcagcttccgcggtggccagaaggcagaagtcattgacaaaaattccgggggatggtggtacgtgcagattggtgaaaaagaaggctgggctcccgcatcctatatcgataagcgcaagaaacccaatctgtcccgcaggaccagcaccctcacccgccctaaggtcccacctccagcccctccctcgaagcctaaagaggctgaagagggacctaccggcgcatccgagagccaagattcaccgagaaaactcaaatacgaagagcccgaatatgatataccagcctttggattcgacagcgaaccagaactgtccgaagagcccgttgaggaccgggcttccggggagcggaggcccgcacaaccccatagacccagccctgccagctctcttcagcgagccagattcaaggtaggcgagtcaagtgaggacgtggcgctggaagaagaaaccatctacgagaatgagggattcagaccatatgccgaggacaccctgagcgctcgaggttcaagcggagacagcgacagccctggaagttcctctctctccctgactcgaaagaacagtcccaaaagtggtagcccaaaatctagcagtctgttgaaactgaaagcagagaagaacgcccaggctgaaatggggaaaaaccatagttcggcttccttttcaagtagtatcactattaatactacttgctgttcatcctcctcatcaagctcttcttctctttccaaaacgagcggggacttgaaaccacgatctgcttcagacgccggaataagaggaactcctaaagtcagggccaagaaggacgccgacgcaaatgctgggctcacgagctgtcccagagccaagccttcagtccggccaaaaccatttctcaaccgggctgagagccagtctcaggagaaaatggacatctccaccctccggagacagctgaggccgaccggacagttacggggtggattgaaggggagcaaatccgaagattcagagcttcccccacagactgctagcgaggcgccatccgagggaagcaggcgatcgagtagcgatttgattactctaccagccacaacacccccatgccccacaaaaaaagaatgggaaggtcccgctacctcgtacatgacctgctctgcataccagaaagtacaggacagtgaaatttctttcccggctggggtggaagtccaggtccttgagaaacaggaatcgggatggtggtatgttcgcttcggtgagttagaaggctgggctccctcacactaccttgtactggacgagaatgagcaaccagatccatcgggtaaggagcttgatactgtcccggcaaagggcaggcagaatgagggtaagagtgattctctggaaaagatcgaacggagagttcaggctcttaatacagtgaatcagtctaagaaagcaactcctccaattccaagcaaaccaccaggcggattcgggaagacttccggcacccccgcagtcaagatgcggaatggagtgcggcaagtcgctgttcgcccacagtcagtttttgtatcacccccaccaaaggacaacaatctgagctgcgctctgcggaggaacgaaagtctcacagctacagatggcctgcggggagtccgaagaaatagcagctttagtactgcacggtccgccgcagccgaagccaagggtagactcgccgaacgggcagcatcccaaggtagcgacagtcctctcctgcccgctcagcgcaactcgataccagtgagccctgtgcggcctaaacccattgagaagtctcagttcatacacaacaacttgaaggatgtgtatgtgtcaatcgccgactacgaaggggatgaagagacagcgggattccaggaaggcgtgtctatggaggtactagagcggaacccgaacggctggtggtactgccagatcctcgacggtgttaaaccttttaaaggatgggtcccaagcaattacctagagaagaagaactag

SEQ ID NO: 30816 - DNA, 3318 bp, synthetic construct
  misc_feature 1..3318: note = Description of Artificial Sequence: Synthetic coding sequence
  source 1..3318: mol_type = other DNA
atgctggcctactgcgtccaggacgccacggttgtggacgtggagaaacggaggaatccctccaagcactacgtctacatcataaacgtgacttggtccgactccactagtcagactatttatagaaggtactccaagttctttgacctacagatgcagctgttggataaatttcctatcgaaggagggcagaaagatcccaaacagcgcatcataccgttcttaccgggaaaaatactcttccgcaggtctcacattagggacgtggctgtgaaaagactgaaacctattgacgagtactgtcgggctctcgtcaggttacccccacacatttcgcagtgtgacgaggtgttcagattttttgaggctaggcccgaagacgtgaacccccctaaggaggattacggttcttcgaagcgcaagtccgtgtggctctcatcctgggctgaaagtcccaaaaaggacgtgactggtgctgacgcaacagctgagcccatgatattagagcagtacgtcgtagtctcaaactataagaaacaggaaaattctgaactgagtttacaggccggagaggtggtggacgttatagagaagaacgagagcggatggtggtttgtatctaccagtgaggaacagggctgggtgccggctacctacctggaagcccaaaatggaacgcgcgatgactccgacatcaatacatctaaaactggcgaggaagaaaagtatgtgacggtgcaaccatatacaagccagtccaaggacgagatcggttttgaaaaaggggtgacagtggaggttattcgtaagaacctggaagggtggtggtacattcgctatctgggtaaggagggttgggcccctgcctcttatttgaagaaggctaaagatgatctgccgacgcgcaaaaagaatctggctgggccagttgagatcattggaaacatcatggagattagtaatttgctcaataaaaaggccagtggcgataaagagaccccacctgctgagggcgaagggcacgaggctccaatcgctaagaaggaaatatccttgccaattctttgtaatgcatccaatggaagcgctgtgggtgtgccagacaggaccgtctcccgcctagctcagggaagccccgcagtagcgaggattgcccctcagcgcgctcaaatcagttcaccgaaccttagaacacgacctccgcctcgtcgggaatcctccctgggattccaactccctaagcccccagagcctcccagcgtagaggtggagtattacacgatcgctgagttccagagctgtattagtgatggtatttctttccggggaggccaaaaggcagaggtgattgataagaactctggcggatggtggtacgttcaaattggggagaaggagggatgggcccctgccagctatattgacaagaggaaaaagcccaacttgtcccggaggacctctaccttgacccggccaaaggttccgcctccagcgcctccgtctaaaccaaaagaggctgaggagggtcccactggcgcaagcgagagtcaggatagccccagaaagctgaagtacgaggaacctgagtacgacatacccgcattcggtttcgatagtgaacccgaactgagcgaagaaccagtggaggatcgagctagcggcgaaaggaggcccgcacagcctcatagaccctccccagcgagtagcttgcagagagcaaggttcaaagtcggagagtcttccgaggacgttgccctggaggaggagaccatttacgagaatgaaggattccggccatacgcagaggatacacttagcgcaagagggtcatccggcgattcggacagtcccggttcgtcctctctttctctgacccggaagaattccccaaaaagtggtagccctaagtcgtcctctctgctcaagctgaaggcagaaaaaaatgcccaggcggagatgggcaaaaaccacagctcagcatcatttagtagttctatcaccatcaacaccacctgctgtagtagcagctcttctagctcatcctctttgtccaagacctctggcgacctgaaaccacgcagtgcaagcgacgccggaattcgcggaacaccgaaggtgagagcaaagaaagatgccgatgccaatgctggtctcaccagttgtccccgagcgaagccctccgtaagacctaagcccttcctgaatagggccgagagtcagtctcaggagaagatggacatctctacactgcggagacaattaagaccgaccggacagctgcggggaggcctgaaagggtctaaatccgaggattccgagcttccccctcagactgcctcagaggctcctagcgagggatccaggagatcgtcgagtgatctgatcaccctgcccgcaacaaccccgccttgtcccactaaaaaggaatgggaagggcctgccaccagctatatgacctgcagcgcataccagaaagtgcaggatagcgagatctcgttccctgcgggagtcgaagtgcaagtgttagagaaacaggaatctgggtggtggtatgtgaggttcggcgagctcgagggctgggccccaagccattacttggtgctggatgagaatgagcagcctgacccctctgggaaagagctcgacacagtgccagcgaagggcaggcagaacgagggcaaaagtgatagcctggagaagattgagcgacgagtccaggctctgaacaccgttaatcagtctaaaaaggcgaccccccctattccttcaaagcctccaggcggatttggtaaaacctccggaacacctgcagtgaagatgaggaatggtgtcagacaggttgcggtgcggcctcaaagcgtttttgtatccccgccaccgaaggataacaatctcagttgcgcactacgacggaacgagagtctgacagctacagatggactccgcggtgttagacggaattctagttttagcactgccagatccgccgcagcagaagctaaaggtaggctggctgaacgtgccgcttctcagggcagcgacagcccattgctacccgcacagcggaacagtataccagtttctccagtacggccaaagcccattgaaaaatctcagtttatccataacaatctcaaggacgtgtacgtgagtattgcagattatgagggagacgaagaaacagcgggattccaggaaggggtcagcatggaagttctcgagcggaatcctaacggatggtggtattgtcagattctcgatggggtgaaaccatttaaaggttgggtgccgagcaattatctggagaaaaaaaattag

SEQ ID NO: 30817 - DNA, 3402 bp, synthetic construct
  misc_feature 1..3402: note = Description of Artificial Sequence: Synthetic coding sequence
  source 1..3402: mol_type = other DNA
atgctggcgtattgcgtgcaggatgctactgtggttgacgtggagaagcgcagaaatccgagcaagcattatgtatacatcatcaacgtgacttggtctgactctacttcccagacaatttacaggagatattcaaaattttttgacctacagatgcagctcctggataagtttcccattgaggggggtcagaaggaccccaagcagagaattattcctttcctcccagggaaaatcctctttcggcgaagtcacataagagacgtggcagtgaaaagattaaagcctatcgacgaatattgcagggcattggtcagactgccgccacacatcagccagtgtgatgaagtttttcggtttttcgaagctcgcccagaggacgtcaacccacccaaagaagactacggttcctcgaaacgaaaatcagtgtggcttagttcttgggccgaatctcctaaaaaggatgtaacaggagcagatgccaccgccgaacccatgatcctggaacagtacgtcgttgtttccaattacaaaaagcaagaaaactctgagctaagccttcaggcaggagaagtggtagacgttattgagaagaacgagtccgggtggtggttcgttagcacaagtgaggagcagggctgggtgcctgctacctacctagaggcccagaatgggacccgcgatgactctgacattaatacatctaagacaggcgaggtgtccaagcgtcgcaaggcccatcttcggagattagaccgcagatggactttggggggaatggtcaatcggcagcacagcagagaagagaaatacgtcactgtgcagccttacacatcccagagcaaggacgaaattggcttcgagaagggggtcaccgtggaagtgatacgaaaaaatcttgaggggtggtggtacatcaggtatctaggcaaagaaggttgggctcccgcaagttacctaaagaaggccaaggatgatcttcccaccaggaagaaaaatctggcaggaccggttgagatcataggcaacataatggagatctccaaccttctcaataaaaaagcaagcggcgacaaagagacccctccggctgagggtgagggacacgaggctcctattgccaaaaaagaaatctcactgccaatcctatgtaatgcttccaatgggagcgctgtgggtgtcccagataggactgtatcaaggttggcccaaggtagtcctgcagtggctaggatcgcccctcagagggcacagatctccagcccaaacttgcgaacgcgtccgccaccgcgtagggagtcttccctagggttccagttaccgaagcctcccgaaccaccctctgttgaagtcgaatattatactatagccgagtttcagagctgcatttcggatggaatttcattcaggggaggccagaaagccgaagtgattgacaagaactcgggaggatggtggtacgtgcagatcggcgagaaggagggctgggcgccagccagctatatcgacaagagaaagaagcccaatctttcccgacggacatccacattaacacggccaaaagtgccaccaccagccccaccatctaagcctaaggaggctgaggaggggccaacaggcgcttccgagtcccaggacagcccacggaaactgaaatatgaggaacctgaatatgatatccctgctttcggctttgactccgaacctgaactgtcagaagagcccgtagaagatcgcgctagcggcgagcggagacctgcacagccccatagaccttcccccgcatcctcattacagcgcgcacgcttcaaagtgggcgagagctcagaagacgtggcactggaggaagaaactatatatgagaatgaaggcttcaggccctatgcagaggatacactatccgctcgtggaagtagtggtgattccgattcacctggctcctcttccctctccctcactagaaaaaattcccccaagtcgggaagtcctaaatcaagcagtctgttgaaactgaaggccgaaaagaatgctcaggcagagatgggtaaaaatcattcctctgcctcgttcagtagtagcattaccattaatacgacatgttgttcatcttctagttcatcctcctcctccctgagtaagacctccggcgatctgaaacccaggtcagcttctgatgcgggaattcgaggtacccccaaggtgcgtgcgaagaaagacgcagatgccaatgcgggtctgacaagttgtcccagggcgaaacccagtgtgcgccctaagccgtttctgaatagggctgaatcccagtcccaggagaaaatggatattagcaccctgcgcaggcaactgcgcccaacagggcagctgaggggtggtctgaaaggcagcaaaagcgaagactccgagttgccaccccagacggcttccgaggccccttcagaaggcagccgacgcagctccagtgacctaatcacactgcccgctacaacacccccttgccccaccaagaaagaatgggaaggaccagccacatcatatatgacatgcagcgcatatcagaaagtacaggactccgagatatcattccctgccggagttgaggtccaagtcctggagaagcaggaatccggctggtggtacgttcgattcggggagctggagggttgggctccctctcactacctggtgctggatgagaacgaacaaccggaccccagtggaaaagagctggacaccgttcccgctaaggggagacagaatgagggaaaaagtgatagcttggagaaaatcgagagacgtgtgcaggcactgaacacagtcaatcagtctaaaaaggcaaccccacccattccctccaaaccacctgggggttttggcaagacctcaggcactcccgcagttaagatgagaaacggcgtccgtcaggtcgctgttcgtccccaatccgtgttcgtttccccaccacctaaggacaataatctcagttgtgccctgcgaagaaacgaatctctcaccgccactgatggcctgagaggcgtgcgtaggaactctagcttttcaaccgccagatctgctgccgctgaagctaaggggagactggccgagcgggctgcttcccaggggagtgattctcctctccttcccgcacagcggaactctataccagttagccctgtgcggccaaagccaatcgaaaagtcacagtttattcacaataacctgaaagatgtttatgtgtcaatagcagattacgaaggagatgaggagactgctggcttccaggaaggcgtctctatggaggtgctcgaacggaaccccaatggctggtggtactgccaaatcctggacggggttaagcccttcaaaggttgggttccgagcaattatttggaaaagaaaaactag

SEQ ID NO: 30818 - DNA, 3183 bp, synthetic construct
  misc_feature 1..3183: note = Description of Artificial Sequence: Synthetic coding sequence
  source 1..3183: mol_type = other DNA
taattcttcgatttacaaatgcaactgctggataagttccctatcgaaggaggtcagaaggaccccaaacagaggatcattccctttctccccggaaaaatcctcttcagaaggtcacacatacgagacgtcgcggtcaaacgcctcaagcctatcgatgagtactgtcgcgctttagtgcgtcttccaccgcacatatctcagtgcgatgaggtctttcggttttttgaggctcggccagaggatgttaaccccccaaaggaggattacggatctagcaagcgcaaaagcgtctggctctcctcctgggcggagagtccaaaaaaagacgttactggcgctgatgctaccgccgagccaatgattcttgaacaatacgtcgtggtgagcaattacaaaaaacaggaaaacagcgagttatccttgcaggcaggcgaggtggtcgatgtgatcgagaaaaacgagagtggttggtggttcgtgtccactagcgaagaacagggatgggttcccgctacctacctcgaggcccagaacgggacaagggacgacagcgatataaacacgtccaaaacaggagaggaagaaaagtatgtgaccgtgcaaccttatacaagccagagcaaggacgagattggcttcgaaaagggggtaaccgtggaggtcatccgcaaaaacctggagggatggtggtacatcagatacctggggaaagagggatgggccccagcgtcctacctcaagaaagcgaaggacgacctgcctactcggaagaagaatctcgcaggcccagtggagatcatcggtaacattatggagatatccaacctactgaataagaaagcttcaggagataaggagaccccgcctgccgagggcgaaggacacgaagcacctattgctaagaaggaaatctccctcccaattctgtgtaacgcatctaacggatcagctgtcggcgtcccagaccgcacagtatcaagattagcgcagggctctcccgcagtggccagaatcgccccacagagggcgcagatttcctctccaaacctaaggactaggcctcctccaaggcgtgagtccagcttagggttccagctcccaaagccacctgagccccctagtgttgaggtcgagtactacactattgctgaatttcagagttgtattagtgacggtatctccttccggggagggcagaaagccgaagtcatcgacaagaattcgggtggatggtggtacgtacagattggcgaaaaggagggctgggccccagccagctacattgataaaagaaaaaagcctaatctgtctcggcgtaccagcacccttactcgcccaaaagtaccacctcctgccccaccctcaaagcccaaagaagccgaggaaggaccgacaggcgcaagcgagtctcaggatagcccccgtaaattgaagtacgaagagcctgagtacgacatcccagccttcggcttcgatagtgagccagaactctcggaggagcccgtagaagatcgtgctagcggcgagcggaggcctgcccaacctcataggccttcaccagcatcttctctccagcgtgcaaggttcaaagtcggagagtcaagcgaagacgtagcattggaggaagaaaccatctacgaaaacgagggctttaggccttacgctgaagacaccctgtccgcgcgaggatcgagtggggatagcgatagcccgggttcttcaagcctaagcctaacacggaagaacagtcccaagtccggcagcccaaagtcatcctcgctcctcaaactcaaggccgagaagaacgcccaagccgagatggggaagaaccatagcagcgctagctttagcagctccatcacaatcaacactacatgttgcagtagttcctctagctctagttccagccttagcaagacatctggggatcttaagccaagaagcgccagtgatgccggaatacggggtaccccaaaggtgcgtgccaaaaaggacgctgacgcaaacgcagggctgacatcttgccctcgggctaagccttcagtcagaccaaagccctttttgaatcgtgcagaatcgcagtcccaagagaaaatggatatcagcacattgcgcagacagctgcgacccaccggccagctccgtggaggcttgaagggctctaagtctgaagattcagaattgccacctcaaactgcatccgaagcaccaagcgaaggcagccggagatcaagttctgatttaataaccctgccggcaactacgccaccatgtccaactaaaaaagagtgggaaggacctgcaacctcctacatgacctgcagcgcatatcagaaggtacaagactctgagatctccttccctgctggtgtcgaagtgcaggtactggagaagcaggagagtgggtggtggtacgtccggttcggggagctggaagggtgggccccttcccattacctggttctggacgagaatgaacagccagacccctcagggaaggagctcgacactgtgcctgccaagggtcggcagaatgagggcaagtcagattccttggagaaaattgaacgcagggtacaagcgctgaatactgtgaatcaaagcaagaaggccacccctcctattccaagcaagcctccgggaggatttggtaagactagcgggacaccagcggtgaaaatgagaaacggtgtcaggcaggtcgccgttagaccacagtctgtctttgtttcccccccacctaaggataacaatctaagctgtgcactgagacgcaacgagtcgttaacagcaactgatggacttcggggagtaaggagaaacagctcctttagcacagcccgttccgctgccgcagaagccaagggcaggttggcagagagagccgcatcgcagggcagcgatagtccattgctgcccgctcagagaaattccattcctgtatcacctgtcaggccaaagcccattgaaaagagtcagtttatccataacaacctgaaggacgtgtacgtttcaatcgccgattacgagggtgatgaagaaactgccggattccaggaaggcgtctccatggaagtgcttgagagaaacccaaatggatggtggtattgtcaaatcttggacggagtcaaaccatttaaaggatgggttccttcaaactatctggagaagaagaattag

SEQ ID NO: 30819 - DNA, 1110 bp, synthetic construct
  misc_feature 1..1110: note = Description of Artificial Sequence: Synthetic coding sequence
  source 1..1110: mol_type = other DNA
atgagcatatgttgttgctttttctttcgagactacggttctagcaaaaggaagagcggggctgatgcaaccgctgaaccaatgatcctggagcagtatgtggtggtcagcaactacaagaagcaagagaatagcgagctgtctttgcaggccggagaggtggtcgacgttatcgagaagaatgagagtggatggtggttcgtttcaacgtccgaggagcaaggctgggtgcccgcaacttatttggaagcacagaacgggacgagggacgattccgatatcaacactagtaaaactggtgaagtttctaagcgcagaaaagctcacctgagaaggctcgaccggcgttggaccctgggcggaatggtcaatcggcagcacagtcgcgaggagaagtacgtcaccgtccaaccatatacatctcagtcaaaggatgaaattggcttcgagaagggcgttaccgttgaggtcattagaaagaacttggaaggatggtggtatattagatatcttggcaaggaagggtgggcccctgcttcctatctgaagaaggcgaaggacgacctcccaactagaaagaaaaaccttgcgggtcccgtggagattattgggaatattatggaaatttccaatttgcttaataaaaaggcttctggcgataaggaaaccccaccggctgaaggagaggggcatgaggctccaattgccaagaaggaaatttctctgccaattctttgcaatgctagcaacggaagtgccgtaggcgtgcctgaccgcacagtgtcaaggcttgctcagggatcccctgccgtcgctagaatcgcccctcagagggctcagatctccagtccaaacttgcggactagaccacctcccagacgcgagtcatccctcaccgaaagtagatgtaggcaggcaggggtgcagtggcatgacctcggctctctccagagtccccacccacgattcaaaaggtttagttgtctctcactgttgagcagctgggaccaccggcacatgccaccccacccagcaaatttcctgatttttttaattgagactggcttccaccacgtaggtcaagacgggctgcacctgctgacatcctag

SEQ ID NO: 30820 - DNA, 2898 bp, synthetic construct
  misc_feature 1..2898: note = Description of Artificial Sequence: Synthetic coding sequence
  source 1..2898: mol_type = other DNA
atgcccgtcactgcgaccggtaagattctgttcaggcggtcccatatcagggatgtggccgtgaaacggctgaaaccaatcgatgagtactgcagagcactagtgcgattgcccccacatatctcgcagtgcgatgaggttttccggttctttgaagccaggcctgaggacgtgaacccgcctaaggaggattatggaagttccaaacgcaagtccggcgcagacgctactgctgagcctatgattctcgagcaatatgtggtggtgagcaactacaaaaagcaggaaaactcagagctctccttgcaggctggggaggtcgtggatgttatagagaaaaacgagtcaggatggtggttcgtgagcaccagcgaggaacagggttgggttccagccacgtatctggaagcacagaatgggacgagggacgattccgatatcaacacctccaaaacgggagaagttagcaagagaaggaaggcacacctcaggcgactggatcgaaggtggaccctgggaggtatggtgaaccgccagcacagtcgcgaagagaagtacgtaacagtgcagccctacacctctcagtctaaggatgaaatcggctttgagaaaggcgtcacagtggaagtgatcaggaagaacctggaaggctggtggtacattcgttacctcggaaaggagggctgggcccctgccagttacctgaagaaagcaaaggacgacctccccacccgcaagaaaaacctggcagggccagtggaaattatcggtaatattatggaaatctccaatctgctgaacaagaaagctagcggcgacaaagagacaccacctgcagaaggggaagggcatgaggctcctatagccaagaaggagatcagcctccctatcctgtgcaatgcaagtaacggtagtgccgtgggcgtgcctgatcgtaccgtcagcaggctggcacagggaagccctgctgttgcacgaatcgcaccacagcgggcacagatctcgagccccaatttgagaacccgccctccccctcgacgggagtcatcattgggctttcagctcccaaagccccctgaacctccctccgttgaggttgagtattacaccatcgccgaattccagagctgtatcagtgatgggataagtttccgaggtgggcagaaggctgaagtgatagataagaactccggcggatggtggtatgtccagattggcgaaaaagaaggatgggcccctgcctcttacattgataagcggaagaagccgaatctatcacggaggacatctacattgacacggcctaaggtcccacctcctgcgcctccttcaaagccgaaggaagcagaggagggccctacgggtgcttccgagtctcaggactctccgcgaaagttgaagtacgaggagcctgagtatgacatccctgcgtttggcttcgattctgagccagaactttcggaggagccagtggaggaccgtgcaagtggggaacggaggccggctcagccacaccgcccttcccctgcttcctcactgcagagagctagattcaaggtaggcgaatcctcggaagatgtggccctggaggaagagactatctacgagaatgaagggttccgtccttacgcagaggatacattaagtgcccgaggatcctccggagactctgactccccagggtcttcctcactgtccttgacgcggaagaacagtcctaaatcgggctcccctaaaagttctagtcttctgaagttgaaagcggagaagaatgcccaggcggaaatggggaagaaccacagcagcgcctccttcagtagctcaatcactatcaacactacttgctgcagtagctcatcaagctcctcttcgtctctcagtaagaccagtggggacttgaagccacgttccgcaagtgacgcgggtatcaggggaacacctaaggtgcgtgccaaaaaggacgcagacgccaacgccggactgaccagctgccccagggcgaaaccctcagttcgaccaaaacctttcctgaacagggccgaatctcaaagccaggaaaagatggatataagtacattgagaaggcagcttcggcctaccggacagcttcgcggaggcctgaaagggtcgaaatctgaggactccgaactgcccccacagaccgcctccgaagccccatcagaaggcagcagaagaagctcttccgacctgatcactcttcctgcaacgacacccccttgcccgaccaagaaagagtgggaaggcccagctacatcttatatgacctgcagcgcataccagaaagtccaggacagcgaaatcagttttcctgcgggagtggaggtgcaggtgttagagaagcaggaatcaggctggtggtatgtgaggtttggcgaactcgaaggctgggctcctagccattatcttgtcctggatgaaaatgaacagccagatccctctggtaaggagctggacactgtacccgctaagggcaggcaaaatgaagggaagtcagattctctcgagaagatcgaacggagagtccaggctctgaacaccgtcaaccaaagcaaaaaggctacgccgcctatcccctccaaacctccagggggattcggtaaaacatccggaacccccgcagtgaagatgaggaacggcgtgcgccaggtcgccgttcgccctatcgaaaagtcacagttcattcataacaatctcaaagatgtgtatgtgtcgatcgccgactacgagggcgacgaggagacggccggattccaggagggcgtaagcatggaggtgcttgagagaaacccaaacgggtggtggtattgccagatcttagatggggttaagccctttaaaggatgggtgccttctaactatctcgaaaagaaaaactag

SEQ ID NO: 30821 - DNA, 2907 bp, synthetic construct
  misc_feature 1..2907: note = Description of Artificial Sequence: Synthetic coding sequence
  source 1..2907: mol_type = other DNA
atgatcctcgaacagtacgtggtggtctctaattataagaaacaggagaattcagagctgtcacttcaggccggagaagtagttgatgtgattgagaaaaatgagtccggatggtggttcgttagcacctctgaagaacagggctgggtgcctgccacctatctggaggctcagaatgggacacgagacgacagtgatattaacacctccaagaccggagaagtttccaagagacggaaggcacacttacggaggctcgatagacgatggactctgggcggaatggtgaaccggcaacattcccgcgaggagaaatacgtgacagtgcagccctataccagccagagcaaagatgaaatcggctttgagaaaggcgtgacggtggaagtgatccggaaaaatttggaggggtggtggtatatccggtatctaggcaaagagggctgggctccggcttcttatctgaaaaaggctaaggacgacctcccaactcgcaagaagaacctggccggtccagtagagatcatcgggaacataatggagattagcaatttgcttaataaaaaggcatcaggcgacaaggaaacccctccagcggagggcgaaggccatgaggccccaatcgccaagaaggagatttccctgcccatactttgtaacgcctccaacggatcagcggttggggtgccagaccgcaccgtaagcagactcgcccaggggtcgccggctgtggcgaggatagccccacaacgggctcagatttccagtcctaacctgcgtactcgaccgcctccgcgaagggaatcctctctgggattccagctgcccaaacctccagagccgccttcagtggaggtggagtattatacaatcgctgagtttcaatcctgcatctcggacgggatctcctttcggggaggacaaaaagccgaagttatcgacaagaacagtgggggttggtggtacgtccagattggggaaaaggaagggtgggcaccagctagctatatcgataagagaaaaaagcccaatttgtcgcggcgaacgagcaccctgacgcgtcccaaagtccctcctccggctcctccctctaagcctaaggaagctgaggaaggacccacgggagcatcagagtcccaagacagccctaggaaacttaaatatgaggagccagaatacgacatacccgcttttggatttgattccgaaccagagctgtcagaggaaccagtggaggaccgggcatcaggcgagaggcgccctgcccagccccatcgcccttcccccgcatcgagtctgcagagagccaggttcaaagtgggggaatcaagcgaagatgtcgcactggaagaggagactatttatgagaatgaggggttccggccatatgcggaggacactctctctgctcgagggtctagcggggactctgactctcctggtagctctagcctgtctctgaccaggaagaactcccccaagtcaggttccccgaagtcatctagcctgttaaagcttaaggctgagaaaaatgcccaggccgagatgggaaaaaatcatagctccgcgtcctttagctcaagcatcacaattaatacaacatgttgttcatctagcagcagctcttctagctccctgtccaagacttccggcgatctcaaacccaggagcgcctccgatgcagggatccggggtaccccgaaggtaagagccaaaaaagatgccgatgccaacgctggactcacatcctgccctagagcgaaacccagcgtccgcccaaaaccatttctgaaccgcgctgaatctcagtctcaagagaagatggacatctcaactctccggaggcagcttagacccacaggacagctgagggggggacttaagggatcaaagtccgaagacagtgagctcccccctcagaccgccagcgaggcaccaagcgaaggcagcagacgcagctcatccgatcttattactcttcctgcaactacaccaccctgccccactaagaaagagtgggaggggcctgccactagctacatgacttgctctgcctatcaaaaggttcaggatagcgagatcagttttcccgctggtgtcgaggtgcaggttctggaaaaacaggaatcgggctggtggtacgtgcggtttggcgagctggagggttgggccccatcccactacctagtactcgatgaaaatgagcagccagacccctctggtaaggagcttgacaccgtgcctgccaagggtaggcagaacgaggggaagtctgatagccttgagaagattgagaggcgcgtgcaagcactgaatacggtcaaccagagtaagaaggccacccctcctatcccatcaaaacctcctggaggctttgggaagaccagcgggactcctgctgttaaaatgcgtaatggtgtacgccaagttgccgtaagacctcagagtgtcttcgtgagtcccccaccgaaagacaataacttgagttgcgcattgaggaggaatgagagcttaactgctactgacggccttcggggagtcaggcggaatagcagcttctccacggcacgttctgccgctgcagaggccaagggcaggctcgcagagagagccgcatcacaggggagcgatagcccactgctgccagcccagagaaatagcatccctgtgtctcccgtacgccctaaacccatcgaaaagtctcaattcattcacaacaatctcaaggatgtctacgttagcatagcagactatgaaggggacgaggaaaccgccggttttcaggaaggagtgagcatggaggtgctagagcgcaatccgaacggctggtggtattgtcagattctggacggagtcaagccttttaagggatgggtgcccagcaactacctagaaaagaaaaactag

SEQ ID NO: 30822 - DNA, 3003 bp, synthetic construct
  misc_feature 1..3003: note = Description of Artificial Sequence: Synthetic coding sequence
  source 1..3003: mol_type = other DNA
atgaacggttcattcctgttgcggttgctatttcccgtcgctagtatcctgcccgagaccgtgctgcttagaggggcagacgcaactgccgagccaatgatattggaacagtatgtcgtggtgtccaactataagaaacaggaaaactctgaactttctctgcaagccggagaggtggtagatgtgattgaaaagaatgagagcggctggtggttcgtgagcactagcgaagagcagggatgggtgccagcaacatacctggaagctcagaatggcactagagatgatagtgatattaatacctctaagacgggcgaggtatcaaagagaaggaaagctcacctgcgcaggttggacagaagatggacgctggggggaatggtgaatcggcagcattctagggaagagaagtacgtgaccgtgcagccctacacatcgcagagcaaagacgaaattgggtttgaaaagggagtcacggtcgaagttattagaaaaaatttggaagggtggtggtacatcagatatctaggaaaggaagggtgggcccctgcgtcctacctcaagaaagcaaaggacgacttacctacacgaaagaaaaacctcgctggacctgtggagattatcggcaacatcatggagattagcaatcttctgaacaagaaggccagcggcgataaagagacgcctcctgctgagggtgaaggacacgaggccccaatcgccaaaaaagaaatttccttgcctattttgtgtaatgcctcgaatggctcagccgttggcgtgcctgacagaacagtgagtcgcctggcgcagggctcgccggcagtcgccaggatcgcgccacagcgcgctcagatctctagtccgaatctccgaactcgcccacctcctagaagggaaagcagcctaggttttcagttgccgaaaccacccgaaccgccttctgtggaggtcgaatactataccatcgctgaattccagagttgcatttcagacggaatttcttttcgaggtggccaaaaggccgaggtaatcgacaagaactcggggggttggtggtatgtgcagattggcgaaaaagagggatgggccccagcgtcatacattgataagcgaaaaaagccgaatctttccagacgcacatccacactgacccggccaaaggttccccctccagccccaccaagcaaacccaaggaggctgaggagggcccaaccggagcaagtgagtcccaggacagtcctaggaagctcaaatatgaagaacccgagtatgatatacccgctttcgggttcgactctgaaccagaactgtcagaggaaccagtcgaggacagagcatcgggagagcgtcggcctgcacagcctcacagaccctcgccagccagctcactccaacgcgctcgctttaaagttggagagtctagcgaggatgtggcactcgaggaagagacaatctatgagaatgaggggtttagaccatacgctgaggacacgctctctgctagaggaagcagcggagattcagactcgcccggaagttcatcactgtcgctgacacgtaagaactcccctaagagcggctcgccaaagtcatccagtctgctcaagctaaaggctgagaaaaacgcccaggcggaaatgggcaagaatcatagcagtgcgagcttctcttcatctataactatcaataccacatgctgttctagtagctcctcttccagcagctctcttagtaagacctccggagatctgaaaccccgaagcgcaagcgacgcaggaattcgcggtaccccaaaggtgagggccaaaaaagacgcggatgccaatgccggattaacttcttgcccacgagctaaaccatcagtgcgccctaaacccttcctcaaccgagccgagagtcagtctcaggaaaaaatggacatcagtaccctccgtagacagctcaggccaactgggcagttgcgtggtggactaaagggcagcaagtcggaagatagcgagctacctcctcagacagcttcagaggccccttcggagggctcaagacgatcctcttctgacctgatcacattgcctgcaaccacgcctccttgccccacaaagaaagaatgggagggacccgctactagctacatgacttgctccgcatatcagaaagtccaggactccgagatatcttttcctgccggtgttgaagtccaggtgctggaaaaacaagagtcgggctggtggtacgtgcgtttcggagagctcgagggatgggctccttcacattacttggttctggacgagaacgaacagcccgacccatctggcaaagaactggataccgtgcccgcaaaaggacggcaaaatgaggggaagagcgactcactcgagaagatcgaaagaagggtgcaggccctgaacacggtaaaccagtccaagaaggcaacaccccctatcccttctaagccccctggcggtttcgggaaaacaagtggcacccctgctgttaagatgcgcaatggcgttcgacaggttgcagtacggccacagagtgtgtttgtcagccccccacccaaggataataatctgtcctgtgcactgcgaaggaacgaatcgctcacagccacagatggcctccggggagtgagaaggaattcttcattcagtaccgcgaggtccgccgcagctgaggccaagggccgactagcggaacgggcagcctctcagggaagtgacagtcccctcctgcccgcacagcggaattccatcccagttagcccggtgaggcccaagccaatcgaaaagtcccagttcatccataacaacttgaaagatgtctatgtatccatcgcagattacgagggagacgaggagactgccggatttcaggaaggtgtctccatggaggtgctggagaggaatcccaacggttggtggtattgccagatcttggacggcgtgaaacccttcaaggggtgggtccccagtaactatctggagaaaaagaactag

SEQ ID NO: 30823 - DNA, 414 bp, synthetic construct
  misc_feature 1..414: note = Description of Artificial Sequence: Synthetic coding sequence
  source 1..414: mol_type = other DNA
atgaacaagctgtctggtgggggtggacggcgaaccagggtggagggtggacagctagggggagaagagtggacaaggcacgggtctttcgttaataaaccaacacgtggctggttacatcccaatgacaaggtaatggggccaggcgtgtcatatctggttagatacatggggtgcgttgaggtgctccagagtatgagggctctcgacttcaatacccggacacaggtgactcgcgaggccatttctttggtctgtgaagccgttccgggagccaaaggcgctacaagacggaggaagccttgcagccggcctctgtcctctattctgggcagatcgaaccttaagttcgccggtatgcctataacactgaccgtcagtacaagctccctgaatctgatggcggcagactag

SEQ ID NO: 30824 - DNA, 918 bp, synthetic construct
  misc_feature 1..918: note = Description of Artificial Sequence: Synthetic coding sequence
  source 1..918: mol_type = other DNA
atggcagggtttgatggaagcgcctgggacgaagaggaggaagagccacctgatcaccagtattacaacgacttcccaggcaaggagcccccactgggaggtgtggttgacatgagacttcgggaaggagcagcccctggtgccgctaggcccaccgcccctaacgctcaaaccccctcgcacctgggggcaactctgcctgtggggcagcccgtggggggagaccccgaggtgagaaaacagatgccaccaccacccccatgtccaggccgtgaactgtttgatgatccgtcgtacgtgaatgtccagaacctagataaggccaggcaagctgtgggcggtgccggacccccaaaccctgcaatcaatggttccgccccacgcgatctgttcgacatgaagccatttgaagatgccctgcgagttccccctcctcctcagagtgtgagtatggcggaacagcttagaggggagccatggtttcacggcaagctgagtaggcgggaagccgaggccctgctgcagctgaacggagatttccttgtccgagaaagcactaccacacctgggcaatacgttctgaccggccttcagtctgggcagcctaaacatctgttgctggtggatcctgagggggtgaggtggggatttgcaatgctgcccaagctgttccttaattcacgagcacaggtgatccgcctccctaggccgccaagagtgctaggactgcaggccaggacaaccatgccctccttacatatatttttttgtaccgtctacacactgctgcgccatgccaacttcttacaggtaaagaagggcgtgtattctagtcagcttcactccttcagggctgacgttgcttttgcgttttctcatttcacagacttatccattcccaccacagttagtttttag

SEQ ID NO: 30825 - DNA, 1563 bp, synthetic construct
  misc_feature 1..1563: note = Description of Artificial Sequence: Synthetic coding sequence
  source 1..1563: mol_type = other DNA
atgagcaaccttcgcttagccaatcccgcaggaggccgtccagggtcaaagggagaacccggtagggccgcagatgatggcgaaggcatcgtaggcgctgccatgccagatagtggacctctgcctttgctccaggacatgaataaacttagcggcggagggggaagaaggacccgggtggagggcggacaactcggaggcgaggagtggactcggcacggctcatttgtgaacaaaccaaccaggggctggctccacccaaatgataaagttatgggccctggggtctcctatctcgtgcggtacatggggtgcgtcgaggtcttgcagtccatgagagctctggactttaacacccgaacccaggtgactcgcgaggcaatttcactagtgtgcgaggctgttccaggcgcaaaaggtgccaccagacgaagaaaaccctgcagccggccactgagctctatactgggaaggagcaatcttaaatttgcaggcatgccaattaccctgaccgtaagtacaagttctctgaatctgatggctgccgattgcaaacaaattatcgccaaccaccatatgcaatccatttcatttgcatcaggtggggatccagatactgctgagtacgtcgcatacgtggccaaggacccggtgaatcagagagcctgtcacatcctggaatgccccgaaggacttgcccaggatgtgattagcacaatcggccaggcttttgagctgagattcaagcagtacctccggaacccacctaagctggtgaccccccatgatcgcatggccggattcgacggaagtgcctgggacgaagaggaggaggaaccaccagaccatcaatattacaacgactttcccggtaaggagcccccactgggcggtgtggtggacatgagactgagggaaggagcagcacctggcgctgccaggcccactgcccctaacgcacagacaccatcacatctcggggcaacgctaccagtgggccagcccgtgggtggcgaccccgaggtcaggaaacagatgcccccacctccaccttgccccgctggtagggagttgttcgacgacccctcctatgtaaatgtgcagaatcttgacaaggctaggcaagcggttgggggagcaggtcctcccaacccggcaatcaatggttcagccccaagggatttgtttgacatgaagccttttgaagacgcattgcgggtcccacccccaccacagtcagtgtctatggcagaacagctcagaggtgagccttggttccacggcaagctatctaggcgtgaagcagaagcgcttttacagttgaacggcgatttcttggtccgtgaatctaccactacccctggccaatacgttctgacaggccttcagtctggccagcccaaacacttactcctggtggatccagagggcgtggtgcggaccaaggatcaccggtttgaatcagtctcacacttgatcagttaccacatggacaaccacctgccaattatcagcgctggatctgaactctgtctgcagcagcccgtggaaaggaaactctag

SEQ ID NO: 30826 - DNA, 1752 bp, synthetic construct
  misc_feature 1..1752: note = Description of Artificial Sequence: Synthetic coding sequence
  source 1..1752: mol_type = other DNA
atggatttgttaccaccaaagcccaaatacaaccctctcaggaacgagtctctttcatccctcgaggagggggcttccggaagcacgccccctgaagagctacccagtccaagtgccagcagcctgggaccaatattgccacccttaccaggagacgacagcccgaccactctctgctctttcttccctcgcatgagcaatctgagacttgcgaatcccgctgggggtaggcctgggtccaaaggcgagcctggccgagcagcagatgatggagaggggattgtgggggcagctatgccagactctgggccactgccactgctccaggatatgaacaaattaagcggcggtggagggaggcgaacgagagttgagggtgggcagttgggcggagaggagtggaccaggcacggttcctttgtgaataagcccactcgagggtggctgcacccaaatgacaaagtgatgggacccggtgtctcatacctcgtcagatacatggggtgcgtggaggttctgcaatctatgagagcactggactttaatacaaggacccaggtgactagagaggctattagcctggtgtgtgaagccgtgccaggtgccaaaggcgcaacacgacggagaaagccttgttcccgccctctgtcctccattctgggaagatcaaacctgaagttcgcaggtatgcccattacgctcaccgtttccacatcatcgctgaatctcatggcagccgattgcaagcagatcatcgcgaaccatcatatgcagtccatctctttcgcctccgggggagatcctgatactgctgaatacgttgcatatgttgccaaggaccccgtaaatcagagagcatgccatatactcgagtgtccggagggtttagcccaggatgtcatctcaactataggacaagcgtttgagttacggtttaaacagtatctacgcaatcccccaaaactggtgactccgcacgatagaatggcaggcttcgacggtagtgcttgggacgaggaggaagaggagcccccagaccaccagtactataatgatttcccgggtaaggagcctcctctgggaggggtggtggacatgcgcctgcgagaaggagcagcacccggagcggctcggcctacagccccaaatgcacagactccttctcatttgggagcaaccctgcccgtggggcaacccgttggtggggacccagaggtcaggaagcagatgccacccccacccccttgtcccggaagggagttatttgacgatccctcatacgttaatgttcaaaatctcgacaaggctcggcaagccgtagggggagccggtccaccaaatcccgcaattaacgggtccgcccctcgcgatctcttcgatatgaaaccatttgaggacgctttacgtgtgccgccaccaccccaatccgtctcaatggccgagcagctgcgaggcgaaccttggttccacgggaaactcagccgacgcgaagccgaggccctcttgcagctgaatggcgattttcttgtaagagagtccacaactacaccgggacagtacgtccttacggggttgcagtcagggcagccgaaacacctgctgctagtagaccctgaaggcgtggtaagaaccaaggaccaccgttttgagagcgtgagccatctaatcagctatcacatggataaccatttgcccattataagcgcaggatcagagctctgtctgcagcagccagtagagcgaaagctttag

SEQ ID NO: 30827 - DNA, 1155 bp, synthetic construct
  misc_feature 1..1155: note = Description of Artificial Sequence: Synthetic coding sequence
  source 1..1155: mol_type = other DNA
atggacctcctgccaccgaagcctaagtataatccactgcgaaatgaaagcctgtctattctggggaggagcaacctgaaattcgccggaatgccaattacgctcacggtctcaactagttcgctgaacttgatggcggcagattgcaagcagattatcgctaaccaccacatgcagtccatttcctttgccagcggcggtgacccagataccgccgaatacgtggcttacgttgctaaggaccccgtaaatcagagagcctgtcacatccttgaatgcccagaggggctggcccaggacgtgataagcaccattggccaggcctttgaactgaggttcaagcagtacctaagaaaccctcccaagctagtcaccccccacgaccgcatggctggatttgatgggtcggcctgggacgaggaagaagaggagcctcctgaccaccagtactataacgacttccctggaaaggaaccccctctgggaggcgtggttgacatgcgactccgcgagggggcagcgcctggcgcagctcggcctaccgccccaaatgctcagacgcccagtcacctgggagccacccttccggttgggcagcccgtggggggagaccccgaggtcagaaagcagatgcccccaccaccaccttgtccaggtcgggaactctttgatgatccttcttatgtcaatgtgcaaaacctggataaagccagacaggccgtcggtggcgctgggcctcccaatccagccatcaacggttccgcccctagagatctgtttgatatgaaaccattcgaggacgcacttcgggtccccccaccgcctcagagcgtcagcatggccgaacaactgcgaggcgagccatggttccacgggaagctctcacggagggaggccgaagccctgctgcagttgaacggagacttcttggtgagagaatcaaccacaacacctggacaatatgtcctgactgggcttcagagtggccagccgaagcaccttctgctcgtagacccggagggtgttgtccgcactaaggatcatagatttgaatccgtgtcccacttgatcagctaccacatggacaatcacttacccataatctccgctggctccgagctgtgtctgcagcagcccgtggaacggaaactgtag

SEQ ID NO: 30828 - DNA, 1422 bp, synthetic construct
  misc_feature 1..1422: note = Description of Artificial Sequence: Synthetic coding sequence
  source 1..1422: mol_type = other DNA
atgaacaaactcagcggtgggggaggcaggcggacgcgggttgaaggtggacagctgggcggagaggagtggacccgccatggttcttttgtcaacaagcctactcgcggttggcttcatccaaatgataaggtaatgggacctggggtgagttatctggtgcgctatatgggctgtgtggaagtccttcagtctatgagggctcttgatttcaatacacgcacacaggtgactagagaagctataagcctagtttgtgaggctgtgccaggcgcaaagggggctactagacggagaaagccatgttcacgccctctatcaagtatcctaggcagatccaatttgaaattcgccggaatgcccattaccctgacagtgtctacttcgagccttaatcttatggcagccgactgcaagcagatcattgctaatcatcatatgcaatcaatctcctttgccagtggcggagaccccgatacggcggagtacgtggcatacgttgcaaaagatccagtgaaccaacgcgcatgtcatatcctggagtgtcctgaagggctcgcccaggatgtcattagcaccatcggccaggcctttgagttgaggtttaagcagtacctgcgcaaccccccaaaattagtgactccacacgatcgcatggctggatttgatggatccgcttgggatgaggaagaggaggaaccacccgatcatcagtattacaacgactttccaggcaaagagcccccactgggcggtgtggtggatatgcgcttaagggagggcgctgctcctggggcagcccgtcctactgccccaaatgcccagaccccgtcacacctcggcgctactctccctgtcgggcaacctgtgggaggagacccggaggttcgtaagcagatgcctcctccaccaccctgccctggcagggagctatttgatgatccatcctatgtgaatgtgcagaatttggacaaagctcggcaagcggtcggtggggcagggcctcctaatccggctattaacgggagcgccccaagggacctattcgacatgaagccgtttgaggacgcactaagagtgccaccacctccgcagagcgtgtccatggctgaacagctcaggggggaaccttggttccacggcaagctgagccgcagagaggcagaggcgctgctgcagctaaacggagattttcttgtgagggagtctacaaccacccctggccagtacgtgctgactgggctccagtcaggccagccaaagcacctcttgctcgtggacccagaaggggttgtcaggacaaaagaccacaggtttgaatctgtgtcgcacctcatcagttaccacatggacaaccaccttcctattatttccgcaggctctgaattgtgcttgcagcagcccgtggagaggaaactgtag

SEQ ID NO: 30829 - DNA, 1425 bp, synthetic construct
  misc_feature 1..1425: note = Description of Artificial Sequence: Synthetic coding sequence
  source 1..1425: mol_type = other DNA
atgaataagttatctggcggaggtgggagacgaaccagagtggaaggcggacagcttggaggggaggagtggacccgccacggtagctttgttaataagcctactaggggctggttgcatccaaatgacaaggtgatggggcctggcgtatcgtacctagtgcgatacatgggatgtgtggaggtgttacagagtatgcgcgctctcgacttcaacacccgcactcaggtgacgagagaagctatttccctcgtatgcgaagccgtcccaggagctaaaggcgctaccaggcgacgtaagccttgtagtcgacccctcagttccattctcgggcgatcaaacctcaagtttgcaggcatgcccataacactcacggtgtccacatcttcattaaacttgatggcggctgactgtaagcaaatcattgccaaccatcatatgcagtcaatttcttttgcttcaggcggagaccccgacaccgcagaatacgtagcctacgtggccaaagatcctgtgaaccagcgcgcttgccacatcttggaatgtccggagggcctggctcaggacgtcatctccacgattggccaggcttttgagctccgtttcaagcaatacttgcgaaatccgccaaaactggtcactccccatgaccgaatggccggtttcgacgggtcggcatgggatgaggaggaagaagagccaccagaccatcaatattataacgacttccctgggaaggagccacccctgggcggagtagtggacatgaggttaagagagggggcagcacctggcgctgccagaccaaccgcacctaacgcgcagacaccatcacacctaggtgcaactctgcccgttgggcagcctgtggggggagaccctgaagtgagaaaacagatgcccccaccacctccctgtccagcagggagagaacttttcgatgaccccagctacgttaatgtacaaaacctcgacaaagcgagacaagctgttggcggagcgggtcctccaaacccagcaatcaacggctcagcgccacgagacctgtttgatatgaagccatttgaggacgcacttcgagttccaccaccccctcaaagcgtatcaatggccgaacagcttcgtggagagccatggttccacggaaagcttagcagacgtgaagcagaggccctcctacaattgaatggtgatttcttggtcagagagtctacaacaactccaggtcagtacgtccttacaggcttgcaatccggtcagccaaaacaccttctcttagtagacccagagggagtggtgaggactaaggaccatcgcttcgagtccgttagtcatttaatttcctatcacatggacaaccatttacccatcataagtgccggatccgagctgtgcctgcagcagccagttgagagaaagctctag

SEQ ID NO: 30830 - DNA, 603 bp, synthetic construct
  misc_feature 1..603: note = Description of Artificial Sequence: Synthetic coding sequence
  source 1..603: mol_type = other DNA
atgaacaagctctctggtggcggtggacgaaggactcgggtcgaggggggacagctgggaggagaggagtggacaagacatggatcctttgtgaacaagcccactaggggctggctgcaccccaacgacaaagtcatgggccctggcgtgtcttatctggtcagatacatgggctgcgtggaggttcttcagtctatgcgtgctctggattttaacacaaggactcaggtgacccgtgaagcgatctctttggtgtgcgaggccgtgcccggagctaagggagcaacacgccgtcgtaagccttgctccaggccactgtccagtatattgggcagaagcaaccttaagtttgccggaatgccaatcaccctgaccgtgtctaccagtagcctaaacctcatggccgctgactgcaaacaggacactgcagaatacgtggcctatgtagctaaagatccagtgaaccagcgcgcttgccacattctagagtgtcctgaagggctggcccaagacgtaatcagcaccataggacaagctttcgagttgcgatttaagcagtacctcaggaacccaccaaagctggtaacccctcacgaccgctag

SEQ ID NO: 30831 - DNA, 603 bp, synthetic construct
  misc_feature 1..603: note = Description of Artificial Sequence: Synthetic coding sequence
  source 1..603: mol_type = other DNA
atgccaataacactgacagtatccacttcaagccttaatctgatggctgcggattgcaaacaagacaccgccgagtatgtggcctatgtggccaaggaccctgtaaaccaacgtgcttgccacatcctggaatgcccagagggccttgctcaggacgtgatttccaccataggccaggcatttgagctgaggtttaagcagtatctgcggaacccgcctaaacttgttacacctcatgatcggatggcaggctttgacggctccgcttgggatgaagaagaggaggagccccctgatcatcagtattataacgactttcccggaaaggagccccctttagggggagtcgtcgatatgcggctccgagagggcgcagctccaggggcagcacgacccacagcccctaacgcacagacaccctctcacctgggggctaccctgcctgtgggacaaccagtgggtggagatcccgaggtgcgtaagcagatgccaccccctcctccgtgtccagctggcagggagctttttgacgaccccagttatgtcaatgttcagaacctggacaaagccaggcaggcagttggcggtgcaggcccaccttag

SEQ ID NO: 30832 - DNA, 393 bp, synthetic construct
  misc_feature 1..393: note = Description of Artificial Sequence: Synthetic coding sequence
  source 1..393: mol_type = other DNA
atgccgattaccttgaccgtgagtacatccagtttgaacctgatggccgcagactgtaaacagatcattgccaatcatcacatgcagtccattagcttcgcttcagggggtgatccagacacggcagaatatgtggcatacgtggccaaagatccggtgaaccagagggcatgccatattctagaatgtcccgaaggcctggcccaggatgttataagcacaatagggcaggccttcgagttgaggttcaaacagtacctacggaatccaccaaagttagtcaccccacatgatcggatggcgggatttgacggtagtgcttgggatgaggaggaagaggagccaccggatcaccaatattataatgactttcctgggaaggagcctccgtag

SEQ ID NO: 30833 - DNA, 894 bp, synthetic construct
  misc_feature 1..894: note = Description of Artificial Sequence: Synthetic coding sequence
  source 1..894: mol_type = other DNA
taggatgaggaggaagaagagcctcccgatcatcagtactataacgattttcccggaaaggagccccctctggggggagtggtcgacatgcggctgagagagggtgctgcaccgggagcggctagacccactgcgccaaacgcccagacacctagtcatttgggggcaacactgcccgtagggcagccagtgggtggggatcccgaggtacgcaagcagatgcctccccctccaccatgtcctggaagggagttgtttgacgaccctagttacgttaacgtgcagaatctagataaggcccgtcaagcagtcggtggagctggtccacccaaccccgctattaatggctctgcacctcgagatctcttcgatatgaagccattcgaggacgctctgcgggttccacccccaccccagagtgtgtccatggctgaacagttaaggggtgaaccttggtttcacggaaagctttctagaagagaggctgaagcactcctgcagctgaatggcgactttttagttagggaatcaaccacaactcctggacagtacgtgttaactggccttcagagtgggcagccaaagcatctactgcttgtggacccggagggtgtgagatgggggtttgcgatgttaccaaaactcttcttaaactcccgggctcaggtgatccggctgccgagaccacccagagtactagggctgcaggccagaacgacaatgccgagcctgcacatcttcttctgtaccgtgtacactttgctgcggcacgccaattttttacaggttaaaaaaggggtttactctagccagctccacagcttccgtgccgatgttgcattcgccttttcccacttcactgatctgtccattcccacgacagtttccttctag

SEQ ID NO: 30834 - DNA, 1755 bp, synthetic construct
  misc_feature 1..1755: note = Description of Artificial Sequence: Synthetic coding sequence
  source 1..1755: mol_type = other DNA
atggatctgctgcccccaaagcctaaatacaacccactaagaaacgaaagtctgtcttctctggaggagggcgcttcaggcagcactccccctgaggagttgccctcccccagtgcttctagcctggggcctattctgcctcccctgcctggcgacgactcgcctacaaccctgtgtagttttttccctcgaatgtccaacttgagactagcaaatcccgctggagggaggccgggttcaaagggggagccaggtagagccgctgatgacggggaggggattgttggagcagctatgccagattccggccctctcccactactccaggacatgaataagttatccggaggtggtgggagaagaacacgcgtggaaggcggtcagctcggaggtgaagagtggactagacacggctcatttgtgaacaagccaaccagagggtggctgcatcctaacgacaaagtgatgggtcccggagtgtcctacctcgttaggtatatgggttgtgtggaggtgctgcagtcgatgagggctctcgacttcaacacacgcacccaagtgacaagagaggcaatttcactagtatgcgaagccgtgccgggagctaagggagccacaaggcgcagaaagccatgttcgcgtcccctctcttcgatcctcggccgatcaaatctgaagttcgcaggcatgcctatcacactgacagtgtcaacatcatccctgaacctgatggcggcagactgcaagcaaatcatagcgaatcaccacatgcagtcaatatcctttgcctctggaggggatccagacaccgcagagtatgtcgcatatgtcgccaaggaccccgttaaccagcgcgcttgtcacatacttgagtgtcccgaagggctcgcccaggacgtgatcagcacaatcggccaagcctttgagttgaggtttaaacagtacctccgcaatcctcctaagctggtaaccccgcacgacaggatggcgggttttgatggtagtgcttgggacgaggaagaggaagaaccacccgaccatcagtattacaatgattttccagggaaagaacccccacttggtggcgtcgtcgacatgaggctccgtgagggggcagccccaggggctgctaggcccactgctcctaacgcccagacaccttcacacctgggcgcaacactccccgtgggccaacccgtgggaggggatcctgaggtgcgaaagcaaatgcctcccccacccccttgtcccgctgggagggaattgtttgacgacccaagttacgtcaacgtgcaaaatctggataaggcccgacaagctgtcggaggagcgggtccacctaacccagcaatcaatggctccgctcccagagacttattcgatatgaaacctttcgaggacgcactgagagtgccacctcccccacaatcagtcagcatggccgagcagctgcgcggagaaccatggttccacggaaagctctcacgacgagaggcagaagcccttctacaacttaatggagattttcttgtgagagagtctaccacaaccccagggcagtatgtgctcaccggcctccagagcggccagccaaaacatctgctgctggttgacccggagggggtcgtcaggacaaaggaccaccggtttgagtccgtgagccatctcatttcatatcacatggataaccacctgcccattatcagcgccggttcggaactgtgccttcagcagcctgtagaacgaaagctgtag

SEQ ID NO: 30835 - DNA, 1749 bp, synthetic construct
  misc_feature 1..1749: note = Description of Artificial Sequence: Synthetic coding sequence
  source 1..1749: mol_type = other DNA
atgactcagggaccgggaggccgagctccgcctgcccctcccgctccgccagagcccgaagcccctaccaccttttgtgcccttcttcctagaatgccccagtggaaattcgcagcaccaggaggatttctggggagaggtcctgcagctgcacgggctgcaggtgcttcaggaggggctgacccccagcccgagccagctggtccagggggagtgcccgctctagccgcagcagtattaggggcatgcgagcccaggtgtgctgcaccctgccctctccctgctctgtctcgttgtaggggcgctggatcccggggaagcagaggagggaggggcgcagcaggaagcggcgacgctgccgctgcagcagagtggatcagaaaggggtctttcatccacaagccagcgcacggatggttacaccctgacgccagggttctgggccctggggtcagttacgttgtgcggtacatgggatgtatcgaagttttgcggtcaatgagatctctggactttaatactcgcacacaagtgacgagggaggcaattaatcggctacatgaggcagtgccaggagttcgaggcagttggaagaagaaagcccctaataaagctctggcctctgttctgggcaagtccaacttaagattcgctggtatgtccatcagcattcacattagcacagatgggctatccctcagcgttcctgctacgcggcaggtgatcgccaatcaccatatgccttcaattagctttgccagcggtggcgacactgatatgacagactacgtagcgtacgtcgccaaagaccccatcaaccagcgtgcttgccacatcttagagtgttgtgagggcctagcgcagagcatcatcagcacagttggccaggccttcgagctgagattcaagcagtaccttcatagcccgccaaaagtggccctgccacctgaacggctcgccggacccgaggaatcggcctggggggacgaagaagatagcctggagcataattactacaactcaatccctgggaaggaaccaccactgggaggcctggtggattcccgactagccttgacgcagccttgcgcccttactgcactggatcagggtccctctccctcattacgggacgcctgttctctgccatgggacgtcggtagcacggggacagctccgccaggggacggatatgtgcaggctgatgccaggggtcccccagaccacgaggagcatctttatgtgaacacccagggcttggacgcgccagagcccgaagacagccccaaaaaggacctattcgacatgcggcctttcgaagatgctctgaagctgcacgagtgttctgtggcagccggagtcacagctgctccactgcccttggaggaccagtggccctcaccacccacccggagggctccagtggccccaacagaggagcagcttcggcaagaaccctggtatcacggcaggatgtctagaagagctgctgagagaatgctccgggctgacggtgactttctcgttagagactcagtcacgaatcccggtcaatacgttctcaccggaatgcatgccggtcagccaaaacatttactcctggtggacccagaaggtgttgtccggaccaaagatgtcttattcgagagcatctctcatctcattgatcatcatctccagaatggccagccgattgtagccgctgaatcagaactgcacctaagaggagtggtttctagggagccatag

SEQ ID NO: 30836 - DNA, 1833 bp, synthetic construct
  misc_feature 1..1833: note = Description of Artificial Sequence: Synthetic coding sequence
  source 1..1833: mol_type = other DNA
atgcttgacttcttcactatattcagtaagggcggactggtgctctggtgcttccagggtgtctctgatagctgtaccggccctgtaaacgccctcataaggagcgtgttgttgcaggttggtttccaaaaaattctgaccttgacatatgttgataagctaatcgacgacgttcatcggctgtttcgggataaatatcgaacggaaatacagcagcagtccgcactaagcctcctgaatggtaccttcgactttcagaacgacttcctgagactgctgagggaagcggaagaatcctctaagatcagggcaccaactactatgaaaaagtttgaggatagtgagaaggcaaaaaagccggtgcgctctatgattgaaacaaggggggagaaacctaaagaaaaagcaaagaacagcaaaaagaagggagctaagaaagaagggagcgatgggcctcttgccacttcgaagcctgtgcctgccgagaagtccgggttgcctgtaggcccagaaaatggggtggaactgtctaaggaggaactgattaggagaaagagagaggaattcattcagaagcacgggcgaggcatggagaaatccaacaagagcaccaaatccgacgcacccaaagagaaaggcaagaaagccccaagggtgtgggagctgggtggttgtgccaacaaggaagtgctggactactcaaccccaaccaccaacgggactccggaggctgctctgtccgaggacattaacctgattagggggacgggctctggagggcagctgcaagatcttgactgttcctcttcggacgacgaaggggcagcacagaattccactaagccatcggctacaaagggcactctggggggtatgttcggaatgctgaaaggcctcgttggaagcaagagcctgagccgggaggacatggaatcggtgctcgacaaaatgcgggatcatctaattgctaagaatgtcgcggctgacattgcagtgcagctgtgcgagtccgtggccaataagctggagggcaaggttatgggcacttttagcacagtgacttccaccgtcaaacaagccctgcaggagagtctggtgcaaatactgcaacctcaacggagggttgacatgctccgagacattatggacgcccagcggagacagagaccttacgttgttacattttgcggcgtgaacggcgtgggaaaaagtactaatctggctaaaatctctttctggctgctggagaatggattctccgtgctgatcgctgcgtgtgatacattcagggccggagccgtagaacagctgaggacccacaccagaagactcagcgccttacatccgccagagaaacatggcggaagaactatggtccagttattcgagaagggatatggaaaagacgcagctggcatcgccatggaagctattgcctttgcgaggaaccaggggttcgacgtggtactggtggacactgcagggaggatgcaggataacgcgcctttgatgacggctctggccaaacttatcaccgttaacaccccagatctggtcttattcgtcggagaggctctggtcggaaatgaagccgtggaccagctcgtgaaattcaacagagccctagccgatcacagtatggcacagacaccaagattgatagatggaattgttctgactaagtttgacacgatcgatgataaagtaggtgccgctatcagtatgacatatatcacatcaaaacccatcgtctttgtggggaccggacagacatactgtgacttacggtctttgaatgcaaaggccgttgtagcagctttgatgaaggcctag

SEQ ID NO: 30837 - DNA, 2253 bp, synthetic construct
  misc_feature 1..2253: note = Description of Artificial Sequence: Synthetic coding sequence
  source 1..2253: mol_type = other DNA
atgagtcagtggtacgagctgcagcagctcgacagtaagtttctggagcaggtgcaccagttgtatgacgattcatttccaatggaaattagacagtacctagcccagtggctggaaaaacaggactgggagcacgccgctaacgacgtgagtttcgctaccatacgcttccacgacctcctatcacagctcgatgaccaatactcgaggttttcattggaaaacaacttcctactccagcacaatatccgcaagagcaagagaaacctgcaagataacttccaagaagatcctattcagatgtcaatgataatctacagttgtctgaaggaagagaggaagatccttgagaacgctcagagatttaaccaggcccaaagtgggaacattcagtcaaccgtcatgcttgataaacaaaaggagctcgatagtaaggtccgaaatgtgaaagataaggttatgtgcattgaacatgaaattaaatcattagaagatttgcaggacgagtacgactttaaatgtaagactctgcagaaccgggaacacgaaacaaacggcgttgccaagtctgatcagaagcaagagcaactgctgctgaaaaagatgtatttgatgctggataataagcgcaaagaagtcgttcataagataatcgaactcctgaacgtgaccgaactgacccagaacgccctaattaatgacgagctcgtggaatggaaacgacgccagcagtctgcttgcatcggcggacccccaaacgcttgcttggatcagctgcagaattggtttacaattgtcgctgagtctcttcagcaggtccgccagcaactgaagaaactggaggaactggagcaaaaatatacatatgaacacgatcctatcacgaaaaacaagcaggtgctgtgggaccgcaccttctctttgttccagcagctaatacagtcttccttcgtagtcgaacgacagccgtgtatgccgacacaccctcaacgacctctggtactaaaaacaggcgtgcagttcactgtgaagctccggcttctcgtgaagttgcaggagttaaattacaacctgaaggttaaagtactgttcgataaggacgtcaatgaacgcaacaccgtgaagggctttcgcaagtttaacatattgggcacccacactaaggtgatgaacatggaggagtcaactaacgggtcattagccgctgagtttcggcacctgcagctgaaggagcagaagaacgcaggcacaaggactaatgaaggccctctaatcgttactgaggagcttcactctctcagctttgagacccaactctgccagccaggattggtcatcgatttagagaccacttcactgcctgtcgtggtcatttctaatgtcagccagctgccctccggctgggcttccattttatggtacaacatgctggtggcagaaccgaggaatctgagctttttcttgacccctccttgtgctcgatgggcccagctgtctgaggttctcagctggcagttctcttcggtgaccaagaggggcttaaatgtggatcagctgaatatgctcggagaaaaactgctggggccaaacgcctccccagacggcctgattccttggactcggttttgcaaggaaaatataaatgacaaaaattttcccttctggttgtggatcgagtccattttggaattgatcaaaaagcacctactgcctttgtggaatgatgggtgtattatgggttttatctcaaaagaaagggaaagagccctgctgaaggaccagcaacctgggacctttctgctgagatttagcgaatcaagtagagagggcgctatcacattcacctgggtcgaaaggagtcaaaacgggggtgagcctgattttcacgccgtagagccctatacgaagaaggaactttccgctgtcacatttcccgatatcattcgtaattataaagtgatggcagcagaaaatattcctgaaaatcctctgaagtatctttatcccaacatcgacaaggatcatgcatttggtaagtattactcacggccaaaggaagcacctgagccaatggaacttgatggccctaaaggcacagggtatatcaaaaccgaactgatctccgtctcagaagtccatccaagccggctgcagacaacggataatctattacccatgagtccagaagagtttgatgaggtgtcaagaattgtaggctcagtcgagtttgatagcatgatgaatactgtttag

SEQ ID NO: 30838 - DNA, 2139 bp, synthetic construct
  misc_feature 1..2139: note = Description of Artificial Sequence: Synthetic coding sequence
  source 1..2139: mol_type = other DNA
atgtcgcagtggtacgaactacagcagcttgattccaagtttctggagcaggtgcatcagctctacgacgacagttttcctatggaaattcgtcaatacctcgcccagtggctggaaaagcaagactgggagcatgccgcaaacgacgtgagtttcgccaccattaggttccacgacctcttatcacaacttgacgaccaatactcacgctttagcttggagaacaattttctgctgcagcataacattcggaagagtaaacgcaaccttcaagacaatttccaggaagatccaatccaaatgagcatgatcatttattcgtgccttaaggaagaacgaaaaatacttgagaacgcccaacgatttaaccaggcccagagcggtaacatacaatccacagtcatgctcgataaacagaaggagctggattctaaggtcaggaacgtcaaagataaggttatgtgcatagagcatgagataaaaagtcttgaggaccttcaggatgagtatgactttaaatgcaagacccttcagaatcgcgagcacgaaaccaatggtgtcgccaaaagtgaccagaagcaagaacaactgctactaaagaaaatgtacttgatgctggacaataagcggaaagaagtcgtacacaagatcatagaactgctcaacgtcactgagcttacccaaaatgccctgattaatgacgagctggtcgagtggaagcgcagacagcaatccgcctgtattggtgggccacctaatgcctgcctggaccagcttcaaaactggttcacaatcgtggcggagagcttgcagcaggttagacaacaattgaagaagctcgaagaactggagcagaaatatacctacgagcacgatccgatcaccaaaaataaacaggtgttgtgggatcgtaccttttcgctgttccagcagcttatccagtcttcattcgtagtggagcgacaaccatgtatgcccacacacccccagagaccccttgtgctgaagaccggtgtgcagttcaccgtgaaactacgtctgctggtcaaacttcaggagttgaactataatctgaaggttaaagtgctatttgacaaggacgtaaacgaacgcaatacagtcaagggattcaggaagttcaacatccttggtacacacaccaaggttatgaacatggaggagagtactaatggatccctggctgcagagtttagacatctgcaactcaaggagcagaagaacgcaggaacccgtacgaacgaaggacccctgatcgtcactgaggaacttcactccttatccttcgaaacccaactgtgtcagcctggactcgtaatcgatctcgagactacttctctcccagtggtggtgatcagcaacgtgagccagttgccctctggatgggcctcgattctgtggtacaatatgctcgtggctgagcctcgtaatctgtcattctttttgaccccaccttgtgctagatgggctcaactttctgaggtgctgagctggcagtttagctctgtgacgaaacgtggtctgaatgtagaccaactgaatatgttgggagaaaaactgctcgggcctaatgcttcccccgacggactcatcccttggacacgcttctgtaaggagaacataaacgacaaaaattttcctttctggctctggattgagagcatcctggagctgataaaaaaacacttactgccgttgtggaacgacggatgcattatggggttcatcagcaaggagcgagagagagctttgttgaaagatcaacaacctggtacctttctccttcgtttcagtgagtcttctagagagggcgcaataacgttcacctgggtggaacgatcacagaacggtggcgaacctgatttccatgcagtcgagccctataccaagaaggagctgagtgctgtgacatttcccgatattatacggaattacaaggtgatggccgcagagaacattccagaaaacccattaaagtatttatatccaaatatcgataaggaccatgcatttgggaagtactatagccgacccaaggaagccccagagcccatggaactggacggccctaaaggaacaggctatatcaaaaccgagctgatctcagtaagtgaagtgtag

SEQ ID NO: 30839 - DNA, 2145 bp, synthetic construct
  misc_feature 1..2145: note = Description of Artificial Sequence: Synthetic coding sequence
  source 1..2145: mol_type = other DNA
atgtggatgtcccagtggtacgagttgcagcagttggatagcaaatttttagaacaagtgcaccagttgtacgacgacagctttccgatggagatccggcagtacctggcacagtggctggagaagcaagactgggaacatgccgctaatgacgttagtttcgccacaatccgtttccacgaccttttatcccagctggatgaccaatattccaggttttcgttggaaaataacttcctgctgcaacataatattcgcaaatcaaagagaaacctgcaggacaacttccaggaagaccctatacaaatgagtatgattatttactcctgccttaaggaggagagaaagattctcgagaatgctcagcgcttcaaccaggcacagtccggcaacatccagtccaccgttatgctagataaacaaaaagagctcgattcgaaagtgcggaacgtgaaggacaaggtaatgtgtatcgaacacgagattaaaagcctggaggacctccaagacgagtatgactttaagtgtaagaccttgcagaatcgcgaacatgaaacaaacggcgtggcaaagagcgatcagaaacaggagcagctccttctgaagaagatgtacctgatgctcgataataagcggaaggaagttgtccacaagatcattgagctgttgaacgtaaccgagctcactcagaatgccctgattaacgacgaactggtggaatggaagcgccgtcaacaaagtgcatgtatcggcggaccacctaacgcatgcctcgatcagcttcagaactggttcaccattgtcgctgaatccctacaacaggtgcgccagcagctgaagaagttggaggagctcgaacagaagtacacgtacgaacatgacccaattacgaaaaacaaacaggtgctttgggataggactttctccctgttccaacagttaatacaatcatccttcgtggtcgagagacagccctgcatgcccacccatccgcagcgcccactcgtgcttaagactggcgtccaatttacagtcaaacttcgcctgcttgtcaagctgcaggagcttaactataacttgaaggtgaaggtgctatttgacaaggacgtcaacgagcgcaatacagtgaaaggttttcggaaattcaacatcctcggcacacacactaaggtcatgaatatggaggaatcaacaaatggatctctcgctgcagagtttagacatttacagctgaaagaacagaagaacgccggaacccgcaccaacgaggggcctctaatagtcacagaagagctgcattctctgtccttcgagacacaactgtgtcagcccggactggtgattgacctagagaccactagtctgccagtcgtggtgatttcaaacgtgtctcagctgccttccggctgggctagtattctctggtacaatatgctagtcgctgaacccaggaacctgtctttcttcctgactcctccgtgtgctcgctgggcacagctttccgaggtgctctcatggcagttctcttccgtcactaagcggggactgaatgtggatcagctgaacatgctaggggaaaaactactgggccctaatgcgtctcctgacggactgatcccatggacccgcttctgcaaggagaatatcaatgacaaaaattttcccttttggctctggattgagtcaattctcgaactcattaaaaagcatcttctgcctctttggaacgacggatgtatcatgggattcatttctaaggagcgggagcgtgcgctactgaaggatcagcagcccggtaccttcttgctgagattctctgagtcctctcgcgagggcgctatcacttttacatgggtggagagatcccaaaacggcggtgaaccggatttccatgccgtggagccatatacaaaaaaggaactttcggcggtcacattccccgatatcatcagaaattataaggtcatggccgctgagaacataccagagaatcctttgaaatacttgtaccccaacatcgataaggaccacgcgtttgggaaatattatagtcggcctaaggaagcgcctgaacccatggagctggatgggcctaagggaacggggtacatcaaaactgagctgatttccgtatccgaggtgtag

SEQ ID NO: 30840 - DNA, 2253 bp, synthetic construct
  misc_feature 1..2253: note = Description of Artificial Sequence: Synthetic coding sequence
  source 1..2253: mol_type = other DNA
atgtcgcagtggtacgagttgcaacagctggattctaagttcctggagcaagtgcaccaattatacgacgactctttccccatggagatccggcagtatctcgcacagtggttggaaaaacaagattgggagcacgccgctaacgatgtcagcttcgcaacaattagatttcacgacctgctgagccagcttgacgaccagtattccaggttctccctcgaaaacaacttcctgctgcagcacaacattcggaagtccaagcgcaacctccaggataacttccaggaagaccccatccagatgtccatgattatctactcgtgtttgaaggaagaacgcaagatacttgaaaatgcacagcgctttaaccaagcacagagtggaaacatacagagtacagtgatgctggacaagcagaaggagcttgatagcaaagttaggaacgtgaaggataaagtcatgtgcatagagcatgagataaagtcactcgaggacctgcaggacgaatacgacttcaaatgcaagacgctgcagaaccgcgagcatgaaactaacggggtggctaagtctgaccagaaacaggaacagctcctgttgaagaagatgtacctgatgctcgacaacaaacggaaggaggttgtgcacaaaataattgaactgctgaacgttactgaactgactcaaaatgcgctgataaatgacgagcttgttgaatggaagcgccgacagcagtcagcatgtatcgggggaccacctaatgcctgtctggaccagttacagaactggttcaccattgtggccgaaagcctccaacaagtccgccaacagctgaagaaactcgaggaacttgaacagaagtatacatatgaacatgaccctatcacaaagaataaacaggtcttgtgggatcgtaccttctccctctttcagcagctcattcagtcaagcttcgttgtcgaaaggcagccctgcatgcctacccatccccagagacctctggtcctgaagacgggcgtgcagtttacagtgaagctgcgccttcttgtcaaattgcaggagctgaactacaatttgaaagtcaaggtgctgtttgataaagatgtgaacgagagaaacactgtgaaaggcttccggaaatttaatatcttaggtacacatacaaaggtcatgaatatggaggagagcacaaacgggtcgctcgcggcagagtttcggcaccttcagcttaaggagcaaaaaaacgcaggtactcgcactaatgagggaccacttattgttacagaggagctgcactccctcagctttgaaacgcagctctgtcaaccgggtctcgtgatcgacttggagactacgagcctgcccgtggttgtcattagcaacgtatcgcagctccccagcggctgggcaagcattctatggtacaacatgctcgtggcagaaccaagaaatcttagctttttccttactcctccatgcgcaaggtgggcacagctgagtgaggtgctgagttggcagtttagctccgtgactaaaagagggctcaacgtagaccagcttaacatgctgggggagaaactgctgggacccaacgcttcacctgacggcctcatcccatggaccaggttttgtaaggaaaatatcaatgataaaaattttcctttctggctgtggattgagtctattcttgagcttatcaagaagcatttgcttccactctggaatgatgggtgcataatgggctttataagcaaggaacgggagagagccttgcttaaggatcagcagcccggaactttcctgttgaggttttccgagtccagcagggagggcgcaataactttcacttgggttgaacgttcgcaaaatgggggtgaaccggactttcacgctgtagaaccttatactaaaaaagaactttcggccgttaccttccctgacattattaggaactacaaggtcatggcagctgagaatatcccagagaatcctttgaagtatttataccccaatatagataaagatcatgcgtttggcaaatattattcccgaccgaaagaagccccagagcctatggagcttgatggcccaaaaggcaccggctatataaagaccgaacttatttcagtgtcagaagtgcacccgtctcgtctacagacaaccgataacctgctgcctatgtcacccgaggaattcgacgaggtgagcaggattgtggggtccgtcgagttcgatagtatgatgaacacagtctag

SEQ ID NO: 30841 - DNA, 543 bp, synthetic construct
  misc_feature 1..543: note = Description of Artificial Sequence: Synthetic coding sequence
  source 1..543: mol_type = other DNA
atgtcccagtggtatgaactgcagcagctggactcaaagtttctcgaacaggtgcaccagctatacgacgattcttttcctatggagatccgccagtacctggcgcagtggctggagaaacaagactgggagcacgcggcaaatgacgttagtttcgcaactattcggtttcatgatctactgagtcagctggatgatcaatattcgcggtttagcctcgagaataacttcttactgcagcataatattcggaagagcaagagaaatctgcaagacaactttcaggaggacccgatccagatgtccatgatcatatacagttgcctgaaggaggagcgtaaaattctggaaaacgctcagcggtttaatcaggcccagagtggcaacatccagtctacggtcatgctggataagcagaaagaactggatagcaaggtgcggaacgtgaaagacaaggtgatgtgcatagaacacgagatcaaaagtctggaagatctgcaggatgaatatgattttaaatgcaagaccctgcagaaccgttag

SEQ ID NO: 30842 - DNA, 213 bp, synthetic construct
  misc_feature 1..213: note = Description of Artificial Sequence: Synthetic coding sequence
  source 1..213: mol_type = other DNA
atgtcacagtggtacgaattgcaacagttggattcaaagttcttggaacaggtgcatcagctctatgacgactcattccctatggaaattcggcagtacctggcccagtggctcgaaaagcaggattgggagcacgctgccaatgatgtgtctttcgctaccattcgcttccacgacctgctatcacagctcgatgatcagtactctaggtag

SEQ ID NO: 30843 - DNA, 582 bp, synthetic construct
  misc_feature 1..582: note = Description of Artificial Sequence: Synthetic coding sequence
  source 1..582: mol_type = other DNA
atgagccaatggtacgagttacaacaactggattctaaatttttggaacaggtccaccagctctacgatgatagctttcccatggagattagacagtatctggctcagtggctggagaaacaggactgggagcatgcagcaaacgatgtgagcttcgcaacaatccgattccacgacctgctgagccagctagatgaccagtactccaggttttccttagaaaacaacttcctgctgcagcacaacattagaaaaagcaagcggaacctacaggacaactttcaggaggacccaattcaaatgtccatgatcatctactcatgcctgaaggaggagaggaagattttagagaatgcccagcggttcaaccaggcacagtcagggaacatacagagcacagtgatgctcgacaaacaaaaggagctggatagcaaggtgcgcaatgtgaaggataaggttatgtgcatagaacacgagattaaaagcctcgaggatctgcaggacgagtacgatttcaagtgcaagactctgcagaacaggggtagctcttcccaaaacaacagggtcgctgagtgtcactag

SEQ ID NO: 30844 - DNA, 453 bp, synthetic construct
  misc_feature 1..453: note = Description of Artificial Sequence: Synthetic coding sequence
  source 1..453: mol_type = other DNA
atgtcccagtggtatgagctgcagcagcttgacagcaagttcttggaacaggtgcaccagctctacgatgactcttttcctatggaaattaggcagtacctagctcaatggcttgagaaacaggactgggaacatgctgcgaatgatgttagctttgccactattcggtttcacgatcttttgtctcaattggacgaccagtactcaaggtttagcctggaaaataactttctgctgcaacataatatccgtaagtccaaaagaaacctccaggacaatttccaggaagaccccattcaaatgtcgatgatcatctattcttgtctcaaagaggaacgcaagattctggaaaacgcgcagcggtttaatcaggcacagtctgggaatatccagtccacggtcatgctcgataagcagaaagaactggactcgaaggtaagaaacgtaaagtag

SEQ ID NO: 30845 - DNA, 582 bp, synthetic construct
  misc_feature 1..582: note = Description of Artificial Sequence: Synthetic coding sequence
  source 1..582: mol_type = other DNA
atgtcccaatggtacgaactccaacagcttgacagcaagtttctggagcaggttcatcaactatacgatgatagtttccccatggaaattcgtcaatatttggcacagtggctggaaaagcaggactgggagcacgcagccaatgatgtgtcattcgccacaatccgcttccatgatctgctctcccagttagacgatcagtactcacgtttttccctcgaaaataacttcctgttacagcataacattcggaaaagcaaaaggaacctccaagataactttcaagaggaccctattcagatgtccatgataatctattcgtgtttaaaggaagaacggaaaattctggaaaacgctcagcggttcaatcaggcacagtccggcaatatccagagtacagtgatgctcgacaagcagaaggagctcgatagcaaggtgagaaacgtcaaggacaaagtcatgtgtatcgagcacgagatcaagagcctcgaggacctgcaggatgagtacgattttaaatgcaaaaccttgcagaatagaggttcttcaagccagaataaccgtgtcgcggagtgccattag

SEQ ID NO: 30846 - DNA, 483 bp, synthetic construct
  misc_feature 1..483: note = Description of Artificial Sequence: Synthetic coding sequence
  source 1..483: mol_type = other DNA
gagtgtcacgaagaccccatccaaatgagcatgattatctatagctgcttaaaagaagagcggaaaatactggagaacgcccaacggtttaaccaggcccagagcgggaatatacaatcgactgttatgctggataaacagaaagagctggatagtaaagttcgaaacgttaaggataaagtgatgtgtatcgaacacgaaattaaaagcttggaggacctccaggatgagtacgactttaagtgtaagacgctgcagaaccgggagcacgagactaatggagtggctaagagtgatcagaaacaggagcaactgctcctgaaaaagatgtacctgatgctggataataagcggaaggaggtggtccacaagataatcgagctcttgaacgttactgaactgacacagaatgccctgatcaatgacgagcttgtggagtggaaaagacgacagcagtcagcctgcattgggggacctccctag

SEQ ID NO: 30847 - DNA, 2556 bp, synthetic construct
  misc_feature 1..2556: note = Description of Artificial Sequence: Synthetic coding sequence
  source 1..2556: mol_type = other DNA
atggcccagtgggaaatgctgcaaaacctagactccccatttcaggatcagctgcaccaactttactcacactccctcctcccagtggacattagacagtacttggccgtatggattgaggaccaaaattggcaggaggccgcattagggagcgacgatagtaaagctaccatgctcttttttcattttctggaccagctgaactatgagtgtggcagatgtagtcaggatcccgaatcattgcttttgcagcacaacctccgcaaattctgcagggatatacagccatttagccaggatcctactcagctggccgagatgatatttaacttactgctggaagagaagcggatcctgattcaggcccagcgggctcagttggaacaaggtgagcccgtgttagaaactccagtggaatctcagcagcatgagattgaaagtcgaatcctggacttgcgggcaatgatggaaaaactagttaagagcatctctcagctcaaagatcagcaagatgtgttttgcttccgatacaagattcaagcaaaggggaagaccccctcgttagatccccaccagaccaaggagcagaagatcctccaggagaccctcaacgaactagacaaacgacgcaaggaggtcttagacgcttccaaggctctattggggagactgaccactctcattgaactcttgctccctaaacttgaggagtggaaagctcagcagcagaaggcttgcattcgggctccaatcgaccacggcctagaacagctcgaaacatggttcaccgccggagctaagctgctgtttcaccttcgacagcttctcaaggaactgaagggtttgtcatgcctagtgagctaccaggatgatccccttaccaagggtgttgatctgcgcaacgctcaagtgaccgagttactgcagagacttctgcacagagccttcgtggtcgaaacacagccatgcatgccccagacacctcatagacccctaatcttgaaaaccggctcgaaatttactgttcggacacgtcttctcgtgcggttgcaggagggcaacgagtccctgaccgttgaagtgtcaatcgaccggaacccaccacagctgcaaggtttccgcaaattcaatatactcaccagtaaccagaagaccctgacccccgaaaagggccagtcacagggcctgatctgggattttggttacttgacactggtcgagcaaaggtcaggcggtagcggtaaggggtcgaataaggggcctctgggcgtcactgaagaacttcatattatatccttcacagtcaaatacacataccagggactgaaacaagaacttaagacagataccctgcccgttgtgatcatctccaacatgaatcagcttagcatcgcttgggcgtccgtcctttggtttaatctactctctcccaatctacagaatcagcaattcttctcgaaccccccaaaagccccatggtctctgctcggccctgccctctcatggcagttttcaagctatgtggggaggggtttgaattctgaccagctgtccatgctccgtaacaagttgttcgggcaaaattgtcggacagaggaccctctgttgtcatgggccgattttacaaagcgagagtcccctcccggaaaactcccattctggacttggctcgataagattttggagctggtgcacgaccacctgaaagacctgtggaacgatgggcgaataatgggattcgtgtcccggtcgcaggaaaggcgtctgcttaagaagacaatgagtgggaccttcctgttgaggttttctgaatcttctgaagggggaataacttgttcttgggtagagcaccaggacgacgacaaggtcctgatctatagcgtgcagccctacacgaaggaggtgctgcaaagcctgcctctgacagagattattaggcactaccagctactgaccgaagaaaacattccagaaaatcccttacgctttctgtatcccagaatccctagggacgaggcctttggctgctattatcaggaaaaggttaacctacaagagcggagaaagtatctgaagcacaggttaatcgttgtttctaaccggcaagttgatgaactgcagcagcctctcgaactgaagcctgaaccagaactcgaaagtctcgaactggaattagggttggtccccgaacctgaactgtctctagatctggaacccctattgaaggccggattggatctgggaccagaactggagagtgtcctcgagagtaccctggagcccgtcattgaaccaaccctttgcatggtatcccaaactgtgcccgagcccgaccagggtccagtaagccagccggttcctgagcccgatttaccatgtgacttacgacaccttaatactgagcctatggaaatttttaggaactgcgtgaagatagaggaaatcatgccaaacggcgatcctctcctcgcagggcagaataccgtagatgaagtgtacgtgagcagacctagtcatttctacaccgatggtccactaatgccatcggatttttag

SEQ ID NO: 30848 - DNA, 1383 bp, synthetic construct
  misc_feature 1..1383: note = Description of Artificial Sequence: Synthetic coding sequence
  source 1..1383: mol_type = other DNA
atggcacagtgggaaatgcttcagaacctggattctccattccaggatcagctgcaccagctttactcacacagcctcctcccggtggacattcgacagtacctggccgtatggatcgaggatcaaaattggcaagaagcagccttgggctccgatgactctaaggcaacaatgctgttcttccactttctggaccaactgaattacgagtgtggtaggtgtagtcaggacccagaaagtctgcttttacagcacaacctgcgaaagttttgtcgggacatccaggatccgacccagcttgctgaaatgatcttcaacctccttttagaggagaagagaatcctcatccaagcacagagagcccagctcgaacaaggcgaacctgtactcgaaactcccgtagaaagccagcagcatgaaatcgaatccagaatactcgacctccgagcaatgatggaaaaactggtgaaatctatttcccaactgaaagatcagcaggacgtgttctgttttcgttataagattcaagctaaggggaaaaccccgtccctggatcctcaccagaccaaagagcaaaaaatcctgcaagaaacactgaatgaactagataaaaggaggaaggaggttttagatgcatccaaggctctgctgggaaggcttaccacactgattgagctgttgcttccgaagctagaagaatggaaggctcagcagcagaaagcttgcattcgcgctcctatcgatcacggcctcgaacagctcgagacttggtttacggctggggctaagctgctgttccacctaaggcagttactcaaggaattgaaaggcctgagttgtttggtttcctaccaggacgaccctctcaccaagggggtggatctgcgaaacgcacaggtcacggagctgttacaacgtctcttacatcgcgcttttgttgttgaaacccagccctgtatgcctcaaactcctcatcgcccactaattctaaaaactggaagtaagttcactgtgagaactcgacttctggtgcgccttcaggagggcaacgaaagcctaacagtggaggtgtccattgatcgcaaccctccacagctgcagggcttcaggaaatttaatatccttacatctaatcagaagacgctgacacccgaaaaaggccagtctcagggactgatctgggactttgggtatctcacattggttgaacagcggagcggcggaagtggaaagggtagcaataagggcccactcggggttacggaagagttgcacattatctccttcacagtgaaatatacttatcagggcctgaaacaggaattgaaagtgtccgagaatggcggacagggggagcgtaagcagctgtggaaaaaggcatag

SEQ ID NO: 30849 - DNA, 2544 bp, synthetic construct
  misc_feature 1..2544: note = Description of Artificial Sequence: Synthetic coding sequence
  source 1..2544: mol_type = other DNA
atggcacagtgggagatgttacagaacctggacagcccctttcaagaccaactccaccagctgtacagtcacagtctcctccccgtagacatccgccagtacctagcagtgtggattgaagatcaaaattggcaagaggccgcactagggagtgatgatagcaaagccaccatgctgttttttcacttccttgaccagctcaactacgagtgtggaagatgctcccaggaccccgagagtttactactccagcataacctgcggaagttctgtagggacatacaagacccgactcagctggctgagatgatcttcaatcttctcctcgaagagaagcggatcctgatccaggcacaaagagctcagctagaacaaggtgagcctgttctggagacccctgtggagagccagcagcatgaaattgagtcacggattctcgacctccgggcaatgatggaaaagttggtgaagtctatttcgcagcttaaggatcagcaggacgtgttttgtttcaggtacaaaatccaggctaaagggaagactcctagcctggatccccaccagaccaaggaacagaaaatcctccaggaaacgctaaacgagttggacaagcgcaggaaggaggtgctggacgcatctaaggctctgctcgggcgtctgaccacgcttatcgaacttctgcttccaaaactggaggaatggaaagcccagcagcagaaagcctgcatccgagcccctatcgatcatgggctggagcagctcgagacctggttcacagccggagccaaattgcttttccatctgcggcaactgctgaaagagctcaagggtctgtcctgccttgtgtcttatcaggatgacccattgaccaaaggtgtcgacctgcggaacgcacaggtgaccgagcttcttcaacggctgctgcaccgggctttcgtggtggaaacacaaccgtgtatgccgcagaccccccaccgtcctctgattttaaagacaggcagcaaattcacagtgcgcacacgtcttctggtgagactccaagaaggaaacgagagccttaccgttgaggtgagcatcgatcgtaaccccccacagctgcagggattccgaaaatttaacattctgactagcaaccagaagaccctgacgcccgaaaagggacagtcccaagggctcatctgggactttggatatttaaccctggtcgagcaacggagcgggggatcgggaaagggctctaataagggtcctcttggagtgacagaagagctccacattatctccttcactgtgaagtatacataccaaggcctgaaacaggagctgaaaactgataccctgcccgtcgttattatttctaatatgaaccagctctccattgcctgggccagcgtgctgtggtttaaccttctttcacctaatctgcagaatcagcagtttttttccaacccccctaaggccccatggagtctactgggcccagccctcagttggcagttctcttcctatgttggaagaggtttaaactctgaccaactatccatgctgagaaacaagctttttggccagaattgccgcactgaggatcctctgttaagctgggccgatttcactaagcgggagagcccacccggaaagctgccattttggacatggctagacaagattttggaactcgtccatgaccatctgaaagatctgtggaacgacggcaggatcatgggcttcgttagcaggtcccaggagagacgcctgcttaagaagaccatgagcggcacgtttctgcttcgattcagtgagagctcggaaggcggtatcacatgcagctgggtagagcaccaggacgacgacaaagtacttatttacagtgtgcagccatacaccaaggaggttttacaatcccttccactgacagagataatacgccattaccagttgctaactgaggaaaacatccctgaaaatcctctgcgatttttatatcctaggatcccgagagatgaggctttcgggtgctactaccaggaaaaggtcaacctgcaggagaggcggaagtacctgaagcatcggctcatcgttgtgagcaatcgccaggttgatgagttacaacagccgctggagctgaaacctgagcctgaactggagagcttggagttagagcttggactcgttcctgagcccgagctgtctctggatctagagccccttcttaaggctgggttggacctgggtcccgagctggaatccgtgcttgaaagtacgctagagccagttattgagcccaccttgtgcatggtttcacagactgttcccgaacctgatcagggaccagtgtctcagcccgtgcctgagccggacttaccgtgcgacctgaggcatttgaataccgagccaatggagattttcaggaattgcgtgaaaatcgaagagatcatgcctaacggagatcccctcctggccggacaaaacaccgtggatgaggtgtacgtgtctcgcccatctcacttttataccgacggcccactgatgcccagcgatttctag

SEQ ID NO: 30850 - DNA, 2313 bp, synthetic construct
  misc_feature 1..2313: note = Description of Artificial Sequence: Synthetic coding sequence
  source 1..2313: mol_type = other DNA
atggcacaatggaatcaactgcagcaacttgatacccgttatttagagcagctacaccagttgtactccgatagttttcctatggaactccgtcagttcctggccccatggatcgaatcacaggactgggcttatgcggctagcaaggagagtcatgctacactggtctttcataaccttctgggggagatagaccagcagtatagtagatttctgcaggagtctaacgtcctctatcagcacaatctaagacgcattaagcaatttttacaatcccgataccttgaaaaacctatggagattgcgaggattgttgctaggtgcctgtgggaggagagccgactgctgcagaccgctgcaactgcggcacagcagggaggccaggctaatcacccaacggcggctgtcgtgaccgaaaagcagcagatgttggagcagcatcttcaagacgtacgaaaaagggtgcaggacttggagcagaaaatgaaagtcgtggagaacctgcaggatgatttcgacttcaattataagaccctgaagagccagggggacatgcaagatctgaacggtaacaaccagagtgtcaccagacagaaaatgcagcagcttgagcagatgttgacagctctcgaccagatgagaaggtctatcgttagtgagctcgcaggactcctgagcgctatggaatacgtgcagaagactcttacagacgaggaacttgccgattggaagcgccgacagcaaatcgcctgcataggtggaccaccaaacatttgcctggaccggctggagaactggattacttcactggcggaatcgcagttacagaccagacagcagattaagaagctggaagagctgcaacagaaggtctcgtacaaaggggatccaatcgtccagcataggcccatgttggaggagcggattgtggagctgtttcgcaatttgatgaagagcgctttcgtcgtggagcgtcagccctgcatgccgatgcacccggatagacccttggtgatcaaaacaggcgttcagtttactaccaaggttaggctcctcgtaaaattccccgagctgaattaccagctaaaaatcaaggtatgtatagacaaagattcgggtgatgtggccgctctgcggggatctaggaaatttaatatccttgggactaacacaaaggttatgaatatggaggagagcaataacggatcgctgagtgcagagttcaagcacctgaccttacgcgagcagcgatgtggtaatggcggacgggctaactgcgacgcttccttaatcgtgacagaggagttgcacctgatcaccttcgagaccgaagtgtaccatcaggggcttaaaatcgatttagaaactcactccttgcccgttgtggtcataagtaatatttgccaaatgcccaacgcgtgggcgtccatactatggtacaacatgttgacaaacaatccaaagaatgtaaacttctttaccaaaccccctattggaacttgggatcaggtggctgaagtcctaagttggcagttttcctctacgactaaacggggactgtcgatcgaacagttgactacactcgctgagaagcttcttggacccggagtcaattattcaggttgccagatcacctgggccaaattctgcaaggaaaacatggcaggcaagggctttagtttttgggtatggctggataatattattgaccttgttaaaaaatacatccttgcgctctggaatgaaggctacataatgggattcatcagcaaggaaagagagagagccattttgagtaccaagcctcctggaacctttttactgcgcttttcagagtcttccaaggaaggaggagtgacatttacctgggtggagaaagatatcagcggtaaaactcagatacagtccgtggagccctataccaagcagcaactgaataacatgagctttgccgaaatcatcatgggctacaagattatggacgcaactaacatcctagtgagcccactcgtatatctctatccagacattcctaaagaggaagcttttgggaagtactgccggccagagtcccaggagcaccccgaagctgatcctgggagcgccgcaccctacctgaagactaaattcatctgtgtgacacccactacatgtagtaacaccatcgatctgccaatgtcaccgcgtacgctggacagtcttatgcagttcggcaataacggtgaaggcgcagaaccaagcgcaggaggacaattcgagtcattaactttcgacatggaactcacctccgaatgcgctactagtccaatgtag

SEQ ID NO: 30851 - DNA, 2019 bp, synthetic construct
  misc_feature 1..2019: note = Description of Artificial Sequence: Synthetic coding sequence
  source 1..2019: mol_type = other DNA
atggagatcgccagaatcgtcgcacggtgcctttgggaggagtcccgcctgctgcaaacagccgcaacggccgcacagcagggcggacaggccaatcatcctactgccgctgtggtgactgagaaacagcagatgttggagcagcatctgcaggatgtgagaaagcgtgtgcaggacctcgagcaaaagatgaaggtggtggagaatttgcaggatgattttgatttcaattacaagacactgaaaagccagggtgatatgcaagaccttaacggcaataaccagtcagtgacacggcagaaaatgcagcagctagagcagatgctgactgctctggatcagatgcgacgcagtatcgtctccgagctggccggactgctgagtgctatggagtacgtgcagaaaactctcaccgacgaggaactggccgactggaaacgtagacagcagattgcatgtatcggagggccacctaatatatgtctggatcgcctggaaaactggatcacgtccttggccgaaagccagctgcaaacaagacagcagatcaaaaaattggaggaactacaacagaaagtatcatacaagggcgaccctattgtacagcatagaccaatgttggaagagcggattgtggagcttttccgcaacttaatgaaaagcgcatttgtggtggagcgacagccctgcatgccgatgcacccagataggcctctggtgattaaaaccggggtacaattcacaaccaaggtgcggttgttggtgaagttccctgagttgaattatcagctgaaaatcaaggtttgcatcgacaaggattcaggagacgtggctgctttgaggggctctcgcaagttcaatattttggggactaataccaaagttatgaatatggaggaaagtaacaatggttctctgtcagcagagttcaagcacctgactctgagagagcagcgctgcggaaacgggggacgcgcaaattgtgatgcgagcctgatcgtgaccgaagaactacatctgatcacattcgaaacagaagtttatcatcaaggtcttaagattgatctcgagacgcactccctgcccgtagtcgttataagtaatatctgccaaatgccaaatgcatgggcttccattctgtggtataacatgttgaccaataaccccaaaaatgtgaacttctttacgaagccaccgatcgggacttgggaccaggttgctgaagtacttagctggcagttctcctcaaccacaaaaaggggactctccatcgaacagctcactacactggctgagaaactgctcggccctggtgtgaattattccggatgccagattacctgggccaagttctgcaaggagaatatggcaggcaaagggttttccttctgggtctggctggacaatattatagacttggtgaagaagtacattttggcgttatggaacgagggatatattatgggatttatctccaaggagagagaaagagccattttgtcaaccaaaccgcctgggacgtttcttctccgtttcagcgagtcaagcaaggagggcggagtgactttcacttgggtggagaaagatatttccggcaaaactcagatccagtccgtggagccttatactaaacagcagctgaataacatgtccttcgccgaaattattatggggtataagatcatggatgcgacgaacatcctcgtgtcccctctggtttacctgtatccagacattcccaaggaagaagcatttggcaaatactgccgacccgaatcacaggagcaccctgaggctgaccctgggagcgcggcaccctatctaaagacgaaattcatttgcgttaccccaaccacgtgtagcaacacaatcgacttgcccatgagcccacggacactggattctctgatgcaatttggtaacaacggggaaggggctgagccgtccgctgggggacagtttgagagcctgactttcgacatggaactgaccagcgagtgtgccacaagtcctatgtag

SEQ ID NO: 30852 - DNA, 2310 bp, synthetic construct
  misc_feature 1..2310: note = Description of Artificial Sequence: Synthetic coding sequence
  source 1..2310: mol_type = other DNA
atggcacaatggaaccagctgcagcagctagatactaggtacctcgagcagctccatcagctgtattccgattcctttcccatggagttaaggcagttcctggccccttggatcgagagtcaagattgggcatacgcagccagcaaagaatctcacgccacactcgtgttccataacctcctgggtgaaatcgaccagcaatacagccggtttcttcaagaaagcaatgttctgtaccagcacaaccttcgacgcatcaagcagtttctgcagtctagatatctggagaaaccgatggaaatcgctaggattgtggccaggtgcctgtgggaggagagtcggcttctacaaacggccgcaactgccgcacagcaggggggacaggccaatcatccaacagccgcagtagtgacggaaaaacagcagatgttggaacagcatctgcaggacgtccgaaaacgcgttcaggaccttgagcaaaagatgaaggtcgtagaaaacctgcaggacgattttgattttaactataaaacactcaaaagccagggggatatgcaggatctgaatggtaacaaccagtctgtaactcggcagaaaatgcagcagcttgaacaaatgctcactgccttggaccagatgcgcagatccatcgttagtgaactcgctggcctgttgtcagctatggaatacgtgcagaagactctgacagacgaagagctggctgattggaagaggcgccagcaaattgcgtgtatcgggggaccccctaatatctgccttgataggctggagaattggatcacttcactagccgaaagtcaactgcaaaccagacaacagattaagaaactggaagagttgcaacagaaagtgtcctacaaaggcgatccgatcgtgcagcatcgacccatgctcgaggaacggattgtagaactgttccgcaacctaatgaagtccgccttcgtggttgagcgacagccttgtatgccgatgcaccctgacagaccattagtgatcaagacaggagtgcagtttaccactaaagtgcggttattggttaaatttcctgagctgaattaccaacttaagattaaggtctgtattgataaggatagtggtgatgttgccgctctcagggggtccagaaaattcaacatcctcggaactaataccaaggtcatgaatatggaggagagcaataacggcagcctttctgcagaattcaagcacttaacactgcgtgagcagagatgtggaaatggcggacgggcaaactgtgacgcctccctcatagtgaccgaggagttgcatctgatcactttcgagactgaggtgtatcatcaaggactgaagatcgatctcgaaactcatagcctgcccgtcgtcgtcatatccaacatttgccagatgcctaacgcttgggctagcattctctggtacaacatgctcacaaataatccgaaaaacgtgaacttctttaccaagccacccatcggcacgtgggaccaggtggctgaagtactctcgtggcagttcagctctactactaaacggggactgagcatcgaacaacttactactttagccgagaagctgttgggccctggagtgaattacagcggatgccagattacttgggccaaattttgtaaggagaacatggccggaaagggcttttctttttgggtctggctggataatatcatcgatctagttaaaaagtacatacttgctctgtggaatgaaggttatatcatgggctttatcagcaaggaaagggaaagagcaatcctgtcgaccaagccaccaggcacctttttactgcgcttctcggagtcttcgaaagaaggaggcgttacattcacttgggtggaaaaagacataagcggtaaaacgcagatccaatcggtggaaccctacacaaagcaacagttaaataatatgtcctttgccgaaatcatcatgggttacaaaataatggacgccactaatattctcgtgtctccactggtgtatctctacccagacatccccaaagaagaagcattcggcaagtactgcaggccggaatctcaagaacaccccgaggccgatcccggagccgcaccatacctcaagactaaattcatatgcgtcacaccaacaacatgttcaaatacgatcgatctgcctatgagccctcggactctggattcactaatgcagtttggtaacaatggcgaaggggctgaacccagcgcgggtggtcagttcgagtcactgacattcgatatggaacttaccagcgaatgtgccacatcccctatgtag

SEQ ID NO: 30853 - DNA, 2169 bp, synthetic construct
  misc_feature 1..2169: note = Description of Artificial Sequence: Synthetic coding sequence
  source 1..2169: mol_type = other DNA
atggctcagtggaaccaactgcagcagcttgacacccggtatctggaacagctccatcaactgtacagtgactctttccccatggagctgaggcagttcttggccccttggatcgagtcacaagactgggcctacgctgcttccaaggaatctcacgcaacacttgtgtttcacaaccttttgggcgagatcgatcagcagtatagccgtttcctgcaagaatccaacgtgctttaccagcataacctacggaggatcaaacagttcttgcaatcaaggtatctggaaaaaccaatggagatcgcgcgaatcgttgccagatgtctatgggaggagtctcggctgttacaaacggctgccacagccgcacagcaaggcggacaggccaatcaccctacagccgctgtggtgacagaaaaacagcaaatgttagagcagcacctgcaggatgttcggaagcgagtgcaggatctcgaacagaagatgaaggtggtagaaaacctccaggacgactttgacttcaattacaagaccttgaagtcccagggcgatatgcaggatcttaatggcaacaaccagagcgtaacccgacagaaaatgcaacagctggaacagatgctcaccgcgctggaccagatgcggagatccatcgttagcgagctggctggtctgctttccgccatggagtacgttcagaagactcttacggacgaagaacttgcagattggaaacgcaggcagcagattgcgtgcattggcggtcctcccaatatctgcttggatcgacttgaaaactggatcacctctttagccgaaagtcaattgcagacgcgacagcaaatcaagaaactggaggaactgcaacagaaagtgagctataaaggcgacccgattgtccagcatcgtccaatgttagaggaaagaatagtggagcttttcagaaacctgatgaaaagcgcatttgtggttgagcgtcagccctgtatgcccatgcaccccgatcgccctctggtgattaagactggtgtgcaattcactaccaaagtgcgcctgctcgtaaaatttcctgagctcaactaccagttaaaaataaaagtgtgtatagacaaggatagcggtgacgtggcggcactgagaggaagccgcaagttcaacattctgggcactaacacaaaggtcatgaacatggaggagagcaataatggatccctgagtgctgagtttaaacacctgacactaagggaacagcggtgtggcaatggaggtagggctaattgcgacgcaagcctcatcgtgacggaagaactgcatctgatcactttcgagacagaagtgtatcatcagggacttaaaatagacttagagacccattccctaccggtcgtggtcatttccaatatttgccagatgcctaatgcgtgggctagcatcctgtggtacaatatgctcaccaataaccctaagaacgtgaattttttcactaagccaccaatagggacgtgggaccaggttgccgaagttctgagttggcagtttagttcaaccactaaaaggggactgagcatcgagcagctgacgactctcgccgaaaagttgctaggacccggagtgaactattctggctgccagatcacctgggctaagttctgtaaggagaacatggcaggaaagggattcagtttctgggtgtggcttgataatatcatcgatctggttaaaaaatatatattagctctgtggaatgagggatatattatgggatttatctccaaggagcgagaacgcgcaattctctcaacaaaacctcccggtacatttctactgcgcttttctgaaagttcgaaggagggtggcgtgacttttacttgggttgagaaggacatttccggaaaaacacaaatccagagtgttgagccatacaccaaacaacagttaaataacatgagctttgcagaaatcattatgggatataaaataatggatgccaccaacattctggtatctcccctggtgtatttataccctgatatccccaaggaagaagctttcggaaaatactgccggccagagtctcaagagcatcccgaagccgatcccggatctgccgcaccgtacctgaagacaaaatttatttgcgttacgccattcatcgacgcggtttggaaatag

SEQ ID NO: 30854 - DNA, 2247 bp, synthetic construct
  misc_feature 1..2247: note = Description of Artificial Sequence: Synthetic coding sequence
  source 1..2247: mol_type = other DNA
atgagtcagtggaatcaggttcagcaactggaaataaagttcctggagcaggtagatcaattctatgatgataacttccccatggaaattcgccacctcttggcgcaatggatcgaaaatcaggactgggaggccgcatctaacaacgaaactatggccactatcctgctgcaaaacctcttgattcagttggatgaacagttgggacgcgtgagtaaggagaaaaaccttctattgattcataacctgaagcgcattcgcaaagtactccaaggcaaattccatgggaacccgatgcatgtcgcagtcgttatatccaattgtttgagggaggaaaggagaatactcgcagctgccaacatgcctgtccagggtcctcttgagaagtcattgcagtcctcttcagtttctgaacgacaacgcaacgttgaacataaggtcgctgctattaaaaactcggtgcaaatgaccgaacaagacaccaaataccttgaggatttgcaggatgaattcgactatagatacaagaccattcagaccatggatcagtccgataaaaacagcgcaatggtgaatcaggaagtattaaccctgcaggagatgctgaactcactggattttaaacgtaaggaggctctcagtaagatgactcaaataatacacgagacggatctgctgatgaacactatgctaattgaagagcttcaggattggaaacgccgtcagcagatcgcctgtatcggcggaccgctgcacaacggactcgaccagctacaaaattgcttcacccttttggccgagagtctgtttcagctgcgcaggcagctggaaaagcttgaggagcaatccacaaagatgacctacgaaggtgaccccatcccaatgcagcgaacacacatgcttgaacgggtaaccttcctcatctataacctgttcaaaaattctttcgttgtggaacggcagccctgtatgccaacacatccacagcgtcccctcgtcctgaaaactctgatccagtttactgtaaagctcaggctcctcattaagctcccagagctcaactatcaggtaaaagtcaaagcaagcatcgacaagaatgtgtcgaccttgtcaaaccgtagattcgtgctttgcggcacaaatgtaaaggccatgtcaatagaggaaagctcaaacggttccctttccgtcgaatttaggcacctgcaaccaaaggagatgaagtcctctgcaggtggaaagggcaatgaaggctgccatatggtaaccgaggagcttcacagtatcacctttgagacccagatctgcttgtacggtcttacgattgatctcgagacctctagcctacctgttgtcatgattagcaatgtgtcgcaattgcccaatgcctgggcctccattatctggtacaacgttagcacaaatgattcacagaatttagtgttcttcaacaatccaccacctgcaacactttctcagttattggaggtgatgtcctggcagtttagttcatatgttgggagagggctgaatagtgatcagctgcacatgctggccgaaaagcttactgtgcagtcctcctacagtgacggccatctgacttgggcaaaattttgtaaggaacacctaccagggaagtcctttaccttttggacgtggctggaagccatcctggacctgatcaagaagcacatcttaccgctttggatcgatgggtatgtgatgggattcgttagcaaagagaaggagcggctgctcctgaaggataagatgccgggaacgttccttctgcgatttagcgagtctcatctaggtggaattaccttcacatgggtggatcacagtgaaagcggggaggtgaggttccacagtgtagaaccctacaacaagggacgtctctccgcactcccattcgcggacattttaagggactataaggtgattatggccgagaacattccagagaacccccttaagtatctgtatcctgatataccaaaggataaagccttcggcaagcactactcatctcagccctgtgaagtctcccgcccaacagagagaggggataaggggtacgtcccttccgtgtttattcctattagtaccattcgttcagactccacagagccgcactcccccagtgatttattgcctatgtctccaagcgtgtatgctgtgctccgggagaatttgtctcctactacaattgagacggccatgaagtctccttactctgcagagtag

SEQ ID NO: 30855 - DNA, 2247 bp, synthetic construct
  misc_feature 1..2247: note = Description of Artificial Sequence: Synthetic coding sequence
  source 1..2247: mol_type = other DNA
atgtcccagtggaatcaggtgcagcagttggagatcaaattcctagaacaggtggaccaattttacgacgacaatttcccgatggagatccgacatctcctggcccagtggatcgagaaccaggactgggaagccgcatcaaataacgagacgatggcaaccatactacttcagaaccttttgatacagctggatgaacaattgggccgtgttagtaaggagaaaaacttgctgctgatccacaatcttaaaagaattagaaaggtcctgcaggggaagtttcatggaaaccctatgcatgttgcagtggtgatcagtaattgccttcgtgaggaaaggaggattctcgctgccgcaaacatgcccgtccagggaccactggaaaaatctttgcagtcctcaagtgtatcagaacgtcagaggaacgtggaacataaggtcgcagctattaagaacagcgtgcaaatgacagagcaggacacaaaatacttggaagatttacaggacgagtttgactaccggtacaaaactattcagactatggatcagtctgacaagaattccgccatggttaaccaagaggtactaaccttacaggaaatgctgaatagtctggatttcaaaagaaaggaggcgctgagcaagatgacacagataatccatgagacagaccttctgatgaacaccatgctgatagaggagctgcaggactggaaacggcgacagcagattgcctgcatcggtgggcctctgcataacggcctcgaccagctgcaaaattgttttactctcctcgcagaatctcttttccaactccggagacaattggagaagctggaggaacagtcaaccaagatgacttatgagggcgaccccatccccatgcaaaggactcacatgttggaaagggtgaccttcttaatctacaatttgttcaaaaacagcttcgtggtagagcgccagccttgtatgccaacccatccccagcggcctttagtcttgaagacccttattcagtttaccgtaaaactccgcctgttgatcaagctgccagagctcaactaccaggtaaaggtcaaggcttctattgataagaacgtttcaacactttcgaatcggcgttttgtcctctgtggaactaatgttaaagccatgagcatcgaggagtcctcgaatgggagcttgagcgtcgaatttagacacctacaacccaaggagatgaagagcagtgctggtggtaagggtaatgaggggtgccacatggttacagaggagctacactctatcacattcgaaacccagatttgcctctacggcctcacaatcgatcttgagacgagttccttacctgtcgtcatgattagcaacgttagtcagcttcccaatgcatgggctagcattatctggtacaacgtctcgaccaacgatagtcagaacctggtgttttttaacaatccccctcctgccaccctgagccagcttcttgaggtgatgtcttggcaattttcttcttatgtggggaggggtctgaattctgaccagctccacatgctcgctgagaaactgaccgtgcagagttcttactccgatggacacctcacctgggccaagttttgcaaggagcacctgccaggaaaatcatttactttctggacctggctcgaagccatcctcgatctcatcaaaaaacatattctgcccctgtggatagacggttacgttatgggcttcgtgtccaaggagaaggaaagactcctgctgaaggataaaatgcccggaacctttcttctcaggttttcagaatcgcacctcggtggcatcactttcacctgggtggatcactctgagagcggtgaggtccggttccatagcgttgagccatataacaagggtcgtctgtccgccctgccttttgctgacattctgagagattacaaggtgataatggccgaaaacattcctgaaaatccactgaagtatttatatccggacatacctaaagacaaagcattcggcaagcactattcgagtcagccctgtgaggtcagtaggcccactgagaggggcgacaagggttacgtgccaagcgtttttatcccaatttctacaataaggtcggacagcaccgaaccacactctccaagcgacttactccctatgtctccgagcgtctatgccgtcttacgcgagaacttgtcacctaccaccattgaaaccgcgatgaagtcaccctatagcgctgagtag

SEQ ID NO: 30856 - DNA, 354 bp, synthetic construct
  misc_feature 1..354: note = Description of Artificial Sequence: Synthetic coding sequence
  source 1..354: mol_type = other DNA
atgagccagtggaatcaagttcagcagctggagattaaattcttggagcaggtggaccaattctatgacgacaacttccccatggagataaggcatctgttagcccagtggattgagaatcaggattgggaggcagcatccaacaacgagacaatggccactatcctgctgcaaaatctgttgatacaactggatgaacagcttggacgggtgtccaaggagaagaacctgctgctgattcacaacttgaaaaggattcgcaaggttctgcaatcacctggcttggcaacagcccaattgccactggatagacacggagaaacttgtatacagcgtagtaagtcctgtccctag

SEQ ID NO: 30857 - DNA, 78 bp, synthetic construct
  misc_feature 1..78: note = Description of Artificial Sequence: Synthetic coding sequence
  source 1..78: mol_type = other DNA
atgtctcagtggaatcaggtacaacagctggaaatcaaatttttagagcaggtagatcagttctatgacgataactag

SEQ ID NO: 30858 - DNA, 240 bp, synthetic construct
  misc_feature 1..240: note = Description of Artificial Sequence: Synthetic coding sequence
  source 1..240: mol_type = other DNA
atgtctcagtggaatcaggtacagcagcttgaaatcaagttcctcgagcaggtggatcagttctacgatgacaattttcccatggagatcaggcatctgttggcccaatggatcgagaaccaggactgggaagccgcttctaataatgaaactatggccactattctcctgcagaatctgctcatacagctggatgaacagttggggagggttagcaaggagaagaaccttctcctgtag

SEQ ID NO: 30859 - DNA, 2385 bp, synthetic construct
  misc_feature 1..2385: note = Description of Artificial Sequence: Synthetic coding sequence
  source 1..2385: mol_type = other DNA
atggcaggctggatccaagctcaacagctgcagggagacgcactgagacagatgcaggttctttatggccagcactttcccatcgaggtgcgccactacctggctcagtggatcgaaagccagccttgggacgcaatcgacttagacaatcctcaggacagggctcaggctacacagcttctcgagggactcgtgcaggagctgcaaaagaaagctgaacaccaggtcggggaggatggttttctgctgaaaatcaaacttggtcattatgctactcaactgcagaaaacctatgaccgctgcccactcgaactggtacgctgtattagacatattctgtacaatgagcagaggctcgtccgcgaagctaacaactgctcaagtcctgccggaattctagtcgatgcgatgtcacaaaagcacttgcagatcaatcagacattcgaagaactcaggctggtgactcaagacacggagaacgagctgaaaaaactgcagcagacacaggagtattttattattcagtatcaagaatcgttaaggatccaagcacagttcgcacagttagcccaactgtcaccccaggagagactgtccagagaaactgccctgcaacagaaacaggtgtctctagaggcctggcttcagagagaggcccagaccctgcaacaataccgggtggaacttgccgagaagcaccagaagacattacagttgctccgcaagcaacagacgatcattttagacgatgaattgattcagtggaaacgcagacaacagcttgctggcaacgggggtcccccagaagggagtctcgatgtgctgcagtcttggtgcgagaagctggccgagataatctggcaaaatcgtcaacagattcgcagagcggagcacctctgtcagcagctgcctattcctggtccggtggaggagatgctcgcagaagtaaacgcaaccatcactgatattatcagcgccctggtgacctctaccttcattattgagaaacagcctccccaggtattgaaaacgcaaacgaaatttgctgccaccgtcagattgctagtcggtggcaaattaaacgtccacatgaacccacctcaagtgaaggccacgattatatccgaacagcaggctaagagtctgctgaagaacgagaataccaggaacgagtgttccggggagatactcaataattgttgtgtgatggaatatcatcaggctacgggtaccctctctgcacattttcgtaacatgtcgctgaagcgtattaagcgggctgaccggagaggcgcagagtcagtgactgaagaaaagtttaccgttctgttcgaatcacaattttccgtgggatcaaacgaattagtgttccaggtcaagactttgtccttgccagtggtcgtcatcgtccacggatctcaagaccacaacgccacagccaccgtgctctgggataatgcattcgctgagcctggcagggtgcccttcgcagtccccgataaggtgctgtggcctcagctgtgcgaggctctgaatatgaaattcaaggcagaggtgcagtctaatagaggattgactaaagaaaatctcgtgttcctggctcagaaactgttcaataatagttcaagccatttagaggactactctggcctgtccgtgagctggtctcagtttaaccgcgagaacctccctggctggaattacactttctggcagtggtttgatggagtcatggaggtgctcaaaaaacatcacaagcctcactggaatgatggcgctatcctggggttcgtgaataagcagcaggcccatgatctactgatcaacaagcccgacgggaccttcctcttgcggttttccgattcagagattggagggattacgatcgcctggaaattcgatagccctgagcggaatctgtggaacctgaagccctttacaaccagggacttctctatccggagcctcgctgacagactgggcgacctgagctaccttatctatgtcttccccgatcgcccaaaagacgaggtcttttcaaagtactacacgcccgtattggccaaagccgtggacggttacgtgaagccacagatcaagcaagtggtgccggaattcgttaatgcaagcgcggacgccggtggatctagtgctacttatatggatcaagcaccgagtcctgccgtttgtccacaggctccatacaatatgtatcctcaaaacccagaccacgtccttgatcaggatggggagttcgacttggacgaaactatggacgttgcacggcacgtggaggagttgctgcggaggccaatggactcattggatagccggctgagccctcccgctgggctcttcactagcgccaggggtagcctgagctag

SEQ ID NO: 30860 - DNA, 378 bp, synthetic construct
  misc_feature 1..378: note = Description of Artificial Sequence: Synthetic coding sequence
  source 1..378: mol_type = other DNA
atggctggctggatccaagcacagcagctgcagggggatgctttaagacagatgcaagtgctgtatggtcaacatttccctatcgaggtacgccactacctcgctcagtggattgaaagccagccctgggacgccatcgacctcgataatcctcaggaccgagcccaggcgacgcagctgctggagggcctcgtgcaggagctgcagaaaaaggctgagcatcaggtgggggaagacgggttcctgttgaagattaaactaggacattatgccactcaattacagaagacctacgaccgatgtccactggagcttgtgcggtgcatcaggcacatcctgtataatgaacaacgactagtgagagaggctaataattag

SEQ ID NO: 30861 - DNA, 2376 bp, synthetic construct
  misc_feature 1..2376: note = Description of Artificial Sequence: Synthetic coding sequence
  source 1..2376: mol_type = other DNA
atggctggctggattcaggcccagcagctccaaggcgacgcccttaggcagatgcaggtcttgtatgggcagcatttccctatcgaggtgcggcattacctggcacaatggatcgaatcgcagccttgggatgctattgaccttgacaacccacaggatcgagcccaggcaactcagctcctcgaaggcctggtacaggagctacagaaaaaggccgaacatcaggtgggcgaggatggctttctgctcaaaattaagctcggccattacgccacacagctgcagaaaacctatgatagatgcccgctggagctggtgcgatgtattcgacacatcctatacaatgaacagaggctggtgcgcgaagctaataattgtagtagccccgcagggatcctcgttgatgctatgtcacagaagcacctacagataaatcagacattcgaggagctccgactggtcacccaggacactgagaacgagctgaagaaactccagcaaacccaagaatatttcattattcagtaccaggagtcactgaggattcaggctcagtttgcccagctggcacaactcagccctcaggagcgcttgagccgggagaccgccctccaacagaagcaggtctcactggaagcatggttacagcgcgaggcacagacactgcagcagtacagggtcgagcttgccgagaagcaccagaagaccctgcaacttctcaggaaacagcagacaatcatccttgacgacgaactgatccaatggaagagaaggcagcaactcgccggaaacgggggaccccctgagggttccctcgacgtgctgcagtcctggtgtgagaagctggccgagattatttggcagaacaggcagcagatccgcagggcagaacatctttgtcagcagctccctattcctggccctgttgaagaaatgttagcagaggttaacgcaaccatcaccgacataatttccgccctggtgacgtcaacatttatcatagagaaacagccgcctcaggtgctgaagacacagacgaagttcgccgctacagtcagactgcttgtggggggaaaattgaacgtgcatatgaaccccccacaggtgaaggccacaattatctcagagcagcaggctaaaagcttgctgaaaaacgagaatacacgcaatgagtgtagtggtgagatactgaacaactgttgtgtgatggagtaccaccaggctactggaactctcagtgcgcattttagaaacatgagcctgaagaggattaaacgcgcagaccggaggggggcagagagcgtgacagaggagaaattcactgtgctgttcgagtcccagttctccgtaggatctaacgagctcgtttttcaggtaaagacactgtcgctgcccgtggtcgttatcgtacacgggtcccaggatcataatgccactgcgacggtcttatgggataatgcgtttgcagaacccggtcgagtaccgtttgcggtacccgataaagtgctgtggccacagctttgtgaagctctgaacatgaagttcaaagccgaagtccaatccaaccggggtctgaccaaagaaaatctcgtgttcctggcccagaaactgttcaacaatagtagctctcatctcgaagattactctggcctatctgtcagttggtcccagttcaacagggagaatctgcctggttggaactacacattttggcagtggttcgatggagtaatggaggttcttaaaaagcaccacaagcctcattggaatgatgggggatttgtgaataaacagcaggctcacgacctgttgattaacaagccagatggcacatttctccttcggtttagcgattccgaaattggcggaattaccattgcttggaaatttgactccccagagcgaaacttgtggaatctgaagccctttactactcgggacttctctatcaggagtctggccgacaggcttggggatctgagctatttgatatacgtctttcctgatcgaccgaaggacgaggtgtttagcaaatactacacccctgttctggctaaagccgtagatggatacgtgaaaccacagattaagcaggtcgtgccggagtttgtcaatgcctctgctgacgcgggaggcagttccgccacgtatatggaccaggcacctagccccgcagtatgcccccaggccccttacaatatgtatccccagaaccctgaccacgtgctcgaccaggacggggaatttgatctagacgaaactatggatgtggctaggcacgtggaagagctgctccgcaggcccatggatagcctggatagtcgactgagcccaccagctggtctgttcacatcagcccgtggctctctcagctag

SEQ ID NO: 30862 - DNA, 2298 bp, synthetic construct
  misc_feature 1..2298: note = Description of Artificial Sequence: Synthetic coding sequence
  source 1..2298: mol_type = other DNA
acagctatggcgggatggattcaggctcagcagttgcagggagatgcgctgcgccagatgcaagttctgtatggacaacactttcctatcgaggttagacattatctggcccaatggatagagtcccagccttgggatgcaattgatcttgacaatccccaggatagagcacaggcgacacagctgctagaagggcttgtccaggagctccagaagaaggccgagcatcaagtgggagaggatgggttcttattaaagattaaattagggcactacgccacgcagctccagaaaacttacgaccggtgccccttggaactagtgcgctgtatccgtcacatcctctataacgagcaaagattggtgagggaggccaataattgtagcagcccggctggaatacttgtggacgctatgtctcagaagcacttacagatcaatcagacattcgaggaacttcgcctcgtgactcaggacacagaaaacgaactcaaaaaacttcaacagacacaggaatacttcatcattcagtaccaggagtcactgaggatccaggcacagttcgcacagctggctcagctgagtccccaggaaagactatccagagagaccgctctgcaacagaaacaggtgtccttagaggcatggctacagcgcgaagcccagacactgcagcagtaccgggtggagcttgccgaaaagcaccagaagaccttacagttgttgcggaaacagcagaccataattttggatgacgaactcattcaatggaagaggcgccagcagcttgccggaaatgggggtcctcctgagggctcactcgatgtactgcagtcatggtgcgaaaagctggctgaaatcatatggcagaataggcagcaaatcaggcgtgccgaacacctttgccagcagctgcctattcccggaccagttgaggagatgctcgcagaggtgaacgccaccatcactgatatcatcagcgcgttagtaacaagcacttttataatcgagaagcagcctcctcaggttctaaagacacagaccaagtttgctgctaccgtaagactgctggtgggcggaaagttaaatgtgcatatgaatccccctcaggtcaaagccacaattatcagcgagcagcaggctaaatcactcttgaagaacgaaaatacccgtaacgaatgtagcggggagattcttaataattgctgcgtgatggagtaccaccaggctaccgggactttgtcggcccacttcaggaatatgtcgcttaaaaggattaagagagccgaccgcagaggcgctgaatccgtcacagaggaaaagttcaccgttctctttgagtcccagttcagcgttggatcaaatgagcttgtgttccaagtcaagggcagggtgcctttcgccgtgcccgacaaggtgttgtggcctcagctgtgcgaggcattgaacatgaagttcaaggccgaggtgcaatctaaccgagggctgacaaaggaaaatctcgtgtttctggctcagaaactttttaataattcctcttcccacctcgaggattactccggactctccgtatcctggtcacagttcaaccgggaaaatctgccgggatggaactatactttctggcagtggttcgatggtgttatggaggttctgaagaaacatcacaaaccccactggaacgatggcgctattctcggtttcgtcaataaacagcaggcgcacgacttgctgattaacaaaccggatggaacattcctgctacgattcagtgactccgagatcggaggaatcacaattgcctggaagtttgactctcccgaacgcaacctgtggaatctgaaaccctttaccacccgggacttttctattaggagcctggccgaccggctgggcgacctctcttacctaatatacgtttttccagatcgccctaaggatgaagtttttagcaagtactatacacccgttctagccaaagcggttgatgggtatgtgaagccccagatcaaacaggtggtccctgagttcgtgaacgcgtctgccgacgccggagggagttccgccacgtacatggaccaagcaccctcacctgctgtgtgccctcaggccccttataacatgtaccctcaaaaccccgaccatgtcctggatcaggatggtgagttcgacttggacgaaaccatggatgtcgctcggcatgtggaggagttactgagacggcctatggacagcctggactctcggctgagcccacccgcagggctgtttacatcagccagaggcagtctgtcatag

SEQ ID NO: 30863 - DNA, 2295 bp, synthetic construct
  misc_feature 1..2295: note = Description of Artificial Sequence: Synthetic coding sequence
  source 1..2295: mol_type = other DNA
atggctggatggatccaggcacagcaactccagggagatgctttacggcaaatgcaggtgctgtacggacagcacttcccaattgaggtgagacactacctcgctcagtggattgagtcccagccttgggatgccatcgacctggacaatccacaggatcgagctcaggcaacccagctgttggaagggctcgtccaggagctgcagaaaaaggcggagcaccaagtgggagaggatggttttctgctcaagattaaactgggccactacgccacccaactgcaatgttcctctcccgcaggcatactggtcgacgcaatgtcacagaagcacctccagatcaaccaaacattcgaagaattgcgcctggttactcaggacacagaaaacgagctcaagaagttgcaacagacacaggagtatttcatcattcagtatcaggagagtctgaggatccaggcgcaattcgctcagctcgcacagctgtctccccaggagaggctgtctcgtgaaaccgctttgcaacaaaaacaggtgagtctcgaagcctggctccagagggaagcccagaccttgcaacagtacagggtggaactcgccgagaagcatcagaagacactgcagctgttgcgaaagcagcagacaattatcctggacgacgaattgattcaatggaagaggagacagcagctggcgggaaatggcggaccccctgaggggagtctggacgtgctgcagtcatggtgtgaaaaattagcagaaatcatctggcagaacaggcagcaaataagacgtgccgaacacctctgtcagcagctcccaatccccggaccagtggaagagatgttagccgaggtcaacgctaccatcaccgacatcattagcgcactcgtcactagcacgtttattatagagaagcaacctccacaggtgctgaaaacccaaacgaaatttgccgcaacggtaagattgctggtggggggtaaattaaacgttcacatgaatccccctcaggtcaaagccactatcatcagtgagcagcaggctaagtctctcttaaaaaacgaaaatacacgaaacgaatgcagcggcgaaatcctgaataactgctgcgtgatggaataccatcaggccacgggtaccttgtctgcccactttaggaacatgagtttgaagagaatcaagcgggctgatcgacggggtgcagagtcagtcacagaggagaagtttacagtgctgttcgagtcacaattctctgtcggttccaatgagctggtgttccaggtgaaaactctctcattgcccgtcgtcgtaattgtgcatgggagccaggaccataatgccaccgccactgttctgtgggacaacgcctttgctgagccaggcagggtgccgtttgcagtgccagataaagtactgtggccacagctgtgcgaagctctcaatatgaagtttaaagccgaggttcagagtaaccggggtttgacaaaggagaatcttgtcttcctcgctcagaagctcttcaataactcctcatcacaccttgaagattactcgggcctgtctgtctcctggtcccagtttaatcgggagaatctgcccggttggaactatactttctggcaatggttcgacggagtaatggaagtgttgaagaagcatcataaacctcattggaatgacggcgctattttagggttcgtcaacaagcaacaggctcatgatcttttaatcaacaagcccgacggcaccttcttgctgcgattcagtgactctgagatcggcggtattaccatcgcatggaaattcgactcacccgaaaggaacctatggaatcttaagccattcacgaccagggacttctcgattagatcattggcggataggctgggggatcttagctatctgatatacgtgtttccagatagaccgaaggacgaggtcttctctaaatattatacccccgtcctggccaaagccgttgatgggtacgtaaagcctcaaatcaaacaggtggttcctgaattcgtcaatgctagcgccgacgctggcggatctagtgccacctacatggaccaggccccttcacctgccgtgtgtccacaggcaccctacaatatgtatcctcagaaccccgaccacgtgcttgaccaggatggcgagttcgacttagacgaaactatggatgtggcacgacacgtagaagaattgctccggagacccatggactccctcgactctcgcctgtcacctccagccggactctttacctccgctcgagggtctctctcctag

SEQ ID NO: 30864 - DNA, 2295 bp, synthetic construct
  misc_feature 1..2295: note = Description of Artificial Sequence: Synthetic coding sequence
  source 1..2295: mol_type = other DNA
atggctggctggatacaggcccagcagctgcaaggagacgctctgaggcagatgcaggtgctctatgggcaacattttcctattgaggtcagacactacctcgcccagtggatcgagagccagccatgggacgccatagacctggataatccccaagaccgagcccaggcgacccagcttctggaaggcctcgtccaggagctgcagaagaaggcagagcaccaggtaggtgaggatggattcttgctgaaaattaaactgggccactatgccactcagctacagtgttcctccccagccggtatcctggtggacgctatgagccagaagcacctacagataaaccagactttcgaggagctgcggctcgtgacccaagacaccgaaaacgaactgaaaaagctgcaacagacccaggagtattttattattcagtaccaggagagccttcgtatccaggcccagtttgcgcaactggcccagctctcgcctcaggagagactgtctcgtgaaaccgccctgcagcagaaacaggtgtccctggaagcctggctgcaaagagaggcccagacacttcagcagtatagagttgagctagccgagaagcatcagaaaaccctgcagctgctgaggaagcaacagacaatcattctagatgacgaattaatacagtggaaaaggcggcagcaactggccggaaatggaggacctcccgaaggatctttggacgttctccaatcctggtgtgaaaaattggccgagatcatctggcaaaacagacagcagatccgcagagcagagcacctgtgccagcagcttccaattcccggtccagtggaggaaatgcttgccgaagtgaatgcaacaatcacggacatcatcagcgccctcgtaacttctactttcatcatcgagaaacagccaccacaggtgcttaagacacagactaaattcgctgctacagttcgattactggtcgggggaaaactaaatgtgcacatgaacccacctcaggtgaaagcaaccattatcagtgagcagcaggctaagtcactgttgaagaatgagaatacaaggaatgagtgctccggggagattctcaataactgctgtgtgatggagtatcaccaggccactggcaccctgtcagctcatttccgcaacatgtcattaaagcgcattaagcgcgctgacagaagaggagccgagagtgtgaccgaggagaaatttaccgtgctgttcgagtctcagttctcagttggatcaaacgagttggtcttccaggtcaaaacgctttcattgccggtggtggtaatcgtccacggaagtcaggaccacaatgccacagccacggtcctgtgggataacgcgttcgcagagcctggaagagttcccttcgcggttccagacaaagtcctgtggcctcagctgtgcgaggcattgaacatgaaatttaaggcggaagtccagtctaacaggggtctcacaaaagagaatctcgtgtttctggcacagaagctattcaacaattcgtcctcacatctcgaagactattcgggcctctcggtctcctggagccagtttaatcgcgaaaatctgcctgggtggaattacacgttctggcagtggttcgacggtgttatggaagtcttgaaaaaacaccacaaaccacactggaacgatggcgctattctgggtttcgtgaacaagcagcaggcccatgatctgctcatcaacaagccagatggaacgttcctgcttcggttctcagattctgaaattgggggtattactatcgcctggaagtttgatagtcccgagcgcaatctgtggaatctgaagccctttacaactagggatttctcgatccggagcttagctgatcgcttgggagacttgagttatcttatttacgtgtttccggaccgccctaaagatgaggtgttctccaagtactacactcctgtgcttgccaaagcagtggatggctacgtcaagcctcaaattaaacaggttgtgccagagtttgtgaatgcctcagctgatgctggagggtcaagcgccacttatatggatcaggctccttccccagccgtttgccctcaggcgccttataacatgtacccgcagaaccctgaccacgtcctggaccaggatggagagttcgacctggacgagactatggacgtggctcgccatgtggaagaactactgcgtcgtcccatggatagcctggacagtaggctgagcccccctgccggattgttcacgtccgccagaggaagcctcagctag

SEQ ID NO: 30865 - DNA, 2364 bp, synthetic construct
  misc_feature 1..2364: note = Description of Artificial Sequence: Synthetic coding sequence
  source 1..2364: mol_type = other DNA
atggctgtgtggatccaagcccagcagctgcaaggggaggccctgcaccagatgcaggcactgtatggacagcacttccccattgaagttcggcattatttgtcccagtggattgagagccaggcctgggacagcgtcgatctggataatccccaggagaatatcaaggctacacaactgctggaagggcttgttcaggagctgcagaaaaaggccgagcaccaagtgggagaggacggcttcctgttgaaaattaagctgggtcactatgcaacgcagctgcagaacacctacgataggtgtccgatggagctagtaagatgtatcaggcacatcctttacaatgaacagcgtctcgtgagagaggcaaacaacggatcctcacccgcaggatccctggccgacgctatgagtcagaaacatctccagatcaaccagacatttgaggaattacgcctggtgacccaggacactgagaacgagctgaagaagctgcagcagacacaggagtattttatcatccagtatcaggaatccttacgtatccaagcccaatttggaccgctggcacagttaagcccccaggagagactctcgcgcgaaaccgctctgcagcagaaacaagtgtctctggaggcctggttgcagagggaggcccagacattacagcagtacagagtcgaactcgccgaaaagcatcaaaaaaccctgcagctcctgcgaaagcaacagacaattattttggacgatgaacttatccaatggaaaaggagacagcagctggcgggaaatggaggccctcctgaggggtcgctagacgtgcttcaatcatggtgcgaaaagttggccgagattatctggcagaaccgtcagcagatacgcagggctgaacacctttgtcagcaattgcctatccccggtcccgtggaggagatgctcgccgaggtcaatgccactataaccgacataatttcagctcttgtaacatcgacttttattattgaaaagcagcctccacaggtgcttaagacgcaaaccaagtttgccgcaactgtgaggcttttggtgggcggaaaactcaacgtgcacatgaatcctccgcaggtgaaggcaactattatcagcgagcagcaagcgaaaagtctgctgaagaacgagaatactagaaacgactattcaggagagatcttgaacaactgttgcgtgatggagtaccaccaggccactggcacactcagcgctcatttccggaatatgtctctgaagcggatcaagagaagtgatcgtagaggcgctgaaagcgtgaccgaagagaagtttactattctgttcgaatcacagttttccgtggggggaaatgagctcgtgttccaggtgaagaccctttccttgcctgtggtcgttattgtgcacggatcccaggacaataatgcaactgccactgtgctgtgggataatgccttcgctgagccaggaagggtgcctttcgccgttcccgacaaagtgctgtggccacagctctgcgaggctctgaacatgaaattcaaagcagaagtgcagtctaaccgcggactaaccaaggagaatctggtgttcctggcacagaagttgttcaataatagctcttcacacctggaggactattctgggctgtcagtctcctggagccagttcaacagagagaacctgccaggcaggaactataccttttggcagtggtttgatggggtcatggaggtcctgaaaaaacatctcaaaccacattggaatgacggggcaatcctggggtttgttaacaagcagcaggctcacgacctcttgattaacaagcccgacggaactttcctgcttagatttagcgattccgaaattggtgggatcactattgcttggaaatttgatagccaggagaggatgttctggaacctgatgcccttcacaactcgggacttctcaatcagatctctggccgaccggctaggggatctgaattacctgatttacgtattccctgaccgcccaaaggatgaagtctatagtaaatactacactccagtgccatgtgaaagtgcaaccgctaaagctgtggacggttacgtgaaaccacagattaagcaggtcgtcccagagttcgtgaatgcatcagccgatgctgggggtggatcggcaacatacatggaccaagccccttcaccggctgtgtgtccacaggcccactacaatatgtaccctcaaaacccggactctgttctggacacggacggcgacttcgatcttgaagacaccatggacgtagcgaggagagttgaggaactgttaggcagaccgatggacagccaatggataccccacgcccagagttag

SEQ ID NO: 30866 - DNA, 471 bp, synthetic construct
  misc_feature 1..471: note = Description of Artificial Sequence: Synthetic coding sequence
  source 1..471: mol_type = other DNA
atggccgtgtggatccaggcgcagcagctccaaggggaggctttgcaccagatgcaggcgctgtacggccagcatttccctatcgaggtgcgccattaccttagtcagtggattgaatcccaagcttgggatagcgtcgacttggataacccccaggaaaacatcaaagcaacccagcttctcgagggactggtgcaagaacttcagaaaaaagcagagcaccaggtcggggaagacgggttcctgttaaagatcaagctcgggcactatgctactcaactgcagaacacatacgacagatgccccatggaattggtgcggtgtattaggcacatcctttacaatgaacagagactcgtgagagaagcaaataacggcagttcccctgctggcagtcttgctgacgccatgagccagaagcatctgcagatcaatcaaacatttgaggagctccggctcgtcacccaatag

SEQ ID NO: 30867 - DNA, 534 bp, synthetic construct
  misc_feature 1..534: note = Description of Artificial Sequence: Synthetic coding sequence
  source 1..534: mol_type = other DNA
atgccccaagcttttcttttggggtctatacatgagcccgcaggagcacttatggagccccaaccttgtcctggcagcttggcagagagttttcttgaagaggagcttcgcctcaacgccgaactatcacagttgcagttcagtgagcccgtcggcatcatctacaaccccgtggagtatgcctgggagccccatcggaattacgtcacgagatactgccagggcccaaaggaggttttgtttctaggcatgaaccccggaccattcggcatggcacaaaccggggtccctttcggcgaggtctctatggttcgagactggttgggaatagtggggcctgtgctgaccccaccccaggaacaccccaaaaggccagtcctcgggctagaatgcccccaaagtgaagggccacgtcagtctatggggcatgagattaaatcggaattactgatgggcggttgcagttggattcgaggaaagattcagtgtgacagagttcaggtgcgaagaccaggattcagtagccagttgtag

SEQ ID NO: 30868 - DNA, 813 bp, synthetic construct
  misc_feature 1..813: note = Description of Artificial Sequence: Synthetic coding sequence
  source 1..813: mol_type = other DNA
atgcctcaggcctttttgctggggtctattcatgagccagcaggggctctcatggaaccacagccgtgccccggaagtctggcggagagttttttggaagaggagctgcgtctgaatgctgagctgtctcagctccagttcagcgagcccgttggaattatttataatcccgtggagtatgcctgggagccacatagaaattatgtgacccggtactgtcaggggcctaaggaggtgctcttccttgggatgaatcctggcccattcgggatggcccagacaggggtgccgttcggggaggtctcaatggtgcgggattggttaggtattgtggggccagttctcactcctccacaagagcatccgaaacgcccagtcctgggattggaatgcccacagtcagaggttagcggggcaaggttttgggggttctttaggaatctctgcggccaacccgaggtgttctttcaccactgctttgttcacaatctgtgccccctcctgtttcttgccccttctggccgaaatctgacaccagccgaactgcctgctaagcagcgcgaacagctgttaggaatttgcgatgctgccctgtgtaggcaggtccaacttctgggggtaaggttggtcgttggggtagggcgactcgccgagcagagagcgagaagagccctagccggattgatgcctgaggtccaagtcgaaggactcctacatcctagtcctcgtaaccctcaggcaaacaaaggctgggaggcagtggccaaagagaggctgaatgagctcggccttttgcccctgctactgaagtag

SEQ ID NO: 30869 - DNA, 813 bp, synthetic construct
  misc_feature 1..813: note = Description of Artificial Sequence: Synthetic coding sequence
  source 1..813: mol_type = other DNA
atgccccaggcatttctgctgggttccattcacgagcctgccggtgcattaatggaaccgcagccatgtcccggatcacttgcagagtcattcctggaagaagagctgaggcttaatgcggagctgtcgcaactgcagttttcagagccagtcggtatcatctataatccggttgagtacgcttgggaaccccatcgtaactatgtgacccgttactgccaagggcctaaggaggtgctgtttctgggtatgaatcccggacctttcgggatggcccagaccggagtccccttcggcgaggtatctatggttagagattggttaggtatcgtcggtcctgtgcttactccaccccaagagcatcccaagcgacctgttctgggcctcgaatgccctcaatctgaggtgtcgggcgcacgtttctggggcttctttcgtaacctctgtggacagccggaggtatttttccaccactgcttcgtgcacaacctctgccctctgctattcctcgctcctagtggacgaaacctgacacctgcagagctgccggcaaagcagagggaacaactgctcggtatctgtgacgccgctctgtgccgccaggttcagcttctcggggttaggttggtggtgggagtgggacgtctcgcagagcagcgggctaggagggcattggctggcctgatgcccgaagtgcaggtggaaggcctcttgcatcctagcccgaggaatcctcaggccaacaaagggtgggaagctgtggctaaggaacggctcaacgaactgggcttgttgccactgctgctgaagtag

SEQ ID NO: 30870 - DNA, 249 bp, synthetic construct
  misc_feature 1..249: note = Description of Artificial Sequence: Synthetic coding sequence
  source 1..249: mol_type = other DNA
atgccccaagcttttctacttggctctatccatgaacccgctggggctttgatggagcctcagccttgtccaggttcgctggctgagtccttcttggaagaagaacttagacttaacgcagagctgtctcagctgcaattcagtgagcctgtggggattatttacaatcccgtggaatacgcgtgggaaccacatagaaactacgttactcggtattgccaggggcctaaagaggtcttgttcctgtag

SEQ ID NO: 30871 - DNA, 519 bp, synthetic construct
  misc_feature 1..519: note = Description of Artificial Sequence: Synthetic coding sequence
  source 1..519: mol_type = other DNA
atgccgcaggcatttctgctaggaagcattcacgaacccgctggtgccctgatggagccacagccatgtcctgggtctctcgctgaaagcttcctggaagaagagcttcgcctcaatgccgaactcagtcagctacagttctcggaacctgtcggcattatctacaatccggtagaatacgcttgggaaccacataggaattacgtgacgcggtattgccagggacccaaagaggttctgtttctgggcatgaaccccggacccttcgggatggcccaaaccggcgtgccatttggcgaggtaagtatggtccgggattggctggggattgtcggtcctgtgctgaccccaccacaggagcatcctaaaagacctgttctgggtctagaatgtccgcaaagcgaagtcagtggagctcgcttttggggcttctttcgcaacctgtgcggtcaaccggaggtgtttttccatcactgttttgttcataacctgtgtccactgctgtttctggcaccttag

SEQ ID NO: 30872 - DNA, 291 bp, synthetic construct
  misc_feature 1..291: note = Description of Artificial Sequence: Synthetic coding sequence
  source 1..291: mol_type = other DNA
atgccccaagcctttttattagggtccattcatgaaccagccggagcccttatggaaccgcagccatgccctggatcactggcagagtcttttcttgaggaggaattaaggctcaacgccgaactgagtcagctccagtttagtgagcctgtggggatcatttacaacccggttgaatacgcctgggagccccaccgtaactacgtgacccggtattgccaggggcctaaagaggtgcttttcctgggcatgaatcctggacctttcggtatggcacagacaggtgtgtag

SEQ ID NO: 30873 - DNA, 273 bp, synthetic construct
  misc_feature 1..273: note = Description of Artificial Sequence: Synthetic coding sequence
  source 1..273: mol_type = other DNA
atgccacaagcttttctcctgggctctattcatgaacccgctggcgctctcatggagccccagccctgccctggttcattggcagagtccttcctggaagaagagctgcggctgaacgccgagctgagtcagctgcaattctctgaacccgtgggcatcatctacaatcccgtggagtacgcttgggagcctcaccgtaactatgtcacaaggtattgccagggtcctaaggaggtgctgtttctgggaatgaaccccggtcccttcggctag

SEQ ID NO: 30874 - DNA, 534 bp, synthetic construct
  misc_feature 1..534: note = Description of Artificial Sequence: Synthetic coding sequence
  source 1..534: mol_type = other DNA
atgccccaagctttcctgctgggcagcatacacgagccagccggagctctgatggaaccccagccttgtcccggatcgctcgctgaatcttttctggaagaagagctgcgtctgaatgccgagctcagtcagctccaattctctgagccagtggggatcatctataatccagtggagtacgcttgggaaccccacagaaactacgtcacacgttactgtcagggccctaaagaagtgctgttcctgggcatgaaccctggcccttttggcatggctcaaactggcgtgccttttggagaggtcagcatggtaagggattggctggggatagtgggtcccgtgctcacacctccccaggagcaccccaaaagaccggttctgggactggaatgccctcagtctgagggacccagacagagcatgggacatgaaattaaatccgagctgctgatgggcggatgcagctggattcgcggaaagatccagtgtgaccgggtccaggtaagaaggcccggattcagctctcagctgtag

SEQ ID NO: 30875 - DNA, 327 bp, synthetic construct
  misc_feature 1..327: note = Description of Artificial Sequence: Synthetic coding sequence
  source 1..327: mol_type = other DNA
atgccacaagctttcttgctcgggtccatacatgagcctgcaggagctctgatggagccacaaccatgccccggaagcctggcggagtcttttctcgaagaagagttgagactgaacgccgaactgagccaactgcaattctctgagcccgtgggtattatttataaccctgtcgaatatgcctgggaaccgcaccgcaactatgtcactaggtactgccagggtcctaaagaggtgctcttcctgggaatgaatcccggaccctttggaatggcccagaccggcgttccgtttggagaggtgagtatggtgcgggactggctttag

SEQ ID NO: 30876 - DNA, 813 bp, synthetic construct
  misc_feature 1..813: note = Description of Artificial Sequence: Synthetic coding sequence
  source 1..813: mol_type = other DNA
atgccccaggccttcttgctgggttccatacacgagccagcgggtgctctcatggaaccacagccatgtccagggtccctggccgagtctttcctcgaggaggagctaagattaaacgctgaactcagtcagctacaattttctgaacccgttggaattatttacaatcccgtggaatatgcatgggagccgcatcgaaactatgtgactcggtattgccaaggccctaaggaggtcctgtttctaggtatgaatcccggtccttttggcatggcacaaacaggagttcctttcggcgaggtcagcatggtgagggactggttgggcattgtcgggcctgtcctcacaccaccccaggaacacccgaaaaggccagtgctgggattggagtgtcctcagagcgaggtttctggggcacggttctggggcttcttccggaatctgtgcgggcagcctgaagtgttctttcatcactgtttcgtccataatctttgtcctctgctgttccttgcgccttccggcagaaacttaaccccagccgagctgcctgctaagcagcgggaacagctcctggggatctgcgatgcagctctctgccggcaggtccagctgttgggcgtgcggctggtggtgggggtcggacggctagctgagcagcgggcacggagggctctggcaggtctgatgcccgaggtgcaagtcgagggactcttgcaccccagcccccgaaatcctcaagccaacaagggctgggaagctgtggcaaaagaacgacttaacgagctcggactgctgccattgctcttgaaatag

SEQ ID NO: 30877 - DNA, 534 bp, synthetic construct
  misc_feature 1..534: note = Description of Artificial Sequence: Synthetic coding sequence
  source 1..534: mol_type = other DNA
atgccacaagcattcctgctgggaagcatccacgaacctgccggagcccttatggagccacagccttgccctgggtccctcgcggaatcatttctggaggaggagttaagactcaatgctgagctgtcacagctacaattctccgagcctgtggggattatttacaaccctgttgaatatgcctgggagccccatagaaattacgtgacacgatactgtcagggtcctaaggaggtgctgttcctcggaatgaaccctggtccatttggcatggcccagactggggtgccattcggcgaggtctcaatggtgagagactggttgggaattgtggggccagtgctgactcctccccaggagcatccgaagcggcctgtgctgggccttgagtgtccgcagtccgaagggcctcggcagtcgatgggtcatgagataaagtcagagctgctgatgggcggttgcagctggatccgaggcaaaatccagtgtgatagggttcaggtgcgacgccctggattttctagccagctttag

SEQ ID NO: 30878 - DNA, 534 bp, synthetic construct
  misc_feature 1..534: note = Description of Artificial Sequence: Synthetic coding sequence
  source 1..534: mol_type = other DNA
atgccccaggccttcctgttggggtccatccacgagcccgctggtgcgctcatggagcctcaaccatgtcccggatcactggcagaaagtttcctggaggaggaactccggctaaatgcagagctctcacagctgcagttttctgagcccgttgggattatttacaacccagtggagtacgcgtgggagccccaccggaactacgtaacacgatactgtcagggacccaaggaagttctgtttctcggaatgaaccccggacccttcgggatggcccaaaccggtgttccttttggcgaagtgagcatggtccgcgactggctgggaatagttggcccagtcctgacaccaccacaggaacacccgaagcgaccagtactcggcctcgagtgtccccagagtgaaggccctagacaatctatgggccacgagattaagtctgagctactcatgggcggttgctcctggatccgtggaaagatccagtgcgaccgggtacaggttcgtcgccctggattctctagccaactctag

SEQ ID NO: 30879 - DNA, 1170 bp, synthetic construct
  misc_feature 1..1170: note = Description of Artificial Sequence: Synthetic coding sequence
  source 1..1170: mol_type = other DNA
atggctgagccagacccgagccaccctctggagacccaagctggaaaagtccaggaggctcaggacagcgacagcgacagtgagggtggagccgcaggaggggaggctgacatggattttttgcggaatctgttcagccaaactctgagcctggggtcacagaaagaacgccttctcgacgaactaacactggagggagtggcacgctacatgcaatccgagcggtgtcgccgagtgatttgcttggtgggtgccggaatctccacaagcgctggcatccctgatttccgctctccctcgacaggcctgtatgacaacttggagaaatatcatctgccgtacccagaggcaatctttgaaatatcttacttcaagaagcatcccgagcctttctttgcactggccaaggagctgtacccgggtcagttcaagcccaccatttgccattactttatgagacttctgaaggacaaagggctgctgctgcggtgttacacccagaacatagatacgcttgagcgaatagcgggactagaacaggaggacctggtcgaagctcacgggactttttacaccagtcactgtgttagcgcctcctgtaggcacgagtatcctctgagctggatgaaggagaaaatattcagcgaggtcaccccgaaatgtgaggattgtcagagccttgtgaagccagacatcgtgttttttggcgagtccctgcccgcaaggtttttttcttgcatgcagtccgattttttgaaggtcgacctcttactggtgatgggcaccagtttgcaggtacagccttttgctagtctcatcagcaaagcacctctgagcacaccaaggctgctgatcaataaagagaaggctggccagtctgatccatttctaggaatgatcatggggctcggaggtggtatggattttgactctaaaaaagcttaccgggacgtggcgtggcttggtgagtgcgaccagggctgtctggcactggctgagctgctgggctggaagaaggaactggaggatctggtaaggcgcgagcatgcttctattgacgcacagtctggtgcaggtgtgcccaatcctagtacaagcgcatccccaaagaaaagtccaccgcctgccaaagatgaagcacggaccactgagcgcgagaaacctcagtag

SEQ ID NO: 30880 - DNA, 816 bp, synthetic construct
  misc_feature 1..816: note = Description of Artificial Sequence: Synthetic coding sequence
  source 1..816: mol_type = other DNA
atggccgagcctgatccgtcccatccccttgagacccaggccggaaaagtgcaggaggctcaggactccgattcagactcagagggtggagccgctggaggcgaggcagatatggactttctgcgcaacctgttttcccagacactgagtctgggctcccagaaggaaagactcctggatgagctgactcttgagggagtggcgcgatacatgcagtccgagagatgtaggcgggtaatttgtctggttggtgccggtattagcaccagcgctggcatccccgattttagatctccatctactggcctttacgataaccttgaaaagtaccacctgccttatcccgaagcgattttcgaaattagttactttaagaagcatcctgagccattcttcgcactggccaaggaactataccccggacagtttaaacctacaatatgccactactttatgagactcctgaaagacaagggattgctcttaagatgttatacccagaacatcgatacactggagaggatcgctggcctggaacaggaggacctcgttgaagcacatggcactttttacacatctcactgtgtgtccgcctcgtgtaggcacgagtatcccctaagctggatgaaagaaaagattttctcagaagtaacgcccaaatgcgaggactgccagtccttggtaaagcctgatatcgtttttttcggcgagtcactccccgctagattcttcagctgcatgcagagtgactttcttaaagtggatctgcttttggttatgggtacctcgctgcagggaagaggcctcgctggctag

SEQ ID NO: 30881 - DNA, 393 bp, synthetic construct
  misc_feature 1..393: note = Description of Artificial Sequence: Synthetic coding sequence
  source 1..393: mol_type = other DNA
atggacttcttgcgtaatctgttctcccagaccctctccctggggagccaaaaggaacgtttgctcgacgagttgactctcgagggagtcgccaggtatatgcagtctgagagatgtcgacgcgtgatatgcctggttggtgcaggaatatctaccagcgctggcataccagacttccgaagccccagcacaggcttgtacgacaatcttgagaagtaccaccttccttaccctgaagctatatttgaaatcagctactttaagaaacatcccgagccattttttgccctcgctaaagagttatatcccggtcagttcaaacccaccatctgccactacttcatgagactgctgaaagacaaaggactcctgttgaggtgctacacacaatag

SEQ ID NO: 30882 - DNA, 1059 bp, synthetic construct
  misc_feature 1..1059: note = Description of Artificial Sequence: Synthetic coding sequence
  source 1..1059: mol_type = other DNA
atggattttttgagaaacctcttctcccagactttatctctcggcagccagaaagaacgactgctggacgagctcactctggagggagtcgctcgctatatgcagtccgaacggtgcaggcgtgtcatctgcctggtgggggctgggattagcacctcagctggcatacctgattttaggagtccgtccacgggactttatgataacctggagaaataccatctaccctacccagaggctatctttgaaataagctactttaaaaaacatcccgagccttttttcgctctcgcaaaagaactgtaccctgggcagttcaagccaaccatttgtcattatttcatgcggttactcaaagataagggactcctattgcggtgctacacacagaacattgacaccttggaaagaattgctggcctcgagcaggaagacttggtggaggcccacggaacattttataccagtcactgcgtgtctgcaagttgtcgtcatgagtacccattgagttggatgaaggaaaagatcttcagcgaagttacccctaagtgcgaagactgtcaatctctcgtcaaacctgatatcgtgttctttggggagagtctgcccgcacgatttttctcatgtatgcagagcgacttcctgaaagttgaccttctactcgtcatgggcacctcactccaggtgcagccatttgcctccctgatcagcaaggcgcctctgagcactcctagactgttgatcaataaggagaaagcagggcaatccgacccattcctgggcatgatcatgggactgggaggtgggatggactttgacagcaagaaggcctaccgggacgtcgcttggctgggagaatgtgaccaaggttgcctagcattagcagagctgctggggtggaagaaagaactagaggatttggtgcggcgagagcatgccagcatagacgcccagagtggggcaggtgtcccgaacccttccacttctgcgtccccgaagaagagcccaccccctgccaaggatgaagccagaaccactgaacgcgagaagccacagtag

SEQ ID NO: 30883 - DNA, 510 bp, synthetic construct
  misc_feature 1..510: note = Description of Artificial Sequence: Synthetic coding sequence
  source 1..510: mol_type = other DNA
atggattttttgcggaacttattcagtcagaccctctccctaggatcccaaaaggagcgcctcttagacgagctgaccctggaaggagtcgctcgatatatgcagtctgagaggtgtcggagagtgatatgcctggtaggcgcagggataagcacttccgccggaatacccgatttccggagccctagtacgggcctctacgacaacctggaaaagtaccatctgccataccctgaggccatctttgaaatttcttattttaaaaagcatcctgaacccttctttgcactggcgaaggaactttatccgggacagttcaaacctactatatgccactacttcatgaggctgctcaaggataaaggcttattgctgaggtgttatacgcagaacatagacactcttgagcgtatagccggactggaacaggaggatctagtggaagcccacggaacattctatacatctcactgcgtcagcgccagctgccgacacgagtaccctttgtag

SEQ ID NO: 30884 - DNA, 714 bp, synthetic construct
  misc_feature 1..714: note = Description of Artificial Sequence: Synthetic coding sequence
  source 1..714: mol_type = other DNA
atggatttccttaggaatctattctcccagacgttgtcccttggatctcagaaagaaaggctgctggacgagctcactctggagggagtcgccaggtatatgcagtcggagaggtgtcgtcgtgtcatctgtctggtcggcgctggcataagtaccagtgccggtattcccgattttcgctcaccctctacaggtttatatgacaacctggaaaagtatcaccttccctatcctgaggctatctttgaaatttcatacttcaagaagcaccctgagcccttttttgcgttggccaaggaactgtatcccggacagtttaagccaaccatttgtcactacttcatgcggttactgaaggataagggtttgctgctccgttgctacacacagaacatcgacaccttagagaggatagctgggctggagcaagaggacctcgttgaggcccacggcaccttctatacatcccactgcgtcagcgcatcctgtcgccacgagtacccacttagttggatgaaggagaaaatcttttcagaagtgacgcctaaatgcgaggactgtcagagtcttgtgaaacccgacattgttttttttggtgaatctctccctgctagattcttctcttgcatgcagagtgactttctaaaggtggatctcttactcgttatgggtacaagccttcaggtccagccattcgcctctctcatatcctag

SEQ ID NO: 30885 - DNA, 237 bp, synthetic construct
  misc_feature 1..237: note = Description of Artificial Sequence: Synthetic coding sequence
  source 1..237: mol_type = other DNA
atggactttcttaggaatctattctctcagacactctccttagggagccagaaggagcggctcctggatgaactgactctcgagggggtcgctagatacatgcagtcggagaggtgccggcgagtcatctgcctggtcggcgcaggcatttctacctctgctgggattccggacttccgttcacccagcactggattgtatgataatctggagaagtatcatctgccttacccttag

SEQ ID NO: 30886 - DNA, 222 bp, synthetic construct
  misc_feature 1..222: note = Description of Artificial Sequence: Synthetic coding sequence
  source 1..222: mol_type = other DNA
atggacttcctgagaaatctgttcagccagactctcagtctgggatcccagaaagagcgcttgcttgatgagctcaccctggagggagtggccagatacatgcaatcagaacgatgccgaagggtgatctgtctggtgggggctgggatttctacctccgctggcatccccgattttaggtctcccagtactggactgtacgacaatctcgagaaatactag
